United States Patent Application Publication US 2017/0114356 A1 - sequence listing, part 93

SEQ ID NO: 152576 - DNA, 2387 bp, Zea Mays
gggagacgcaggacgcacagagcgacagaggagggagacctcgcccggtcgctccacccctcgcccacatcacttcgtctctctggtcgcatcccaccccacacccctcctctcccatctccgctcgatctcccattcttcctcgtctccgccgccgtctgccccacctccaaccaacgcccaacgatcagtattccagaagcttccccggcaaccttcgtccccgtcccggatccggggcgcccctgatgcggtgcccgcgcggcgcgatcgcgtgacggacggccgccatggatcccccaggccgcggcgaccaaggcgaggcgccgcagccgcagccgctggagtggcggttcgctcaggtcttcggcgaacgtgccgcgggcgaagacgtccaggaagttgacatcatatctgcaattgaatttgacaaatctggtgaccatcttgccactggggataaaggaggacgtgtggttttatttgaaaggacagatgttcgggatcagaatgccagccagagagaactggagagacaagatgttccagttactagacacccagagttccgctacaaaactgaatttcagagtcatgaacctgagtttgactacctcaaaagtttggaaatagaggaaaagatcaacaggatcaagtggtgccagacagccaacaatgctctctcccttttgtctacaaatgataaaacaataaaatactggaaggttcaagagaagaaagtaaaacgatttgcagtcatgaatttggacagttcccaaagtgcaggaagtagtaccactgctattgcaagtaccagtagttctaaggcacctcttccaaatggtggatgctctgatatgcttggttgcctgaataatgatctcacatttcctcctggaggctacccatcactgcgtttgccagttgttaccagtctagaagcaaaccctgttgctagatgtcgacgtgtatttgctcatgctcacgattaccatataaattctatttcaaataatagtgatggtgagacattcatatcagcagatgatctccgaataaatttatggaacttggaaataaacagccagagctttaacattgttgatgtgaagcctacaaacatggaagatctaacagaggtgattacatgtgcggagttccatccatcccattgtaatacactggcctatagtagttcaaagggttctatccgacttattgatctgcgtcaatcagcactgtgtgacaaccattcaaaaatatttgaggaacatgaagcacctggatcaagatccttctttacagaaattattgcatcaatttctgatataaagttttcaaggaatggcaaatatattcttagccgtgattatatgacgctcaagctatgggatctaaacatgaattcaggccctgtttcaaccttccaagtccatgaacatttaagacctaagctctgtgatctgtacgagaatgactcaattttcgacaagtttgagtgctgtcttagtggggatggacttcgtgttgcaactggttcttatggtaatatatttcgtgttttcggtcgtcctccgggaagcatagaggcaacaactttggaagcaagtaggaacccaatgaggcgtcagattgcaaatccagcaaggcccacacggacactaacttcttttgcccgtggtgttcggagaggtggagaaaatcaaggcgttgatgctaatgggaattcactcgacttctcaacgaagctgctccacctcgcatggcacccgaccgagaattctattgcatgtgctgctgcaaatagcttgtatatgtattatgcgtagagaatgccctacagaaaatttgttttttttgtggcttgctctcggcgaaggcccagggcccttcaactgcaaccagagagatggtgcaggacattgttgtcagttcaccccttggggccagaagccgctgatgtccacaagatcaccaatgctgtgctaacagactgcgccctgttgattctttagtacatgtgtaaattataattctaaacatgggaagttttgatccaaatattcaatcgtggcagttgtattgggagtcggtggaagggacatatcgaagataaaattctgtattggatttgcaggacatgcattgcaatggtgtagtatgactggcaatccttatcatgtaataccacctagacagggataatgttgtttaatgtcagaaaatgatagatatttcccagttattgtcgttactcatcatagttatccttctattagttgtactgttaaaataaggcagcaccgttataattgtgctttttctttttctgaatgccttttgtacactgaggttttcgcaagaaaggaattcacggaattaatgca

SEQ ID NO: 152577 - DNA, 408 bp, Zea Mays
tagaaaagtaacgatcagcctagtgtaccaaccacgtggtacgacgggcactcaaagacctggcgaatgagggcccacccaagagcgcttatgtcatatgggaactcttggctggaaacaatccttatggtttttatatccggttagaataataagaaagaatcaaagtccaggttggttggtgagcctagtgataggagactatctagcttggttcggagagcacttgttgggtttaagattagttttttgctaaatgttacggcctaaatgctgaactattgaccctacttgttcggatgggtgttcaccccaaagtgttcccggactgcatgcatacatccgtaagtaacttagtgcaacatggcaaatttcattgagaggaatcagcaaagaaaagaaatcttc

SEQ ID NO: 152578 - DNA, 2087 bp, Zea Mays
aggtgtattattctacattttcccaaaaggacattcattcatttctttcttccccgtcgaccactacgactaaaacgacgcgacaaatcaagacccggaaaggataagggccggtggtgggcatttgggaaagtcgggccgatcgggtgtcttcattcaagcgagggtacagaggaagaacgaaacgaagtgagaggccggggggcagggaaaagagtcgagtcgatcgaccgggagaagcaaaacgaaatcaggatttggccgaaaaagatgcaacgttatggataccatgaccgatcccccatcgagaaagaagaatttttctaaatcacttcgggtgaagcggggccctcaaagcttccgaaatacgccggggtggtaaatgacatagccttcctgatagaaaatgacgactccttcggcccgacgagtcatctactaaaaaggaccctccccgctgtgcgcccctccttgaattattcggtcatgcaatacttttttaatacaaagaacaaaatgcatttcgaccccgtcgtagttctcaatcatttcgtggcaccgggtgtggctgaaccatctacgatggggggagcgaagggaggaagcttagataagagaatacgctctcgcatcgctttttttgtagaaagctcgaccagcgataaaaagtgtttggcccgagccaaaaagaggttgatccacttcattcgccaagcgaatgatcttcgcttcgcgggaacaacaaaaaccaccatctcgctctttcctttcttcggtgctacctttttttttcaagggatggggttggggtgtataataacccattttatgagtatgcccgggaacaactcctaggtcaattaaggatcaaatgtaggaacctcatgggtaaggataaggtaatggaattgatagagaaattcatagacctaggtaggataggcaaattgataaagggaatagagatgatgatagagatcatactgagaaagaggagaattccgtacgggtacaactcttatttgaacgaagtgcaaaaaatgcgatcttttttgtctaatagaacaaacactaataccttaattgagtcggtaaagatcaaatcagtttatcaaagtgcttctctgattgctcaagacatctcttttcaactgaggaacaatccaatctcatttcgttccatttttagtaaaatagttaaggatattccattaataatgccaaaaggggtggaggggatacgtatttgttgttctggtcgattagggggtgcggaaatagctagaactgaatgcggaaagtatggaaaaacatcttgtaatgtatttaaccagaaaatcgattatgctcctgcggaagtatctactcgtgacggaatttcaggtgtcaaagtgcggatctcatatagtcaaaataagaagggacgtgctatatccgaaacgtacgaaatatagtaaatatagtaaatgcagatgtagtaggggtcgcgaaccggatggtacacaacttggttttggaagatatggcaccaaaagtagtagagctggtcgtctttcatatcgagccattgaagcagcgcgtcgggctacaatcggacaattccgtcgtgctatgagcagacaattccgaagaaattgtaagatatgggtaagagttctcgcagatcttcctattacggggaaacccgcagaagtttgaatgggaagaggaaaaggaaatcctacgggttggattgctcgtgtgtccacgggacaaatcccatttgaaatggatggtgtgagtttgtcaaatgctcgacaagccgctagattagcggcgcataaaccatgttcgtcaaccaagtttgttcagtggtcgtaacgtaattggttagtggggaaaaaccgggccgggactcaaaataattttacgaagtgtttgttccggaagtggaaagacaaagagggatagggagctcgcctccttcttttttgtaatcgccgaaatggaaattgtacgacgacccttcttgttccaggcatacgaccctgagacgtgacggtgtcacttttccggcccggtaaagtgacagttatataaaaaagaat

SEQ ID NO: 152579 - DNA, 2408 bp, Zea Mays
caaagcgagaactgatttcacttcttccactgaatcccaggcttgagggcttcacccattttataaccccgcggtaaattattactttatcagtttctgtgctcatgagaactaacaacagatcgtcaccagcgtctgcaagtacacaaaggaactgctgagttatgtaaaagccggtttcatcccttggtcattatggggcagtgtcatagtctacactgagaacagtgaatttcatctcaggaacgagatctatagtggcaaggcggtaaccgcacagcataaagaactccctaagagcatggagtgaatatcctactcatcatccttgaattagtagccagcccaagcattgccgtgtactttgcaatatccgaatgtgggtccgttcagttggaacacgacttcaaagccttctgacgaaggtggagataagattacccgaatgatataacgcggataaataaaaggaatgaagttgggatcagaaattagttgcattggtggtgtgggtaaccaaagctgggtgcgcgtaaagatattggtaaggacaatctcatgcgtggcatctgatgcagtgataaggaactcatttgaggtgaggagatttccgagttgatccaactgtcctatctttcaattcgcttattgaatttgtgggcaaggacgcatatcttcagctgaggaaatcttcagtgggctaagagatccagggttaatccctgatgtggtcacatatagaatatgaaaatatcaggatgctgcggcgattccgctagagcttttgagctgcatgaagaaatgtcaagttgctcctcagaaaattagtagaatagtttcattggccttcgtcaatgggacaaacgctccagtgtatgcgttacagttactgggaagctagcatttttgcttgtcatggaatcaagtctatttgttcgaatgttctttttttggaaaaaccaaccacaaaaaaagtctccctttctcttggagcagagcttcatcataaaagtggagagtcacaatgagatttagtggaatggatatgaagggtataaatatgctatttgctgctattccatctatttgtgcatcaagtccgaagaagatctcaatctataatgaagaaatgatagtagctcgttgttttataggctttctcatattaagtcggaagagtttaggtaagactttcaaagaaactctcgacgggagaatcgagtctattcaggaatcattgcagcaattcttcaatcctaacgaagtcattctggaggaatccaatgaacaacaacgattacttaatctacggatcagcttgcgaatttgcagcaccgtaaaagtagtagaatcattaccagcggcacgctgtgcgcctaagtgcgaaaagacagtgcaagctttgttatgccgaaacctaaatgtcaagtcagcaacacttctaaatgccacttcttcccgtcgcatccgtcttcaggacgatatagtcacaggttttcacttttcagtgagtgaaagattagtatccgggtctacaactttggtagaagcttctaccgtagaacaaattcgagaggccttcttattagaacccagagacctaattcgagaaggctttatagtcctcagaaaggtgagggtggggggtatccccgggacctgtggagacggggtgggcctgtagctctgaggattagagcacgtggctacgaaccacggtgtcgggggttcgaatccacttctgagcgggctggcggctccaccgggagcgagcctactgaaggaaagttttattgttgaacttcttatccaatatttatcttttgtttggaaaaaccaaacccacaatctttaagtctccctttctcttttgggagcagagcttcaaaatcaatcaatcttttccatgatcgagtttcttcattatgtgtaccagacagcgacggataatgctaagtttttttctatattactgagtataagtgtcgttgcctctatctacctactacaaatactccgcaattatgtgcggattctaaaattagtggaggaaaataatagaaaagagggtaaactgttggggctctgcgtggtacatgagtttacctactcatggagaagaggagtcaccctaagacccattcattttggctcgaaagagcaaaagtgcggagtaaaagaaaaagaatcggaaggagaagtgtgataagctttgaatgggatggatagtcaagaaaaaaggcacctaatctttaccgtctccactgagatttcagaccagaaaggagtagactctagtttcaattgcgtatagaaagagattcgtcttgtaagagcgagcaggttgaagcgcttaggctacttcagctatatgcttaacacatgcaaatctaacgaagtgctcctgg

SEQ ID NO: 152580 - DNA, 100 bp, Zea Mays
aggaattcgatcaatcgctatcaatgccaggaggcagatcaagattcatgggaacgagaaccttttccgagaagagtcaagcgagggataggatagatga

SEQ ID NO: 152581 - DNA, 972 bp, Zea Mays
ctgctaccgaaagagagaataggtctaagggcagcatctactcgttcatcgcttgcctcacctcgaaagaggcatggcttctctcttcactcactcgcctgttcgcctgcttcaatagcatggaagaaggtgttctaagagcatagtttcacatatctcttgatcaataattcacttatagcttatagaaagtagaaagactcttatttcgaagatccatatctaatcccacttcgttcatagcgaccgcacttcccatgcgcgctctactcttcactcttgctcacctctcttcttcaacaaggatttgccgttcctatctgtttttcaaggtaaaagaaggagccggcctggggctgctgtgcccttcctaatggtttcatagcttttgcgcgtatcgtaggattcgtacgtctataaaacgtagtcctctatggctattcctgaatcgtgggaaaaggtatgcgtatacttaaattgaattgatcgtccgggtatagaaatgtgttcagtctcctttctcttttgggagcagagctgaaaaagatgggaaattccaatctttatgcatagacaactacatccttgggtaaaaggtagactcaaagagcagctcactaacacaacctcgacgattcaatagccacggtcggacattgactttttacactcacttatctacatattggcaagtagcaagtaatatatatgctatgcttagtactcgaaaatgagcttagcttaaaaatggaataggtgtaaacgtccaggaaaagatctctagttaacaaaaccaatcctagacctagcagataaggcgggtaagaagcatactacgcacccttgatcctttcccctcgctctgaacctgtgtctgccctttaccctgcagcctggaggggaacttagactactggcactttagatggccgggcactccttatttgaactccaaaaagctggaaaaaagag

SEQ ID NO: 152582 - DNA, 543 bp, Zea Mays
cgcgctcgcccatgtcgccatcgtagtatcgtcactagtggtagcttcgtatcgtcgttgagcccgtcgaacctcgttcttccctgcttgatctcatcgaaccccgaagcccggactttagagaaaaataagcgaggtccctgtgcatcgcttatcaagtgctcagtcgaagacttcgatcgaaggtcgtcatcatttcgtgcgtcatcaaggaatcccaagaatcggatgaagacgaagctagcagcgtggtattccccaaatgctcgacacaagagctgtaccagaatccttgtcgtgttcgttgttagcgcgtcaaatttagaatggtaagccgattcaaaatttccgttagcttaattattgaagtagttcaatgaatgtgatgtgtttatttttataatttggaagcagtcgcatcgcggtaggattatatatatgtgaagtacgatggagttagtaatgaaaaagatctcaataagtcttagggtttgcgggattgtatgtgttaaaaatggaaagttattaatatatatttgatac

SEQ ID NO: 152583 - DNA, 409 bp, Zea Mays
aggcgcagcaaattggtgatgtgcgtcgatgtcgaggttgaaatctggtagcacaggcagactggcagcacgtgcaaagcggaacaattcttgtcgtccccgcagatcgcctatggagtcctcgtcccctgacagagcccaggacccatcccccacggatcacctatggagtcctcgtccccctggcagcgcccaggccccggcggcggctgctgcgcgacaggtctcaggcggcggctgctgcgagacaggccttcggcggtggctgcgcgacagacctccggcgttgtgtgacgtgaagaggagacctacgtggaggaggaatcccagccggggcgaccacgatgccgaactcgtacagataatggcgaagtcgaatgaatggagattgtttggaggatgtaaataa

SEQ ID NO: 152584 - DNA, 881 bp, Zea Mays
gaaaggactgccctaacctcgtgcagtcgtgcccgcttgtttcacttgctcgccttcacccctcgccgccgccgtcgccgccgtcgcaagcgacgatgctcgacatcaacttgttccgcactgacaagggcggcaacccggaccttattcacgagtcccagtgcagtcggttcgcctccgtcgagctcgtcgacgaggtcatcgccctcgacaaggcatggcgcgaaaggcagttcgagctggataagatccggcaggagctcaacgctaccagcaagaagatcgacaagctcaaagctgcaaacaataaaattgtacgggcatttggagagaagagagtagaggataatttgaagaaccacgtggacctttgcaggatgcttgatattgtcgcattggaaaagggattaatatacaatgaagatgttgattcttggagttgcacgaaataaccttgtgattgtgattagttacttcaaagcgttttttggtcttaatgcatggatgggagagtgtcggatgcttcttcatatactatttcttggtccatcaaatctgcttgactcaaatgcaagttttgctcaaatgtggcaaaaataattgtctcaccaattgtcagcgcgcctgtttccagcaaagtttcagagaaggaaaagatggaatgtaactcaaattttggtggccgcacaagtgtggagacttgaattcatatatacttagttaggctcaatattagtgcaaacagttgataaccaagtttttcaattagtatttagttttggctttagagtacacttatgtatgagttatttgacaatatttatttatgagatattgaatggtacttatctatattatattagttacaatgttattaaata

SEQ ID NO: 152585 - DNA, 1418 bp, Zea Mays
gaaaggactgccctaacctcgtgcagtcgtgcccgcttgtttcacttgctcgccttcacccctcgccgccgccgtcgccgccgtcgcaagcgacgatgctcgacatcaacttgttccgcactgacaagggcggcaacccggaccttattcacgagtcccagtgcagtcggttcgcctccgtcgagctcgtcgacgaggtcatcgccctcgacaaggcatggcgcgaaaggcagttcgagctggataagatccggcaggagctcaacgctaccagcaagaagatcgacaagctcaaagctagcaagcaagaagaggaagcaaagaagctcatggaaatttagttggtgtttgttctggctatttgctttccactgaagtaaccgttagactgtagtgtgacatcctaaatattagctccactgtcaactccaaccctgattctcacactcacaatttgattgttggaattctaattgtgctttagggttctatgtgaagatacaaaaaaatattgcattcctattctggtcccgtattgaaattgccagtggtccctctgaattttgatccaattgttataaatttcagatgaactgaataaaactactacttgtaggcaaacaataaaattgtacgggcatttggagagaagagagtagaggataatttgaagaaccacgtggacctttgcaggatgcttgatattgtcgcattggaaaaggccattgtctcagatagataaccttctgcagacatcttatgatcaaggggacaaatgagatcatgccaactctactccatgtactgctggtgtcacaggattaatatacaatgaagatgttgattcttggagttgcacgaaataaccttgtgattgtgattagttacttcaaagcgttttttggtcttaatgcatgatctataccatgttatgatgtacatgttctttagcccaacaaatgatttttgtgagaactagttttttgtgagatctataccatgttagtccagaagacagtgcatgtctatattccttgttggatgggagagtgtcggatgcttcttcatatactatttcttggtccatcaaatctgcttgactcaaatgcaagttttgctcaaatgtggcaaaaataattgtctcaccaattgtcagcgcgcctgtttccagcaaagtttcagagaaggaaaagatggaatgtaactcaaattttggtggccgcacaagtgtggagacttgaattcatatatacttagttaggctcaatattagtgcaaacagttgataaccaagtttttcaattagtatttagttttggctttagagtacacttatgtatgagttatttgacaatatttatttatgagatattgaatggtacttatctatattatattagttacaatgttattaaata

SEQ ID NO: 152586 - DNA, 1295 bp, Zea Mays
gaaaggactgccctaacctcgtgcagtcgtgcccgcttgtttcacttgctcgccttcacccctcgccgccgccgtcgccgccgtcgcaagcgacgatgctcgacatcaacttgttccgcactgacaagggcggcaacccggaccttattcacgagtcccagtgcagtcggttcgcctccgtcgagctcgtcgacgaggtcatcgccctcgacaaggcatggcgcgaaaggcagttcgagctggataagatccggcaggagctcaacgctaccagcaagaagatcgacaagctcaaagctagcaagcaagaagaggaagcaaagaagctcatggaaatttagttggtgtttgttctggctatttgctttccactgaagtaaccgttagactgtagtgtgacatcctaaatattagctccactgtcaactccaaccctgattctcacactcacaatttgattgttggaattctaattgtgctttagggttctatgtgaagatacaaaaaaatattgcattcctattctggtcccgtattgaaattgccagtggtccctctgaattttgatccaattgttataaatttcagatgaactgaataaaactactacttgtaggcaaacaataaaattgtacgggcatttggagagaagagagtagaggataatttgaagaaccacgtggacctttgcaggatgcttgatattgtcgcattggaaaaggccattgtctcagatagataaccttctgcagacatcttatgatcaaggggacaaatgagatcatgccaactctactccatgtactgctggtgtcacaggattaatatacaatgaagatgttgattcttggagttgcacgaaataaccttgtgattgtgattagttacttcaaagcgttttttggtcttaatgcatggatgggagagtgtcggatgcttcttcatatactatttcttggtccatcaaatctgcttgactcaaatgcaagttttgctcaaatgtggcaaaaataattgtctcaccaattgtcagcgcgcctgtttccagcaaagtttcagagaaggaaaagatggaatgtaactcaaattttggtggccgcacaagtgtggagacttgaattcatatatacttagttaggctcaatattagtgcaaacagttgataaccaagtttttcaattagtatttagttttggctttagagtacacttatgtatgagttatttgacaatatttatttatgagatattgaatggtacttatctatattatattagttacaatgttattaaata

SEQ ID NO: 152587 - DNA, 458 bp, Zea Mays
cccacagttctaaagtcgtatgacctatattctctatttcatacataattacttactaattccttggttattttcaataggatgggagagtgtcggatgcttcttcatatactatttcttggtccatcaaatctgcttgactcaaatgcaagttttgctcaaatgtggcaaaaataattgtctcaccaattgtcagcgcgcctgtttccagcaaagtttcagagaaggaaaagatggaatgtaactcaaattttggtggccgcacaagtgtggagacttgaattcatatatacttagttaggctcaatattagtgcaaacagttgataaccaagtttttcaattagtatttagttttggctttagagtacacttatgtatgagttatttgacaatatttatttatgagatattgaatggtacttatctatattatattagttacaatgttattaaata

SEQ ID NO: 152588 - DNA, 399 bp, Zea Mays
atggttgttgaccccgtcgagtacaacatgatgctcaagcagaagttggagaaggacctcgctgccatcgccatgtggagggcctccagctcaggtgtttctgaatgttgttacatgttggaagagatccaggtgacggaagccatactcgctttcggcctcctccagcagcgctgcaaagacgaggttggaagagatccaggtgacggaagccatactcgctttcggcctcctccagcagcgctgcgaagacgaggtgctcgaggtggcctattgactgctgagatatatgaggccttggaattgaggaatggtggatctgattattatggcaagggtgttcttaagtctgagggtattatactagctttatttgccatgcactcgtattcaccatag

SEQ ID NO: 152589 - DNA, 3996 bp, Zea Mays
atgggccgttccggccgccgcaggcgggaccgcatgcggtggagcaatctctacaccttctcctgctttcgcgcccagcacgagcacgccggcgatgcgggcccctcctccgacggggctggcgccgtcggcgggccgggcttctcgcgcgtcgtgtactgcaacaacgccgccctgcagaagccgctcaagtacatcaccaactacatcaccaccaccaagtacaacgtcgtcaccttcttccccaaggccatcttcgagcagttccgacgcgttgccaacctctacttcctcctcaccgccatcctctctctcaccccggtgtgccccttctctgccgtcagcatgattgctccgctggcatttgtcgttggcctcagcatgatgaaggaggggttggaggactggcgccgcttcatgcaggacatgaaggtgaacaaccgcaatgtcagcgtgcacaagagtgatggcgaattcgactaccggcactgggaggacctttgcgtaggcgatgtggtcagggttgagaaggaccagttcttccctgctgatttactgctactgtcctcaagctatgaggatggcatttgctatgtcgagacaatgaacctcgatggcgagacaaaccttaaggtgaagaggtcacttgaggttacgctgccgttggaagaagacgagtcctttaaagatttccaggcagtgatacgctgtgaggatcccaacccgagcttgtacacattcactggtaactttgagtatgagaggcaggtttacgcccttgatccgtctcagatacttctgcgggactcaaaactaaggaatacagcctttgtctatggagtggtcatttttaccggtcatgacagtaaagtcatgcagaactcaactgagtcgccatccaagaggagcaggattgagaggaagatggatttgatcatatacatcctgtttactgtgctcgtgttgatatcactcattagttcaattggatttgctgtgaggatcaagttagatttgccccgctggtggtacttgcagccacagaaaagcaataagttagatgatccatcacgccctgctctttctgggatattccatctaatcacggctctcattctttatgggtatctgattccaatctcgttgtatgtctcgattgaactggtgaaggtattgcaagcacatttcattaaccaggatattcatatgtttgacgaggagactggcaataccgctcaggcgcgtacatcaaacttgaatgaggaacttggccaagttcatacaatcttgtctgataaaactggtacactgacctgcaatcagatggatttcctgaagtgttcaattgctggagtatcatacggcgtgggttcaagtgaagttgaacttgctgctgcaaagcagatggcgtcaggtgctgatgaccaggatatccctatacaagatatatgggaagagaacaatgaggatcaaatcgagttggtagaaggagttacctttagtgttggcaacaaccgaaagccctccataaaaggcttcagttttgaggatgaccgtctcatgcaagggaactggaccaaggaaccaaattcttccacaattctactcttcttcaggatacttgctctgtgtcacacagcgataccagagataaatgaagcaactggttctattgcctatgaagcagaatcacctgatgagggggcttttctcgtggcagccagggaatttggatttgaatttttcaaacgaacacaatcaagtgtctttgtcagggagaaacacacttcttcgaaaggcacaattgagagggagttcaagattctcaatctattggaattcaatagcaaaagaaaacgaatgactgtaattctgcaggatgaagatggtcaaattcttcttttgtgcaaaggagcagacagcatcatatttgatagattggcaaaaaatggaaggatgtatgaagttgatacaactaagcacctgaatgaatatggtgaggcaggcttgcgaacattggcactatcgtacagggtgcttgatgaatcagaatattcttcttggaatgctgagtttcttaaagcaaagacctctattgggcctgatagagagttgcaacttgaacgtgtctctgagttgattgaaagagagctgatccttgttggtgcaactgctgtagaggacaaattacaaaaaggggttcctcagtgcatagatcgtttggcgcaagcaggtctcaaaatctgggttctgacaggtgacaagatggaaactgcaattaacatcgggtatgcatgcagtttactgaggcaaggcatgaaacaaatatgtttgtccatacccactggtgagcaggtagcccaggatgcaaagaaggctgcaaaggagagtctcctgtcgcaaatcgccaatgggtcacaaatggtcaaactcgagaaggatccagatgcagcattcgctctagttattgatggaaaagctctagcatttgctttggaggatgacatgaagcatatgttcttgaacctggcaatcgagtgtgcttctgttatatgttgccgtgtgtcaccgaagcagaaagcactggtgactcgtctcgtcaaagaaggtataggacaaaccactttagcagtaggtgatggtgcaaatgatgtgggcatgattcaagaagctgatattggagttggtataagtggggtagagggaatgcaggcagtgatggctagtgatttttccatttctcaatttcggtttcttgagagacttcttgtcgtccatggacattggtgctacaagagaatcgcccaaatgatttgctacttcttttacaagaatattgcctttggacttacaatattttactttgaagcattcgctgggttttctgggcaatctgtatacgatgattggtttatgctgcttttcaatgttgttcttacctcgcttcctgttatatcactcggagtttttgagcaagatgtttcgtccgaaatctgcttacagttcccagcattataccagcaagggccaaagaaccttttctttgattggtaccggatccttggatggatggggaacggcctcttctcctctctagctatattcttcctcaatctctgcatattctacgaccaggcaatccgtgctggagggcagactgcggacatggctgcggtgggaactaccatgttcacctgcatcatctgggctgtcaacatacagattgccctaacaatgagccatttcacatggattcaacatctctttgtatggggcagcataacaacttggtatatcttcatcctcgcctacgggatgacattgaggtccggcgacaactaccagatcctgttagaagtccttgggccagctcccatatactgggcagggacgcttctggtgactgctgcttgcaacatcccctacctgatacacatatcctaccagagatcgtgcaatccacttgatcaccatgtgattcaagagatcaagtatctaaagaaagatgtcgaagaccagacaatgtggaagagggagcggtccaaggccaggcagaaaacaaagattggtttcactgcgcgggttgatgcaaagatcaagcagattaagggaaaattgcataagaaaggcccatctttaacaatccaaacggtatcttaggaatctcggtggcctgacaggctcgtcaacagtagttgccactttgttgtttgcttctgcaaggcagtggttttagcttctcagggcaatatagcaaaattcttttcttttttttccttatttctttattccccccgggagtcttttttttatcttcatttgtgtaagaaatgttggggtgtaatcggtggtgttcatcctagtagaagcttcatagccagccgtgtaaaaaatatagctcatttcagttggaaaaacaagctattgatatagctgacaacatatgtatatctgcaattttgattgttccctatcgatatttacggcggtgttggt

SEQ ID NO: 152590 - DNA, 183 bp, Zea Mays
gtcgtcgggggactagcggtgggtcgctatagagcaaggatcactatcaaatcttatagcctgaacgtacctgtagatattagtgactaaaaattaattaaaacaagtaaacattgatcgctaaattgtagtaaagaaaaaaagaattgtagaaaagaaaaaaagaattatggaaaagaaaaa

SEQ ID NO: 152591 - DNA, 666 bp, Zea Mays
atggaggaagcagaggggcacggcatggagtcatcgcagtgctccaagtcgaaggccaccacggtgctgctgcaagacggaccttcatcggcgctgggacatcgtggtggccgagcatgcaccagagccgaggtggaggcgagcttgaagaggtggaatagggaggacaacagttggacctgggaggagcaaggagggtcacggcgatggagagggcgagcagggagatgggcgtggcagcagagaggagcgccatgggagacgggcgcgcgccagcactggagcacacggcccggagatccgatccaggagccgagcgtgggaggaggtcgagaggagaacgtcctacgccgctacgcgcatggtgctgcagcggagagagcttcttggtggccggcgaggaggaagcagggcgcgtgctggagagctgagcaggagggagcgggaactagggcgtggtccgagctgggggaagatgcgcgcggggggacaagacgcgagggagagagaggtgctgaagatagagagaggaggggcgaccgggggaagaagcttgcacgcgtggaaggggataagcaccgcgagaaaatatccagggaatgggggcgggggcagattttccttttttttgctgtgcgcgacgatgaggatcgactgcagagataa

SEQ ID NO: 152592 - DNA, 1222 bp, Zea Mays
cctcgccgccatctccgtctctctctctcccgcaaccaagcagttcaactcacacccgaagcggcgccgctagggtttgctccgacagccgcgaaacctagtccttactgcgccctcccacagaggccgtcattcactaatctacctgctacgcttcgcttcccgctccgattgggagctagggtttagcttatctccgagctcagcttcgggtcgcggcacgcggcatggcggggtacggggaagagaaccagaacgccatgaacgggtacgaggaggaagaggaggaagaagaagttgaagaagtcgaggaggtgtacgaagaggaggaggagggggacggggagggggaaggagacgagggggcagccgccgaggcagcagcgatggcggccgagacgagaagtgtcgatggaggccggggcctagcggaggccgttgggaatgttgatgccggaggcgaggatgagagggatgcagattctagcggcggtgacgcttcggggaaggttttcgtagggggtgtagcctgggagacaactgaagaaacattcacaaagcattttcagaagtatggagctataactgattctgtgatcatgaaggacaagcatactaggatgcctcgtggatttggatttgttacattttccgatccgtctgtgcttgacagggttctagaggatgaacatgtcatagatggaaggacggttgaagtcaaaaggactgttccaaaagagctgtcgtcgaaagatggccctaagacaaaaaagatctttgtgggtggtatcccaccatctcttactgaagataaattaaaggagcacttctcatcgtacgggaaggtggttgagcatcagattatgcttgatcatagcactggacgttcacggggctttggatttgtcacatttgaaagcgaggatgctgttgaaagggttatgtcagaggggagaatgcatgatcttggagggaagcaggtcacttctttatctctcattgtgttctgtgttggtaaatatcattggcatgtaagcagttctgcagttgtcaggttcaattagcaaatggtctaacctggcatgttgtctataattttgttgttgttaacttagttttggttagtaatcatgaagatgcgattctgtctgtacaatataactgatgtgtctgggagtttttgagcattgatcattgtttgtttagtactttctcttccaaa

SEQ ID NO: 152593 - DNA, 1844 bp, Zea Mays
cctcgccgccatctccgtctctctctctcccgcaaccaagcagttcaactcacacccgaagcggcgccgctagggtttgctccgacagccgcgaaacctagtccttactgcgccctcccacagaggccgtcattcactaatctacctgctacgcttcgcttcccgctccgattgggagctagggtttagcttatctccgagctcagcttcgggtcgcggcacgcggcatggcggggtacggggaagagaaccagaacgccatgaacgggtacgaggaggaagaggaggaagaagaagttgaagaagtcgaggaggtgtacgaagaggaggaggagggggacggggagggggaaggagacgagggggcagccgccgaggcagcagcgatggcggccgagacgagaagtgtcgatggaggccggggcctagcggaggccgttgggaatgttgatgccggaggcgaggatgagagggatgcagattctagcggcggtgacgcttcggggaaggttttcgtagggggtgtagcctgggagacaactgaagaaacattcacaaagcattttcagaagtatggagctataactgattctgtgatcatgaaggacaagcatactaggatgcctcgtggatttggatttgttacattttccgatccgtctgtgcttgacagggttctagaggatgaacatgtcatagatggaaggacggttgaagtcaaaaggactgttccaaaagagctgtcgtcgaaagatggccctaagacaaaaaagatctttgtgggtggtatcccaccatctcttactgaagataaattaaaggagcacttctcatcgtacgggaaggtggttgagcatcagattatgcttgatcatagcactggacgttcacggggctttggatttgtcacatttgaaagcgaggatgctgttgaaagggttatgtcagaggggagaatgcatgatcttggagggaagcaggttgaaattaagaaagctgaaccaaagaaacctggcgctggtgattcaagctcaaacggaagacacagccgtggtggtggtcatcgtgattcataccgtggtagtggtgtttctgtgaacagcggtggcggctatggatatggtggtggttaccgatcagctgctgcagcatattatggcagcacagcatatggtgcctatggcagagggtatggatatggtgctacttctggctatggctcaggttatggctctgcatatggtggctccatgtatggaggtccatatggtgcctacgggtcatatggtggtgcctatggaggtggtgcgtatggtgctccaggagggtatggtgggggaggatatggcagctacggtggtgctggaggcatgggtgggggtggcagcgctggtggtcggggctccagcagataccacccttatgggaaatgatcatccattctgtgtttctctaggatctgataataaagccatacctttcctcgtttctgctactgagaaaatggaacattccattcgtcttgttgaatcagcggcatctggacatttttttccttggaacttgcattgcacatcaacgattctatagtctatagtcgctgaaccctgaaccgcccccaccccgagctttctgtagaagctgcagctgaaattctcgtagtctggcatgagccttagaatgcccttgaaactattatctttgtggtagtaacattatggtgtaatggaacagatgtacgttgttgtaacattcactcactgatcagagacttgctatctctacatatgtggagagaagctttgcaaatgattgactgatactattaaattgtgtgggttgct

SEQ ID NO: 152594 - DNA, 1676 bp, Zea Mays
cctcgccgccatctccgtctctctctctcccgcaaccaagcagttcaactcacacccgaagcggcgccgctagggtttgctccgacagccgcgaaacctagtccttactgcgccctcccacagaggccgtcattcactaatctacctgctacgcttcgcttcccgctccgattgggagctagggtttagcttatctccgagctcagcttcgggtcgcggcacgcggcatggcggggtacggggaagagaaccagaacgccatgaacgggtacgaggaggaagaggaggaagaagaagttgaagaagtcgaggaggtgtacgaagaggaggaggagggggacggggagggggaaggagacgagggggcagccgccgaggcagcagcgatggcggccgagacgagaagtgtcgatggaggccggggcctagcggaggccgttgggaatgttgatgccggaggcgaggatgagagggatgcagattctagcggcggtgacgcttcgggggttctagaggatgaacatgtcatagatggaaggacggttgaagtcaaaaggactgttccaaaagagctgtcgtcgaaagatggccctaagacaaaaaagatctttgtgggtggtatcccaccatctcttactgaagataaattaaaggagcacttctcatcgtacgggaaggtggttgagcatcagattatgcttgatcatagcactggacgttcacggggctttggatttgtcacatttgaaagcgaggatgctgttgaaagggttatgtcagaggggagaatgcatgatcttggagggaagcaggttgaaattaagaaagctgaaccaaagaaacctggcgctggtgattcaagctcaaacggaagacacagccgtggtggtggtcatcgtgattcataccgtggtagtggtgtttctgtgaacagcggtggcggctatggatatggtggtggttaccgatcagctgctgcagcatattatggcagcacagcatatggtgcctatggcagagggtatggatatggtgctacttctggctatggctcaggttatggctctgcatatggtggctccatgtatggaggtccatatggtgcctacgggtcatatggtggtgcctatggaggtggtgcgtatggtgctccaggagggtatggtgggggaggatatggcagctacggtggtgctggaggcatgggtgggggtggcagcgctggtggtcggggctccagcagataccacccttatgggaaatgatcatccattctgtgtttctctaggatctgataataaagccatacctttcctcgtttctgctactgagaaaatggaacattccattcgtcttgttgaatcagcggcatctggacatttttttccttggaacttgcattgcacatcaacgattctatagtctatagtcgctgaaccctgaaccgcccccaccccgagctttctgtagaagctgcagctgaaattctcgtagtctggcatgagccttagaatgcccttgaaactattatctttgtggtagtaacattatggtgtaatggaacagatgtacgttgttgtaacattcactcactgatcagagacttgctatctctacatatgtggagagaagctttgcaaatgattgactgatactattaaattgtgtgggttgct

SEQ ID NO: 152595 - DNA, 1785 bp, Zea Mays
cctcgccgccatctccgtctctctctctcccgcaaccaagcagttcaactcacacccgaagcggcgccgctagggtttgctccgacagccgcgaaacctagtccttactgcgccctcccacagaggccgtcattcactaatctacctgctacgcttcgcttcccgctccgattgggagctagggtttagcttatctccgagctcagcttcgggtcgcggcacgcggcatggcggggtacggggaagagaaccagaacgccatgaacgggtacgaggaggaagaggaggaagaagaagttgaagaagtcgaggaggtgtacgaagaggaggaggagggggacggggagggggaaggagacgagggggcagccgccgaggcagcagcgatggcggccgagacgagaagtgtcgatggaggccggggcctagcggaggccgttgggaatgttgatgccggaggcgaggatgagagggatgcagattctagcggcggtgacgcttcggggaaggttttcgtagggggtgtagcctgggagacaactgaaggacaagcatactaggatgcctcgtggatttggatttgttacattttccgatccgtctgtgcttgacagggttctagaggatgaacatgtcatagatggaaggacggttgaagtcaaaaggactgttccaaaagagctgtcgtcgaaagatggccctaagacaaaaaagatctttgtgggtggtatcccaccatctcttactgaagataaattaaaggagcacttctcatcgtacgggaaggtggttgagcatcagattatgcttgatcatagcactggacgttcacggggctttggatttgtcacatttgaaagcgaggatgctgttgaaagggttatgtcagaggggagaatgcatgatcttggagggaagcaggttgaaattaagaaagctgaaccaaagaaacctggcgctggtgattcaagctcaaacggaagacacagccgtggtggtggtcatcgtgattcataccgtggtagtggtgtttctgtgaacagcggtggcggctatggatatggtggtggttaccgatcagctgctgcagcatattatggcagcacagcatatggtgcctatggcagagggtatggatatggtgctacttctggctatggctcaggttatggctctgcatatggtggctccatgtatggaggtccatatggtgcctacgggtcatatggtggtgcctatggaggtggtgcgtatggtgctccaggagggtatggtgggggaggatatggcagctacggtggtgctggaggcatgggtgggggtggcagcgctggtggtcggggctccagcagataccacccttatgggaaatgatcatccattctgtgtttctctaggatctgataataaagccatacctttcctcgtttctgctactgagaaaatggaacattccattcgtcttgttgaatcagcggcatctggacatttttttccttggaacttgcattgcacatcaacgattctatagtctatagtcgctgaaccctgaaccgcccccaccccgagctttctgtagaagctgcagctgaaattctcgtagtctggcatgagccttagaatgcccttgaaactattatctttgtggtagtaacattatggtgtaatggaacagatgtacgttgttgtaacattcactcactgatcagagacttgctatctctacatatgtggagagaagctttgcaaatgattgactgatactattaaattgtgtgggttgct

SEQ ID NO: 152596 - DNA, 115 bp, Zea Mays
gaaaaccctaaccaaccaaacataataattaaacaccataatcaaacaaacatactagtcatgaaaaaacatattatattcgtcggcaaatgaataatggctgccgaaaataagg

SEQ ID NO: 152597 - DNA, 608 bp, Zea Mays
ctttccccttggtcgccgcccccctgcccacctcctcctccctccattgttgcagccaccaaaaccctagccgcccccccccaatcccctcctccctaggtgctactctgtgccgctcggatcatcgtcttttggtgcgaatctccaatcgttttggtggaaggaagaagggaggaaggaaaaggggagaacccaaggtggtggacttccggatcgttcttagggattttgcccgaacttcggtgaaggcacctgatctttgctttgggaaagaagggatgtagcagcacggccaccacacttttaaataaaggaataactgattattaatgatgttaaacaggaagggtcaagtctagggaattattacattctaatctttcatggtagttgaactgtttagtttggtgggctgagatgtctatcttttgtctggtcatgaatgttcttttctaccgttgcattttgattatactatggcaattatctttcttttatatcctgtataaactatatgcttcccttgtttatgctactttcaagggaggtgctgccggattttgcaatacttttctttctctatgtgttgcataagtcttgtagaaaag

SEQ ID NO: 152598 - DNA, 1414 bp, Zea Mays
cgtttgctccgtgatcatgtgccccaaacgcaccgacctcaccctcccctctttaaataaccacactcccccttcttcccccaccactaccaggccaccaccaccacgcagcacctctgccatccccgcttccctccctcactcgcagccacccgaaccccaccgccaaccagccggatcaagtcgagtgaagcgatgctggaggaggcgatacccgcgctgctgagcgccgtccacgggtggttcacccccgccgtgctcttcgtcgtcctaaacatcgtcatcggcaccatcgcggtcacctccaaggccgccgcctcggcgaccggcggcgacgaggaggaagtcgccgctgctggcgcgggatgggagccgcaccggcggctggcccgcgtgccgtccatggcgttcgagcgtctcaagtcgttcaacggccgcttcgccacggccgagcccgtgcccgccgagacaggagtggtggatctggggtacaacaagcagccccacacggcggagatggagaaagagggccctgtcgtcgtcgagggcgctgtagatcctgagcccgagcccgagccccaacacgcggcgcacatggagcggagcaggtcggaggcggatgcagaggcgaagctgccgttgctcccgtcgcgtctgcacaagtccgccagcgacaagtcggcgttcgcgcacttcggcgccgaggaggtggaggagaccgtgcgcgcggtggaggcgcggcgccccgcgacgacgagggagaaccgcggtcggcggctccccgtggcggagccggagccggcatctgagtcgtcggagtccgagtccgagtcagaggaggaggaggccagcggcggcgaggtggacgcgcgcgcggacgacttcatcaaccagttccgtcaccagctgaagctgcagcgcatcgactccttcatacgccacagggagacggtccgccgcggccaggcggcggcccagggcgtgtaggtgtgccccagcggagggagcgagatgctgcaagagtcggtgacaccgtgaggagaggttgaaatggacgaagagaagctgcagtgaagggagatcgggtgggggaggaggagatggtaattcctgcctgcctccttcgccgtctgctttggtttttcccgtttgctggttcctggtgcgagcatgtcgtagctccacactatgcgtttttttttggggggggataggagaaccttgccttgcgcaatgtggtatgccacattgcatcgcatcatatatattcataatatatgcgaatcgatagtagaaggaaacccgtagctgtaaatctatggctctcttctctttgctagcattgctgcttcacggttctttacggctttgtttagattgctggtgcacatggtcacaggcagcggttctcctc

SEQ ID NO: 152599 - DNA, 779 bp, Zea Mays
attattcggatccgaagcccactaaaacttgcgatcgtcccggacggatccatttggctctggtcgtcacaaagttgtttgtgcatcgcggcggcgacaagggggcgacgaggcaggcggagcgggcggcgactacagcggcagcagatctcacggaatggcggcgaaggcaatctcgagccccgtgccggtggagtggtacccgacgctggccgtcgtcatggtatccgtaggcctcatgttcaccgcctccttcttcatttatgaagcaacttcatcccggaggagccgtagcctgtcaaaggagatcgcaacagcagttgttgcttctgttttcttgggctttgggtctctgttcgtgcttcttgcaagtggtgtttatgtctgatgactggctatgggccgtgtgtgcttgtgttctgcatcccgagttgtagacttggttatgacagatcctcaaagctgttgtcctaacgaatatagagcatttgaacttattctagaacgatgtatgggagcaaccgagttaaagcaacgtttccttccaggtctgcattatatatcatcaatctaaatccctgttccctatgtttctgcttattccaggtctgcttatttattactccctccgtttcgttttagttgtcgctgaatagtgtaaaattgaactatctaacgacaattaaaaagaaacggagggagtatgtattaccaacatattttgctgttttatggcgtgcattgtgagtgaaggatgatctggttgggcacatgatgtt

SEQ ID NO: 152600 - DNA, 1421 bp, Zea Mays
ggtgcgccgcgcacaaccgcaaccaaggccaccatgagcgtccagccgtccaccaatcactgccgtcaatagcggcgtacaccacgagcaacagattgtagcgtgtacgggcggtccagcgctataaatccacaaaaatgggcagtgtcacttcctgctctgcttcagtacgtagtgggctgagccagaaatgggcacgtcgttggctagaagcgttgctctgtttactctgctgctctgcctgcttcttccgtcccatggccatgggaagctctcgaccaagttctacgccaagtcgtgccccagcgtggccgccatcgtgcggtcggtgatggagcaggcggtcgccaaggagcccaggatgggcgcctccatcatccgcctcttcttccacgactgtttcgtcaatggttgtgacgcgtccatcctcctggatgacacttcgacgttcaccggcgagaagaacgccggagcgaacaccaactccgtccgcgggtacgaggtgatcgacgccatcaagacgcaggtcgaagcagcctgcaagggcaccgtgtcgtgcgccgacatcgtcgccttggcgtctcgtgacgccgtggacttgctcggaggccccacatggaacgtgcagctcggccggaaggactcgcgcgcggcgagccagagcgcggccaacgccaacctcccgggcccgggctccggcgccgcgtccctcgtggccgcgttcgcggccaaggggctctcggcgcgcgacatgacggcgctctccggcgcgcacaccgtggggcgcgcgcgctgcctcttcttccgcgggcgcatctacaccgaccagaacgtcaacgcctccttcgcggcggcgcggcagcagacgtgcccgcagagcggcggcgacggcaacctcgcgccgttcgacgaccagacgcctgacgccttcgacaacgcctactacacgaacctgatggcgcagcgcggcctgctgcactcggaccaggagctcttcaacggcgggccgcaggatgcgctggtcaggaagtacagcggcaacgcccgcatgttcgccaccgactttgccaaggcgatggtgaagatgggcggtcttgcgccggcggccggaacgccgacggaggtcagattcaactgccggaaggtgaattgagaatggcttgcattcagagacgggatgacagggggagttgtctgaattctgaaacaaagcactaaaccgtatctttccctttcgttccaagatcaagtctttggttcctgggcatgatacaagtgaaaataattaagacaatcttaaaatgcttgatgttcacgccatatacatataggcgtttttcctgttctatatttttttccattgaaaccatcctttagaacaatacatgtatcgactgtgaataatagagctcttttccgaa

SEQ ID NO: 152601 - DNA, 80 bp, Zea Mays
caggccagtctgaagatgtcaccttttgaagctttatttggtaggagtgcaggactcctctatactgggatcagactaga

SEQ ID NO: 152602 - DNA, 1939 bp, Zea Mays
tgtttactggtatatatgactacgttactaaacattttcaagactatttacacggacgaaaaggtttgttgctaatttggcactgcatgcacactcaaaactaaacaatgtggcgcgcggccttgcctatgaagattgcatctgcagcaggagtcaactagctagctgagggtatacctcgatctcgtcacgcagacaagactacaagagacaccaacaactactccagtgcactctgcacggcgtagcaagttgcagttttagaaagatgattgcaggaacatgcgctaaccaaacaagcgtcctctacaccgatccgatcttgtgattagttttttatattactagttttggagcagtactacagtccaagcctaatctgcccaccgtcaccttctcgccaggctacgccgtgcgcgcgcattagtcaaccgatccagcgcgagttcaggcgctcgaccatatgggaaggcaatgcaagcaccaaactggagccacggcacactacatatacgcagctccgtccttgttccttcccatcgatcaaccacatccatagggatcggtaaccagcaagcttatcatcatcgtaactatagctagtcgcatttgcaagtctcaatccacatccacagggatcgctattagctttagccatggccaagagcgcagcatcgtcggtggttaggtgcttgcagctgctcaccgtggctgcggtgctggccggtgctgctgccggcggcgggctgtcgacgagcttctacagcaagaagtgcccggacgtgcagagcatcgtgcgggccggggtggcgtccgccgtggcggcggagaagcgcatgggcgcctccatcctccgcatgttcttccacgactgcttcgtcaatggatgtgacgcgtccatcctgctggacgacacggcgaccttcaccggcgagaagaacgccgggccgaacgccaactcggtgcgcgggtacgaggtcatcgacgccatcaaggcccgggtggaggcgtcctgcaacgccaccgtctcctgcgccgacatcctcgcgctcgctgcccgggacgctgtcaaccttctaggcgggccgtcgtggacggtgtacctcggccgccgcgacgcgcggacggcgagccagagcgacgcgaacgccaacctcccggggcccgggtccagcctcgccaccctcgtcaccatgttcggcaacaagggtctgtcggcgcgcgacatgacggcgctgtcgggcgcgcacaccgtcgggcaggcccggtgcgccacgttccgcaaccgcatctacaacgacggcaacatcaacgccaccttcgcgtcgctccggcagcagacctgcccgctggccggcggcgacgccgcgctggcccccatcgacgtccagacccccgaggcgttcgacaacgcctactacaagaacctgatggccaggcaagggctgttccactcggaccaggagctcttcaacggcggctcgcaggacgcgctggtgaagaagtacagcggcaacgctgccatgttcaccgccgacttcgccaaggcgatggtgaggatgggcgccatcagcccgcttacggcgacgcagggcgaggtcaggctcgactgcaggaaggtcaactagcgccaactgctgctggattatccatggatatcgattcgccattcgtgtgttaaaacttgcaaattccaatccaagttggatcgtcgagctggatagtgtgtcgtcaacagtcaaaattgcgtggcggctcgtctcgtagcaggattaagcaattgtttctgattatcttacgtggcaggaataatcctgttcttttatcttatcggcaactgtattgataaaatccgtactagtatacatgtggaatacgaaagtctgctacatgacttatttctttcttggtggttacaatctaaaaatgtgatatgaat

SEQ ID NO: 152603 - DNA, 1529 bp, Zea Mays
aaacatggatggtgtctatatatatagttgcgttcaaaatccaatacgaaaatgtcagatgaatcatttcggtaaccaagtgacactgcttcgatcactcttgtcgttgcgtggtcgttcaccacttattctactggtattgatgacgtgttcaatctatagctatatctatgtatatatactagagagtacacgtactggggttcatcagaagcgagctctgtgtcggtcgatccatcaatgggcgctcggtcgacgagcaagctagctatagctacaagtatatcgatcgaatccgatgcgtatctctagctgttgacgacccggcagttgcgcctgatctgtccagcggtgccggtgagcaccccaacgttgcccatcctaatcatggctgccacgaagtcggcgttgaagagcgaggcgctggcgctgtactgcctcaccagcgcgtcctgcgacccgccgttgaagagctcctggtccgagtggaacaggcccctccgcgacagcaggttggtgaagtaggccgtgtcgaacctcaccggcgtctgcacgtcgatgggcgccaggttgccgtcgccgccggaccgcgggcacgtctgctgccgcagcgccgcgaaggaggcgttgatgtcggtgtcgccgtagatgcggccgcggaaggtggtgcaccgggcctgcccgatggtgtgcgcgcccgacagcgccgtcatgtcgcgcggcgacaggccctgcctgccgaacagggagatgagcgtgccgaggctggccgtcgggggcgggaggttgctgttggcgagcgaggcgctggccgtcgtcgagtcccgccgcccgagcggcacgctccaggtcggcccgccgagctatacgtaacgtacggagatgcacaacgaagcaaaggaaaagtgtcagacgatcgacgacgcgagcggtttgaccgtccatgcaaactagctagaaggcgcgcgcgtgcgtacaaggttggttccgtcgcgcgcggcaagcgcgaggatgtcggcgcacgacacgacgccggggcacgcggcctcgacgttccgcttgatggtgtcgatgacctcaaagccgcgcaccgagttcaggttcggcccggcggtcttctcccctccggcgtcgagaaggatcgatccgtcgcagccctgtcatcatgcatcaccgtcgcatacacatgtcatgatgcatcgcagtcaaattattgagctgtgtgttgttagctagctgttataagaatatataatagtgtgaggattctagctagtatacttgaacgaagcagtcgtggaagaagagcctgagcagagaggcgcccatcctctgctcacttgcgacggcctgggtcatcgccgcccgaacgatgctctgcaggttggggcaggaggacgcatagaacgtgggcgagagctgtgcgtgggcgacacaggagaggagggaaacggcgaccaggcattgcatcaaggtgggagacgccatggcaagctgctgcctgtgcctgcacgctcggtgaatgaagc

SEQ ID NO: 152604 - DNA, 408 bp, Zea Mays
ggtggacttccggatcgttcttagggattttgcccgaacttcggtaaaggcacctgatctttgctttgggaaagaagggatgtagcagcacggccaccacacttttaaataaaggaataactgattattaatgatgttaaacaggaagggtcaagtctagggaattattacattctaatctttcatggtagttgaactgtttagtttggtgggctgagatgtctatcttttgtctggtcatgaatgttctttttctaccgttgcattttgattatactatggcaattatctttcttttatatcctgtataaactatatgctgcccttgttatgctactttcaagggaggtgctgccggattttgcaatactttctttctctatgtgttgcataagttttgtagaaagg

SEQ ID NO: 152605 - DNA, 2393 bp, Zea Mays
acaagtacgggagagaaaaagaagaagaagaaaaatacacaaggaataattcaacagctaggtactagtgtagtagtagtactacgtaccaaaacgaggtcgttgccgtgttgcgtggcctgaggttgtcctcaacgcaaaggcaaagccaaccagagccagccagccagccagcggctccatcccctcctgccgtgctgccaggagcttggcatctgcggctatgcaatctcggccgtcctgatcgagcagcgcggggccgagagatggagggtgtttcgtcgtctgccgccggaggttcttcttcggcagcagcggtgcagggcggccggggccgggagcccgggcccgggagggtgggcgcgaccaacatcggcaggctgcggcaggggaagcagcagcacgccacgaggcccggcgtcggggccattagcgtcacgtcctggcacctccgggtgttcgcggccgtcgtcgccctcatgggctgcctcctgctcgccgcctccctcgccatgtccgcgctccaccaggtacagttcaggaacgccgccatctccaggaacttcaggggcctccaggagcttaagcaaagcatcgtgaggagggaaccagtggagcagatcatgcatgcaaggcttctgcaaatggccacttcagctctcacaaagaacggctctgaatccgaggatttcgcgctatgggaagagccctacaagcaagcgcggaaatggaagccctgcgctgcgaagcatagcttggctgacgaagaccctgatgatgagaccaacaacggtttcgtgctggtcagcgcaaacggtggcctgaaccagcagcgtgtcgctgtgtgcaatgctgttgtcgtcgccgctctgctcaatgccacgctagtagtcccacggttcctctacagcagcgtgtggaaggacacaagtcagtttggcgacatctaccaggaagactacttcgtgaagtacatgaagaacgatgtccgaatcgtgaaagaactgccagcccgccttcggtcgctggacctcgaagcaatcggcagccagatcactgacatggagatctcgaaagaggccgatccatctgagttcgtcaaatcgatcctcccaatccttgagcaaaacggcgtcgttcacttcctcgggttcggaaaccggctgggcttcgactcggtacctgttcatctgcagaggctgaggtgcagatgcaacttccacgctctcaagttcgtcccagagctccagcgagcaggctccgtgctggtccagcggctgcgccaggtgggtgggatgcagaccgagatggacaagcagctgttcggcaacaacatgctcgaccaggccttcgccgagaaggacgacggcgccgacaccggcaccggcaccgccacgcccaacaggtacctcgccctccatatgaggttcgaggaggacatggtggcctactcgctgtgcgaattcggcggcggcgaggaggagaggagggaactgcaggcctacagggagacccacttccccacactcgcgctgcgctcccggaacaccacggtttcgccggaggagcagcgtagcctggggaggtgcccgctgacgccggaggaagcgggtctcgtcctctccgcgctcggctacgaccgccggacgtttatctacgtggccgggtcgcagatatacggcggcacgccacggctgcggcccctgacgcggctgtacccgaatctggtcaccaaggaggataccctcaccgccgacgagctggccccgttcaagaatttctcttcacggcttgcggccttggacttcatcgcgtgcgcctcggcggacgtgttcgcggtgacggactccggcagccagctgtcgtcgctggtgtccgggtaccgcatctaccacggcaggggccgcgcgccgacgctgcacccgaaccggaagcgctacgcgcaggtgctttccgaggaagggagcattgcgtggggcgggttccagaagagggtgaggcagatggtggacgagtacaagcgggtgagcccgcgcccgaggggccggagcgtctacaggcagccgaggacgccggggtgcatgtgcagggccggcggcgacggcagcgtccacttctgacgcacgcgtttgcagcagcgtcggtttcttggggatcaagcggccggctgctctgttccattaattctttcctacacgtttttttttttgcatagattttatgctccttaactttggtgggtccttttagcagctcaggatacgtggcgggataggtgacaaattttgagtcctacggcatggttcttacttcttagaggttctaaacacagctatacgcctttaccgacaggtttggtgtacatagggaaataaggtatatatcatgtcatg

SEQ ID NO: 152606 - DNA, 85 bp, Zea Mays
ggtccatgcaacataaaggtagtacttttcacagatctagaactaatcaatgaagaaatagttgaaataagatctaggactaatc

SEQ ID NO: 152607 - DNA, 187 bp, Zea Mays
gtagataggagggtggcggctagggtttgggaggcctaatgggccgaaacaccagttgcggcccaactaacccacgcgacagctcccgaccgcaacgcaaatgtcaaaccaaaaaaaaaatctactgccctagttgcgaatgttattcacaaaattccaaatccccaaaacaacaactggatgaggg

SEQ ID NO: 152608 - DNA, 2101 bp, Zea Mays
cccaccccctgtagaaaaatgtgtatgaaatggaatatcactgttgaaactagtcaatgtagtggaatgcttgcccatttccccgtccttatattttattcccacatcaagcttgcttattcttcttcccctccctagtattattctcatcacgttcgtgtcttctttcctccaggttcctactcccaccacacacctcattccaatcctatgctggtggtgtagagacagacagagagagccgggagagaaaagagaagaggaccaaatctgagaggtggaagccatggcaaaggtgaaacagaaggtggcaacggaggatatccttgaaggagatgatgagagaacatcttcggagaacaactctgtaccacctgtgattctcgacctcaacgagggtttcggtgaggggaacgaggcaggggaagccagcgatgatggtgacgacaaccaggaggaggacggtgacgacggcggcagcacaagtgaagttgcaggcggcaggaattcaagcaacaacagcagcaccaaccacacttccatgagcaacaaggattatgacatgaatagcagcagtaatggtgagggccgcgaagagagagagctagcggtgaggcagtacaacagatccaagcttccccggctccggtggactccggacctgcatatggcatttgtccacgccgtggagaggctgggcgggcaagagagagcaacgccaaagctggtgcttcagacgatgaacgtgagggggatcaccattgctcatgtaaaaagtcacttgcagatgtacaggagcaagaagctggaccaagagtctgttttctcgcccatggacttccacatgatgaggacaggggaccatcatcgctaccatgacatgttcctccatcgacctgcagctggctcggccatctcttcgcggctgctccacggtggggagttcttcgggtcacgaaacgccgccgtctcgccggaggccagaaggctctacgagctcctccaacgccggcagcctaccatgcaaacgttcgacttcaagggctacagtagtggtagtggcctcagggatcaagagtggagtttcagccagcatgcggcggcggcggcggcaagggctggggccatcaatggccacggcccgacgaaagggctcatccacgatatgggtttgagaaagaacagcaggccgatgtcccatttgttcgacgtgcgggatcgggatgctatcgcttccaaccggacatcgtccgacgccacgggtgctgccagccatggcgtaacgatcaccagaagcgcagatcggaacggcaccagctcatcttggccccagcctaggacaatgtcggcagctgcgtccacggctcctgcgttgggcagtcaccacctgctgtctatgggaagaggctccgctaacttaacatcgtcgtcagatcaccccgtggtgacaaatgaagccctaggctcccggctccagctgcagacgttccaggagctaaacaaagtaaccggcgacatgtgcgctgggaccagaaagacgaagaggatgaagacgccaatggaggggaacagtggcacgccggacttgcacctaagcttgagccccaacgacgacgacatgggaggagctgccgacaagcagatcaagaagatgaagatccaaggtatcggattaagtgaacagcaggaggtggacggcgataagatgctgcctctctcgctctccctgtcactccggggtggcgaggatgccaggaggttagaggcagctacaggcggtagcagcggcaacaaggccgctctggggcggtgtactttggatctgaccatgtcgatcaaggcaactgagtgaggagataagtttcatggccgttctggggggtgagtactttggatctgaccatgtcgatcgatcaaggcattggagtgagatctttcaagtacttgtccccaaggccttccaaaacttgcacactgcaccatgcggttatattaagtaatatgagtgatagtttaagttaaccttgcatgcgtccagaccagaccacatataaatacatatctatatatatgttcaatgagatgcacttattgtttttct

SEQ ID NO: 152609 - DNA, 1103 bp, Zea Mays
ggaattgggtctgctatgcgaaccactgaaaagaccccacgaacttttactctagccctcccagggtctctcttcggcggcggcggtagcgatgtctcttcccccggacggagtggatggtggcgccggcactggcgatgactggttcctcgactgcggcatcctcgacgacctcccggccgtggcctgcggggccttctcatgggacgcatcctcgtcttcttccaaccccaggtcagcgcagatgaccgatcgatcgatccctccgccctcccctccactccccccttcgagttccaggaaatgcggatgctttcgtttagcataggttcctggcgatcggttccgtgacggcggcgttctgtgtctatgcgatgagtatcatggaactgtgacgtgagcggatgaattgttttcggtatttcgttgatttgttctcatgttgcagaggctgtgtttatgacggtggaatggatggattgtgtgtgatggtgaccaatgatttgcccaaacaattgagatggtctgctgtagcgtgaaccattttatgtcggcgactcaattgatggaggactgtgtcaccagtcctgacgttaagtatgtgttgcgagcaatgggatgtgctgctaggtcatggatggcatcgtaaagctggactgtagagccaaagatataagttcccatctgtcatcgtggaagtgggcagctatgtgaacaccaatgatgtcttcaaggagcctggcagcaataagcggtcaggatccaatgatgtgcatgtgccaacatctaaagcttctagggaaaaaatgaggaggaacaagctgaatgataggttccttgaattggggtctacattagaaccagggaagccagtaaaagttgacaaagctgctatcctaagtgatgctactcgcatggttattcagcttcattcagaagcacagcagctgaaggaaactaatggtagccttgaagaaaagatcaaagaactcaagatccaaatttctcttacaattatgcgatctttatctatgttggcaatgctttgtggtattggtagtttatgccctgcgcatgaatacactgtgattgctattgcatag

SEQ ID NO: 152610 - DNA, 273 bp, Zea Mays
ttctctcgacggcgccaccatgccgcctccgccctcaaccctagccgccagggcaacaacagtagcaccgcagggcgtaggtggcagagcagggacgcggattccgactgacacttcgtcgtcaagctctcgccatttgtaactccttgctccgccgacctcgacgcaaactacaacttctcgctcgcgcctatccaggatccgctctcgccatggtaccgccctttttctcggtctgtgaatccacccccatctccctgctccctcctgcat

SEQ ID NO: 152611 - DNA, 707 bp, Zea Mays
ttctctcgacggcgccaccatgccgcctccgccctcaaccctagccgccagggcaacaacagtagcaccgcagggcgtaggtggcagagcagggacgcggattccgactgacacttcgtcgtcaagctctcgccatttgtaactccttgctccgccgacctcgacgcaaactacaacttctcgctcgcgcctatccaggatccgctctcgccatgaatgttgcatttgacaaatgactactctcaggcctgcaaactgcacattacaacgtgaagttggttattgaaagggcgcccatagctgcaaacatagctgtgaccacatgatgatgacgatttactacagcaggcacttgcaatgtcaatggagggtggtgcttcaggatctgcagctgtgactgactctgctatggcagaagctagtgcagttgaccctgacttagcgttggcttcctggtgttgatcccaatgatccatctgttaaagatttgttggcatcattgcacaaccagggagagcaagagaagaaggaagacaagtaagacaaaacagaagacgagaagaactgcttcaagctggagtgatgtcgctgtggtgcttttgtgactgatcatctctggagcttttgtgaatgatctagctagctatttgtaaatgatctagttgtgaatgatattataattgtgatacttttgtgaatatataatt

SEQ ID NO: 152612 - DNA, 574 bp, Zea Mays
aatgtattgacatcagatgatcttgtgtcttctataagtatacttgaaaaatttttagtcttgcatttatttgctggtgtttcttgttaccgtattttctccaacaaaggtggtagtaacaccgagttatatgtgcctagaacttcttgctgatataccatatggtactaaatccaatatttggtctctaggtgtgtaccacttcagtgtcataaactatgtttctgcacctagatagaatgagcttgcgatctaatacttgaattttacagaatgttgcatttgacaaatgactactctcaggcctgcaaactgcacattacaacgtgaagttggttattgaaagggcgcccatagctgcaaacatagctgtgaccacatgatgatgacgatttactacagcaggcacttgcaatgtcaatggagggtggtgcttcaggatctgcagctgtgactgactctgctatggcagaagctagtgcagttgaccctgacttagcgttggcttcctggtgttgatcccaatgatccatctgttaaagatttgttggcatcattgcacaaccagggagag

SEQ ID NO: 152613 - DNA, 702 bp, Zea Mays
tttttttttcttttgcacactgatcagtttatttatgtagtttaattcacagaattcctatatatcttcccaagtgaatcttgggcttggagttcaaggatcaagtattacctcatctacaacaccataattttgagtccccagttctgcagaaatataaatgatggcttatttaattactttcagatggcaaaagaaattgcattgcttgaggtattttatcacatatagttgtttttcgtgcattgagaatttacacctatatgtgcagatgatatatgggcatataaatgtgaagaacaacaaattttggctgaagatgttggtgtcgaatcttttatgacaacaggagaaaataaacaagcaagtgaagatgacccaaagattctatattcggttaggaaactggaggcgtacatcatcagttattggtacaagaaagggcacagaccaatagagcatcctttgctcccagatgcaagaagaatagtgaagtttgacctatatgatgactcagtttcaaccagaatataatgtaatgatgtatcttgcacctgctcatcagagagtgagatctgttgtttgtagcttagtagaagattacaagggagaaacatatgatgtgtagagatttgctgtctctctctttcactctcgtagaatgcaatttttcagggaaacttaaatttatatccttttcta

SEQ ID NO: 152614 - DNA, 630 bp, Zea Mays
atggaggaacaacaatcttccttggtggatggtcttaaaactcccactactgtggctggtaaactttttctactgaagatcaagaatccacagccgtggagtgcttgtccgacattgcacccaataataattgtaacctgtgggagcgtggtgatggaaatcacaaaccttttgtccgtgacacacaatgttaccaaggaattaattaagtatcactcgcagactcttggatatgtaattggtggcactaacatgagaagcgacaccaaccatctcacagaagggatcaatatcttaattgccacactggacaggcttttggaccatctgcaaaataccggtagtttcaaatacaaagagctaaagagtaccaaaaaggtcatgcccgacgacaagctcgctgagttcgcgctcctcgacccgaagccaccaagaggtgttttaaaggatgtagcaggttgtgacaatgcaaaacaagaaataagggagtttgtgcatttgtttaaaaaccccaagaagtatgaagatttcggagctaaaatacccaaaggtgctctacttgtaggtcatcctaggacatggaagcctttgcttgccaaagctacaacaagagtctgtcttagcatttaa

SEQ ID NO: 152615 - DNA, 3284 bp, Zea Mays
ccaatcgcatcgcagcagcacgagcagcacgccgtgccgctccaaccatctcgcttccgtgcttagcttcccgccgcgccatggcgtcgaccaaggctcccggccccggcgagaagcaccactccatcgacgcgcagctccgtcagctggtcccaggcaaggtctccgaggacgacaagctcatcgagtacgatgcgctgctcgtcgaccgcttcctcaacatcctccaggacctccacgggcccagccttcgcgaatttgtccaggagtgctacgaggtctcagccgactacgagggcaaaggagacacgacgaagctgggcgagctcggcgccaagctcacggggctggcccccgccgacgccatcctcgtggcgagctccatcctgcacatgctcaacctcgccaacctggccgaggaggtgcagatcgcgcaccgccgccgcaacagcaagctcaagaaaggtgggttcgccgacgagggctccgccaccaccgagtccgacatcgaggagacgctcaagcgcctcgtgtccgaggtcggcaagtcccccgaggaggtgttcgaggcgctcaagaaccagaccgtcgacctcgtcttcaccgcgcatcctacgcagtccgcccgccgctcgctcctgcaaaaaaatgccaggatccgaaattgtctgacccagctgaatgccaaggacatcactgacgacgacaagcaggagctcgatgaggctctgcagagagagatccaagcagccttcagaaccgatgaaatcaggagggcacaacccaccccgcaggacgaaatgcgctatgggatgagctacatccatgagactgtatggaagggtgtgcctaagttcttgcgccgtgtggatacagccctgaagaatatcggcatcaatgagcgccttccctacaatgtttctctcattcggttctcttcttggatgggtggtgaccgcgatggaaatccaagagttaccccggaggtgacaagagatgtatgcttgctggccagaatgatggctgcaaacttgtacatcgatcagattgaagagctgatgtttgagctctctatgtggcgctgcaacgatgagcttcgtgttcgtgccgaagagctccacagttcgtctggttccaaagttaccaagtattacatagaattctggaagcaaattcctccaaacgagccctaccgggtgatactaggccatgtaagggacaagctgtacaacacacgcgagcgtgctcgccatctgctggcttctggagtttctgaaatttcagcggaatcgtcatttaccagtatcgaagagttccttgagccacttgagctgtgctacaaatcactgtgtgactgcggcgacaaggccatcgcggacgggagcctcctggacctcctgcgccaggtgttcacgttcgggctctccctggtgaagctggacatccggcaggagtcggagcggcacaccgacgtgatcgacgccatcaccacgcacctcggcatcgggtcgtaccgcgagtggcccgaggacaagaggcaggagtggctgctgtcggagctgcgaggcaagcgcccgctgctgcccccggaccttccccagaccgacgagatcgccgacgtcatcggcgcgttccacgtcctcgcggagctcccgcccgacagcttcggcccctacatcatctccatggcgacggccccctcggacgtgctcgccgtggagctcctgcagcgcgagtgcggcgtgcgccagccgctgcccgtggtgccgctgttcgagaggctggccgacctgcagtcggcgcccgcgtccgtggagcgcctcttctcggtggactggtacatggaccggatcaagggcaagcagcaggtcatggtcggctactccgactccggcaaggacgccggccgcctgtccgcggcgtggcagctgtacagggcgcaggaggagatggcgcaggtggccaagcgctacggcgtcaagctcaccttgttccacggccgcggaggcaccgtgggcaggggtggcgggcccacgcaccttgccatcctgtcccagccgccggacaccatcaacgggtccatccgtgtgacggtgcagggcgaggtcatcgagttctgcttcggggaggagcacctgtgcttccagactctgcagcgcttcacggccgccacgctggagcacggcatgcacccgccggtctctcccaagcccgagtggcgcaagctcatggacgagatggcggtcgtggccacggaggagtaccgctccgtcgtcgtcaaggaggcgcgcttcgtcgagtacttcagatcggctacaccggagaccgagtacgggaggatgaacatcggcagccggccagccaagaggaggcccggcggcggcatcacgaccctgcgcgccatcccctggatcttctcgtggacccagaccaggttccacctccccgtgtggctgggagtcggcgccgcattcaagttcgccatcgacaaggacgtcaggaacttccaggtcctcaaagagatgtacaacgagtggccattcttcagggtcaccctggacctgctggagatggttttcgccaagggagaccccggcattgccggcttgtatgacgagctgcttgtggcggaagaactcaagccctttgggaagcagctcagggacaaatacgtggagacacagcagcttctcctccagatcgctgggcacaaggatattcttgaaggcgatccattcctgaagcaggggctggtgctgcgcaacccctacatcaccaccctgaacgtgttccaggcctacacgctgaagcggataagggaccccaacttcaaggtgacgccccagccgccgctgtccaaggagttcgccgacgagaacaagcccgccggactggtcaagctgaacccggcgagcgagtacccgcccggcctggaagacacgctcatcctcaccatgaagggcatcgccgccggcatgcagaacactggctaggcggcttctcttcactcacctgcagagtgcaccgcaataatcagcttccggatggtggcgttttgtcagttttggatggaaatgccgaactggcagcgtctgttttccctatgcatatgtaatttcctgcctctttatattcactcttgttgtcaagtccaagtggaaaatcttggcatattatacatattgtaataataaacatcgtacaatctgcatgctgttttgtaataattaattaatatcccagcccattggatggacttgtttaccatggtgttacttcagcca

SEQ ID NO: 152616 - DNA, 546 bp, Zea Mays
atgacgatcgtagagatgcatgtgagcatcgactgcgatggctgcgaggacaacgtcaggaaggccctggaaaagctcaaaggagtgcaccacgtaagcatcgacaggatgcacggcaaggtgactgtcactgggtcggtgagccagaggaaggcgctccgcgcggcgcggcgcacgggcaagctcgccgtgctgtggccgtccgcctacaacaacccgtcgtaccaccaagcccacgcgatgcgggcctactaccagtaccagtaccaggccaataagcccgcgcaagcgcagcagcaccagtactacagcagcgtccagcgcgccggcaagaacagcggcggcatctcggcggtggctacgaagccggcggggcatcagtacccccagtccaaggccagctcctacaactaccatgtccacgggtactatgactccgagctgtacgggtactaccacgaccacgagcagcccggcgacgtagtgccagccgccgtgcggtcctacttcagcgacgagaacccgagtgcttgctcgatcatgtag

SEQ ID NO: 152617 - DNA, 249 bp, Zea Mays
catctcccttctgcaactcgatctcaaaattgtgacctcgtcagcaaactgattcaatatggtgagttgtgttgtccttttgatttgttgccacgattgtttattctcgacctgtgcatgcgcaactgttacattattaattgtttaatctctaacttactagatgctgcaattgtgcatcaccgacagccgacgcatgggctcagaatatagaaaagacgtccaaataaaagaagtgtgccagatttt

SEQ ID NO: 152618 - DNA, 420 bp, Zea Mays
atgactcgtccctgcagctcgtccggcggtggtcgtcccggcggtctcacaaccttagcgacgtcggcagcttcaaggggccaccgtggtcgggtccttctccaggatcgggcgagggtccagccggatggccggcggcgtggacaaacccgagcacgacctgtgatgggcattttactctgtgcgtgggcgtggctgagcagatcactggacggcttggttcgtggtgtagtaaaagcgaccaaggataccttgctgacgccaaaggatgtgcagctcgagggtgactcgaggttggcgagcctgtccattggccagatggacgtcacagtgtcgcaccatcgactcggcggtggcgatgctcctccaggagtccagggtgcattagaagcggctggcgtcactatcttgcttgtatga

SEQ ID NO: 152619 - DNA, 718 bp, Zea Mays
aaccagacagccagcgagccatctccatccgagttgggcgccatgcaatttgcaatgtcaccggacaacctcctcttcttctgctccgtaacggcgtcggtggccgcctccttcgctctcgtcgcgctgtgcaggcacctggcgcaccgccgaccgcagcagcccaccgcggacgtcctcgcgacgagctcctcaggaggctccgccgagccagaggagctgctgccgctgagcgccgttgccgcggccgtccccacgttcatgtacaaccggctggtgaggcactgcggcaagggcgcgggcttgaccgagtgcgcggtctgcctcggcatcatccaggtcggcgccatggtcaagcttctgcccgcgtgcagccatgtttaccaccgcgactgcatcgacctgtggctctcgtcgcgctcgacgtgcccgctctgccgctgcagggtcggtcctccctccgagatcggcgccggccaggagacgccccggcagcttgctcaaccttcccctcaaataagatgaatcctcacgcgcccgtcacagatgtttgtactggccacttcagtttctccacactcaacagctgtaagagatcaagccgcacttgtgcagttgtgctgcttaagatccatgttgattagcacagagtaaatttgtttatttacaaggttacatacactttcgttggaaacgtgagcgtatttattacatctca

SEQ ID NO: 152620 - DNA, 441 bp, Zea Mays
atgtcgccgccgccgccgagctcaccaccgcgcacactggccatttctttggccgtgtccctattattcgtctccgccgccatcgtcttggtcacagcaacgacagtattcatgctgtgctgtcgccggagaagggacggtcctggccccgagctcgagtccgggcacagggtgaccggcgcggcggtctccgccatcgatgcggaggcgatccgtcccctacctgcagcagagacgaccctgcgggccttctcttacgccccccaggacggcgagcatggtggcagcgcacttgagtgcgccgtgtgcctcggcgcggtcaaggaaggggagatggtgcggcagctggcggcctgcatgcatgtgtaccacgtcgagtgcatcgaccgttggctcgtcgcacaccacacgtgccccgtgtgccggtcgatcgcagcttga

SEQ ID NO: 152621 - DNA, 1063 bp, Zea Mays
atactctctccacaaggatccaatccatcttggttattcgtccccacgatggcgtccaagaaccaagttgatctcgagtcccagaagcccatgccgacgcacgccgtcgttgcatcggctcccgcagcttccgtgccggcttcttctggtacaggctccgtcgttgctggcatctccgacgctgcgccggagacccagccactcctggctgagccgaacggccacagccaggaggaggggctgggagacggtgggggtaccgacgacgagacaacgcagctggagcgagcaatggcgcaggcgttccggagcaccgccgagctggccaagcacctccccaccggcgcggtgctcgcgttcgaggtgctgtcgccggtgttcaccaacggtggcaaatgcgacgacgtgaaccgcgtcatgacgtcctggcttgtggggctctgcgccgcggcgtgcttcttcctctgcttcaccgacagcttccatgacgccaaggggaccgtgcggtacgcggtggccactcgccgcgggctgtgggtcatcgacggcacgccggcgccgccgccagtggaggccgccgagaaacggatcaagttcatcgacttcttccacgcgttcttgtcggtcatcgtgttcatgtccgtggccatgttcgacgggaatgtcggggcgtgcttcaaccctgtcatgtcctacgacactcggcaggtgctgactgccgtgccgcttgccggagggctcgtcggcacgctgctcttcgccaccttcccgtccacacggcacgggatcggattcccgatccatgcttcctgagatacgcctgttgttgttgctacgaactagcagctgatttctttgggttgcgtgtctccatgttcttagagctaggtttgttgtgccggggtcgtattgggagggttgacaaacacagacagtaccattggttgggaacttcggatattcctggacatgcattattgtttatatttttagcttgcgacctcaagtaattaataccggtgcaaatgtatattatatgcaattattaatttcatacgttcgg

SEQ ID NO: 152622 - DNA, 324 bp, Zea Mays
atgtcgtcagcggcagcggagtatccgtggcgctcgcaggtcttcggcgaagccgtggctgtgcagcgcagcgcgctggtgctcgcttcgtacccgctgttgctgctcctggtcatcctggccgcgttcgtcaggtacctgtggatcgcgctcgccatctactgcgcgctcctgttcgtgctctcgtgcgcctctcgtaccctcgccgccgggccttcttccgctgaggtggggctggtcagccgcggcgggctgtcggccgcggccatcgccgcattcgcgccgggcgttcccgtacaaggcagcggcgtccgcgctcggtga

SEQ ID NO: 152623 - DNA, 1208 bp, Zea Mays
ttgttgtgataagaattaaagaagcataatacctttttcatcacagtaaaatagtaaaaaaaatgaaatatacgtcacaagccctcttcatgttcttccaactaccctaccattactcgatatggcacaggcgacggctactgcgacttcgacagggaaccaccaccgtcctctctaattggcaacggtgacggtgatgctgacgcgatcacctctatcctttccaatgttgcaacgcttctcgccgtcgtcaactgcctgcttgtgctgaacctcatcggcgacggcgacttggatgggacaaccacgatttctgataatcccgatggaggtgacattgagcatctatcttccacccggccagacaactgcggcttcggagacggaatccttgacccaaagtgaagccttggcgatggtgattttgagacgatggtctccttggatttggatccacttgtcgagcaggagcagctgtttctcaacggtgaccgcgccaggatgtccaccaggaccctcgatgccgtggaccgctcaggcgacacgccgcaccgtcgcagctgcggcagtggcggggacatgggcgcctccgccagccgcgcgcgctcgggtttcgggtgcgcgcggcacacggggcacgtcgagtgcgcggacagccaggcgtcgatgcagccaccgtggaagaagtgcctgcacgcgggcagcgcgcgcacgacgtcgccgtcctccatctcctgcaggcacacgacgcactccaccaccgcccggcccggcgtcctgcccttgctgcggctcatcccgccaccttgcggcgacgccgacgcggcccgcgcctggtacgtgaacgtgggcagcgcggcgatgtcctccacgctaagcccgagcctcgtcccggacgcctcggcctcgccctggccgcctccctggagccgttgccactcggccaggactgactggccatggcggatggccacgtacagtatcacgccggtgagcaccgcgatgatgatgtacagcagcgtgaagttggagctgggggtgccgggtgccgttggggcatcgccgaaagagtctggcggcggcgagaccgtggtggacatggctgctgcttcgcgctgctgctccaacgggaacgtccgattccgatgacctggtataaagatgatttcagagacatgtcactaggagccgatcaaatcattgagctt

SEQ ID NO: 152624 - DNA, 828 bp, Zea Mays
caccgaaacccacctccgaccccgtccgctccctccactacttcccaatcatttgccccaaaaactcaaatcctgaaagggatcccggctccccgctcccccctcctgggctacagctctcaaataccgatggccactccccgttccccaatccaacctccagcgtccagcctcaccgcccctcccccgccctcgatttccccccgtcctggcacccgatctcgcgacccgtgatggctgccggttctgcaggcaaggagaacgctgctccttctacttcggacgcaaccgtttcggctgctgcggtgtctcggcggcacgtctacgctgtcaagagctgcggagtgaagaagcgcccgtcgagggcgcggttgctgggccgggtcccgctccgggacatcaccaacctggttcaaacgagcttggcggtcgcgggacctgaggctcctctcgggcaggaggtttcgccggctctggcgacgtagttggccaagcccgatgtggtgctgcggcggtgttgagactagcagcactgctggatggagtcgctgctgccccggcggctaaagcggacagatactccctccggaaggggttcagctaggcgcccactgtacagtatagaacagttcttgcttcgtggcccaatttctcttcggttttggttgcattcgattggactggattggttggttgatcctctattttctgtactcttcttgatagactgagttgtccccaggggaaaataagataaattgcaaaaaccatagattcatctgttcctcactgatgatggcgtcacaatgggtcgcaatttggattcct

SEQ ID NO: 152625 - DNA, 309 bp, Zea Mays
tcatcagccatgaagctcgtcctgtgcttctgcatctgtgtcgttctcgtcatcgcctcgtcgccggtcccgctctctgatagccgccctgcgatggggcgacgctggctgcgagacgaagttgtcattgccaagggccctgaagggaacacgacctctgcctcagcctctgcctggtcggaggaggcgccggggataccgtacgacgggtcgaagaggctcagccccggtggtcccaacccgcagcatcactaatcgtcgtccgatcttgttggcaagtgccactgcggacatcttgctacgggaatc

SEQ ID NO: 152626 - DNA, 363 bp, Zea Mays
atgtcgtcaaggatggcagcggtggcgatggctgcgttcctgttctgcgctctctttgcttggacgtcgtcggaagcggcacgcatggggcggacgggtgatgaggtcgttgttgttgccgccgctagagctgtcaatcgaggtggcagaggaagcggcggcaatgtggtctactgggagaggcaacgacagcagcgcggactcatcgtcggcggccgtcggccgaggctcgcgtcgttcacgccacgtgacgacggtgctggcgaggttggcggctacaagagagaggtgccctccggcccggaccctaaacaccacggcgacccgccacccacgtcggctgctccgacgacgagcccatag

SEQ ID NO: 152627 - DNA, 1698 bp, Zea Mays
cagtggctgccacacccacacctcatcctgagctgctgcagcacctgcaaagctctgcaagcatccagcacaggccacactggccacctctctctcactctcttcactcccacagccgcagtttatataaagcaaaagcggaggagagcaacgcgccacacaagcaaagaacttggccccgcctcccgtctcttaccgcacatgcgcgtcgggccgcgtcgacatagctgcttgccgccgacacccgcagccgcaatggccgtcgcccacgcgccgccgcgccggggcgtgctccccctcctgctcgtcgccgcgctcgtggcggcgttgccggccacctgcgccgcggccaggagcaagaagtcgtacacggccatcttcagcttcggggactcgctctccgacgccggcaacctcatcgtcaacggcacgcccaaggcgctcaccaccgcgcgccctccctacgggatgaccttcttccgcaagcccaccggccgctgctccaacggccgcctcgtcgtcgacttcctggccgagcatttcgggctgccactgccgccaccgtcgcaggccaagggcaaggacttcaagaagggcgccaacttcgccatcaccggcgcgacggccctggagtactccttcttcaaggcgcacggcatcgaccagcgcatctggaacaccggctccatcaacacccagatcggctggctccaggacatgaagccgtccctctgtaaatcggagcaagactgcaaggattacttcagcaaatccctgttcgtcgtcggggagttcgggggcaacgactacaacgcgccgctcttctccggcgtcccattttctgatgtcaagacttacgtgccccttgttgcaaaggctatcgccaatggcgttgagaaactgatcgagcttggggcaacagacctcctggtgcctggcgttctcccaattggctgcttcccgttgtacctgacgctgtacaacaccagcagcaaagcagactacaacgcccggaccgggtgccttcggaggtacaaccgcctggccttccaccacaacagggagctgaagcagcagcttgacgagcttcagaagaagtaccccaagacgaagatcatgtatggagattacttcaaggctgcactgcagtttgtcgtcaaccctggaaaatttggttttagcacggccttgcaggcgtgctgcggcgcaggagggcagggcaactacaacttcaacctgaagaagaagtgtggcgagcagggcgcgagcgtgtgctccaacccgtcgtcgtacgtgagctgggacggcatccacatgaccgaagctgcgtacagaaaggtcgccaatggctggttgaatggcccgtatgctcagcccccaattctcaagtcatgatcgagattactaggctgtgcgtaataccgccgcagctgcatgctgcggctagagatatatatgaggagtgtttcaggcaatagatatgctaagttatggtaaagctatttggtctgttcattggaagatctgtataaactgcgccggtatagatatgttcccagctgaaatggctctagcacagatgtgcatggcatgttctctgattcttttcatttgttctaaaaaaatattgcggcagtaatatgagttgataaaagtaactaaatttctgcaattttatcaggcttcaaagctaccatt

SEQ ID NO: 152628 - DNA, 1719 bp, Zea Mays
aaaaccactcgttgcttctggaacaccaccgcgaaagcaaaggaataacgagccgaggaaatggccacgcggtcactcacctccgcacttccgctctccagaaccccgcgcgtcccctcgcatcgtccctctctccgccgactccaaaccctaacccgcgcgcttacctcctcgtcccctcaggccatggcgtcgtcccctacccccaagaaggtgctggtcccgatcgcgaatgggacggagccgatggaggcggtcatcaccatcgacgtgctccggcgcgcgggggccgatgtcgccgtcgcttccgtcgagccgggggcgacgtccgtagctgcctcatggggcatcaagcttaccgccgacgcgctcctcgccgacctcgcggacgatgagttcgatctcatctctctaccgggagggatgcctggttcttcgacttttggagagtgcaaagttttggagaaaatggtcaaaaaacatgtagagaagggcaagctttatgctgcaatttgcgctgcaccagcaatgactctaggaacttggggtttgctcaatggcttaaaggcaacatgttatccttcgttcattgataaacttccttcagaggtacatgctgtggaatcaagagtgcagattgatgggaagtgtatgaccagtcgtggaccgggaacagccatggagtattctgttattttggttgagcaactatatggaaaggaaaaagctaaagaagttgctgggccaatggttatgcgtcctcagcatggtgtggaattctctatgaaagaggtgaattcaactagttggaatgttggtgaaacaccaaatattctagtaccaatcgctaatgggacagaggagatggaagcaactatgatacttgacattttgcgtagggcgaaagcaaatgttgtggttgcctccttggaagacaagctagagattgttgcatccaggaaggtgaagatgattgctgatgtgctgttggatgatgctcttaaggagcaatatgatctcattctgttacctggaggtctgggtggtgcagaagcatatgcaaaatctgataaactaatggatctgatcaagaagcaagctgcggcaaatagattgtatggagctatatgtgcctcccctgcgattgctcttgaaccacatggcctactaaagggaaagaaagttacatcctatcctgctatgtggaacaaacttgcagaccaaagcgaatgcaacaacagagttattgttgatggtaacctaatcaccagccaaggtcctgggacttctatggaattctcgcttgccatagtggagaaactctttggacgggagagagcccttgagctggccaaatccatggtttttatttgagttgaaatggtacgtgtacgtattaggtttctggagtatgtacttgtgtaaatcgaggcatgctatgttctttttcttgtggaatgtacttcaaatccccttttaaatagaaataagacgaacgcttgtaatgtgtttcatatgcagtaaaaggtttgaggcaaacattaagcgaagacagtcctgaacctcacgttctatgaaatctttttgctcgtttgaagctagcctatattgaaatggggtgtagcagttaggtgacgagcatagcatgttttggctttttagatatagtttttcttatgaacgtagatataaataatgtctagaaactaataaaattaa

SEQ ID NO: 152629 - DNA, 2113 bp, Zea Mays
aaaaccactcgttgcttctggaacaccaccgcgaaagcaaaggaataacgagccgaggaaatggccacgcggtcactcacctccgcacttccgctctccagaaccccgcgcgtcccctcgcatcgtccctctctccgccgactccaaaccctaacccgcgcgcttacctcctcgtcccctcaggccatggcgtcgtcccctacccccaagaaggtgctggtcccgatcgcgaatgggacggagccgatggaggcggtcatcaccatcgacgtgctccggcgcgcgggggccgatgtcgccgtcgcttccgtcgagccgggggcgacgtccgtagctgcctcatggggcatcaagcttaccgccgacgcgctcctcgccgacctcgcggacgatgagttcgatctcatctctctaccgggagggatgcctggttcttcgacttttggagagtgcaaagttttggagaaaatggtcaaaaaacatgtagagaagggcaagctttatgctgcaatttgcgctgcaccagcaatgactctaggaacttggggtttgctcaatggcttaaaggcaacatgttatccttcgttcattgataaacttccttcagaggtacatgctgtggaatcaagagtgcagattgatgggaagtgtatgaccagtcgtggaccgggaacagccatggagtattctgttattttggttgagcaactatatggaaaggaaaaagctaaagaagttgctgggccaatggaggactgtctcattatattaagaagaaagaaggttatggggccagaaaacagcccaaacacaggagcctccttacggaggatgaaaacatgaaaacataaaaggactcataaggaacctataaacaacatcctcacatcaagtaagacagggagagagaaactagactgcagggtgccgggcagccaaggcccaagttgtttcgactaaaaaggctttgttgtgttttcttgcaactttcctgcatttgattcctgtttccatcatattagttttgaagtagtagtttttttgttgacatttgcaacatctcttgttctttgtttttttactatagttgatgtatttttgacagctgttaattctattcaactaagtgaatattacctttcaggttatgcgtcctcagcatggtgtggaattctctatgaaagaggtgaattcaactagttggaatgttggtgaaacaccaaatattctagtaccaatcgctaatgggacagaggagatggaagcaactatgatacttgacattttgcgtagggcgaaagcaaatgttgtggttgcctccttggaagacaagctagagattgttgcatccaggaaggtgaagatgattgctgatgtgctgttggatgatgctcttaaggagcaatatgatctcattctgttacctggaggtctgggtggtgcagaagcatatgcaaaatctgataaactaatggatctgatcaagaagcaagctgcggcaaatagattgtatggagctatatgtgcctcccctgcgattgctcttgaaccacatggcctactaaagggaaagaaagttacatcctatcctgctatgtggaacaaacttgcagaccaaagcgaatgcaacaacagagttattgttgatggtaacctaatcaccagccaaggtcctgggacttctatggaattctcgcttgccatagtggagaaactctttggacgggagagagcccttgagctggccaaatccatggtttttatttgagttgaaatggtacgtgtacgtattaggtttctggagtatgtacttgtgtaaatcgaggcatgctatgttctttttcttgtggaatgtacttcaaatccccttttaaatagaaataagacgaacgcttgtaatgtgtttcatatgcagtaaaaggtttgaggcaaacattaagcgaagacagtcctgaacctcacgttctatgaaatctttttgctcgtttgaagctagcctatattgaaatggggtgtagcagttaggtgacgagcatagcatgttttggctttttagatatagtttttcttatgaacgtagatataaataatgtctagaaactaataaaattaa

SEQ ID NO: 152630 - DNA, 1447 bp, Zea Mays
gatcaggtacatatcattcattgttacctacaggtggttatttttactcgagccattattatttatctgtctactgaaatgaacacacgtagattttatgctaagtggaaagtcatcttttcatggcatttgcaaactctgatgaccgtacagaatgttttggcaaccttctcgtttcctttttgtgctctctatgaccataaactccattccttgtgttgttgaccttttgctgtcttcaaaatgcaaatctggtcatttgttttcttacattatatttgtgtaagatcagtgtttataagaaccatgtttatgtcacaaatctaattgtaaacaaaataggtaaaagttctagaagtttgacgtcgaccaaatgtgccagtaaattttgtgattagatctaggactcttcagtgtctcagaagatgcagagcatgcactttaccatggcattttgttgttgattgtctgctttgtactgtgccactgcattgaaatctgagttaaaatacatagcactggatctcaaagttggagctattgatgactgcctgtacagattctagtaccaatcgctaatgggacagaggagatggaagcaactatgatacttgacattttgcgtagggcgaaagcaaatgttgtggttgcctccttggaagacaagctagagattgttgcatccaggaaggtgaagatgattgctgatgtgctgttggatgatgctcttaaggagcaatatgatctcattctgttacctggaggtctgggtggtgcagaagcatatgcaaaatctgataaactaatggatctgatcaagaagcaagctgcggcaaatagattgtatggagctatatgtgcctcccctgcgattgctcttgaaccacatggcctactaaagggaaagaaagttacatcctatcctgctatgtggaacaaacttgcagaccaaagcgaatgcaacaacagagttattgttgatggtaacctaatcaccagccaaggtcctgggacttctatggaattctcgcttgccatagtggagaaactctttggacgggagagagcccttgagctggccaaatccatggtttttatttgagttgaaatggtacgtgtacgtattaggtttctggagtatgtacttgtgtaaatcgaggcatgctatgttctttttcttgtggaatgtacttcaaatccccttttaaatagaaataagacgaacgcttgtaatgtgtttcatatgcagtaaaaggtttgaggcaaacattaagcgaagacagtcctgaacctcacgttctatgaaatctttttgctcgtttgaagctagcctatattgaaatggggtgtagcagttaggtgacgagcatagcatgttttggctttttagatatagtttttcttatgaacgtagatataaataatgtctagaaactaataaaattaa

SEQ ID NO: 152631 - DNA, 1929 bp, Zea Mays
aatactcagcaaactcctgccatcctccctcccccttccctcctcctcctcctcctctaactcgatcacacctccatccatctcacaacaatggcatctgcattgtcgtcgttgggaccaacagcgcttctgatctgtgccctcctctgcacctttctgtcttcagaggtgggctttgtgcggcaggccacggcgctgggcatcaactacgggcaggtggcgaacaacctgccgccgccggcgcaggtggtgcagctgctctcctcgctccgcatcggcaaggtgcgcatctacgacgtgaacccgcaggtgctgacggcgttcgcgggcacgggcatcgagctggtcgtgaccgtcccggacgacctggtcccgggcatggcgagcagcgcgtcgcaggcgctgcagtgggtgagcgccagcctgcggccctacttcccggcgacgcgcgtgacgggcatcgcggtggggaacgaggtgttcacgggcgacgacgagcagctcaaggccagcctggtgccggccatgcgcaacctgcacgcggcgctggcgcagctggggatggacgcgtacgtgcgcgtgtccaccgccaactccctcgccgtgctcgccacctcctacccgccgtcgcaaggcgtcttcacgcaggctgccgccccctacatggcgcagctgctgcggttcctcgccgagaccagctcgcccttctgggtcaacgcttacccctactttgcctacaaggatgaccccacaaaggtgtcactggactacgcgctgtcgaacccgtcccacgtgggcgccgtggaccccttcaccaagctgcagtacacgagcatgctgtacgcgcaggtggacgccgtgacgttcgcggcggcgcggctgggttacggcggcgtgcccgtgcacgtgtcggagacggggtggccgtccaagggcgacgccaacgaggccggcgccacggtagagaacgcgcggcaatacaaccggaacctgctcatgcggcaggtgagcggcgagggcacgccgctgcggcccaggctccgcctcgaggtctacctcttcgcgctcttcaacgaggacatgaagcccggccccgcctccgagaggaactacggactctaccagccggacatgagcatggtctacaacgtcggactctcccagctcgccaccacgtcggccgcctccctctccctcgccacgtcgccagcagccaggaccacggatgttgggaaggactatgccggcctatgcctcgtcgccgtatctgtggccatcctgcttatcacccaacaaggatcgctcctcctgtgaccgcaaaaagcgcgcgcccgcccactgccaggcctgcagaatggcctggcttttgtggaccaaaagcctccaagaccaaaggggagacgcaccgttcaaatccaagggagaaaaaagctaggacgagggggcgatgtggaagccactatcttgaggacagaaacagcgtgtataagctatttgcgaggccattttctagcacacaccagactttattccttggttacttgcagaggagatcaggagaaggaaccaggaaaactagttcgttctgagaagatttatgccaggaggaaaaagggtggcctgcgctgcttgggagaactggcgtctccttctcagcgagaagagagctggctttattccccttgcgttgacaagcccgtggtctaggcctcttctgatgcgaattttagctgtacataccaattggttcattcgtttatttttagctccatttagcttgaccattctgccctcatcccccggggtggttggtcgaaatgagaggccagtggcccagtcatgtaaataactcgagtaaacaaatgaggcagctattgcatcttattgtaatctgtttaaaaactatgacattatgaagtcctcattgtt

SEQ ID NO: 152632 - DNA, 897 bp, Zea Mays
atgaaaggcaaggagaatggagagcattatgaattgtcacctcaggttttaaatgaatgggctcctaaatcggctgccagaaatggttctggagaccacaacaacggatcacctgtggttactggccatcaagacaacatgatactagaaggaaaccctaaaatcactccagttgtgcccaagagcatacacgatgggaagaaacctccaagggaaaactgcaagaccattccagttgtgccagagaaagagattaatgaaaagaaggccagtacttacagaaccattccggtcataaaggaaagtgatgagaagaagattggcatgagggaaaagagggagtcaaaggaggccaacagtgctgaaatggttgaagagaacaggaaaaaaaaacacaatgactcatcagtagttaagcattcaaaattgcccccagtatgcttacgtgtggatcccttgccaagaaagaaacctggaaatgattcttctaggtctcctagtccaccaaggaagaatactgacaacacgaagaaggacgtggaggaggcccagagccagatcctggagcctaaacagtctagtacaagtaaggatatcactgtgtctgaagaggaagaagctcccacaagtaaagatggccaaaaggtccaagctgctagcactacagttggtgatcaagaaaatgcagacctgaagagcatagaggaagatcatgtgcaagaaaatgctggtgcaggaagcttgaatggatgtgacaaaagaaaaaatgaagatgggacagtgattgaaagtgaaactgcgaaagatgatgccagaacatatggagttaatttgtcagaatcagatgttgcagttcgtattcaatctgcctacagagggtatgatgttcgaaaatga

SEQ ID NO: 152633 - DNA, 318 bp, Zea Mays
atggaagagctcggccaccagggtgaggagcggcgtccagcagggggggcgagcaccagcgagggcgccgtgagggagatagggctgggcgagtggagggggctcagttgggcgctgcttgctgcagaaaaggggaggagatgggggcgcctgcacaagggaagaagggagagaggatggacgcctgggaaccctgcgccatgggaaggtgctggtgcagagagttggggaaggaatggcgtcggcttgctgcaggaacaaggcagagggaggcggcgtgagataaggctcccaggtaatcaatgccttccagaataa

SEQ ID NO: 152634 - DNA, 783 bp, Zea Mays
atggcgtgtcgctctacgccgacctcctcctccatctgcttgtattggtcggtgtactacgccgaggggattgggaccggcagcggcagccaggagtggaaggccaacctgagctgggtgctcgccgccctcgccccccgccggagcagcagcaggtgcctcgtgctcgcgcacctgcgccgacccacctcccggatcaacatcaccagcgcgtcgcacgacattgctgccctcgttgtttacttcgcgtttggatctgtggctgaggagctgcgggttggttggcctgtggccatgcagatgtcgtccgaggcgtcgaaggtggcggtgccggagtcggtgctccgcaagcggaagcgcgaggaacagtgggccaccgagaagaaggagaaggctctggtcgagaagaagaagtccatcgagagccgcaagctcatcttcacccgtgcaaagcagtacgccgaggaatacgatgcctaggagaaggaactggtgcagcttaagcgcgaggcccgtttgaagggtggtttctatgtcagtcttgaggcaaagctgctctttgtggtccgcatccggggtattaatgccatgcaccctaagaccaggaagatcttgtagcttctgcaattgaggcagatcttcaatggcgtgttcctcaaagtcaacaaggcgactattaacatgctacacagggttgagccatatgttgcatatgggtaagttttcttgctgatttaattcttccgttgccgcttatctctactactctatatgaaggtattg

SEQ ID NO: 152635 - DNA, 1404 bp, Zea Mays
tcactttcctcgtgtttttcttgcctgtctccatactcatcgatcggttgctttttgtcgtcagttcttttgaggagctgagctacaatcaggcaagggatatttccgagatcttagctaggttttacagggaggaatgcatccaggtgttggaccattgtcggtgccaccaggcttccgcttccatccgactgatgaggagctcctctactactacctgaggaaaaaggttgcttatgagcccatagatcttgatgtcataagggagattgatctcaataagcttgagccctgggatctcaaagaaagatgcaaaataggcactgggcctcaaaacgagtggtacttcttcagccacaaggacaagaagtacccaacgggaacgagaacgaaccgtgccacgacggcgggattctggaaggcgactggccgagacaaggccatcttccttggcagcgccaggaggatcggcttgagaaagaccctggtgttctatatcggcagggcgccgcacgggaagaagactgagtggatcatgcacgagtaccgccttgatgaagagaacgttgaaattcaggaagatggatgggtggtatgtagggttttcaagaagaagaactatgagcagagaggccacaacatggctgagatggcggcactggacgacgatgagctccagcctttcacggttcctgtcgtccctgctggcactagctccctgccaacaacagaccacaagaacaaccctcacctcatgcaatatgacttcccttctttcgacccttccatgcagctcccacagctgatgagcgccgaccagcccgtgccaaccctattccccagccatcctggcgtcgccacggccatgagctcatcaatcgacgttgagtgctcgcagaacctgctgacgatgctgacatccaacggcagcgacgggatgctccacgtccgcgctggtggtgctggagctggtgtcgaccgcttcgctggcacgacagattggtcgatcctagacaagctcctcgcctcgcaccagaacctcgaccagctcttccacggcaaggtcaccgcagcatctgcctccccaatggctccataccatcagcagctcatggaactcggtggctcgtcgtcgtcgtcgtccttgcagaggcttccactgcagtacctcagcggcgagacgaccgatctcctcaggttccccaagtaattattggatcgacctcaagtttagctaccttgttgagcagtgaccatatcaggattttggttgactactaggctgcttaattcggcctacttcgtatggagtttagtgcttttaaatgtatatatggtgcaactgtttggggcatgcaggcatggaatgccatcgatctaccatggttgcttgcttggccaaga

SEQ ID NO: 152636 - DNA, 834 bp, Zea Mays
ctctaaacctctcgctaccttccccgtccctactggcggcagcctagggctttccctaagcttctccatcccaagatcaagatgcctccgggaaagaaggggtcacgatgcatactaaatccccagcgacaagaaaaatataaagatacccaaccaagtgcaataaatcttttcaaggagatgtattgcggcaagaagaaatgatttagtaaaattgttcagaaagctattgatgatatggaagcaatggtggcagcatcagttgaagttagacaacttgtgatgtcttctacaagttgtttctcatgtcttgccgagctcaagtaaattccttcacaatgttggccttcagcctgcctccaagacaagctctatttcagcaaaggtgcacgagcttcaatctcaattggagaccaagagacaagaaaaagatggacttaggcaagaaatggaatccttaaaggctacatcacaagaatttatgaccactattgctaatcaaacaattgagatcgagaatttaaagaagtcgctagcagaaaataatagccttcttcgtcagatactaagcaccaatcgaggcatgtctcctccttaagattgttgctatagtcgaccatgccaatgttacatccaacaacactggactacttttttattagttgtctatttagtctgatcatattgatactatagtagctgtgtgcagcttgtggcggttgaacatgtcctacttttgcatttaagttatagaaaagttgtgtgtgttcatgttgtttgatgaaattgtatgcacggtttggattgaattcaattatatactgattttattaa

SEQ ID NO: 152637 - DNA, 395 bp, Zea Mays
gatgttcagtgctgctcgtgtttggtggtggggaggactgcacagttcgcatctggagcatcaaaacaggcaagctaatctttgcgcggagcatggcagacagtcccttcacaacatcttattggcccgaaagcacagctggggagcttggttgggtgaatgaaggacatcgtctttggaagtcagacatcacctagagctagggtgtccattcttgacatgtttctcttagtgataggtggataatgtctagctaggaacagagtcttgagggattgatggacgcatgcatcttcaattcctgtgtgttgtattactactggtacaatcttgaattcttgtgaacttatgtatttggactgtgaatttgtgatatgaacatatatcaatgtgtt

SEQ ID NO: 152638 - DNA, 298 bp, Zea Mays
aggggttggggacacatatttatagccctaggggctgcactaccacaccttctcacacacactacacaacaggattgtcctctagatgctaaagagactacagaggacagtcaaaagcgattgttgtcctctagatgctaaagcgactacagaggacagtcaaaaagcgactgttgtcctctagatgctaaagagactacagaggacagtcaagctgtcctctagatgctaaaggactacagaggacagtcaaaagcaggctgtcctctagatgctcaagacttattccatcattctc

SEQ ID NO: 152639 - DNA, 88 bp, Zea Mays
catactcgggttcgtcgctcaacgctatactggagtctgaatatttggatttcttttgagattctggtggtcaaaagctggaagctaa

SEQ ID NO: 152640 - DNA, 921 bp, Zea Mays
ctggtgtatcggattccttgaggaaatcccaaccacactatttaatatatctgccatgtaggttgttgaacagggtttcgcagccctcgtagcaatggtgcaagcttgggagagctctgcaccagatgaaaacaagacacctgagaagaggttctggcagtcaggccagtctgctattgcccaaacaatttcattactgttacaaaaagcttggttgtttcaagctgacaatatggagggctctgcattaccacctctgtcatgcgtaaacgatgcttctgtgttacttgagtttgtcatgagttctgtcacttgcatggaagaaactgaaagtctgaaggtctttgagctggtagctacatgggctgacgctattgccaactgggactcttgggaggagatggaggatcagggtgttttcaacacaattaaagaagctgtcaattttcaccagagatttgacctcgacggtctcttcctgaaaacgcactttgtgagatgtcattccactagctaaaagtttgcaaaaatggcaccatcaagatcggtctggagaccaacaagatcatggacttcatcaagtttgacgtcggcaacgtggtcatgatgaccggcgggaggaacacctggcttgtaggagtgatcaagaacagggagaagcacaagggtagcttcgagaccatccacgtgctgcttagagctttttgctatgtctagttttctcctatttgttgtacaggaaaacatagaatggaattcaaatttggtggccgcaaaatgtggagacttgaattcatataaagttaggcttaacattagtgcaaacaattgtattttagtttagatttagagtacacttatgtatgtgttgtttgacaatgcttatttatgatatattgaatggtacttatttatattata

SEQ ID NO: 152641 - DNA, 949 bp, Zea Mays
ctggtgtatcggattccttgaggaaatcccaaccacactatttaatatatctgccatgtaggttgttgaacagggtttcgcagccctcgtagcaatggtgcaagcttgggagagctctgcaccagatgaaaacaagacacctgagaagaggttctggcagtcaggccagtctgctattgcccaaacaatttcattactgttacaaaaagcttggttgtttcaagctgacaatatggagggctctgcattaccacctctgtcatgcgtaaacgatgcttctgtgttacttgagtttgtcatgagttctgtcacttgcatggaagaaactgaaagtctgaaggtctttgagctggtagctacatgggctgacgctattgccaactgggactcttgggaggagatggaggatcagggtgttttcaacacaattaaagaagctgtcaattttcaccagagatttgacctcgacggtctcttcctgaaaacgcactttgtcactcaagcagatctaaagttattctttgagtccatatgtggtgagctaaaagtttgcaaaaatggcaccatcaagatcggtctggagaccaacaagatcatggacttcatcaagtttgacgtcggcaacgtggtcatgatgaccggcgggaggaacacctggcttgtaggagtgatcaagaacagggagaagcacaagggtagcttcgagaccatccacgtgctgcttagagctttttgctatgtctagttttctcctatttgttgtacaggaaaacatagaatggaattcaaatttggtggccgcaaaatgtggagacttgaattcatataaagttaggcttaacattagtgcaaacaattgtattttagtttagatttagagtacacttatgtatgtgttgtttgacaatgcttatttatgatatattgaatggtacttatttatattata

SEQ ID NO: 152642 - DNA, 729 bp, Zea Mays
atggcacttgaaccacaacatcctgtctccgttgcgtcgtgcgcagagatgtcagggaccaaggcagcctccagggcgctgcttctggggtctaccatggcattgagcagctctaggaagtcgccgccatggaggtgtggtgaaggtccatccatggcgatcgtgcttagggagggagacgagcaatcatgcttaggtagggagggagctgagggatacgagaaatcagggagacgaacatttcatctgggttttttagtaaaagaacacgggcagcatgtgcttataaacaagagcaatacaggtcaaaatagattgccaggtcctaagatgtatgacatgaacattggaacaattagatatgcgagtgtccatgcccatttggggagcactggtagtaggagggatgatttagagttactggcatacacccttattttcttgataagaggaagattaccttggcaaggctaccagattgtcacaaatatgaaatttgacgaagagccaaattatgccaagcttatctctctttttgatggtttgattgaagcgcctgcttcgagacaaatcggaactgatggggctctcaaggttggacagaaacgtggaagattgcttgcagatctagaagaagatgaacaacctaaaaagaaggttagattagggaacccagtggctcaatggatttcagtttataatgctaggcggcccatgaagcagaggtag

SEQ ID NO: 152643 - DNA, 533 bp, Zea Mays
gagagaataatggtcatcatgttgattatgatcaacggcctgatatctttagtggaacaattagatatgcgagtgtccatgcccatttggggagcactggtagtaggagggatgatttagagttactggcatacacccttattttcttgataagaggaagattaccttggcaaggctaccagggagataccaagagtttccttgtttgcaagaagaaaatggctacaactccggagatgctttgttgttattgtccaactccattcaaacaattttttgagattgtcacaaatatgaaatttgacgaagagccaaattatgccaagcttatctctctttttgatggtttgattgaagcgcctgcttcgagacaaatcggaactgatggggctctcaaggttggacagaaacgtggaagattgcttgcagatctagaagaagatgaacaacctaaaaagaaggttagattagggaacccagtggctcaatggatttcagtttataatgctaggcggcccatgaagcagaggtag

SEQ ID NO: 152644 - DNA, 360 bp, Zea Mays
caatttttgtggtgctgttagtgcaggagatatccagagccacctgccagaagaaagcagaggaagaaaaaaacaaaacaaattattagtcggtgtatggatatacagtggtatacggccagaaaaagtggaagaagagcacccgtacaagcatctacggatgaccaaattggcatggccacaagcactgaagtttattaggattattattcatttagatcaaattagttcctattttctagagtaagtcagttttatgtttggtcagggataaactagaaagtgaagttgtttagatttttatggagtcggttcctattttctagagtgagtcggttgtagatggattataaagcctta

SEQ ID NO: 152645 - DNA, 950 bp, Zea Mays
ttttcctacacgagtttaacagataccggaatttatgcggtgaattttctttcgcagtggcaaatctgttcacaccgaagatcgctgagttttacgagaactactatgcatcgaaaggagtcacttttataaaaggaactgcagtttcatctctgcagatctcgtctgagaaggtgacggcagcaatcctgcgagacggcaggcgcctacctgcggacatgccaaggagtaccgcgccacgctcgagttctactgggcgcccttcctcgtcgagtccaactctaacaaccccaacttccacagtaccaaggaatagatcgtcagtcccgagcggatcgagacgcacgccaatcgagacgcacgccaagcaatgtcattttcgcttagcctcttgtgctgctggtgggggattaagaactactgcagaatgtgttaagatagcgattggttattcggacttgctggaagctcgtggtctatcactttcgtcagttctgatgaagcaattcagaccctctgttgagcaagcattagattccaatttgaggagaattgaagagagtactgctgctttagctgcagctgatgactggatactcacctatcctccaacgggtatacgtccactggctagatcatctggtaatctggcactccagccgaagctctcaagcagtgctcaccgtttcaattcaatggttcaggatttctttggggatgttggaccactggttagcttacagctaggtggttccgcgatggatgggcttctgaaaatattcaactcgtatgtaaacttgctcataatggaaactggttgtttaagcaccagatacctcaccgagaagttcccatcagctcaagctgttgggctcgacctatcaccgtactttcttgttgtggcggcacaaaaggaagaaaaactgtcacggccaaagcctattcgctag

SEQ ID NO: 152646 - DNA, 617 bp, Zea Mays
ttatccatgcggattgaagaggactatagtctatagatcatatgctcatttcaaaatcaagggcaatttgattcaattaagtctaggatgatgatgtaagttcattgtaatcccctctttggggtatgttattttgaacccttagaccccaaagaagtatacccatgtttgtatatatgatactaccacacacggttatcacttatttgtgcatcaacatgattaatccaccacaattatttttctgaaatgctttcttgttgtcaattacttttagtacctaggatgaagtttaagagctgccagctgatttcagttttagagttgccagatttattttttagagccgccagatttcagtttcagagctgcacgatgaatccacacttgattatattttctcttctgtttcagagctgcaagatttctacaaaattggaagactatgctaccaaaaaaaagcttcctaatttacctaagatgaagttcagtattgtttaggatgagtcatatgtttatatttttgtgtctccaaaaatatttgtacatgtatcaagtggtggtgattattttaagttgtggtactctatatattgactattttatttcaatgagaa

SEQ ID NO: 152647 - DNA, 113 bp, Zea Mays
gggaaatttgttttaaatatacaatgcactcacacattatgtttatgttaaggaaatattattttggatgtgaagtcaaaattaaagtatatttcaaagttcatattcatttg

SEQ ID NO: 152648 - DNA, 3108 bp, Zea Mays
ttaaaccctaaaccgtctgccggccgccatgcggcgccaccaccacctcttcgttatcctccgccgcgcggtcgcctcctctgcctcccagcgcgcgcagccccttcccttgctccactccgttgcgctccgaaatggcgcagctggttccttctccccgtgcttcttctcctcccgcgcccgttcctcggtcggcgccgcgaagagccttgtggaagacgaggcggagctcagcgactggattagcgacctcaaaactgactcgttccacctcggtctcagcagcggagacgaaggcgatgcgccgtccacccgcaggtcctcggtcggctcatccaggggcggccgaggtgggtcggactccaggggttcgttcccgaggtcaagtacggccggcggtgagttcagtggagacagacgcggcggcttcgagcagagggggaggatgattagtagtggactggatgatgctgattccggctttggttcctccaggggaaggcggggacggggtgagaggacgtcggggttcgtgagaagaggagggagggggaatggatttgatgaggaggccacatttaggtctcctagggagcagcgaagccagcgagggagggcttcaggtgtggcgagaaggggagggaggtacagtgactttgaccaagatgatggtgacactggatttgggtcttcaaggggaagacacggtgccagtggtcaactgtctgtatcctcacacagaagaggaagggtgagtgatttagatgacgatgaggatagtgatgatgatttggttgggtttggggatcttgatggaaagcagcatcatggtcgcaggaaagggggaagggaaaacacagttgggctgggccgaggtcggggcaggagggatttgggtctgtcacgaaagggagggagttacaatgattttggtgattatgatgacggaaggagaaggacgtccgatcttttgcagagaacagggagaggaagcgatttagatgacgatgaagatgatgatgctggtccagttgggtttgatggttacagtgtaaggcagcaaggtggcaggagaggcaaaatggcgaagagtgttggaccacatcggggtgggaggggcagcgatacggactttggtcaccgacagccaaggggtctgaaaaaaattgactttggcttgtcagaggatgatgatgaggcgggggaagttgatgaggaagatgagccatcggggttcgaagatgatctttttgaagacgagggtgataaggaggatgtgggacatataataggtaataagtctggctcatctatgttacccgaagatgagccagctaaaaatgaaagtgtacagggcagaagtgctgggggtggtgattcttatctgagccagaagaggtttgatgaatgcccgttatctcccttgtcactgaaaggtgttaaggctgctgggtatgaacggatgactgctgttcaggaggctactcttcctattatacttcaagggaaggatgtactagccaaagcaaagacaggaactggaaaaactgtagctttcttgctaccagcaattgaagttgtttcgaaattgccacctgttgatcgtgatctaaagaaacctcccatcagtgttgtagtagtgtgccctacacgtgagcttgctgatcaggctgctgcagaagctaacaagcttcttaaatttcatccatcaattggagtacagcttgtaataggcggcactagaatggcacttgaacagaagcgcatgcacactaacccttgccagattctagtagctactcctggaaggcttagggatcacatggagaacactccagggtttgctacaaggttgttgggtgtcaaagttctaattcttgatgaagctgaccgcttgttagatatgggattccgatcagatattgaaaaaattgtggctgcactaccaaaacagcgtcaaacacttctattttctgcgacagttccagatgaggttcgtcaagtatgtcatattgccatgaaaagagatcttgaattcgtcaacactgttcaagaaggaagtgaggaaacacactctcaggtgaagcaaatgcatttaattgcaccactggacaaacaattctccaacctatatggtcttctaactgatcatatttctgaaaatgttgactacaaggtgattgtattctgtacaacagcaaaagtaacaagccttgttgctgagcttctgtctgagttgaagttgaatgtacgtgagatccactccagaaaacctcaaagctacagaactaggatatcgaaagaatttaaggagtcaaagggtctcattcttgttagctctgatgtatctgccaggggtgttgattatcccaatgtcacactagttgtgcagttgggggtgccaactgacagagagcaatatattcatcgacttggtagaactggtcgcagaggcaatgaggggacaggaatcttactattggcaccatgggaagaatatttccttaggagcatcaatgacttgcctattacagaggcaacacaaccattaattgatctggatactaagaaaaagaggtttctattcttttgataaacccatctgggttttatcttcatcagcagacatgaaggtcgataaggctcttgcacatgtggaggttaaagacaaggaatccgcttatcaggcgtggcttggttactacaattcaaataaggtcattgggcgcgacaaataccagcttgtatcacttgccaatgagttcagcagaagcatgggtctcaacaaccctcctgcagtgtctaagcttgccctcaggaagatggggctgaacaacattccaggtctgagatcaaagtaaccaattgccatgtatactgtatacatgtcttgaagtcttttttgcacatgatctgacatctgagcacgctattccatactgatcgagttgagttagtttctggtaataaatttattgtacgttttatgcttgcagaagtgcacgaatattcataatatgttctcattcgtttgttctgttactgagataacaaatgataaagatgaacgtgttttgctattagtctcaagtatatgttgttgaatat

SEQ ID NO: 152649 - DNA, 3062 bp, Zea Mays
ttaaaccctaaaccgtctgccggccgccatgcggcgccaccaccacctcttcgttatcctccgccgcgcggtcgcctcctctgcctcccagcgcgcgcagccccttcccttgctccactccgttgcgctccgaaatggcgcagctggttccttctccccgtgcttcttctcctcccgcgcccgttcctcggtcggcgccgcgaagagccttgtggaagacgaggcggagctcagcgactggattagcgacctcaaaactgactcgttccacctcggtctcagcagcggagacgaaggcgatgcgccgtccacccgcaggtcctcggtcggctcatccaggggcggccgaggtgggtcggactccaggggttcgttcccgaggtcaagtacggccggcggtgagttcagtggagacagacgcggcggcttcgagcagagggggaggatgattagtagtggactggatgatgctgattccggctttggttcctccaggggaaggcggggacggggtgagaggacgtcggggttcgtgagaagaggagggagggggaatggatttgatgaggaggccacatttaggtctcctagggagcagcgaagccagcgagggagggcttcaggtgtggcgagaaggggagggaggtacagtgactttgaccaagatgatggtgacactggatttgggtcttcaaggggaagacacggtgccagtggtcaactgtctgtatcctcacacagaagaggaagggtgagtgatttagatgacgatgaggatagtgatgatgatttggttgggtttggggatcttgatggaaagcagcatcatggtcgcaggaaagggggaagggaaaacacagttgggctgggccgaggtcggggcaggagggatttgggtctgtcacgaaagggagggagttacaatgattttggtgattatgatgacggaaggagaaggacgtccgatcttttgcagagaacagggagaggaagcgatttagatgacgatgaagatgatgatgctggtccagttgggtttgatggttacagtgtaaggcagcaaggtggcaggagaggcaaaatggcgaagagtgttggaccacatcggggtgggaggggcagcgatacggactttggtcaccgacagccaaggggtctgaaaaaaattgactttggcttgtcagaggatgatgatgaggcgggggaagttgatgaggaagatgagccatcggggttcgaagatgatctttttgaagacgagggtgataaggaggatgtgggacatataataggtaataagtctggctcatctatgttacccgaagatgagccagctaaaaatgaaagtgtacagggcagaagtgctgggggtggtgattcttatctgagccagaagaggtttgatgaatgcccgttatctcccttgtcactgaaaggtgttaaggctgctgggtatgaacggatgactgctgttcaggaggctactcttcctattatacttcaagggaaggatgtactagccaaagcaaagacaggaactggaaaaactgtagctttcttgctaccagcaattgaagttgtttcgaaattgccacctgttgatcgtgatctaaagaaacctcccatcagtgttgtagtagtgtgccctacacgtgagcttgctgatcaggctgctgcagaagctaacaagcttcttaaatttcatccatcaattggagtacagcttgtaataggcggcactagaatggcacttgaacagaagcgcatgcacactaacccttgccagattctagtagctactcctggaaggcttagggatcacatggagaacactccagggtttgctacaaggttgttgggtgtcaaagttctaattcttgatgaagctgaccgcttgttagatatgggattccgatcagatattgaaaaaattgtggctgcactaccaaaacagcgtcaaacacttctattttctgcgacagttccagatgaggttcgtcaagtatgtcatattgccatgaaaagagatcttgaattcgtcaacactgttcaagaaggaagtgaggaaacacactctcaggtgaagcaaatgcatttaattgcaccactggacaaacaattctccaacctatatggtcttctaactgatcatatttctgaaaatgttgactacaaggtgattgtattctgtacaacagcaaaagtaacaagccttgttgctgagcttctgtctgagttgaagttgaatgtacgtgagatccactccagaaaacctcaaagctacagaactaggatatcgaaagaatttaaggagtcaaagggtctcattcttgttagctctgatgtatctgccaggggtgttgattatcccaatgtcacactagttgtgcagttgggggtgccaactgacagagagcaatatattcatcgacttggtagaactggtcgcagaggcaatgaggggacaggaatcttactattggcaccatgggaagaatatttccttaggagcatcaatgacttgcctattacagaggcaacacaaccattaattgatctggatactaagaaaaaggtcgataaggctcttgcacatgtggaggttaaagacaaggaatccgcttatcaggcgtggcttggttactacaattcaaataaggtcattgggcgcgacaaataccagcttgtatcacttgccaatgagttcagcagaagcatgggtctcaacaaccctcctgcagtgtctaagcttgccctcaggaagatggggctgaacaacattccaggtctgagatcaaagtaaccaattgccatgtatactgtatacatgtcttgaagtcttttttgcacatgatctgacatctgagcacgctattccatactgatcgagttgagttagtttctggtaataaatttattgtacgttttatgcttgcagaagtgcacgaatattcataatatgttctcattcgtttgttctgttactgagataacaaatgataaagatgaacgtgttttgctattaaagaaaataaagggatacaaataaatgaagataataa

SEQ ID NO: 152650 - DNA, 91 bp, Zea Mays
tctgggagatcaatttcatccctgcgttgatggttatacattgattcaacagaggtttctattcttttgataaacccatctgggttttatc

SEQ ID NO: 152651 - DNA, 97 bp, Zea Mays
gagtagaatcacccttctatcaaaagtgcttgacattgccaaaacatttcacaatttattgttgagaacccatgaattaccatctacatcatcctgc

SEQ ID NO: 152652 - DNA, 1778 bp, Zea Mays
agatcaagctagctttgcaaaggtagatgagcttgtttcagatgacggggcggcatgagggtgccaaggaagggggcagtggaagggttgcgatgtggctcctgctgcctcctcttttcgtgctgattgtgctcaagactgatttcctgccacaggtcgtcgtgcacacggtttcatacgctggtttcgacaatgcaagatggcagcaacatccacatgacccagaagcggtaaaagagtacaaccaccaaaatcagattcttgccactaacgggcctcatgaggatagttcttcaataaattcagacacgggagcctcagtcagcaagttaacctgcgacttcggcaaccctcactcggacacctgcacaatggaaggcgacctgcgcatccacggcaaatccgcgacagtctatgttgtggcagcatccacccacaggccggagaactctacgatcacggtccgcccgtacacgcggaagtgggagcaggagaccatgtcgaggatccgagaggtcaccatgcgatccatgccgccagctttcagtttcgtcatcccgcccaagtgcacggtgaggcacgacgtgccagcggtggtcttctccaccggtggctgcggcacgaacttcttccacggcatgagcgacctcgtcgtcccactctacatcacatcgcgcgagtacgacggccgcgtccagcttcttatcgccgactacaacgctgaatgggtcgccaaattcaggccggtcctcgccgcgctgtccacgttcccagtcatagacttggacgccgacgccgccgtgcgctgcttcccgtcggtgcatgtcgggttagagagccacaagaagatgctcgcgatcgatccgagtctctcccgcaacggctacactatgatgggattccgtgacttcctgcgttctgtcttctcgctgcagcggccatgggcgacaccagtaaggttgggctcaggacagaagcctcggctcctcatggttctgcggcgccgctcaagggagctgagcaacgaagctgaaaccatcgccgccatggaagagatcgggttcgaagtggtcgcggcgcggccagaggacgtcagtgatatgagccgcttcgcgggggtggtgaactcctgcgacgtgatggttggcgtgcatggtgctgggctcaccaacatggtgttcctgccccacaacggcaccgtggtgcagatcgttccctggggcaacatgaagtgggcttgctggtatgcgtttggcgagcctgtgccaggcatgggacttcggtacgtcgagtatgaggctacggcggaggaaaccacgctgaaggagaaatacccaagggaccacccagtgttcaccgacccccagtccatacatcgccagggaaaagcttggtcgaccttcctcaatggccagaacgttactctggacatcgatcgcttcaaagcggtgatgctgcaagtgttccaatccatcaccacggagtagtagagttggactgttgggaggtatgcaggaagtcgtggatcaacaatatagcaaacacatttcctttttttattcctggagtgcctaaaactgaagataaacaaaggggtttagttatatggttgaggataaattctaatatagttggattatttaggcgtcacatgattaagcaagtctcagttgctttttttcgattttgttgtactaccagttagttaaccatataggtagatcttgttgaaaatgacatatttattcaaacacgattatattttaacggtatatata

SEQ ID NO: 152653 - DNA, 612 bp, Zea Mays
atgaaacagtcgtccccccaattcctaggtctgcactcaccgcacacgcaggaggcttggatccggctcgtgcacacgctgctagcgtgcgcagaggtcatgcagcaggagaacttctctgatgcggaggtgtcggtcaagcagatccccatgatggcctcgtcgcagggcggtgccatatgcaagttcgccgcctactttggagaggtgcttgcccgccgcatgtatcgctttcgcccgccatcggactgctccctcctcgacgccgccttcgactttgcctttcatgcgcacttctacgagtcttgccctaccttaaattcgtcgacttcaccaagaaccaggccatcctcgaggctttcggtggccgacgctgcgtccatcaagcaggggatgcagtgccggctcttctccaagccctcgctctccgccctgttctgggatggtattgttccccttcacacaattcagctccatcgccatgcaatgcagggtcatgtttctgctgcactaatagttgctaaatatattaacttcataactgaacatgtcattggtcttcgtcttgcaaatgacaatgggacttctgcaaagcacatcaggaagaactag

SEQ ID NO: 152654 - DNA, 277 bp, Zea Mays
gatggggttgtgagtcgcgatatctttggtcgtcggtctgtttcctcggtggggagtagatctcgaacttcaacttcgagggaatcagagcttgatgagcaactaagacaacaacaacaagttcaacaactatatcaacaagttcagatgatgcagggaatgctgatgcaggtaataattttagtaatccaccattcattcgattttcagatgcattgcaaaaactcaagcttattgtatttgcagatatataatgctcagatggtatctcaaatgg

SEQ ID NO: 152655 - DNA, 1412 bp, Zea Mays
gatgtgtcagcgccgtcaatgagcgaagttacctgcaactggagcaatcgtcactcagacacctgcaaaatggaaggtgacttgcggatccatggcatggccggcacagtctacgtcctttcatcatccaacttccgaccaaacaactcgaccatcacaatccggccgtacacgcggaagtgggagcaagagaccatgctgaggattcgggaggtcagcatccggtccactgcgccagagcctttcagcttcgtcatcccgcccaagtgcaccgtgaggcacgacgtgccagcggtggtcttctctaccggcggctgcggcaccaacttcttccacgccatgactgacctcattgtcccactctacatcacagcccgtgagcacaacggccacgtccagctgcttgtcgccgactaccagcctgaatgggtggccaaattcagaccgatcctcactgcactgtccatctacccggtcatagacttcgacgcggacactgccgtgcgctgcttcccgtcggcgcatgtcgggctcgagagccacaggatacttggcatcaacccggcgctctcccggaacagctacactatgatggggttccgtgacttcctccgcgacgtcttctcgctgcggcggccatgggctacacccgtaagcaggagcagcgggcagaagcctcggctcgtctttgtcctgcggcgccactctagggaggtgacgaacgaagtggatgccatcgctgctcttgccggtctcggcttcgaggtggtcgttgcgggaccggaggacgtccgcgatatggccaaaatcgcaggggtggtgaactcgtgcgacgtgatggtgggcgtgcacggcgcagggctcaccaacatggtgttcctgccgcacaacggcaccatagtgcagatcatcccgtggggaaacttgaagtacccatgccggttcgacttcggcgacccggcgccggacatgggactccgctacgtcgaatacgaggcgaacgcggaggagaccacgctcaagtacaagtatccgagggaccatcctgtgtttaccgacccgatctccatagagcgcagcggcaaactttgggagaccttcctcgagggccagaacgtcacactggacatcgaccggttcagagaggcaatgcagcaagtgtacaactccatcaccacggagtagactagctgccaggcatgaagtagactagcatggcactagtagttgattacaatcttgagagatgtaataacttaagtaatattagtaaaagttacttatattaatttacccgttttatgcctttgtttatttttagatttagtatgcatacattatatagatgctatgtgtattatatgtctgaggcggggtttaatttttataggcatattcggttatcaaccatc

SEQ ID NO: 152656 - DNA, 249 bp, Zea Mays
gagtgatttgaggtttgccgtagagaatgaagcacgacacttaggtgggacaagcttcgactcgaagaatagcatgcaaagcaatccgaatagcctagttgttgtaatacaagaaaaaagagatgtcatacttctgtttctcaagcaatcaatcatcgacttgcacaagggtttcttgttattccggatttcatgctagtcgaaacgagtcgcacgaagcacatctattctgatactccggcccattcc

SEQ ID NO: 152657 - DNA, 183 bp, Zea Mays
caacttgaacctctctatcttttcttctgttcttttattttaagcttgaatagctggaatctttccattcgtagtagttatgagctcctgcttaaggttctgggctacgaattccttccttggtccattccttcgctagccctgttcctaaacctattccttgcatacgagcgaggcccacac

SEQ ID NO: 152658 - DNA, 241 bp, Zea Mays
ctttgagattggcaatcttatccacttttttactttgatccacacagatgaaggcaagcttgtcttcgctctatcttaccaggaaagtaggaaatacacacccctgttggttaaagcagactcgtatgcctattctgatgcggagggatcagccacctctttctgttcgaaagattccagacctgacttaaagccctctttcacaagacatttggttgatcaggatttggtaaacctagag

SEQ ID NO: 152659 - DNA, 3132 bp, Zea Mays
cgaaccccgcccactcgatctgaaactaatagaatagaaggggccataaacaggagagtcttgaccaattcatttggtgtagttgaaataacggaattggaagttgttcggtcaagtataggaaattaatataagaatgaataactttctcaatggtttatttttttttcttttatttatcttaatattcattccattcaggccattcgcaagcaagcacgaaaaagcttctatttctaaatggaaacgcccggcccaatacatcgaaactcattacccatgggcaaagaaagccagtcgagaaaaaaaaagaaaacaaacatggtttagcggattcggaattgtaaccaagcatcctgggttttatacccgattgaacactagagcatgcagccgatcctggatacagaactatagaaagtgtgcagtgagggatctttattggtagccagtctttcacttccgcctctccactcccatgcctttcttggtcggaccaacccaaccgacgatttccgacaagtctttctgcttagagcaagaagcggaacaaaaatcaagctttctttattttcatttatggataaccaatccattttcaaatatagttgggagattttacccaagaaatgggtacataaaatgaaaagatcggaacatgggaatagatcttataccaatactgactacccatttccattgttgtgctttctaaaatggcatacctatacaagggttcaagtttcgatcgatatttgcggagtggatcatacctctcagaaacgcagatttgaagttgtccataatttactgagtactcggtataactcacacattcgtgtacaaacaagtgcggacgaagtaacacgaatatcttcggtagtcagtccatttccatcagctggccggtgggagcgagaagtatgggatatgtctggtgtttcttccatcaatcatccggatttacgccgtatatcaactgattatggtttcgagggtcatccattacgaaaagactttcctctgagtggatatgtggaagtacgctatgatgatccagagaaacgtgtggtttctgaacccattgagatgacccaagaatttcgctattttgattttgctagtccttgggaacagcgtagcgacggataattccaaatctacataggtctagtccaggggacaaatcaataggaaatgctattggcttcttaatcttaagacttaagataagaagaagaactttttaaaatgaaagagtcggatatcatttcttcaaataaggaagaagaagtgttatcgaaggatttccttccattcttcctagtatggaagaagtcaagaaaaagtactgcgtctcgatctatacgaaagggcacaggttttttcttttggtttcattgatagcagaagagtacgctagctagcgaagcctgaaaacacttgcttgtgccccacccctacgctatggaaactattgcctatgcttgctgctcgctcagtgtcagtagaagggaagaaaagatggtcactccttttaggaacatggcgagccttacttatgactgttgcacttcacttgcagctcgttcattcacttgctcatgaactcgcagcttcgccagaagcgactagtcgcctcctttcctccgccgaaagatgcttagcttagccagacgaagaaggggagctggggaaggccaacgatggcaatgagggggaagctgtcgtagaagctttgccccttgctttacataaattgttatgaacttactaaatgaccttatttattctcccggaacgctatcaaatctaatagttccatctgctcttcttaacttaacttaagaataagaacgaaggtcgccatccttcttatttaggaaccctttgtttgaggagggcgtatcctagggaaggggagagtggccgagtggtcaaaagcgacagactgtaaatctgttgaaggttttctacataggttcgaatcctgcctctcccacttgttgtagacttaagagaagagaaagtaggcggaagcctaggagggccaaccgagcgaagctctttctttttttggccgtgccgtgaagtgcaattttatcgtatgcgttttagagaggttgtcgaaaatgacgatctatagagattccccatctatatccaatcgagaatagaagtgagtccagttagtacggacttggggaagagtggtggagcaactattggttggtcggagagggcgaagaaaacatgactctggtgggcgtaaaagagcaaaaccttaacgatgtgtgagcgttagcgagtctgtcctttctttctatctagctggtaccaacaaaacaagtctgttctagctttctcgtggacaagatggcaaaaattcatctttcctctgatttcttggtggtacagacggtcgagctcctgcgaggggtagggtagatgagtaccgagcggaagaagaaaccggattgattgagaaagcagaccgtccagaagcaaggttaggataccgtccacccgaagagtatggggatggaaggaggaaagtgggaataaaccgtctgtcaggtaggactggtggtagagagggtatagatggtagatcaactttgtttatggtgggggaaaagaaactcttctgatcagacatgagtagaattagtcctctttctattgctacacccgttttgtgccgtctattttctttggtaactcaatttaatttcttttcagaaacctaataagccatgcctacaactagttattaagcgagggtagtcaattccactcttttcgccagaagtcttatttttaagatggaaaagaaggacagatatatcttgactagtacatccgccttgccatccaaatcattaatctatttattttattagtattatgtgtggatatcccgaccttgttaaggatagaggtaggggtaggtgttgggcatgcggaggcttaagatcttcataggcaatcaggtatggctttggttaagtgaatttatgactccatcttcaccagtagccaaggtaggcataatacgcgtgagctctttcaagtctttcgtgcgggtatacgttgagctagtcctcatactccttttcttagctcttttag

SEQ ID NO: 152660 - DNA, 307 bp, Zea Mays
atgcctgccgacgttcagataaagtgcatatcccttaccactaaaggaaaggctcgacgaagggggggggggaagggtaaggaaaacgctttcggagattgatttgtttttcatcgaaaaggaagaaggccgaggggatagcagccttccttcgggctttgcatgtcgacattctaataaagaattccggctcggcccgggaaagcgctggcaacaacataaagaaaggggtccatgtagctgctgcgcccgcccattgagcagcaggttcggcatctactacaatacaaaagaaaagaaaagaact

SEQ ID NO: 152661 - DNA, 966 bp, Zea Mays
gttgagaataagtccttcccttctgtgtgaattcccagcggcgaattaaccaacttgtggggccctatctattcaatctctcgagccccaagaaaaccccactctccctcggacttaatctctcttttgactctatatatgtgggcacctgatatctatgagggttcacccaccccggtgacagcattcctttctattgcgcctaaaatctctatttctgcaaatatgtcacatgtttctattattgcttcctatgggggtacattacaacaaatcttctttttctacaacattgcttctatgatcttaggagcactggccgccatggcccaaacgaaagtaaaaagacctctagctcatagttcgattggacatgtaggttatattcgtactggtttctcatgtggaaccatagaaggaattcaatcactactaattggtatatttatttatgcatcaatgacgatagatgcattcgccatagttccagcattacggcaaacccgtgtcaaatatatagcggatttgggtgctctagccaaaacgaatcctattttggctatgaccttctccattacaatgttttcatacgcaggaatacccctgttagccggcttttgtagcaaattctatttgttcttcgctgctttgggttgtggggcttacttcctagccccagtgggagtagtgactagcgttataggtcgttgggcggccagaaggttgccatgacttaccgaatcagttgcaacacagatgggaatgcatgctacgaaagacagggtcaagtctgatacatcaaccgttgactccatatccttgtacgagtccacaatcactacacgagatgaacctgggtttggtgaatggaagttggccttaggtgtaataggactccaagttactgcgcgcgatcgtatactggggtgctccccgtcgattgttggaacgacgcaagtcgggcct

SEQ ID NO: 152662 - DNA, 276 bp, Zea Mays
ctcctccacttgatcagcagccattggagtagactccatcaaacaccacttcttctaggtgttcctccaggcacacggtgctcacacgaagtcaaccggagaagatgcggttaagcgggttgacggtcaggctgccaacggcgccgatctgcggtggcgagatcctgttccaagcagcatacactggaagagttcaaaactcgagttgtgtgagcttcactggtccatggcgatcacagaacaaacatagcatgatcgtgtaccttgctgagttgt

SEQ ID NO: 152663 - DNA, 90 bp, Zea Mays
ccctctaataattttctacagagactttagtcttataccccttcgatcagacacaaaacagctccaaaatcctaagaaaaacactaaacc

SEQ ID NO: 152664 - DNA, 435 bp, Zea Mays
atggcccgtgctcaacgccggcgagcaagcgaccatgactgcggcggcgctagcctcggcgcccccccccccaaccactactgcaacctgtccccgaccaacacaaaccggtcacaagtttaccatgtcctcgccaagcactcaccggccctaaccacgacgccggtgagctcctcggtccggcgagctcgagcccgagacaacaaaacagtagaactccaatcaagcgtatggagagcatcactcaccctccaggcacacggtgctcacacgaagtcagccggagaagatgcggttaagcgggttgacggtcaggctgccaacggcgccgatctgcggtggcgagatcctgttccaagcagcatacactggaagagttcaaaactcgagttgtgtgagcttcactggtccatggcgatcacagaacaaacatag

SEQ ID NO: 152665 - DNA, 206 bp, Zea Mays
accggagataggcatggcaaaaacaggaatcctcggcaattgaggagccacgtcggctttccaccaccggcgagcgattcggtaggccctggtcgatctccgtgccttgaagcctcacaaatcggtcccacacgcctaagtttatcccctggctatctcaggatcgtccccccactgttgccgatgagttatggtagaggcggatc

SEQ ID NO: 152666 - DNA, 279 bp, Zea Mays
tgtttttgtgatttgtgttctgatgatgcaaacacttccatttttatgttactcctgcacaagatttcctgcacaaccaactgtcttttgaattctttttgttatttgatccagggagtggacacaatcaggctcttgcgcaagtatcccctgaatttactacctgtagtttcgaaatggacttacccaaaaaatatttgcactaagaatatttatgtttgtttagttggtctggacaaaccacaagatcagtttaagcattgcttccaaatgccatta

SEQ ID NO: 152667 - DNA, 359 bp, Zea Mays
cccatttatcccaaaagcgaagtaaaactctgtttaacctacctaccccatgtacccacaattggtatccaaacttagataatgacatctaataccacgaccaatagtccctaaatcagacctaagaagaaggttaacttcgacaatgaaggatatgagtagaaacagatctccagatgaatcaagatccaccacccagaataaaagtctcccttacctaactttctcttacccccaaatcttctctacactcacctaatagttaaaacctgatgtacccttgttttctatgccacacctgctaatggcatgaaaattttaggtgtataaaaaatactaattgggagttccacttagat

SEQ ID NO: 152668 - DNA, 1665 bp, Zea Mays
atgcaggctgcacgttgtggctatgagggttctgtgaacgaggccatcaagatgtttaatcccatggttcacgctgggttcatccagaacatgtggcacgtgcctgcaatatgctttgttgcagtttacaatgaactatgtttcttacaatgtttatatcttcctgcgcaattgcacctagcagttgaggagtgcctctttggctcttttcgtcgagggaagccgctacggttcctagagcaggttgttgtgatggtggttgctgttgatgtagatgaagttcttggtagctttcttgcggctctgaacaaaattattgttgatcgttgttcttggaatcactcagtatcaaaataccatgtatacgagttctttaaggttgctctagagagtgctaggatccaaacagccatcaatgacgtgatactcaatctttttgacaagttctttgagatgcagagaaatgacataataagggcacttaacatgtataaaagagaaattgagcaggaaccgatgatgatcttccagcatcatatgataatagctcctgaaagcttaccatgccacatcgaagtatctgaaaatttttccatacttggatttgcttgtgcttacctgaagggcagtactgatgctggcttacaggagaactcagcagccttgagctgttggttgggtacctttagaagacgttttcagttaagaaacgtattaggggctcttgaagacatgcccattgccattgaaacagacaaagctaaagcccaacattatgagctgccaactacatttttcaagttagtgcttggaaggaatctcaaatacagttcctgctatttccctgatgattcaagcaccctagaagatgctgaggttgcgatgatggatctgtattgtgagaggtcgaaactacaagatggcaaaagcatcctagatgttggatgtggatggggatccctttcactgtacattgcaaagaaatataggaactgcagtgtaacagggatatgcaactctactacacagaaggcttttatagaagagcaatgtagggaaaatgagctgtcaaatattgagataatcgtagccgacatcagcaagtttgagatggaacgctcttttgacaggatcgtatctatagagatgtttgagcacatgaaaaactacaagtcgcttcttaagaagatatccaggtgggtgaaagaggatggcctactattcgttcacctcttctgccacaaagcatttccatatcactttgaggataaaaacgatgatgactggatcacgaggtacttcttcactggaggaacaatgccatctgcaaacctacttctatactttcaggaggatgtatctgtggtatatcattggcttgttagtggcatgcattatgctagaactagaggaaaggtacacgaatccgaaacatctggccatcctggacaggtggacaacagtggtgcgacgtcgcttcgaccaccggcctccacgcagctgccactgcaagcgcgacggcgtctgccactgcaggcggatgcggaattgctggcggacgacgactgccattacttgtggagggctagggaggcgacggatgctccttcggttggcggctcagtgcaaatctgggcggggcaggggtgccgggctaggacctag

SEQ ID NO: 152669 - DNA, 167 bp, Zea Mays
ctctactgtcttgaattttcctcttctaaatctagaattttcctcttctttaaaataaaaattagcttgatgaatgagagaactaaatactaattgctgcagactgaaatgtcaatttaaatgatatgatgtcacagtttctagtggctttctatagcccatctatc

SEQ ID NO: 152670 - DNA, 1956 bp, Zea Mays
actatttacattctagatgttgtatatattatatgttttttgtacggtacacttgcattcgttcctatttcactctccctctcactggttttttcgaatattttgtacgtggttgcaaattaaattaagagcaactacctactaatctatagttattttggcagaattgaatgtagtagcctcgtagggccaacatgaccgaactcaaaatgtgcagcccacctccaatcccgtagaagatagtgctgccctgccgaatgccgcccacctccaatcccgtagaagacaaagagagagggagagaactggacggcggcggcggcggagacgacgatgcagtggtacttggtggccgcgctcctcaccatcctcaccagctcccagggaatattgaccaccctttcccagagcaatggcaaatacaattatgattatgccacaattccttttttagctgagctcttcaagttatctgtctcaggcttcttcctctggaaggaatgccattcttcatctccaccaaggatgacaaaggaatggaggagcgtgcgactatatgttgttccttcagttatatacctcatccacaacaatgtccagtttgcgacattgacctatgttgacccatctacctatcagataatgggaaacttgaaaattgtcacgactgggattttgtttaggcttgtcctaaaaaggaagttgtccaatatacaatggatggcaattgttttattggctgttggtacaactacaagccaggttaaaggatgtggagattcaccatgtgattctcttttctcagcaccattggagggttacttgcttggaatactttctgcttgtctttcagctctagctggtgtgtacacagaatatttgatgaagaagaataatgatagtttgtactggcaaaatgtacaattatatacgtaggtttggagttatctttaacatgggctggctaatttatggcgattttaaagctggatttgagctaggtccatggtggcagcgcctttttaatggttattcgatcacaacatggatggtagtgttcaatttaggatctactggtcttctagtatcatggttgatgaaatattctgacaatatagtcaaggtgtactcaacttcaatggcaatgcttttaacgatggttttatctatatatcttttcagtgtgaaagctacaattcagctcttcttgggcattatcatttgtataatttccctgcagatgtattttatgcctgtgcacatgcttattgagttgccacaaactttgcctgtaacatcaaagtaggttcatggcattgttagctaacccattgatcagctgagggtagggcactgttgattgagtggttaattgactatctgcagcccagctctatttgagtcatatatttggagatttatggttgtaatctcaacagctatggatatagacagctaggttagtttcatgttgcaggaaaggtgaatcaactgtcaagtgagcatgtaatgccaatacaaatggattgaaagttaacacctacatgccttccaatttttatccaggtaaaagatggaggctgattagttttgttgcctagggaaacgaaatccattcaaatgcaagttttcttaaaatagagcaaaactactcattcaccttgtatccacagttttgcattaatggagtcgatatggaactgacaagtacaatgagttatggcttcattacaaaaaagtacacaattttgctcctgcggcagcagtcttgtcttttcaggaaattcaaacaggacaaagtgttcattgagcagatcctcaggtgtactgatttttttttatcatcatcagttagaaatggctgtacattctagcatatgttatttattttagttaaaagaaagcgcaacactgttactgtgattaatttcatgaaaatcatagcatcgttaaatt

SEQ ID NO: 152671 - DNA, 1739 bp, Zea Mays
gcagcccacctccaatcccgtagaagatagtgctgccctgccgaatgccgcccacctccaatcccgtagaagacaaagagagagggagagaactggacggcggcggcggcggagacgacgatgcagtggtacttggtggccgcgctcctcaccatcctcaccagctcccagggaatattgaccaccctttcccagagcaatggcaaatacaattatgattatgccacaattccttttttagctgagctcttcaagttatctgtctcaggcttcttcctctggaaggaatgccattcttcatctccaccaaggatgacaaaggaatggaggagcgtgcgactatatgttgttccttcagttatatacctcatccacaacaatgtccagtttgcgacattgacctatgttgacccatctacctatcagataatgggaaacttgaaaattgtcacgactgggattttgtttaggcttgtcctaaaaaggaagttgtccaatatacaatggatggcaattgttttattggctgttggtacaactacaagccaggttaaaggatgtggagattcaccatgtgattctcttttctcagcaccattggagggttacttgcttggaatactttctgcttgtctttcagctctagctggtgtgtacacagaatatttgatgaagaagaataatgatagtttgtactggcaaaatgtacaattatatacgtttggagttatctttaacatgggctggctaatttatggcgattttaaagctggatttgagctaggtccatggtggcagcgcctttttaatggttattcgatcacaacatggatggtagtgttcaatttaggatctactggtcttctagtatcatggttgatgaaatattctgacaatatagtcaaggtgtactcaacttcaatggcaatgcttttaacgatggttttatctatatatcttttcagtgtgaaagctacaattcagctcttcttgggcattatcatttgtataatttccctgcagatgtattttatgcctgtgcacatgcttattgagttgccacaaactttgcctgtaacatcaaagtaggttcatggcattgttagctaacccattgatcagctgagggtagggcactgttgattgagtggttaattgactatctgcagcccagctctatttgagtcatatatttggagatttatggttgtaatctcaacagctatggatatagacagctaggttagtttcatgttgcaggaaaggtgaatcaactgtcaagtgagcatgtaatgccaatacaaatggattgaaagttaacacctacatgccttccaatttttatccaggtaaaagatggaggctgattagttttgttgcctagggaaacgaaatccattcaaatgcaagttttcttaaaatagagcaaaactactcattcaccttgtatccacagttttgcattaatggagtcgatatggaactgacaagtacaatgagttatggcttcattacaaaaaagtacacaattttgctcctgcggcagcagtcttgtcttttcaggaaattcaaacaggacaaagtgttcattgagcagatcctcaggtgtactgatttttttttatcatcatcagttagaaatggctgtacattctagcatatgttatttattttagttaaaagaaagcgcaacactgttactgtgattaatttcatgaaaatcatagcatcgttaaatt

SEQ ID NO: 152672 - DNA, 872 bp, Zea Mays
cctttttcacatgaatttagaggcacccacagattttatttcctttttttcatttccctgaagaatactggatctgtaaactttcactaacccagatagtacgaccgtcccttccgtgagaaaatacccaaccgtcgtaccaacatcctcctctgtcggcgatgaaagctaaaaccgccgcctctcacacactacacgaacacgactctcctataaaaagcacccgaggcgaggcgaggccagaccaggccactcaacagcatcactcaaagccaagcaacagcagcagcttccctagcaacaccttgcccctgagctcatgggatccctgggccccacagtgagcttgagcatcatggccaggccaggcggccagcagccggcggagatggagaggaagaaggacagcggtgtcttcttcggtgggggctgcggcttccggatgccgctgcactacccgcgctacaagaaggcggactacgagagcatgccggagtggcgcgtcgactgcctgctccgcgagtacggccttcccgccgacggcgacgtcgacagcaagcgccgcttcgccatgggcgccttcctctggcccgaccagtactgatccaaccaaacaaagctcagcgctagctagctgcgtgccggccgtgatctcgtcatatttagaggatcagctgcatcagttatagcgagacctaattgatcatctccatcgatcgtatacatgttaccatcgttctgcttgtagttgtagcggccggacatgctgcattctagtatatagctggatcgcgcgctgtatagtgtagtatgtctatgaaataaaagaaatgttgtttattttatcagagatgaggtgttctgttctgcca

SEQ ID NO: 152673 - DNA, 895 bp, Zea Mays
ttggcacgtgcccctgcttccatggatgtcgcgtcgctgcttacttcccttgctcctccgtagccgcggcagccgagctcgtctctacgtgcggcactccctccagctcctccatgtcgtcgtcttgctccgtccatggtcgtgcccaccgctccctatacttcacgtcgctcagctcgcccagtccccagcccgactggagctcccttcaactcgagctccacctcccatggccaaccaccgttgatcccgcctgagccccttcacgccgtctcgttgcgcaccctgctccctgttgccatgagctctagcccggattcagctcagcttgcccctgcccatgtcgcgcgagtttctttgaccccggtgttgtcgtttcagttgaccacatcgactgcgcagcctcgccgtcgtcattcggtcaccctgcctcgatgctggtccctacgtgctatctctgacttgtgttcgcgccaacaaaagaatcccaagaagatatagagaagcaagcccctggtcgatgcccaagtgctcggcgaaaggccagaacaagaatcataaccattcatgcggagttctagttaatatggagagattccaagagttgtggatggaagagaaagtgaagctccattcaatactcgtcagctgtttgatcgaagacttcaatcgaagactgtcgtcgttctcgcaaataattttatgattgtgaaataagacgcttagtgtgcgtatgaagtttaagttagaaatacaagtgatgcgaggtgtgcttcgaggagtttagttgccgagtatattcgaactagttctattttgcatagtgtagtatttcagtgacgcgtacgttaaattcagtattttatgcaattatcgataaatctgtcaatgttaa

SEQ ID NO: 152674 - DNA, 309 bp, Zea Mays
atggagtttcttcctgtgctcgcccttggtgctggccacgtgctcctcgtccggctcggccgcgacctcgccatcgttcctcagctcgtcacgcgcttgggatgcttgccggcgctcagccccaccgcgcgtcatgaggctcctatgcgcaagctgtctgtcggccgagctccctcgtggaggccttcccctgccagtgcccagcccagctccctctttctgttccccaccacggagctcctgtgcgcacgaattcttttggtggacgcgcgctggccatgctccatctcatccatcgcggcgctctag

SEQ ID NO: 152675 - DNA, 482 bp, Zea Mays
ttgttcggtcaccccgcctcgatgctggtccctacgtgttgtctccaacttgtgttcgcaccgacaaaagaatcccaagaagatatagagaagcaagcccctggtcgatgcccaagtgctcgacgaaaggccaaaacaagaatcatcaccgtttatgcggagttctagttaatatggagatattccaagagttgtggatggaagagaaagtgaagctccattcaatactcgtaagctgtttgatcgaagacttcaatcgaagactaacgtcgttctcgcaaataattttatgatcgtgaaataagacgcttagtgtgcgtatgaagtttatgttggaaataccagtgatgcgaggtgcgcttcgaggagtttagttgccgagtatattcgaactagttctattttgtagagtgtagtatttcggtgacgcgtaggttaaattcagcattttatgcaattgtcgataaatatgtcgatgttaa

SEQ ID NO: 152676 - DNA, 318 bp, Zea Mays
atggaggaacaggggaggagcacgccgagggagctgagaggagcagctgggcgagactttggtagggagatgggtgccgaactggaacagggtggggcgccggcggtgaagcatctgggcaagctggagactgggcgaccgagcgcagggagctggacacagagtgaggacgggcgggcacgccagggaagtcggcgcggcggccatgggaagggaagagagagctctgctgggcgccattggagggagataggcgtgagcaggaagggtgcgcgacagagggcgagcagggggaggagtgccatggctggagcttag

SEQ ID NO: 152677 - DNA, 924 bp, Zea Mays
atggctggtaccgtgtcaacggcgggaacatgtttacagccggctttttggtgttgtggaggtcgaaccatcatcttcactgagacgaaggattctgcatcagagctttctggtttgattcctggatcccgtgccttgcatggagatgtagcgcaagcgcagcgtgaagtaattcttgctggattccgtagcgggaagttccaagttttggttgtgacaaatgtggcggctcgtggtctggatattaatgatgtgcagcttatcattcagtgtgaacctccccgggatgttgaagcttacatacaccggtcaggtcggacatggagagcaggtaatactggtgttgctgtcatgctttatgagcccagatataagcacagtgtcagcagactagaaagggagtctggggttaaatttgagcatatctctacgccacaacccactgatgtagcacaatctgctggcagtgaagctgcagatgccactgcgagtgtgtcagacagtgttattcctatcttcaggcagcaagcagagcagttgctaagctcttccagtctgtctgcagctgacttgcttgccaaagcacttgcgaaggcagttttggaactaacagaaatatgtgtcttagggttacacggacataaagaaaagatcattgttatcttccttggaggattacagtacactacatcttcaaactggcagaccgatgtggtcacctgggtttgctataacatcctggagatcgtgtttcttcatcgtcggtttgacgtcggcaacgtggtcatggtgaccggcgggaggaacaccgggcgtgtaggagcgatcaagaaccgggagaagcacaagggcatcttcgaggaaaacatagaatggaattcaaatttggtggtcgcaaaagtgtggagacttgaattcatataa

SEQ ID NO: 152678 - DNA, 1341 bp, Zea Mays
cgtcttctccctctcccctagatccttcgacgccgccctccctcagctcattccctgccgccgctcatctgctggccttgtctcactgccgcccaaccattttcctccctcaagctagcacgcagcctcaactcctctcccacctcacgcacgtctctcccagccgttccttcatttctctggctcgtccttctccatgaggtcgcgccctgctgcgccgtcgtgctggtcgccggctgagcccccttcagtgcctgacgccgcatctccctggtgctcacctctgtttccccctgcgttggacgacctcgcactccctccctgctccagatttctccatggtcgcccctttccttgccccgggtggcgagctcgcccctcattcctgctcgcctaatctccacttccctgttgcagccacctcccatggacgccagccctcagccatggatgccgaaccccctctctttagtgcctttctttacagcccctgcgtcgccgtgcgtgtaaggtgtttgtataaatgctcaagaggagtgacgtgtcatggccaacccttttggcgtcgtcggatgtttgatgttttgtgcatcccgtctacgacgccgtcgaccatcggtgaggattcgttcttgctttgtcatttcatcgatcgacgtctatttgctaatatgaattgtgtttatgtgcctatgtgtgttgaggagcgaaatccgtgaaatctaggtgaagaagagacggagcacgtcgtcgtcatggttgcagctttgcttttgtcgtcgtggagcctccaccagcgccgtgtagcaggactgctcttatgtgttattggtgctattccgcttgtacggccaacgaaataggtcctactacacaagggaaatagaggataccatactcttagctttacagaagcctgaagtgtatgatgacattgctcgcgctacatgctgcaaatttgggatagatagacctcaagttgtacctgtgcaaggactacctcaggtttgaaccatacttatggaatgcatgtaagaggtttgtgttggagcaccgggctggcgagaaccgtgctccaatcatttcagatgatagccccaacaaagatatcaacaatgccttctataatatcgtgatgctgaaaaagtagatactactaccccaatatatccccccatttctcttctttatttccttttcagttttagtagaagaaaatgttgttggcttgtgatttagcatggttcttggattctacaaagcgattgtcttcaccaatcctttgataaattctatgagaatgcttaattgcaagatatgcaatgatgtaattcttgctcc

SEQ ID NO: 152679 - DNA, 1690 bp, Zea Mays
cgtcttctccctctcccctagatccttcgacgccgccctccctcagctcattccctgccgccgctcatctgctggccttgtctcactgccgcccaaccattttcctccctcaagctagcacgcagcctcaactcctctcccacctcacgcacgtctctcccagccgttccttcatttctctggctcgtccttctccatgaggtcgcgccctgctgcgccgtcgtgctggtcgccggctgagcccccttcagtgcctgacgccgcatctccctggtgctcacctctgtttccccctgcgttggacgacctcgcactccctccctgctccagatttctccatggtcgcccctttccttgccccgggtggcgagctcgcccctcattcctgctcgcctaatctccacttccctgttgcagccacctcccatggacgccagccctcagccatggatgccgaaccccctctctttagtgcctttctttacagcccctgcgtcgccgtgcgtgtaaggtgtttgtataaatgctcaagaggagtgacgtgtcatggccaacccttttggcgtcgtcggatgtttgatgttttgtgcatcccgtctacgacgccgtcgaccatcggtgaggattcgttcttgctttgtcatttcatcgatcgacgtctatttgctaatatgaattgtgtttatgtgcctatgtgtgttgaggagcgaaatccgtgaaatctaggtgaagaagagacggagcacgtcgtcgtcatggttgcagctttgcttttgtcgtcgtggagcctccaccagcgccgtgtagcattcaggaacaatggaaccaaaatacaggacattttcctacttcacgtctggatgccatccaattaatatcttctctgcgatattgcaatggaaggtgtagatagatgcaagtatacattcaatgttcttatgatagaggaaaggcatagctgcagatgggtttgatgttttatcttttcattcatgcatttcatcccatgcgcataaacaatttccaagtagcttgtgtatccaaacttggttcttttgttcactcagccaggttgtactgtttcattcagaattcggatttttcagccattaacccgcattttctattggatcgttttagattcatttgttttatctattagaccgtactctatattgtttcatttgaggacatttcaaatggttgttgtaggtcaatatgtgatagatgactagaagaaaattataaaaggatgttgaataagattgtgcttattttctcgtgacgaaggttttttctatgcttagggactgctcttatgtgttattggtgctattccgcttgtacggccaacgaaataggtcctactacacaagggaaatagaggataccatactcttagctttacagaagcctgaagtgtatgatgacattgctcgcgctacatgctgcaaatttgggatagatagacctcaagttgtacctgtgcaaggactacctcaggaaaagatgaaatggaactcaaattttagtggtcgcacaagtgtggagccagttgatgaccaagtttttcaattagtattttagtttgaatttagagtacacatatgtatgagttatttgacaatgcttgtttatgagagattgaatgatacctatctatattatattaattataatgttattaaat

SEQ ID NO: 152680 - DNA, 1378 bp, Zea Mays
gatccttcgacgccgccctccctcagctcattccctgccgccgctcatctgctggccttgtctcactgccgcccaaccattttcctccctcaagctagcacgcagcctcaactcctctcccacctcacgcacgtctctcccagccgttccttcatttctctggctcgtccttctccatgaggtcgcgccctgctgcgccgtcgtgctggtcgccggctgagcccccttcagtgcctgacgccgcatctccctggtgctcacctctgtttccccctgcgttggacgacctcgcactccctccctgctccagatttctccatggtcgcccctttccttgccccgggtggcgagctcgcccctcattcctgctcgcctaatctccacttccctgttgcagccacctcccatggacgccagccctcagccatggatgccgaaccccctctctttagtgcctttctttacagcccctgcgtcgccgtgcgtgtaaggtgtttgtataaatgctcaagaggagtgacgtgtcatggccaacccttttggcgtcgtcggatgtttgatgttttgtgcatcccgtctacgacgccgtcgaccatcggagcgaaatccgtgaaatctaggtgaagaagagacggagcacgtcgtcgtcatggttgcagctttgcttttgtcgtcgtggagcctccaccagcgccgtgtagcagtgagcccctcgctagtagtccgttgttttttgcatccctagtgcttgataaaatgttgaaccgttgtgtgtcgttaatcgcagccaccgtcaacgttgtgccttgcgcttcaccaatgcgatgaaatgttttagttgtgtgcgataatatggttgtcgttcgaatggaaagtagaattaatctatatatgtgattagaaagtgccaagcacatgataattataggagtaaattgaatacttgctgtttggactgtgttcagttttagtatgcaggtagtttagtgaagtaaaccatgttttctgtagaaatgttatataggaaagttgtagatcacttctttatcttgcttgtgtataaatttcatgaccacaggtttagtagtttaggagttatgatttttccaagtacagtatacgaatctatccagattctgtacagatttcgaaaactgtcttgtttgattaagttaaacttagaatcagttcttagtaattataaagaagttgtagtacttttcttaagctttccaaaaaaatttggatcaccctttttggtgatctataaattaagttagtgctgtttgagttaggatctctgaatctgtcccaatttggacagcagagcctttctcatattttctgaccttgatatatattaaattaacctgggatg

SEQ ID NO: 152681 - DNA, 1123 bp, Zea Mays
ccgccctccctcagctcattccctgccgccgctcatctgctggccttgtctcactgccgcccaaccattttcctccctcaagctagcacgcagcctcaactcctctcccacctcacgcacgtctctcccagccgttccttcatttctctggctcgtccttctccatgaggtcgcgccctgctgcgccgtcgtgctggtcgccggctgagcccccttcagtgcctgacgccgcatctccctgccacctcccatggacgccagccctcagccatggatgccgaaccccctctctttagtgcctttctttacagcccctgcgtcgccgtgcgtgtaaggtgtttgtataaatgctcaagaggagtgacgtgtcatggccaacccttttggcgtcgtcggatgtttgatgttttgtgcatcccgtctacgacgccgtcgaccatcggtgaggattcgttcttgctttgtcatttcatcgatcgacgtctatttgctaatatgaattgtgtttatgtgcctatgtgtgttgaggagcgaaatccgtgaaatctaggtgaagaagagacggagcacgtcgtcgtcatggttgcagctttgcttttgtcgtcgtggagcctccaccagcgccgtgtagcattcaggaacaatggaaccaaaatacaggacattttcctacttcacgtctggatgccatccaattaatatcttctctgcgatattgcaatggaagggactgctcttatgtgttattggtgctattccgcttgtacggccaacgaaataggtcctactacacaaggtacgtacacgagggaaatagaggataccatactcttagctttacagaagcctgaagtgtatgatgacattgctcgcgctacatgctgcaaatttgggatagatagacctcaagttgtacctgtgcaaggactacctcaggaaaagatgaaatggaactcaaattttagtggtcgcacaagtgtggagccagttgatgaccaagtttttcaattagtattttagtttgaatttagagtacacatatgtatgagttatttgacaatgcttgtttatgagagattgaatgatacctatctatattatattaattataatgttattaaat

SEQ ID NO: 152682 - DNA, 1251 bp, Zea Mays
ccgccctccctcagctcattccctgccgccgctcatctgctggccttgtctcactgccgcccaaccattttcctccctcaagctagcacgcagcctcaactcctctcccacctcacgcacgtctctcccagccgttccttcatttctctggctcgtccttctccatgaggtcgcgccctgctgcgccgtcgtgctggtcgccggctgagcccccttcagtgcctgacgccgcatctccctgccacctcccatggacgccagccctcagccatggatgccgaaccccctctctttagtgcctttctttacagcccctgcgtcgccgtgcgtgtaaggtgtttgtataaatgctcaagaggagtgacgtgtcatggccaacccttttggcgtcgtcggatgtttgatgttttgtgcatcccgtctacgacgccgtcgaccatcggtgaggattcgttcttgctttgtcatttcatcgatcgacgtctatttgctaatatgaattgtgtttatgtgcctatgtgtgttgaggagcgaaatccgtgaaatctaggtgaagaagagacggagcacgtcgtcgtcatggttgcagctttgcttttgtcgtcgtggagcctccaccagcgccgtgtagcattcaggaacaatggaaccaaaatacaggacattttcctacttcacgtctggatgccatccaattaatatcttctctgcgatattgcaatggaagggactgctcttatgtgttattggtgctattccgcttgtacggccaacgaaataggtcctactacacaagggaaatagaggataccatactcttagctttacagaagcctgaagtgtatgatgacattgctcgcgctacatgctgcaaatttgggatagatagacctcaagttgtacctgtgcaaggactacctcaggtttgaaccatacttatggaatgcatgtaagaggtttgtgttggagcaccgggctggcgagaaccgtgctccaatcatttcagatgatagccccaacaaagatatcaacaatgccttctataatatcgtgatgctgaaaaagaaaagatgaaatggaactcaaattttagtggtcgcacaagtgtggagccagttgatgaccaagtttttcaattagtattttagtttgaatttagagtacacatatgtatgagttatttgacaatgcttgtttatgagagattgaatgatacctatctatattatattaattataatgttattaaat

SEQ ID NO: 152683 - DNA, 582 bp, Zea Mays
aaaatatttgtcatatcttttcaattttctttcttgtgtaatcatggcctagatgtttagattactgattagcagtttttctatgcattattttgagtttgtagacaacagacattgagtgtcttttgatattaattttcaggtcaaaggtcagttttgtggaaaacatacaatatgttggtatcttcaatagtataagatcatgtaccacacgtcaacatcaatattgactaatttctttcagtaggatgggagaatgttgaatgcttcttcagatactatttcttggtctgtcaaatctgcttaacccaaatgcaagtttgttcaaatgtggcaaaaaataattgtctcaccaattgtcagcatgtttgcttccagcaaagttgtccagagaagaaaagatgaaatggaactcaaattttagtggtcgcacaagtgtggagccagttgatgaccaagtttttcaattagtattttagtttgaatttagagtacacatatgtatgagttatttgacaatgcttgtttatgagagattgaatgatacctatctatattatattaattataatgttattaaat

SEQ ID NO: 152684 - DNA, 269 bp, Zea Mays
gacctttgtgatatgtgatgatgtgaggtattcaaccgtgtctaactactaattattgccttctcctatttgttgtataggaaaagatgaaatggaactcaaattttagtggtcgcacaagtgtggagccagttgatgaccaagtttttcaattagtattttagtttgaatttagagtacacatatgtatgagttatttgacaatgcttgtttatgagagattgaatgatacctatctatattatattaattataatgttattaaataa

SEQ ID NO: 152685 - DNA, 201 bp, Zea Mays
atggcggttagcggtcacgacggtcggtcagtgctccagccaggtcccgagtcggcttggcggcggctagaccttgtagatgatgaggaagcaagggagcacgccgcggctgtcgaggaccaccagctcgccgtcgccccatgtccacggagtcatacgcagaaggcggagagcagcgcacagaggccggcaatggcgtag

SEQ ID NO: 152686 - DNA, 695 bp, Zea Mays
tttattgtttatacctcccatacattatccttggtcttcacctccacctacacctacatctccacctacaggtatgcaaattcatcatcatttacttgttgttagttatattatgatgtaactcagcaaatatcatttgtacatgtatattagacccctccagctaccttgtcgatgcatcaacgagaagacgggttagactttgtcgaaaccctcttcgctagtggaggtatcgaccatcactcgtcactgtacctcgatggtgatcggcgatcgtgagcttccatgttatgtgttgtgatatttgaaacttttattatgactatgtatgagatattgtctcttattatgactggatgagatgtgtcttattatgactatggatgagcttttgtgatgtaattgatgagaatatggatttaaatattgttatgtgactgtgtgagatgttttatgtgaaaaatatgttgtgctatatagctgttgatatatttgttatgttgcggaatgtggtgtaaaataaaaataaacagaaatttgtaatgctggtcaaattaacttcctagaggcttatcgggccgtaggaagttagccagctaacttcctaggggctacagtcagccgtaggaagttagacagctgacggcgctgacggcgtgaagctactaacttccgagaacctactaacttccgag

SEQ ID NO: 152687 - DNA, 1273 bp, Zea Mays
gctgatcaagggaggtataggaataggaagcaacaaatcaccaccaatgttttgggtgtttgtgatcgacacatgaagtttgtttatgttctagctggatgggaagggtcagcttcagattcacgtgtgctacgtgatgccatgtctcgggacgatgcattttctattccaagtgaaaaatattacctagtagatgttggatacaccaatggaccaggctttcttgctccatatcgatccactcgctaccacttgaatgagtgggctgcccaagggaataacccatccaatgccaaggaattgttcaatttgcgccattcaacagctagaaatgtgatagagagaacgtttaggctattgaagatgaggtgggctatattaaggaaaaactcatattttgacttacaaaatcagattaggataatcaatgcttgttgcatattgcacaactttgtaagggatatgcaaagagatatggatgatttacttttaggccaagttgatcaaataatatctgttgaatctcatgatgttcaaagtgaagtgagtatgattaccaatgtgcaatcatcaaatcaatggagtaacttcagggacaccaaagctaaccaaatgtttgatgattaccaagcgagacgtggacaatgaatgatatttttttaaaatatttttttgcaaatattgtgttgctccttaataactctactaacctttgtaatttttttatttgtaggatatggagaagggtaagaagtcaggctcgggcaggggctacatttcttggaatgatgatatggacaaggcacttcttgacacattcgtggagtactacaacaaaggtgacagatgccaaaatgggtggaagtctcatgtctacacgactgctatcaagaatgtccgagaaagtgcaatgtggaaatcacaaaagacaacatcatgtcaaggaacaagacatttgacaagcaccacactatcatcaatggtatgctagaaacaagtggctttagttgggattggaacaagaacaagatatctgtcgatagtgattctgtatgggaggcttatgtggcagtaagtttcagttttttttgtttttctgttgttacactatcatcaatggttttctattttttagctacatggtcaaatctgaaatttgcatgtgtcctttaataagtttgttgatctaatactgtacttcgagcaactagattttttatctccgacaaagagaactttggctttgttgtattactgctacagtaaaaatggg

SEQ ID NO: 152688 - DNA, 405 bp, Zea Mays
atggcgaagggcgtcggtggcggggatcccataccgctgtcgcggttcggcgcgctggtggcccagctggagtccgtagtggcatcggccaggcagaagacccccgacgcgctgctctgcttcgacctcctctccgagctctcctctgccatcgacgaggcccccaaggagaccatacaactttggcaaaggaaatgtgaggatgctctccaatccttgctcgtccttgggacacgacgtccagttcggcgcttggcgtcatcagcgatgggccgaattatcgagaaaggcgatgtgatatctgtatattcaagggcaagtaacttgcaggggtggttggtcgatgtgaaaagggctgaggccactgcatgtgcaggttaggtttcttgtttgaatcattgtcat

SEQ ID NO: 152689 - DNA, 76 bp, Zea Mays
gtgtgtgtccacaacttccagaatacctcgaagctgtgagcacttcagcgcaacatgcttattgaatgagcagaga

SEQ ID NO: 152690 - DNA, 678 bp, Zea Mays
atggggagaatggcggcggtaggcgcggcgggagagagcgctgcccacacagggggggtgggaggtggctggctcaaggttgtccatgtggctgctattgcagagcgtgaagctggttggttgctattagcttctcttctagcatccatgccaaaagaggagctggaagaccaggtgtttgatgttcttttgctatgggcgggtccttttactggaaatcctgaatcttaccttcgtcatatacaggattgggcatcagaattgcgggttctgtcagttgcagttgaggcgcttactgccttcataagaagttttgtttatccatctatcacaactactgattgtggaatcttgcttaatcctgtacttgcctaccttggcggagctctatccctcatatcttcgttgagatctaaacaagtgcccaatgtaaggtctgcgctggacctactcacaactagaacattgatggcttattggtccctttcgaatccagtggtatataaaactgagcaccagcagatacttcagctatgctcaagtccgttcaggagaactgtgtctcattatattaagaaggtaaagcaaggtctaaaaatagaccccgagcaaggacttccttaccgaggtctaaaactcagcaacctgagaagatccatcatccattcatccatctaa

SEQ ID NO: 152691 - DNA, 1033 bp, Zea Mays
ttatgtctcgcaagttcaggggacacttttccttgctatggagattctcctcttggaagaaaatggatatgttgatcttcgacaaggaattggtcatcttattaatgcaatagttgctgttattggtccagagcttgctcctgatagcacattcttttcacgatgcaagtctgttattgcagagataagttcatcaaatgaaatggctacacttttagaatcggttagattctcccagcagcttgtgctttttgctcctcaagctgttcctgtgcacttgcacgttcaaggtcttatcccaatgctttactcaagacagccaagtcttagatatttagcagtgtcgacactgcaccatctgattgaaagggacccggctgcaatgattgacgagaatattgaagagaatctgttcagtatgcttgatgaggagaccgattcagaaacagcgatgttggttcgtgcaactattattcgcttattgtatacatcatgtccagtatgtccatcacggtggctggcagttttacgaaatattgttcttgctacgtcaattagaagaaacacaggtgaagttctgtcatgttttgggcataatcctcctgatagtacatctgagaatgatgtgtactatggagaagatgaagacaacatgatttccagctcaaagcagcagcaaatccgctgtgctggttctatatccagccagtttcctccaaggaataaacacctcagatatcgtaccagggtttttgctgcagaatgcgttagccatgtaccaattgcagttggagcagaacctgctcattttgacctcttgttggcaaggagcgcaatatctcaaggcacttatttgtcaaatgattggctagtgcttaaactacaggaactggtctcactttcataccagattagtactgggcaatttgaaggaatgcaaccaataggtgtgaagcttttgtgtttgataatggacaagttcggcaaggcagtagatccggaatttcctggccatatcttgctggaacaattt

SEQ ID NO: 152692 - DNA, 1899 bp, Zea Mays
tctcagtatctgggtctgatacttcaatgtagggatgggagttctcagaataattcaagtaacactttgatttctgagttgtctattgcaagcgagacgatggcttatcggatcaaaggagagtatttgtggaagctggtgatgttagtggtatctacttcacaccaatcatttcaacaagtttcaactaatttatgcttctcaaatattatatgcttcctccaaaatatcttccctttcatgaggaaaatttttagagaaagagtcgaatcagatggtgagtgcacaagtcctaaagttgtctttggtgctatggttggcctagtgggatacttctatgtagagtgtgataaaaagatctcattgctcgaaaacaagatttctgattcctacaagctgttgaataagatactacttttttgcttgggagaagccactgctcttgcaaaacttgttcctgagatcatttatcgaagtgaaaatgtaagtaacaatgatgtgctcctttggggcagcttcaggctgtgcgtacaggttattcaaggttcatttcgtagtaccaacatacaggtgcacatgctgggtctgcaagtactgagaagctatgcacagaaggagctaactgaaggttcagaaacaaagttggattcttttatgatgttgcttacggaattgttgggagacttgtttttggtgatggagactacattgaaggaatgttcaaacaaaaaatctgtcagtgtcgttgatgaatgtttgaaacttgttttcctcttccacacactagcacaatcaaagaaataccgacaagatgctacaactcttctgctggaggccttgctgatggttttctctctgtccagtgatactgtttcacaggagcttgctgaagtgaacaccatttccagaaagttgttctctcattttattcagattccgtctgtggctatacagatcaaagacataatgctttctgcaccagctgaaaggagactacagcttcaggacatggtccgagcttcagtcagtcaagggcagataacggtgccagtggctacgagtgcacactcagaacagaatattcaggatagttgcagtaaaaaccctgggtccacatctgaagcttctgattgtgttgcaactcacgggaataatgacaatgaagttgttgatgatgactgggatgacgattgggatgctttccaatctcttcctgcaattgcaaatgatggtgttgattctggagaaatctctcttacaactaggtacaatgaacagatccctcaagaaaatagcagttacggttcttgtaatgcggatattacagctcgtgctatggaagacataacttgtgtggacaaggaacttgaggagccctctgatttgcaattctcaagtactgaacaacagcctaaacatgatttaccagggtcatcccacgaaggttgtgctaaacttgaaagacatccatctgttgattgcaaagagcaattagctgatgatgagacagcagatgaactgcagcagcaggttcatgaagacactgatcatgtaaataaagatagcgaagttctctctgcagaaattcatggggttaaattggatatccttgatgaagatgttgaagatgattccccaatgaattcaaacaatctatcagatatcgcagaggaagagtcctagggttggtacaatgcaacgagggtggaccgcaagcttgtcgagatagtagagaagagctgtccggttcctctgatgctggcataccagattttagtatgtcaggacacgtgatgagcaagagcggaggaaatgagcaaaatgttattttgcctgtatcaatatatattgcacgagataaaaataatataaggttacaaccatgatttttattttgtg

SEQ ID NO: 152693 - DNA, 327 bp, Zea Mays
atgatcgagaggtacaagaaggcacacgccgttggctcttcctctggccccccactcttagagcacaatgcccagactctgattgctgaattcttgtttcagagtgagctgtcggctgccgagatcaatttcatggccaaaagggagactgagcttcagaatgaccacatgaacctcaggaccaagatagtttctgtaatactcaatcattggcagaagagctcaggaggaaatcaactagcattgaaattcaggaacgtaccgctggtgacggaagtggctgtgttggccatggggggcgtccccaaggccccattggatgtgtag

SEQ ID NO: 152694 - DNA, 1344 bp, Zea Mays
cggccccgttacctttcggaatgggggatccccgttggcaacaaccacggtagtagttgcggaactactgggccaagagaggacaacctgttgttcctgctcctccttcttcgcttcggggacggaggtcctacggtaggtaagagcacgcacaagcacttggccgaaggggaccagcgcttctactcctccaccgaggagccgttcttgcgagaagcaagggatgtcgtgaacggtgggaggtcaaagaaagagaattgacctctgaatacagtgatcctatgatctagatagactccgtccttttttttagataagggtgactcaagaggggggagaactacctaactaaagaagaatagcgctctttaaaaataagagtaggcgtggagagctttttgcggggaaacttgcaagtcaagtttggggggaggcgggcgtcgacccaaccttatgagtattcggactataacagttccgatgaacagtcactcacttttgacagttatacgattccagaagatgatccagaattgggtcaatcacgtttattagaagttgacaatagagtggttgtaccagccaaaactcatctacgtatgattgtaacacccgctgatgtacctcatagttgggctgtaccttcctcaggtgtcaaatgtgatgctgtacctggtcgttcaaatcttacctccatctcggtacaacgagaaggagtttactatggttagtgcagtgagatttgtggaactaatcatgcctttacgcctatcgtcgtagaagcagtgactttgaaagattatgcggattgggtatccaatcaattaatcctccaaaccaactaaaccggggaagctgaagcggaaatgcaattctcgggtgagggaaggcttcgctcgctcgctcaaaaagctctaacgctcgtttacgagtggagtgcataagcccttattgaagtagggcgaggccttactacacgagctcgtaagtaaagcacggaacgagccttgtctacgaagcttcgcttcatcatcttgcttgcttctgccgaagcttaacgcactataacataggcatgcatgatggtatggtaggaagactccttttaaggccgaccactacataggagcgataggaagccaagccgtcaaaaggaaaggcgagcagcccttattgcaatagcaaacggcctacttatagccctatttataccctttatcggggacgggccttacaagctcaataaattgcaattcttcaccttttcctcagacagtgggaatgaattttcttacttgattgacattgacagatatgtgtaccacaccgaacaagcaatatgtc

SEQ ID NO: 152695 - DNA, 112 bp, Zea Mays
attagtggtttgtagttgccgggagttgaattgcagttatcagtttgaaaaaccagtcaaagatagaattgctttctcgtatcatacttgcttaggcgtttcctatctatag

SEQ ID NO: 152696 - DNA, 3889 bp, Zea Mays
catttcgagattcatcaaaatcgtttcaaagaagaggaacaaacattgtctttaacaacactcatccacttattgacattgacacgtatcaatcggcgtgggtcgctcactcatagaaactttattggttgtgacagaaccacttatctttcgccacaaacataagatccctatggtcctactcaaggtagactatcgcaagtcatttgaccgagaaagagaagagttgtgtcttaaagtaaagacgaggatgtagaaatccacacacacttgtctttcaggcccagcccaccagggatttccaaatcgttaggttagcggcgggtctttcttcttctgggtgagctgcggagctaatttttctttctttcattccattccattccatctgtctctgtatgcttgggtgaatgccataagcggatttatatgccccggttcccagggttagggtattccctatgttgagcctactcagatcagaacaaaacttttggattctctttcgcctatcggccggctttaagcaaccttcacatttcctgctgagatcccaagtctccaagtgggccctcttggcccacccacgaccttggctttttagagaatcccgctcctgtgtcgtaggacttgtagctcggcagtccaccgggtaggtttgtttatccatcctttttcgagtgtcttcttggatagttatagcggcccataggcgcaagatgtaccttgtggagggcggcggtcccctggacatagcatagtcctttcaggcagtggccgtttagtccatggtccgttggatggtcggtgcaaggccagaaattggaacacattgattccgctcgttcctgtccttcgcttcagggcctgtccctcggtgtggtcagtactccatactgtcgggcagcaaagcttacacttgttcacttattatgacggttcaccagggcctctttcctcctcccttttctgctcactcgtaggggtccagaccctcacaaagggggagggagtcgactgaacatctcagccattggcgggaatttcgcccgcatccgatccccaattcttgttcaccccggatgatcgtgttgggtaaattgtgacctcgtacgatcgtatcgggtgagcaacagccgcttcgtcacagtacttacttatgggctaacaggtcacactttggccaagtatcctacaaagagactcccgagagccaaaagtattaaaggaatggccataggaatgggcgcatcatgacatcgtaatctgtctcgcccgaatgaattagttggtactagaaatgttagaaatagtaaacgaaaggagtaataagaagtgaaaaggacagagacacttcccaaccagaaagcaaagttcccactgatggtatactttgtgtaagcgagctctaagatcacatctttggaataaaatccagttagaaaaggaaatccaataagagataagctgcccatgagcatcatggcataggtcaaaggaaaggaggaggcaagcccccccatcttccgcatatcttgctcatccgacatggcatgaatcaccgaacccgcactcaggaagagtaatgctttgaaaaacgcgtgattcattaagtgaaagacgctaaccgaatagttagagatgccgcaagcaaagatcatatagcctaattgactgcaagttgaataagctatgaccctctttagatcgttctgtaatattccagtggttgccgcaaggaatgacgtcatagctcccgcaaaagtaataacaatcaaagccgtaggtgagtattcaaataaaggggagcaccttgctatcatgaaaacgccagcagtgaccatagtagctgcatgaatcaaagcagatactggagtgggaccctccattgcatcgggtaaccaagtatgcaatcctatctgtgcagatttcccaactgcaccaataaaaagtaaaatacaaatcagagttatggcattaaatctcatattgcaaaaaatccattcatttctgggagcactagcacaagcaaaaatggttgaaaagtctactgtttgaaagagagtaaaacaaccaaaaatcccaagagctaatccaaaatcacctactcgattgacaagcatagcttttatagctgctttatccgcctgaagtcgtgtaaaccagaaatgaattaacaaatatgaagcaagacctactccctcccatcccaggaataattgaagaaagttatctccagtcaccaacattagcataaaaaaagtaaaaatggataaataacacataaatcgagggctatgcggatcctcagacatatatgaaatggaataaagatggaccaagctacttatgaatgtaaccacaattaacatcactacggtcaggctatcgaacacggagtcaaaagtgaattacgagtcagaccaatctgcgaatcgagcgagctccccttgcaatgatgtggtggtgaacctctcattcgtcttcagtgctctccgaaccgtgcgggaaggtttcccatcacacggctcaccaacttgatcttctgcgggaaccttatgcttatgtaagaacaggcctggcaaaagaagtacggtctcgctttcctttgccactcaagtgtacggcatctgccgtgcttaggccccttcttcccttccctaacccaaaaatgagtccaccgcctgcctggcactgtatgggtataggtatggcgcgcaggccagacccccttggattttaggtgattaactaccgacgaagaaaaggctggatcaagaaaaggggggtactacgagccctctgccccacgcatctaaccagctcgcgtggttcaccggttccaccgacgtcacccttagatagagttattcagtcgatacagaaatgcgcttaaagtggggggtgtgctgtccctattgggctgggcccttccccataaggccccaccgtcggggcataagcgccctcttgctacccatatgcaaggcgccgtcttagccttgccttcccaggatcgctcccgcacctgtcacgttcgtgatcggcctcctcaactgtgtatcgatcgaaaggcagggcggcagagcccccaaccgacgggagttgttacgtccagtatgtcccccctcgattcccgacatgctatgataccccacccagggtgggtaggagcgggtcgagtccgtatcaccgcggaacaactgcagcgtccggatcagatctatttactcggcaattcatccggtgacttcacggtcgccaaagaagccccaagaagcatcaaacatttccgatgagatccatggagctattctgagatagcaagcactagctcccagtgcgacttcataaaaagcaatcaaagataagatcgaagaaaatgaaacgcacgtggtggtcattatagcagttccttcagatcctagaaaacgtccgaaaaaaccggctacggaactaccgagcaaaggcaaaaagacaataagtagatacataagatcgagtctcttcaaaaaaaaatcagacaatgttcgagcggcctgtcattgagacaaaaacgtgttaagcatataagcactttcgacttgatttgcagtggtcagttacgcaagacgggaagagagtttccttcttcagagtccttttatcccacccaatattaaggagaatgtgtgggcctttactgaaagaagattgttgatccccttgccgactcattccatcctccccccggtgggtcgtcctcttattcactctcgcgagcaaagaagaagagagacagcattcaagccagcaatggactgaggtatgagacgataaaggtaaagagaaggggcgggccgtcgttggtgcataacagatctttcctatctacgatctttctcggtgc

SEQ ID NO: 152697 - DNA, 748 bp, Zea Mays
gttcttatgtcctttggagctctcgagttgcctgactccgattaaaaaccttttccaggtgctgaaaacaattcctgctactgtcagtgtcacaggaggatgggtcacggcacaggctattgtggaacactgcttgatattattcaagattagattgctaattaagaattagactagtccccagaagggtaaaaaaaaaagatccattgccgaatctgaaagagtacagtccagagacgggcaaagctgtccaattgaatgaagcatagtgcatctttcattaagtgagattccaattccatctgttacggctaggaagcggatgagtggccgtattcgaccacctctttatcttatcttacggctagttcctttagattcgggaaagttttccattagattaggggaagggagagaaattgtttgtttatcttcccttttttttaaccattcttcttctcgatagccagatagcataagaatattgttactaagaaagcagcaaatcccttctttctacgaagaagctaaatagacttaaaaaaaaattaccttgcaacagaagttttttttagtagtccactttgactgatagatcccagatcttcaattaccagccccaccctattttggtaaaataagatatgcgtagcgcttcatatgaacatgcctctatcaattgagaggctctaactgagctcttgaatgctcttaggctaccgtaacgagaagaatgaattccgacgcg

SEQ ID NO: 152698 - DNA, 1030 bp, Zea Mays
agccgaactagcccctggatcagctctcatagtgggggaatcagagtcaagttaggcgcaaaagagggggttgacatcattcgtcgtgattggatcaatcagactcccccgcaggaaatgccaaggggcgccctttctcattatcatctaccgcccatttcttcatcatctgctgctgccttaagtgcgtaaagtaggctcagcttctttggtttctaaatatcttgtggtagccgaagggtccgcttgttagattgaattgaatcttatataacctacgtagctaaagagaaaataataatagtctaagtggacctctcaaaggtataaataagtagacattagtcttacaggttcggtctttttctttttttgttatgatgcccacatttcatacttctcaattcttatttattcaagggttcgtatgtactgagtgactctaggtctattcagatgcagcttcaagagagctttattcggcctttgtatgaccgtcttcccttcctgtctatctcccttcggtcaggtagttctgcttccgatgccggaggagcagggtgggatagaagggtagtttctgagttcgagatgtctgagcttggaggttccgcttctctaatgtgataataaagcaacaaagcgctcatcccttgcttgttgacccgagggatcccttcgtgacggcctctagattgaactagggctttgcttcgctcgcctacagatgatagtcttcacagccgacaagcccattcccattcattccttcacagctgagtttgtcttgtgcaggagatggaatgttcacaaagcacgtgcatctgaagactctgaggtttgatttgaatagtagaagcttgtttcataggataggattctattctatttgcttgccgggaaaggtttgggttgggaagcttagcagagggagaggtatcatacatagaagtcttgaagagcatggggcccccaaggtgaatgtgaatggtgacggggtgacgggcaagcctgccgctggttaagaagt

SEQ ID NO: 152699 - DNA, 909 bp, Zea Mays
cggaaaaagaagaaggcgttgttccgtacattctctttattcgttgtccatgctgcgttctattatttaatactcaagtctgcctccagatccaagggaagaaagaagtaatggctctctaaactctgtttatagatttatggatcggtcagcatagcttttggcctagaatttcagagatgcgagtgctttagcgctagttcaatgagtttaaagttacgaacaaagaaagaagacatattgccaactaagatgagtttattttttgctattttagctaagctagcgtcatattactgaattcataaggtaggttgtcctgcttattcttgcatatccctacctaggcaagggaaggaagagtgggttagcgggctttcttcacatgtttattttttttcctaaaaggaagagtgggaatgcgggctgtttcgaaagaaactatgaaaaaataagatttatcgtccaatcggacagggctcgcgaacctagtctagtatagtgggatgaactccgcgcctgcctgaaagcatgagtgccgagcctgccggggcattatccattttaagtttcccatcctgttggctgccttcttcttagccaactgaagaatcggttgaagtccattgattgtgcaaaacgaaacacactttcttcttttcctcgtaccgtccatagagggcaagagtgatgcctaaaatcacggggaaatgcagttttcgaaatccatattgtggtttccagaggtcaaatctgcttacgtgattcatgtgagaaccaaggccagctcaaccaaagcgtgccatagacttcagtgcttcttcagtgctttaagagaatcaaaagtacgattgtatttgtggtcattggacggaataggcccgtcacctttcgaatcgaacacaggaa

SEQ ID NO: 152700 - DNA, 234 bp, Zea Mays
cgcgtgatgcgatagtgccagagaatatcttctcttctcttgttggtaggaaagcagtggtgaatgaaaagcggttctgttcccttccgggtgaatggatgggaaatggaaatagactaacactcacacaaaagagacaaggaaccagaaatgcttactactgaccagctcctattcctatgccaaagagggattcgagtttcaggggtagagggaagctttaggaaaggatag

SEQ ID NO: 152701 - DNA, 405 bp, Zea Mays
tattataaatatgtaccagtttcctgaaactaacaaatagagttatagctttgattgacttactagcttacgggaatgctttgaatctcaacttacttttttagagggggggattactactgcatggaaggatggtatactggaacgcaggtgttcttactctttctcaggtacctgagaaaatagagttggctgactataacatggaaggccccaagcgtcgccttgaaaattatgtggaagagttccggcttgcttgcattaggatccatccctccaagaaaccatcaatatatgaagcatatggctcctctttgagttctattttcttggggttgggatgagagcacgatatgagcatgcgaatttcttcgaatctaccattggagagaaaataaggggtta

SEQ ID NO: 152702 - DNA, 101 bp, Zea Mays
ctctaaccaattgcggcttgttagagcacctaagcaacgatgcgaataatcgcttgcctaattcagtagggttttcatttgatttctatatgataatatgc

SEQ ID NO: 152703 - DNA, 107 bp, Zea Mays
ctctcaacctattcttgggacattggccaaagataataagcgaagaaggaaggcaaagatacttggattccattgattatcttccatttcatcctgcacttgattgc

SEQ ID NO: 152704 - DNA, 116 bp, Zea Mays
attgttcattaaggatctttaacagatgttttttgttattctctcgagacctaaatgttcatcgaccaaacttgtttttgtatccgtgtataatattattgtcactgtttttgtat

SEQ ID NO: 152705 - DNA, 1928 bp, Zea Mays
ctgccaagtacacttccaattttccaaagatttgttgtgcctttagtcccctgctcgctcttcaccatcctaaattaaagctgcagcacacgcctgatccaccaatgtgcaccactcccgtgccgtcgccgctgcctgtggcgctggtcggagtcaagggagaccaccgtgtctacgtcacggtaccccagcacccggaaggcgacgtggccgtccatcgcagccggcagttcatgtgcagagccgtgcccctgccgacggcgggggagaccttccgggaggcagtagcgctgtgccggctggcgttcccgatcgcgttgacggctctgctgctctactcgcggatggccttgtccatgctcttcctgggcaccatcggcgacctcccgctagctgccgggtcacttgccatcgccttcgccaacatcaccggttactcggtgctgtcagggctctcgctcggcatggacccgctctgctcccaagcgttcggcgccaaccacccacgcctgcttggcctcaccctctaccgctcagtcctcttcctgttctgctgctcgctgccgctcaccgcgctctggctcaacatgtctaggatcctcgtcttcctcggtcaggacatcgagatcacggcactcgcccaggagtacatcctcttctccctccccgaccttttctccttctcactcatccacccgctccgtgtgtacctccggtcgcaggggataacgtggcctctcgccgcagccgcgggcgctgccgtgctgttccacgcgccgaccaactacgtgttggtggggcggctccggctcggcgctcctggggtggccgccgcggcgtccgcgtccaacttcgtgctcctcggcgtgcttctggcgtgcgtcgtcggccggcgcgactcggggcttcgagcggcggggccgcccacggcggagtgcctcgccggttggggtccgctcgcgcggctggcagcgcccagctgtgtgtcggtgtgcctggagtggtggtggtacgaggtgatgatcctgctctgcggcctcctgccagacccgaagccggcggtagcatccatgggcgtgctcttgcagacgacggcgctggtgtacgtgttcccgtcatcgctgggttttggcgtctccacgcgggtgggcaacgagcttggcgcgaaccggcctggccacgcgcgtgccgcagcgcacgtggccgtggccggagccgcgtgcatgggtctcgcggccatgtcgttcgcagctggggtgcgccacacttggggccgtatgttcaccgccgaccccgacatactccggctgaccgcggccgcgcttccagttgtggggctctgcgagctcggaaactgcccgcagaccgtcggctgcggcgttctccgcggtagtgcgcggccgacgcgcgcagcgcacgtcaacctcggcgccttctacctggtgggcatgcccgtcgctgtgctgctggccttcgggctcggcgtgggcttcgtcggactctggattggtctcctcgcagcgcaggtgtgctgcgcggggctcatgctcttcgtcgtcggctccaccgactgggaggcgcaggcgcggagggcgcaggagctgacgtcatgcgcggtgggcgaaatggagaagactggggcccacgcgtcagctaccacggaagcgggaggcaggccggagaagggggagcaggaggagggcgtagaaaggaggcacgacgactacgagccattgatgatttcgaacagtggggagcccgagccagaaactgtgtaggctgcttcaagattcgtgaaaatgcctggatccattcttactctctaattaattggagttactgctagtactactccagttctaatggtaatgagtataacttgtttttttatttgttgctttccatttcccctagttttttttctcttg

SEQ ID NO: 152706 - DNA, 711 bp, Zea Mays
atctatatactacacttggttgtttgttcttgcgctcatgccggatcggccatcttcaggcgcctgctccgcagaggccggcctccggcgcctctacgaaattcctccatggatgagcttgcagcaggaggccagtagctgtatactgtccgaaccgactacaccacgtgcacaacgaagttgccgctgtcctcctcgtcgtcgtcgttccaccgtccggagtcagacatgctccgtcgccggctgcctttcttcctcgactcgaggagcggcgtgccgccgcctccgccgccctggtagctcgcctggcacgcctctgcctcagcggcgatctgttcgcacctgatgagctggtgcaggacctctttcatcgacggccgcgtcagcgggttctcccccgtgcagatcacgccgagggtgaacacccacaggatatcttgcatgtaggccggctcccggatggcttcgtcgacgacgtcgtcgagtagcgggcctctttggtaccgccgccatgcccattctgccaggcacaggtccgcgccgctgtcgtttgcgaccttgccggttgtaagttctagcaggacgacgccgaagctgtagacgtccaccttctcgcttaccttcggcctgtacccatattctgcagagttcgttgccacagatcaatcggctgcaaattctcacggattgaattaaaatgactggcaattg

SEQ ID NO: 152707 - DNA, 134 bp, Zea Mays
tgacaccccagtgtcacctagggtttctcttaaaaagccacaccaagagccattacttcctgtgaaccaaattacttcctgtgaaccaaagtaagcatgagcatcaaaataacttaagtgacaaagaattcacc

SEQ ID NO: 152708 - DNA, 259 bp, Zea Mays
actttttttaaaatatgttttatgtttcctggaaacgatttgcactggcggttttattacgtcgaccgccagtgcaaatcgattttcactggcggttttattacgccgaccgccagtgaaaatcgattttcactggcggtcctcagttacccgcctgtaaaaatgatgatttctactgacccctagcactggcggttacgaaaaacgccattataaataggtttacaaccgccactatagaacttctctgtactagtgt

SEQ ID NO: 152709 - DNA, 381 bp, Zea Mays
taccagagaatacgctgcaaggagcctacgagcggcgctcgaggaactctgtcgagtgattcagctgttcctcgagagatagtgcgggacgagatcgacggtagcagcgttgttctctctttcttctcctctctgctcacatgatgcactcggctttggcacagacggatgagtggagggaggccgtggcctcaaatatacatccctaggggcgcccagattccgggccaagtccaagaacggccagcgtggtttctgggcgatcgagggccagttacaacaatctcggatagggatggtcgagatgaggagaacaatacagagaagatatttggggtgggattctgtgttttttgtccaaagccagcccccgaggtcagg

SEQ ID NO: 152710 - DNA, 963 bp, Zea Mays
cagccatagccgttggcctcgcctagggcttggcatccggctctctctgctggccaagccccagcaccggatctcgtccatccgtggccgctcccatcgatggcaagctccgccagccggtctgcatctccctcttcgggcgtcggccgtctccatcctccagccgccgagcttccccctgcatggacgcgtctgcgatggtcttctcccatggactgaacgtccatccccctgcagcttggccagggcacgccctctgttgggtccgccagcgatgagcgccgggaagggagggtggggggcatcgcccaaacttcacctctgagcccctgcatcaggttcctgacagcgaaagcctagcacctgctgcaacctacctgctcgatggaatgctcaacctctcgccggatctgtgcagctcttacgcgatgtcgttgaacccgctagttgttgacactgctcctcgtgcatcgcttattcgacaaaaatcccaagcccatggacagcacacgcgacatgcgcaacccaaatccgatcgaccaggttgttcgatgtgtgtgtgtttttctatcgcttatgtgtgtgatttgtagtttgttctaaatatgttctggtcgatgcagtgtatatatgtgtttgaatatgtttaggggtgaatggaagtgtgtggagaaagatagttaagtaaaaagggattaggatgttcatatgtttccgatcgttgttagaagtaaaattgatacaaaggttaggttggaatgtgcggatccgtgtgatgaacgcatttgttacctatgtataaaatatatggtcgagtaaatgaatcgaataatgagttattttgtcactccagataatcgattcttaggcggctttgaatccggcacatactcgcgaggatttgcttgttgttgtctaaatgtcatattgtgtatcgtgtcttgaatgcaatagaaaaataaa

SEQ ID NO: 152711 - DNA, 1406 bp, Zea Mays
aacaaaaatcacgtttccatccatcctggcgcacaagaggaagcggagagcgctctctctctcccgcccgcaatatcatggcgagagcacacctagccctggtcagcttcttcgctgcctcaattattggtgcggcgtccaagtcgttcaccatcgccaacaactgcgagcacacggtgtggccggggatcctctcgagcgccgggtccgcgggggtggacaccacaggcttcgcgctggcgccgggggagtcgcgcgctctgagcgtgccgtcggggtggtcgggccggctgtggggccgcacgctctgctccaccgacgcggccacgggccggttcgcctgcgtgaccggcgactgcggctcgggcaggcaggactgcggcggcggcggggccgccccgccggccacgctggccgagttcaccatggacggcagcgggggcatggacttctacgacgtgagcctggtggacgggtacaacctgccgatgctggtggcgccgcagggcgcggccgctgccgcggggggcagctgcgtgcccaccggctgcatggcggacctcaacggcgcgtgccccgccgacctgcgcgtggcggcttcgacgacgtcctccggcggcggcggcgtggcctgcaagagcgcgtgcgaggcgttcgggtcggcgcagtactgctgcaacggcgactacgggaaccccagcacctgcaagccgtcggcgtactcgcagttcttcaagaacgcgtgcccccgggcgtacagctacgcctacgacgacgccacctccaccttcacctgcgccggcgacaccgcctacgccatcaccttctgccccagcacgaccagcgtcaaggcggccggaggtagcccgcaggcgcaaggagccctgccgctgatgaacgccaccatggtgtacctcggcggcgaccaggtcggatccgccacagccgcggcccggctgccgagcggcctcctccaccacgtcgtggtcctcgccgttgtgtccctcgcgctagcaggggctctgtactgatggtgagccccactgcacagtgacgacgcgacgccacgcgggagacaatcgtgctcctacagatcgaagaacaaaaattgcaggacagaaacgagaaatggacgcatcacctgcctgccggtgtggacggcggtggtcctcgcggtccagcgagccccgacgacggtgtgattattcacccgtgccgagagagacgtgtgtagcggcgatgcagatttgattgaagacattattgtgcgttttcttagatatttattaattacacgataatacaaacatgtatttttatagcagttgagctcttttgtttgtgtaaaggctagacatcctctttttcttccattttctatatataagtcagtggttacgataata

SEQ ID NO: 152712 - DNA, 82 bp, Zea Mays
cgcattcagacactccacggaaccggcggaaataatcacgcacctgatgtatcaggggacaggggaaaacaatcgaaggttg

SEQ ID NO: 152713 - DNA, 2297 bp, Zea Mays
agaagtccaaatccgcagctcccatctctctccccatggccgcggcggcgccggaggctgcggacgaggttgcgccgtcggcgacgctgagcgtctacaaggcggcacggtgcatcaagcggcgggcgagcacgctgtacaacgcgctgcggagcgtggcggaggacgcggccttcgtggcggaggtcgcggcgctgtggccctcgctgccgctggtggccaacctccgctgcggtctctggtacgccccgccccgtgccttcgcagccacctgctacttcaagtccacggatggccacgccgggaactggtccttctcaactgcccgcctcaacctccacctcgccctcctcgctggggagagaggagggtgcataatagttgattcaacaaggagagggaaacgattccctgatagcatgtcaaagaccatacccatttggtgctctgtcttgaaccgagcgattgagaggcatcggctgcaggctatccacaaaagtgccgaagtgaattatcagtcgtctaccctgctgaatggagatgcagaaaacaactctgatctatctaattgggatagctcagtgcaccttcctgtatgggttctaggcacagagaaaaatgctatagaggggcgtattgatgaatggacagaccaatttgaatcatgtggtgcagatattcattctcttgcggtaggtttgcaaaaaccgctacgtcctctatggatctcacaaaggacacgtatatggttaaatgaagtgccggagcttgagtcatgggatttcactcctataattctaatttctgcatctgatgcagttgctacacaaaggatgtcttcagaattcagttggcactatattcctggagcaggagatgatgaagagagttgggcacgtggtctaactcctaccttattctggaaacattcatatgaccttattgatgctggaccagatcgttgtaaccagatagttgctgatattgttgaaaaagatagggtttatcgtgcacagagaggtgaacattgtcctcaaattacatgtaagtctctgaggagccttgctggtgccaaatgtaatgatgatcagacaaccgagatgtgtgctatgaacttggatcattgtaccagtacaatggatgcacactgttctaataatggccttctactcttttggattggaacatcaaaccttgcagtatcatctactttccatgttgcaggtgccttagttggtgtggactgcatactgaactgtgacagcacgtcgaagctacctgctagttcatcagaaaattcttaccttgagctatctattgttggctcaaaggatgaccgattttcattgatgagaaaccttccaaaagcagttgactttgcaaagaggaatttgatggctgggagaaaaattctcgtgtgctgtcaaaatggagaagatataagtatttgtgtggccttggcaatattggccttgttattcgatgataacggatgctttgactatggaaattattttgtcaaaagagatgttacaaagttggagatgaggaggaggctggtattcatctgtaaatttgctgtaaacgcacggccatctagaggaaacttgaaacaggtgtatggtttcctcagcagtcaaaaggaactgctgtcatgtttgacatagcttggtcttctgtgatgtagatgaggtatcagttctgatctgctgcttgagtgataggtgtggagtacgagctggggcttctgagtttgtctttcacacagtctgttgatcagatggtgcattacgatcatgcccagaggttttcattggaattgccaccatggcaatgatctcattctgggatcagtatctcaagccaacgtcaatcaacatttatttggagaagaatgaacacaaactttggtagagtgtgattgcaaagacaagctgatggcttggataacctagcgatgattcgagtattatcaatctgtgataaaatatagaagaaactaagttaaggacgtgcctgccagattggaaagtcattagtgcttaatagaattatgagggaaataatagtgagaagttatcttatttattttgcggtcttttttatctgcaaatcatgtttagcaaccatttccaatcgctttgttttagaaactggaccaactttcaaattgaagcgcatgacaaaaagcaagtgggcacttgaagaaaatgcatatcttacgaacttttctatgacaatgaatgggacaaattttctgttgagacatgtaaatagtagcagtaaaagtttcattt

SEQ ID NO: 152714 - DNA, 361 bp, Zea Mays
gggaaaatcaaacaaagtaaagccaatataaaagacatagtaaactgaagcatagtaaattggttcatccatcatgacatcacactttatctgtcattacaatagtttgtcaagcaaatcgaagtagtaaaagacagtataagcatcatcgtcagcaaactgaagcatcaacacaaactaaaggcagtatcaacaaaatgtttgtagcagaacactgcttttcatgagtcatgtgccagattgtgaagccaccgtcaacaaaatacatctaaaatttgttccttcaggtagatatggtagaggcagcgacatgagatggaaagaggtaccgcaaggaagcataatgttaaaacaaacatgc

SEQ ID NO: 152715 - DNA, 98 bp, Zea Mays
ctttgatcatgagacttcacagcaccagctgatcgagtactttacttatgtggatgtcccacttactggggtccagatgattgtttttagttagcttt

SEQ ID NO: 152716 - DNA, 1295 bp, Zea Mays
cctactcgtgctaaaacgcaagacaccaaagcaaccagtactactctctctctctctctctctctctctctctcacgatctcaccacaaaaaccaacacgctcggctcgatcgatctcgaaagtcaaatcagcgcaaggaatctaagtcgagcagccgcaaggaactgatcgagatggcgatggagccgaacatggcgaggcggctgtggcgcgtggtgcgcgccgtgctgttcatgctccgcaagggcatgccgaagcggaagctggccatggacctgcacctcctcatccaccgcggcaagatcgccggcaaggccctcggcaacctcatgaccgcccacgggcacaacagcgacaaggccgccgcggctgaggcggcgccgcctccgcagcacttctcgtgcggccgccgcggccacgacccgtcgctcgccgtctacgacccgcggggcacgcgcgaggtggagttcagctgcagcaacaccccgtcctacccgtccctccacctcgtccccacgggcaagcgcaggcgccgcaacaacaacaacaacaacagcagccgccgccgcggcacgcaccgcggcgcgaacggcgccgagcccggctggtacaactacgacgcgtccgacattgccagggccttcgagatcctcaacaacaacgagcagctgctcagcggcggcgacggcaacagctcggaccagccgtctcccctcgcgcttgtggccacgccgtccccggcgctgtgggcgagcttcggccgcacgcccgcgcacgccaggcagctgaggatcaccgactcgccgttcccgctcggggacgacgacggggactgtggccaggtggacctggacgccgaggatttcatcaagaagttctacgaccagctgcgcacgcagcaggcccttgccaccgccacgccggactactgcggcgggtatgcgcgaccggtctctggcatcgcctagaattcaacccacgcatccacacgcgtatgcatatgtaatatatatgtacgtgtccatagagtatttgtttgaacatgcatgatgcatgcatggataaagcatgttcgtttgagagctagctactggtggtagagctagtctagagcttggtctttgtgatatgagggagagattttgtacaacatcatcatatcatgtttgcaagctagatccatgcatgtatagtactcctatatatgtgtacgctgtatgtgtatattttgttgtagtgacatgtatcaattttactgcaagtaaggtacatgttgcaaagacattagcatata

SEQ ID NO: 152717 - DNA, 272 bp, Zea Mays
gtttacacctttatatgaagcagctttgcattctgccactcgatacctcaaagacatatcaacatatggatcacctattagagaggccccatgaagatctgctgaaagaaggttctcagacaatttctttttcttgtgctaaaaataggacacgtaattagctcatatagggtacaaattacaggaacaagcagaatgataaattacacgaaaatgctacacctaaaatacagcagcagcatgatgaaaaaagaataatgaagaaaacaaaa

SEQ ID NO: 152718 - DNA, 2415 bp, Zea Mays
atggcaaggaggtcgaagcacctggggcagggcgtggtggagacgaacctcccgtattgcttctttaggttgggcatgtcgtggcccctagaattcgacgaccaacaatcccggggaatgggagggcgggggtggccgcggaccatcaccacttccttggatgtagcacaggatctgggaggtgaatggagagcacgagatctgggaggtgaaggggatcgcgggggcaatcccgttgattgtgggggcgaccgcggacgtggggatgagcggaggatgtcgcgggtgggagtgggaggcagaaccgtggctgctcgtccgccagaaccaagcagggggactttcgtggacagcagttgtcactatgtgacaagggtctgccggtctggagatgtttctgtgctgaatttgcttgttccgcacaagtggatcggtgtaaacatgcttcatcattcaaatagccggaaccaaaggaacaggggatcaagaatcaaaactctactccaagcgaccttgctttcaggtgttgtcttttggctcctgtatcaggtgaagcattcctatgataagaaaaacgagtacttggatgatgctgaggaccagcttacccataatgatagaagcatattccaggcgaggaaacaaaaggcaggtagttacagtgatagcaacgtccaaatggttgtcgacaattctgatgtaacaactaaaccagaggaaggtgatgtagatcatcattctgatacttttgatcataacgagaagactgtagaaactgtgttcgataaagatagtactaacctgcatgaagatgacaagagaaacactgagagttcagaagcggaaggacaagtcaacagtggagatagtaatacagaagctaataataataagaatgaagatgaaaccaccagtcttgtagaaggacgcaagcatgatactgaatccaactctgctgctgagagtaaaagtgaagtcaattcaactggagatgaattgtcccaaaacaatcatgcacaagaggaaaacactagggaggcaagtggaatgtctcatgatgaagtagcgcatggtgacgaatcaaccagtgcaagtggaacttggaatggatcagatggagaaggtgagaaaaaggaggcagttgatactcaaactggttctgaaacccttcctgacgatgccaagaccgaagcaactgatgaccgtggtactaacagcctttctgacgaaacagggaacataccatcagttcatactgataattcacaaaatgatgccagtgaaaaccaaggagatgcaacatccactacctcagattcatctgagcatggcatcagtgaggctgtccatattgaaactggattggaacatggaagtgcaacaacatcatctgttactggatctggtgatgacagggataactcatctgatagctcctctgcaggaaaaaatacggagactctatctggtgatgataagaccaactccagcagcactccgcatgcggctccggatccgtattttgcggagtctagcacactattcatcagtccagcaggctccgtatccggctccgtaaaacgcacggcgtgtacccagactccccatttccacgctttctctctcctctccgcagctctctcgcgggcgcgcgtgcctgctggcgggccccaggtgtcatagactgcatgcggagtgggatggggagtgttgctggaaacggagccggatacggagaggagagagaatgtgtcggccgcgcgttttagggatacggagtcgcacactgctggagttggtctaagggcatggaaacaggtacaaccactgaagcgtcatattccaaagaagagaactctgagaacagcagtgtctcaactgaagcagagaactcccgaggagattcttccattggagtgaatggttcttcagaaacgtctaccaatggtgagcaggtggatcccaagactgaaactagcacatccaccagtaacgtgcacaatgaatctcaaggggctgatggcagttctggatcaaataactcaattggtaacggccctgaacaaaccggtaaaactgaaaggcagtgataccactatctagacacgaacattgttttagtataaagatttgtttcctggagattgaagaggctagtactgaaccaagaaaaactgttcacattgtggcttatggtgattttagttgatactgctgaagtacaattgtgcacatcgcaagatcggttgtctgctatgcttattgcttatgccatgatttctcgtcaagttgtatcagaacgagtcattatagctgtacggttattaatctctactagtacaatgcccgtcccttctgttgcaatgcaaggacacacaaattattcaaatataatattagtcaaattattcaaat

SEQ ID NO: 152719 - DNA, 1193 bp, Zea Mays
gccggcaggagcacgagggggggtcacgagcgacgaatccaaggcgcgaccgcaaccacgccgcaggcagcggtccggccgcccggccgaggccggcagctcatcacgagtgccagatccagtcgtggccaacgccaacacagcgccccctccccacgacgctgaagtcccagatctaaccacacagacacaacccaccacgtcgccaccaccaactaacccattaatccatcaacgccggtcctccacggtcacgcggaagtcaccgccgctctgccgcgctctcccgtagtcccgtaccgcatcgcgttcttcgctggcctcgctgtcgtctcatcgccattggcgtttcgcctgcagctgctcgtccgccagaaccaagcaggttcgtcccttcctagcccgcccgccgcctcgacgctcatctgagctgcgctccccctccaacgtcgtactactcgcgtggcgctttatctcgtaggtctgaatcgggcctccaccgagtgtgtgactctcgcgcggacgattttgcgtactgcgtagcatccatgcgcgattacctgcgcgctcgctgccaagcgcgcaaatgtgtcccgccgctcgcttagctgattccgcgccgcgttacatctgcctcctctgtctgctactctgcttcgctcgttctccagggggactttcgtggacagcagttgtcactatgtgacaagggtctgccggtctggagatgtttctgtgctgaatttgcttgttccgcacaagtggatcggtaagtccattattgcaggttccttttctggggttcaagcagcattgcgtttggctttgggtgggtcagtggctgtgacctgtaatgttccaggctgcaaatccagcaatgaagatgaaagtgacatttctacaatcattcttgctaaatcctgtccggcttgctgcctatttctggaatctaccagctgacagtttgacccctttggaaactgctcatattttactatttccactatttttttatttgtcgcgttttagttcaaaaatggacgacaaatattcgagaacggagttagtactatattactagcttcttctgttaggagtgatttcttctgttagcagtggtttgaaggggatttggagggaattaaaacccttgctaataaaaaaatgaatggaaagagatttaataccccttg

SEQ ID NO: 152720 - DNA, 2041 bp, Zea Mays
gccggcaggagcacgagggggggtcacgagcgacgaatccaaggcgcgaccgcaaccacgccgcaggcagcggtccggccgcccggccgaggccggcagctcatcacgagtgccagatccagtcgtggccaacgccaacacagcgccccctccccacgacgctgaagtcccagatctaaccacacagacacaacccaccacgtcgccaccaccaactaacccattaatccatcaacgccggtcctccacggtcacgcggaagtcaccgccgctctgccgcgctctcccgtagtcccgtaccgcatcgcgttcttcgctggcctcgctgtcgtctcatcgccattggcgtttcgcctgcagctgctcgtccgccagaaccaagcaggtgtaaacatgcttcatcattcaaatagccggaaccaaaggaacaggggatcaagaatcaaaactctactccaagcgaccttgctttcaggtgttgtcttttggctcctgtatcaggtgaagcattcctatgataagaaaaacgagtacttggatgatgctgaggaccagcttacccataatgatagaagcatattccaggcgaggaaacaaaaggcaggtagttacagtgatagcaacgtccaaatggttgtcgacaattctgatgtaacaactaaaccagaggaaggtgatgtagatcatcattctgatacttttgatcataacgagaagactgtagaaactgtgttcgataaagatagtactaacctgcatgaagatgacaagagaaacactgagagttcagaagcggaaggacaagtcaacagtggagatagtaatacagaagctaataataataagaatgaagatgaaaccaccagtcttgtagaaggacgcaagcatgatactgaatccaactctgctgctgagagtaaaagtgaagtcaattcaactggagatgaattgtcccaaaacaatcatgcacaagaggaaaacactagggaggcaagtggaatgtctcatgatgaagtagcgcatggtgacgaatcaaccagtgcaagtggaacttggaatggatcagatggagaaggtgagaaaaaggaggcagttgatactcaaactggttctgaaacccttcctgacgatgccaagaccgaagcaactgatgaccgtggtactaacagcctttctgacgaaacagggaacataccatcagttcatactgataattcacaaaatgatgccagtgaaaaccaaggagatgcaacatccactacctcagattcatctgagcatggcatcagtgaggctgtccatattgaaactggattggaacatggaagtgcaacaacatcatctgttactggatctggtgatgacagggataactcatctgatagctcctctgcaggaaaaaatacggagactctatctggtgatgataagggcatggaaacaggtacaaccactgaagcgtcatattccaaagaagagaactctgagaacagcagtgtctcaactgaagcagagaactcccgaggagattcttccattggagtgaatggttcttcagaaacgtctaccaatggtgagcaggtggatcccaagactgaaactagcacatccaccagtaacgtgcacaatgaatctcaaggggctgatggcagttctggatcaaataactcaattggtaacggccctgaacaaaccggtaaaactgaaaggcagtgataccactatctagacacgaacattgttttagtataaagatttgtttcctggagattgaagaggctagtactgaaccaagaaaaactgttcacattgtggcttatggtgattttagttgatactgctgaagtacaattgtgcacatcgcaagatcggttgtctgctatgcttattgcttatgccatgatttctcgtcaagttgtatcagaacgagtcattatagctgtacggttattaatctctactagtacaatgcccgtcccttctgttgcaatgcaaggacacacaaattattcaaatataatattagtcaaattattcaaat

SEQ ID NO: 152721 - DNA, 699 bp, Zea Mays
cccagcagagaggcgtgtgcggtcgccatggccatggcggcgccgttccttgcgacagcgagcaacaacatcggtagcgccagcaacggcgagatcaaacgccggcagacctcggccgacgccctccagcgcacggtgtccgacgtctcccacgagctccaccaccagcagcacggcgtcaacgacaataatcaggagaagaaggcggcggaggccgagaagcaccagcagctgctgcatccggggcctgaggtgcaggacgccaagtgtgagtgctgcggcatgtcggaggagtgcacaacagagtacatccgcggcgtccgcggcaggttctcggggcgctgggtctgcggcctgtgcgcggaggccgtcactgaggaggccgagaagaacggcgggacgctggaggaggcgctcaaagcgcacatgggcgtgtgcaagcggttcaacggcttcggccggacgcacccggtgttgttccaggccgaggccatgcgggagatcctcaggcgccgggccaagctcggacctaggtccaggtccagcatcaaccacagggaggtcagggaagcggataaggccggcagcggccgcacgggtatcgcacgctgctccagctgcatgccctctatcaccgacgacttcaacgagggcgtcgtcgatcaacaaaaactgattctcgatcggttggtcgattaa

SEQ ID NO: 152722 - DNA, 252 bp, Zea Mays
atggagcttgggaagctatgcgcagagacgaacagagagctgggcgtgcgcggtgagcaccagcgagtagcgggggcgcggtttggcgagggagcttggctgggcgaacgcgccagggagcttcggacccagacgcagggagcagggcgcgagctgcagcaggggtcgagcgccatgggagctccacgagctgctcggctggctgaggcgccatgggggagaagccagcgtgcagtagagaagcccggctga

SEQ ID NO: 152723 - DNA, 447 bp, Zea Mays
ttcaagcatgtttgggagcaaaacaaaattttactttctatgggaggatattgaagacatacaaggaatacctcaatcaatatcatcatggagtccatccattataataactcttcacaaaggtagagacatggatgcaaaacatggacaatggaaagcttaagttctgcttgcagtcttttgcatcatttagtgtgtccaataggacaataatggcattatggaaggcaagatctctgagcacagagattaatgtacagcttgctgaagagcaatcccaaattaacacccttcagagtgagtacattggggtctttgttggtattgaggaagccaagagccttcatatgaccaatatggtctcgattatggaggtgtttgcaggaggatctttggaaatgaaggtaatggagaaagttggatgccagaagtactcggcacaatggg

SEQ ID NO: 152724 - DNA, 1569 bp, Zea Mays
ccgtggattggcgggtccgcggcagcgcgcgctttttccccacccgtcgcggtcggcgggggctccatgcccgcggggccacgtgggaggccagggcgccgaaccctcccgagcccgcggcacgcgtcgcggctgcactggccaggccacggccccgcgcccattatatcctgcccccgccgcgcatcaccggcgaccacgtcgacaccctgccaccaacgacaggttaccttcttcgggcccttctcaccatttcctcatttaagccccgtgtgccttgctcctcggtgtttcctccagatagtagtgtttcctcagtggactagtgtgaagctgtgcttagcgtagcggaagggaggaaggacaaggcaaggcaactgatggcggcgggcggcggaggcggctcgccggcgccgttcgtgtggaagacgtacacgatggtggaggaccccgggacggcaggggtgatcggctggggcagcggcaacaacagcttcgtcgtcgccgaccccttcgtcttctcgcagacgctgctccccgcgcacttcaagcacaacaacttctccagcttcgtccgccagctcaacacctatggcttccgcaaggttgatccggaccggtgggagttcgcccacgcgtcgttcctgcgcggccagacgcacctcctgcgcaacatcgtccgccgcggcagcagcgccgccggtgccggaggcggaaagaggaaggacgccagccccacggagctggcctccggggacgacatgaccatggtggccacggaggtggtgcgcctcaagcaagagcagcgcgccatcgacgaccgcgtcgcctccatgtggcgccgcgtgcaggagacggagcgcaggcccaagcagatgctcgcgttcctcctcaaggtcgtcggcgaccgcgacaggctgcaccgcctcgtcggcgacgcccccgtgccagataacgggttcgcctccggcggtgccgccgagccgcccgccgcggaggtcggcgagaagcgggccaggctgctgctcgacggtgacagcatggtggcgctcggtcccgaggccgtcgacttcgccgggttctacagcggcggcggtgcgttcggcgatgttgccgtggatgctgccgctgggtcccgcggaggcgggttctcgtttgcgttcggcgtggacgcggggtactgaatgacgagcaggcgccgccattgtcagcagcttggcccgcttatgctgctgtcgagcttcctgccaatgccattgcgctgagcggcggcagccgtcacatggaagcatggcaggggatggatgataatgatgttaagttctatccctgctacatggataggatgtgtgtctgatgctgcttttcgtggatctatatgggcggggagcgactactgcgtcgagatctaaaaataaggggatatactgtcatggagtgtgaccttcgaagttcccaatatgagtaggtttgatgttgtacatgaccagtgcagcagcactaatatttcaatctcctgcggatacgcagctggaaaattggcatcgctattatttagcccttttctaa

SEQ ID NO: 152725 - DNA, 771 bp, Zea Mays
attagtacagctagcatggctaatgactccttgacgaggggccacataatcggggatgtcttagacccgtttactagctcagtgtctctaagtgtcctgtatgatggcagaccagtgtttgatgggatggagtttcgggcgtcggcggtgtcggtgaaacctagagttgagattggaggtgatgattttcgagtggcctataccctagttatggtggatcctgatgcgcctaatcccagcaaccctagcctgcgggaatacttgcattggatggttactgacatcccagcatcaacagatgatagcttcggccgagagctcataccatatgagagcccaagccccaccatgggcatccaccgtcttgtgttggtgctctaccagcaattggggcggggcacggtgtttgcgccgcaagttcgtcagaacttcaacttgcgtaatttcgcacgccgtttcaacctcggcaagcctgtggccgcgacgtacttcaactgtcagcggcaaacaggcacaggtgggagaaggttcacttgtgtttttgatcatgtcgttcaaggtgaaggccggcaagcttgaacctactactactagtaacgttcgcgtgtgcttatatggccgtatcggcgtacactacgtagcatgaaagctagctagaaataaataaagatgtatttctttcgcacatgtagctaggcttttataaaggcgtacctccaagggtattatgtccggcttttaattaataatcgcgtgataagggtggttagt

SEQ ID NO: 152726 - DNA, 1991 bp, Zea Mays
accacgaaattttaacttgttgcttctctccctcttctgttctgtctcgtccccttcacgaatcacgacagtattgaagcaattcctgattgctgatcctccacaatttctcccgtggattggagcgatctgaattggagccgtttactgctgacatggcgggaactgatcgcctctaccctgaaattgggacgtatgacctggagcccccgcaggtcccagcctccgccgggggcagcggcgaggaggaggccggggtttgcgacgcactggtgatgtgggacgacgaatccgacgcgtgtccctcccatgaagcggcccccatcatatttgagaagggcactagggatcctcctcctaaagttttcaaggaagaaaggcttgatgttgtccattattcagagttcagcgatgagatggcgactgagaaggaattcggagaaaacaactatgacagtttcccttcttgtgaacaaacaggcatcatatgggtgcctccctctgttccacctatgccaaaacatgatcacgatgagtggcaaaagggctttggttacaatagtccgtgcttcccagaggaagaatataagtgggatattgacgaagaaaatttggagatgacaatgtgggatgtgctctctgagatggttgttgcaggaaaggataaaatattatccattgcatcatttgatttaggaatgtatggcacgtctatgatttcagatttttgccttgaagagactttgaaggataaggcccaaacacttaaagatgtcagtgctggttctgaacatgctctccttgagacagaactaacaaagtggttgcctgatagtgcttcaacttcctgtatgctttgtggagcacgttttcatccaataatttgtgctcgccatcattgccgattttgtggtgggatattttgtggtggctgttcaaagggtagaagcttgatgcccccaaagttcatgaactcagatcctcaaagggtctgtgatgtttgtggagtgcgtcttgagtgtatacaaccttatttgatgaatcgattcagtcgtgcttgtcaacttccaactcaagacttgactgacctaagcaccttgaggtcatggataaacaccccatgggcagtcagaatggagtatgagatctacaaagcggcaaattccatacatggctattgtaaggtgggagagctgaaacctgagaagtcgatccctgattcaattctcagacaagcaaaagggcttgcaatcatcactgaggtaaaggttggagtgatgcttacatacaaaatcggtactggattggttgttgctcggagaggtgatggttcttggtcccctccttcagccatctctacttgtggtcttggatatggagttcaggctggaggtgagttggctgactacatcattgttcttaggaacaaagatgccatcaaaacttttagtggaaatgcacatatgtcaattggggctggtgttagtgcttctgctggtcattttggacgagtggcagaggctgatttccgtgctggtgatggtggttatgctgcctgttacacatacagttgtagcaaaggtgcctttgtgggctgtgcgctcaatggaagtgtggtgtccactcgagactcggtaaatgcccggttttacggtggtccgattaaggcctcagaaatccttcttgggtcgctgccaaaaccgcctgctgccgcaactctatacaaggctttatctgtattatttgataagatcgagaagtgaatctcctgatccttctctttagtttgcgacacgcagggtagcatggtgaattgaattatttatgggtcattggttcgctctatttaccttatcctagttggtgatgatgcaagtgtacacctgacgatccactgttttccatcaaactgaggtatttggaaccacaaaccactctgtaaattttgtagacaattctcgttagaaatgaaaaggaaaccattttttcaa

SEQ ID NO: 152727 - DNA, 872 bp, Zea Mays
atggagggttcctgggattgcgcgaccaagagcagggcaaggggaggatgtcgggggcaggggcagggcagaaccgtgcgccacgccactgtggacgcctacgcgcaattgataatgccggcgtcgtcgtcgccgtcgccgtcgccgctcgagatcgtgacctgctccgctctggaggatccgtggtcaccaatgatggccatcgccggcgacaagttcacggtggtgcagcgggtgccgagggacgtctcggacggcctcctcggcaagttcgcggacaccagcgcgttcggcttcgactacgaccgcagcgcgctctggtcgccgctggtgctgcgtcccgaggccatgctgctcgcgcagtgcccggccgggcgccgcggccgacggcggctacgatggcggcagcgtcgccggaaccggaggaagcagagctggcgtagtattaggacgcgtaactggatggtctttgggcttgcaggtgctctgcggctgctggcaatggtggtgacgtcgcatgcaatgttgcctacggacgtcgaagcatctggtctgaatcatcctgcaaacgttctgccgccgattcttggatttcttcattcttctgcagtattatgcattcaaagagtcaatactgttaccatatcgtctctctatgatcaacgacgatgggaagctgaggacgctatgtaatgtatatgtatgtatacatgcagcaacgtaaggtccaaatgtaagatgaaatgattgtgtaatgtatagtcacagataattacattgttttttcgatgtgcacattggacacgtatcattgtgttgtgattgttggaggcatcttcaacaggaatgaatacagtaattacacttgctaa

SEQ ID NO: 152728 - DNA, 80 bp, Zea Mays
ccctattactgcatatattcatttatatcccatttagattcaatttctagaaccagatattcattcgcttatgttttggt

SEQ ID NO: 152729 - DNA, 1125 bp, Zea Mays
tgccacagtgccgcggcccacgcggtgaaaacggaaaccaaactaaccaaaatcccccacccccccactgctctctctcgccccaaaaccagatcgccacgacaagggcagagggccccggaggggcgcgtagcaatggcggcaggctaccgggccgaggacgattacgattacctcttcaaggtggtcctgatcggcgactccggcgtcggcaagtccaacttgctctcacgcttcacgcgcaacgagttcagcctcgagtccaagtccaccatcggcgtcgagttcgccacccgctctctccaggtcgacggcaaggtcgtcaaggcccagatttgggacaccgccggccaggaacggatccgatactggaacacgcgaatcagcatgcaggcatcctattgttgactagagttgtaggatgacgatgataggatattcttctattgcacaaacgtttttttatactgcctggagcttggtttcgagtacgcagcagtgcagcaggtggcgtggactgaataagactttctgaagataccgtgcaatcactagtgcgtattaccgaggcgctgttggggcgttgcttgtatatgacgtcactcgccactcaacctttgagaacgttgagcgttggctgaaggagctgagagaccacacagaccccaatatagttgttatgctggttggcaacaaatctgatctccgccatcttgtagcagttcaaaccgacgaaggaaaagcattcgcagagagggaatcgttgtacttcatggagacctctgcgcttgagtcgaccaacgttgagaatgcatttgcagaagtcctagctcagatctaccgtattgtggacaagagagccgttgaagcaggtgaagatgcagcatctgggcctggcaggggcgagaagataaacataaaggatgacgtctcggcagtgaagaagggtggctgctgctctagctgagctgccgtgctgtaatttttttggggagttgtgggatgtagcttatgttatggcattttcagcgactggaaattggtagtggcatttagcagcctctattacctagagaggttattgtcaaactgaaaaaaactgaaggttagatcagtttagagctc

SEQ ID NO: 152730 - DNA, 1009 bp, Zea Mays
tgccacagtgccgcggcccacgcggtgaaaacggaaaccaaactaaccaaaatcccccacccccccactgctctctctcgccccaaaaccagatcgccacgacaagggcagagggccccggaggggcgcgtagcaatggcggcaggctaccgggccgaggacgattacgattacctcttcaaggtggtcctgatcggcgactccggcgtcggcaagtccaacttgctctcacgcttcacgcgcaacgagttcagcctcgagtccaagtccaccatcggcgtcgagttcgccacccgctctctccaggtcgacggcaaggtcgtcaaggcccagatttgggacaccgccggccaggaacgataccgtgcaatcactagtgcgtattaccgaggcgctgttggggcgttgcttgtatatgacgtcactcgccactcaacctttgagaacgttgagcgttggctgaaggagctgagagaccacacagaccccaatatagttgttatgctggttggcaacaaatctgatctccgccatcttgtagcagttcaaaccgacgaaggaaaagcattcgcagagagggaatcgttgtacttcatggagacctctgcgcttgagtcgaccaacgttgagaatgcatttgcagaagtcctagctcagatctaccgtattgtggacaagagagccgttgaagcaggtgaagatgcagcatctgggcctggcaggggcgagaagataaacataaaggatgacgtctcggcagtgaagaagggtggctgctgctctagctgagctgccgtgctgtaatttttttggggagttgtgggatgtagcttatgttatggcattttcagcgactggaaattggtagtggcatttagcagcctctattacctagagaggttattgtcaaactgaaaaaaactgaaggttagatcagtttagagctctgttactgtattgtgtatccggcaataggcatagtattttttatttttttatttttgctgtg

SEQ ID NO: 152731 - DNA, 1311 bp, Zea Mays
ctaaccaaaatcccccacccccccactgctctctctcgccccaaaaccagatcgccacgacaagggcagagggccccggaggggcgcgtagcaatggcggcaggctaccgggccgaggacgattacgattacctcttcaaggtggtcctgatcggcgactccggcgtcggcaagtccaacttgctctcacgcttcacgcgcaacgagttcagcctcgagtccaagtccaccatcggcgtcgagttcgccacccgctctctccaggtcgacggcaaggtcgtcaaggcccagatttgggacaccgccggccaggaacggtacgtttcgtttcagctcgctccagctcgtctcgcctctcttctctccccgccgctgccgcggcagctggtagtagatctgatttgcgtctcggttcggctgctgctagcgtgcgtatcctcgttgtcaccgttaagattgggctctcgctttggatctcgctgccgaattgcgttgcgtgctgctgttgattaccatttgtagggtttggtgcattttcatttcaggatccgatactggaacacgcgaatcagcatgcaggcatcctattgttgactagagttgtaggatgacgatgataggatattcttctattgcacaaacgtttttttatactgcctggagcttggtttcgagtacgcagcagtgcagcaggtggcgtggactgaataagactttctgaagataccgtgcaatcactagtgcgtattaccgaggcgctgttggggcgttgcttgtatatgacgtcactcgccactcaacctttgagaacgttgagcgttggctgaaggagctgagagaccacacagaccccaatatagttgttatgctggttggcaacaaatctgatctccgccatcttgtagcagttcaaaccgacgaaggaaaagcattcgcagagagggaatcgttgtacttcatggagacctctgcgcttgagtcgaccaacgttgagaatgcatttgcagaagtcctagctcagatctaccgtattgtggacaagagagccgttgaagcaggtgaagatgcagcatctgggcctggcaggggcgagaagataaacataaaggatgacgtctcggcagtgaagaagggtggctgctgctctagctgagctgccgtgctgtaatttttttggggagttgtgggatgtagcttatgttatggcattttcagcgactggaaattggtagtggcatttagcagcctctattacctagagaggttattgtcaaactgaaaaaaactgaaggttagatcagtttagagctc

SEQ ID NO: 152732 - DNA, 840 bp, Zea Mays
taattcccccgccgccgcccctcgccacgctccgccagccgctgccactcgccacgttccaccagccggcgccccttttccttctcactccgctggcgccggcgccgccttatccatggcgtcggagaagaagcaatccaacccgatgagggagatcaaggtgcagaagctggtgctcaacatctccgtcggagagagtggggatcgcctcacccgcgccgccaaggtcctggagcaactgagtggccagtcaccagtgttctctaaggctaggtacactgtccgttcctttggtatcaggcgtaatgagaagattgcctgctatgttactgtaaggggtgagaaggcaatgcagcttctggagagtggacttaaggtcaaggaatatgaactgctaaggaggaacttcagtgacacagggtgctttggtttcggaatccaggagcacattgatcttggcatcaagtatgatccttcaaccggtatctacggaatggatttctacgtcgtccttgagcgcgctgggtaccgtgtcgcccgacgccgaaggtgcaagtcccgtgttgggatccagcacagggtgaccaaggaggatgctatgaaatggttccaggtcaagtacgagggtgtcatcctcaacaaggctcagggcaacacttcttagggacgcacatgttacagcccagccgttagacatgtttaccagtagcaacagagttttcacctctactgaagttttgtcgatctcggatgatattatttgccaagactgtttggacagaggagcttatgatctctatactttgaaagctgaatgcgccgattcatttggttctgcaa

SEQ ID NO: 152733 - DNA, 390 bp, Zea Mays
atgagcagccatgatgccaaagtgctgcaaaacttggtcctcaatcttgcatcctcagtggaaactggtgctttcaatattaggagctttttagaagaggctttccgtcatttgggtgacgtgcattaccttctgaatgctctacttgctattcgaaaggaggtagacctgatggagcaggatgcactagagagcaaagcaaggtctgacccagagaaggagaggatggaggaacaaattaaccttgctgagcctgcgaatccagtgcctagacaatttactttcaccccccttcctcacctgaattgtatgaggccagtgacaatgactcctatgactcggacaggtcaactaggtatagcatttggaacctgtaatagtggtacctag

SEQ ID NO: 152734 - DNA, 1848 bp, Zea Mays
atgcagtgcaacaaccaaccttgcaacgcgtttgcaaaacaagctagcagctagctaagccaaaaacaaaaatggccatggccaagagcgtattagcgccgccggtgctcatatttgccttgttctgcagctactacgccgcctccatggcttcggcccaagctgccgcttcgtcgtccgatggcttcctccggtgcctctcggcgagcatccccagccagctggtgttcacgcagagctcgccttcgttcacgacgctgctcaagtcgtccatcaggaaccccaagttcttcacgccgagcatcgtgaggccgctgtacatcgtcacgccgacgaacgcctcccacgcgcaggacgccgtgctgtgcggccgccagaacgggatgcgcctgcgcgtgcgcagcggcggccacgactacgagggcctgtcgtaccggtccgagcggcccgaggcgttcgcggtgctggacctgtcgaacctccgcgccgtgcgcgtggacctccagacctcgaccgcgtgggtggactccggcgccacgctcggggagctctactacgccgtcgggaaggccagcaacgtgctggggttcccggccggcctgtgcccgaccgtcggcgtcgggggccatttcagcggcggcggcttcggcatgctgctgcgcaagtacggcctggccatcgacaacgtcctcgacgccgtgctggtggacgccagggggaggctcctcagcaagaacaccatggggagcgacgtcttctgggcgatccgtggcggcggcggcgagagcttcggtgtcgtgctgtcgtggcaggtcaggctcgtgcctgtcccggcaacggtggcggtgttcaacgtcccggtgcccgcgagccagggcgccgtggacgtggtcaccaggtggcagcaggtcgcgcctgccctgccggacgacctcttcatcagggtgctcgtccagcagcagacggccaacttccagtccctgttcctcggcacgtgcgacgcgctcctgcccgtcatgggcagccgcttcccggagctggggctcaaccgcagctcctgcaaggagatgacgtggatccaatccgtgccctacatctacctcggcagcggctccacggtggaggacctcctgaaccggaccacctccgcgtccgtgttcagcagcggctacaaggccacgtccgactacgtccggcaggccatcccccgggacgtgtgggccaacatattcagcaggctcgcgcagcccaacgcggggctcatgattctggacccctacggcgcgcagatcagcaccgtgccggagtcggcgacgccgttcccgcaccgcgccggcgtgctgtacaacatccagtacatgaacttctggcccatggctgggggaggagacggagccgtccagaccaagtgggtcagggacttgtacgcgttcatggcaccgtacgtgagctccaacccgagggaggcctacttcaactacagggacctggaccttggtgagaacgtcgttgtgggcaacgtcagcagctaccaggccggtatggtgtggggacacaagtacttcaaggacaactatcagaggctcgccgtggccaagagtcagatagaccccgacgactacttcaggaacgagcagagcatcccgccacttgccaacagcaactagtcatcagcaaaatggacagattttagtttcggtcttttacgtacatggtaggcacagattagactgtatcactattacatttacatgtgtttgcatcttgaataaatttcatgaaactactaaacgtgtgaaagtcctttaccacaaaactatgcttctttacactccaacaaatactgag

SEQ ID NO: 152735 - DNA, 2128 bp, Zea Mays
agtttccatgcagtaagccgtacctcccggaccaatgaatcgatgcgcgcgagtaggaaacggagaagaggaatgtccactcgtagctaggtcgtatcctctatataagacctatgtcctgctcttgtggcgaccaaacacgtacacggtgcagtgcaatccactcacctgctatggcgacatcaaggccccttgccttggcgctcctcttctgcgccttgtcagcctgcagccacgccgccatttcctacccaccgtcggccatgtccacggcggcacctgccaacaatggctttctctcgtgcctcatcaagagcgttcccccgcggctcctccacggcaagagctcgcgtgcgtacggctccatctgggagtccaccgtcaggaacgtcaagttcgtgtcggacaagacggtgaagccggtgtacattatcacccccaccgaggccgcgcacatccaggccaccgtggcgtgcgggcgcaagcacgggctgcgggtccgcgtgcggagcggcgggcacgactacgagggcctgtcgtaccggtccgccaagccggagacgttcgccgtggtggacctgtccatgatgcggcaggtgcgcatcgacggcaaggccgccacggcgtgggtggactccggcgcgcagctcggcgagctctactacgccgtggcgaagatgacccccagcctcgggttcccggcgggcgtgtgcgccacgatcggcgtcgggggccacttcagcgggggcggcttcggcatgctgctgcgcaagtacggcaccgccggggacaacgtcatcgacgccaaggtggtggacgccaacggcaccctgctggacaggaagtccatgggcgaggactacttctgggcgatcaggggtggcgggggcgagagcttcggcatcgtggtgtcgtggcaggtgcagctcgtgccggtcccgcccaaggtgaccgtgttccagatccacaggggggtcaaggacggcgccatcgacctcatcaacaaatggcagcaggtggcgccgtccctccccgatgacctcatgatccggatcatggccatggagcaggatgccatgttcgaggccctgtacctgggcacgtgcaaggacctcctcccgctgatggccagccgcttcccggagctgggcgtcaaacaggaggactgcaacgagatgccgtggatccagtccgtggccttcatccccatgggcaagtctgccaccgtgatggacctcctcaaccggacgtccaacatcaaggccttcggcaagtacaagtcggactacgtcaaggaccccatccccagggacgtgtgggagaagatctacacctggctcgccaagcccggggccggggtcatgatcatggacccctacggcgccaggatcagctccatcccgaaggatgcgacgccgtttccgcaccggcagggcgtgctgttcaacatccagtacgtcagctactggttcggcgagggcgacggggcggcgccgacacagtggagcagggacatgtacgcgttcatggagccgtacgtcagcaagaaccctaggcaggcgtacgccaactacagggacctcgaccttggcgtcaacgaggtggtcggcgacgtctccacctacgacagcggcagggtctggggcgagaagtactacaatggcaacttcgagaggctcgccaggactaaggccaaggtggacccctgcgactacttcaggaacgagcagagcatcccgccattgctcaagtgatcgatgatacccggtcccatccagatcctttcgaccgcgccaagcaaaaggacgacgagtcgtacatgattctgctgattatattaattagattgatcctgctttgcatgcgttgagccaggtgctttgcatggcgagttagctacgtagtttggcatcagccacatgcatgacattaaaacacaagctgacagccggctacccaagtaaataaggatacgcgacatacactgtcgtgccaattagtatggctgcttctttttttgaatattattagtcaacattttatttcattttccttgtactgatgctactccatgcatcttaattatattcatatatatatagacgtcgtcatgacatttttcttgcga

SEQ ID NO: 152736 - DNA, 98 bp, Zea Mays
agtcgttaaaaattcttcggtatatgttttcacagttccatccgaaaagccattaaaagcaggtctatgggtgctttcagatttgcactacgagaaag

SEQ ID NO: 152737 - DNA, 1781 bp, Zea Mays
ctttccgtccactcctttggtctcaaatcctcaatcatgcccggaattttgtaccagctcgtcgtcgccgccgccatctgcgccctctccagcggcagcatcgcggtcgcctcaggtttgaatgcgaccgactcgttcctcgtctgcctcgtcggcgcgggcgtcccgccgcgcctccttcagaccccggcgtccccgtcgtactccacgacgctgctctcctccgtacgcaacctccgctacgtcacgtcggacattcagcggccggtcgccatcgtggccgccaccgagccagcccacgcgcaggcggccgtacgctgcggccgccgccacggcgtccgcgtccgcgcccgaagcggcgggcacgactacgagggcctatcctacgcctccctcgaccccggcgagcgcttcgccgtgctcgacctcgccgctttccgtgacgtccgcgtcgactccgcgcgcgccgaggcgtgggctggatcgggggccacgctcggcgaggtctactatgccgtcgccgccgccagccgcgtgctcgcgttccccgctgggatctgccccactgtcggcgtaggaggacacctcagcggcggcggcttcggcacgctgatgcgcaggtacggcctcgctgcggacaacgtcattgacgccgtcctcgttgacgccgacgggaggctgctgaaccggaccaccatgggggaggacctgttctgggccatccgcggtggcggcggggagagcttcggtgtcgtactgtcttggaagctccgcctcgtgcgcgtgccggagacagtcaccgtgttcaccgtgcgccggtcaataaaccagtccgcctcgcacctcatcaccaaatggcaggcaatcgcgccggcgctgcccagtgacctcatcctccgagtcgccgtccggagccagcacgcgcggtttgaggcactgttcctcggccgctgcagccgcctccttgagcacatgcgagttcacttccccgaccttggcgtcacccaatcggactgcgaggagataagctggatccagtccaccgtgtacttcgccttctactcgagctccaagccactggagctgctcctggacaggagcggcgagacgcccagatacgtcaaggccaagtccgactacgtgcaagaacccatcccacggcacgtgtgggagagaacatggtcatggctggagaagcccgaggccgggctgctcatcctggacccctacggcggccggatgggcagcatctctccgtcagcgacgccgttcccgcaccggaaggggaacctgtacaacctccagtactactcgtattggttcgagaatggcactgcggcattggagaagcggatgagctgggtcagggggctgtacgaggagatggagccgtatgtgtccaagaacccaagaactggatatgtcaactacagggacctggatcttgggacgaacgagttggaggacaatgtgactagctacgccagggcgaggatctggggggagaagtatttcaaaggcaattttgagaggctggcagctgtgaaggccatggcggatcctaatgacttcttcaggaatgagcagagcatccctcctcttcccgctgcaaaaggatggggctccatttgagtggtcgtttgtttcgtagctttgtggtggtggatttcttgtctacgtttgtgaattgtgatcacggctgaggatttgcatgggtgaagtgtagaatgcactattgtattccgtgttctgttgagctgagttctctttgatttgttttt

SEQ ID NO: 152738 - DNA, 1827 bp, Zea Mays
ctgaacacaggcgttcttcaacctcggggctgcggagccgcctcttggcctcttcttgttcctattcgttctcgcctagtaggctactaggctggagcagaacggagaaccagagacaaggaggttattcggacacagaaactcctctctcggtaagcatgaaaccctacccaagtgccgtctgattgtaattgagcgagctttcttgagcgggtgcgtgagcaatcgaaccccctttctctgttccctccatcgccgcgtggaggagggcggtgctgattgattcttctccggacctcgattgtattgatttcctgctttctccgtcgctaccgtaccacccacgcaagcaaggaagcaaatcacccaataggatccgttactacttttagtagcgatttttctacttatatactcctcctgcctctatctttccttgcatcttcgtgagaatttggaaatcaggcttcaatccctagccgcacattgcgacgccgcgtcctccttgcctccgtgccgcatccgcaggccgtagcgtcgtgcccgtgtcctcccgactctcggtcccggcctccccgccgcgtccgcgtccgcagcgccgcgctcgcgtcctctcggtcccggcctccgtgctgcatctgcagcgccgcctccactccaccggcaccgggtggtgggcgtcgtgtcgccgtccgccgccacacgcccgcgccagaagcgggagctgtccgccgcgtcttcatctaggactggaagtctgtgaaaccgccgacgacgacgccgccgctgccatctgccatcaccgccgaggacgctgtcgctgcccacagaggacggcaggacgccgctagcatcgtcaatctgtaagattttagtcgtttctaatggtgcctggggttggattggatgctggctccgccactgattggaattgagaaaaaaaatataggccttgggacatggagcagaggaaggaagcttgagaagcaggatagcagacgtaccaccacggctatggggaggccaagcagggggaggcagcgcatcgagatccgccacatcgaggatggcggccggctgcaggtcaccttctccaagcgcaagtctggcctgcaaaagaaggcctccgagctctttctgctctgcggctcgcccgtcgccatcgtcatcttctcccctggcaaaaaggtgttcgcgctgggcactccctcagtcgaccacgtcctccgccgctatgctccgatccccggcgaagaagaggaggatggactccttccggtgcttcaggacacagacgatgtgagcgctatcaccgaccgcgtggaggtggagggcattgtgcggcgaacggaggagaccaaggcgcgttcggtgatggagaaggcacggatggacgccatcgggaagacggtgaggcagaccgcggcaaaggccggaaggaagttctggtgggaggcggactctggcaagctcggggaggctgagctaccagaattcgccaaggtgctccgtcggctcagggtcaacctgcaacgccatttggactcgctgtcggcgtctactaggcagctgcagtaggagtggctgtgcaaaactgggtcattcgatttggttagggcttggatgtttaggcacttaggatagtgtcattgactacaaaaaaaatcaaaatgttagtgtgattagtctgccgcttgacaagaagtgcttaatgtgattagcatttgctgattagttttgaccacctaagggcttgttcgttttggtgataatccacatgtattgggtgggattgagccggtttaaatccaaaacaagtcaaaatac

SEQ ID NO: 152739 - DNA, 1325 bp, Zea Mays
ctgaacacaggcgttcttcaacctcggggctgcggagccgcctcttggcctcttcttgttcctattcgttctcgcctagtaggctactaggctggagcagaacggagaaccagagacaaggaggttattcggacacagaaactcctctctcgatcaagatgacagaaccatcatcatcatattcattgccctctaaaaagcgacaacgctctcctgatgataatgaacattcactagacagaggtcgaatttgtttaagccttgatgataatcttacgttcaatgataccatgatagcacttcaattgatgcgcacacagtttccaaagctggataaggttttggcgcagccattcattttgcagtcacaattgtatagcagtgtgaaggatagaacacaagttgacagagacttggagtcatttaagaaagacaaagtgttacggatattcaaacttagttctgggcaagatgatcatgcaatcatgttcatggatgattatttgaaacaggtctcttttgctattaaacggtcagggggtaaagaccaagatggtagtgaagtatttgagtggtttgagagatatgtggtcccttcaaaactggatgttagcataactcaactagagctgtgctcactgttatcacagggtggtgatgtaacagacaaacatatcacactattgatgaatgctggtctcttaactcgtcaacttattgatccaaatatttactggttttctattccaagaattggccccatattgaaaggcctatcccagggcaggaatgaaattctttcgctgttgaaccgtagaaagtacaaggagatgccgctttcttcactggagaatacaaagttaagattatcacctcttgatacgcggttcctccttcgcgatttgattggatctgggcacataaaaacagttcaaacgcccactggtttgctcgctcgcgtatcaagggattaatagagctctctgtcgtaatcctacttatctgtctgccttatctcttatctgatcatgcacgatttggtgattctagtttcgttttgcattttacctgttttcaaacagcattcaacatgaccccaactcgtcgatagtctttttcattttaagagggtggttgggactccgctctacgttttgatgttccgtggaaactccagcaactcggttccccaaaaagcgtttttgatggagaaattcgttttaagatgtagatgtggagttcagggttaattacccaccaatgtcattcattaaatgccattcattatgatgagaaaataacatttcgtctcaatctattccttc

SEQ ID NO: 152740 - DNA, 1320 bp, Zea Mays
ctgaacacaggcgttcttcaacctcggggctgcggagccgcctcttggcctcttcttgttcctattcgttctcgcctagtaggctactaggctggagcagaacggagaaccagagacaaggaggttattcggacacagaaactcctctctcgatcaagatgacagaaccatcatcatcatattcattgccctctaaaaagcgacaacgctctcctgatgataatgaacattcactagacagaggtcgaatttgtttaagccttgatgataatcttacgttcaatgataccatgatagcacttcaattgatgcgcacacagtttccaaagctggataaggttttggcgcagccattcattttgcagtcacaattgtatagcagtgtgaaggatagaacacaagttgacagagacttggagtcatttaagaaagacaaagtgttacggatattcaaacttagttctgggcaagatgatcatgcaatcatgttcatggatgattatttgaaacaggtctcttttgctattaaacggtcagggggtaaagaccaagatggtagtgaagtatttgagtggtttgagagatatgtggtcccttcaaaactggatgttagcataactcaactagagctgtgctcactgttatcacagggtggtgatgtaacagacaaacatatcacactattgatgaatgctggtctcttaactcgtcaacttattgatccaaatatttactggttttctattccaagaattggccccatattgaaaggcctatcccaggaatgaaattctttcgctgttgaaccgtagaaagtacaaggagatgccgctttcttcactggagaatacaaagttaagattatcacctcttgatacgcggttcctccttcgcgatttgattggatctgggcacataaaaacagttcaaacgcccactggtttgctcgctcgcgtatcaagggattaatagagctctctgtcgtaatcctacttatctgtctgccttatctcttatctgatcatgcacgatttggtgattctagtttcgttttgcattttacctgttttcaaacagcattcaacatgaccccaactcgtcgatagtctttttcattttaagagggtggttgggactccgctctacgttttgatgttccgtggaaactccagcaactcggttccccaaaaagcgtttttgatggagaaattcgttttaagatgtagatgtggagttcagggttaattacccaccaatgtcattcattaaatgccattcattatgatgagaaaataacatttcgtctcaatctattccttc

SEQ ID NO: 152741 - DNA, 1373 bp, Zea Mays
gaatttggaaatcaggcttcaatccctagccgcacattgcgacgccgcgtcctccttgcctccgtgccgcatccgcaggccgtagcgtcgtgcccgtgtcctcccgactctcggtcccggcctccccgccgcgtccgcgtccgcagcgccgcgctcgcgtcctctcggtcccggcctccgtgctgcatctgcagcgccgcctccactccaccggcaccgggtggtgggcgtcgtgtcgccgtccgccgccacacgcccgcgccagaagcgggagctgtccgccgcgtcttcatctaggactggaagtctgtgaaaccgccgacgacgacgccgccgctgccatctgccatcaccgccgaggacgctgtcgctgcccacagaggacggcaggacgccgctagcatcgtcaatctgccttgggacatggagcagaggaaggaagcttgagaagcaggatagcagacgtaccaccacggctatggggaggccaagcagggggaggcagcgcatcgagatccgccacatcgaggatggcggccggctgcaggtcaccttctccaagcgcaagtctggcctgcaaaagaaggcctccgagctctttctgctctgcggctcgcccgtcgccatcgtcatcttctcccctggcaaaaaggtgttcgcgctgggcactccctcagtcgaccacgtcctccgccgctatgctccgatccccggcgaagaagaggaggatggactccttccggtgcttcaggacacagacgatgtgagcgctatcaccgaccgcgtggaggtggagggcattgtgcggcgaacggaggagaccaaggcgcgttcggtgatggagaaggcacggatggacgccatcgggaagacggtgaggcagaccgcggcaaaggccggaaggaagttctggtgggaggcggactctggcaagctcggggaggctgagctaccagaattcgccaaggtgctccgtcggctcagggtcaacctgcaacgccatttggactcgctgtcggcgtctactaggcagctgcagtaggagtggctgtgcaaaactgggtcattcgatttggttagggcttggatgtttaggcacttaggatagtgtcattgactacaaaaaaaatcaaaatgttagtgtgattagtctgccgcttgacaagaagtgcttaatgtgattagcatttgctgattagttttgaccacctaagggcttgttcgttttggtgataatccacatgtattgggtgggattgagccggtttaaatccaaaacaagtcaaaatacatctcaatcccatccaatacactccaatacacatgtaatatcaataaccgaacaaggcctaacaagtgaactgtgactcatg

SEQ ID NO: 152742 - DNA, 2269 bp, Zea Mays
cccccaagcgctgctcaggtcatctatctccctctttgccatccggcccatccccagcctgtgtttgcatcccatttgcttccccccctcttgcccatcccctgtgctgtgctgtgaactgcggccgggggcatccttgttggggggtggcgtaggaggctgctgacactactgcagagcagggcagccatgaggcttcctctccctctgctggccctggtgtgctgcgccctgatggcgcgccagcattgcgctgcggcgggcaaggcccggcacttgaggtgggagatcagcaacatgttctggtctcccgactgcgaggagaaggtggtgatcggcatcaacgggcagttcccgggcccgacgatccgcgcccgggccggcgacaccgtccacgtccagctcaggaacgcgctccacaccgagggcgtcgtcatccactggcacggcatccgacagatcgggacgccgtgggcggacggcacggcggcgatctcccagtgcgccatcaaccccgaggaaaccttcacctaccgcttcgtcgtcgacaagccggggacgtacttctaccacgggcactacgggatgcagagggcggcggggctgtacgggtcgctggtcgtggacgtggcggagggggaggaggagccgttccagtacgacggcgagctcaacctgctgctcagcgactggtaccacgagagcatccacacccagatggtcgccctctcgtccaggcccttcaggtggatcggcgagccacagtctctgctgatcaacgggagaggccagttcaactgctcgctggccgcagcgcacacgcagggggccaccaacacgcagtgcgccgccaccgccgccaacacgcagtgcgcgccggtggtactccccgtgcagcctaacaagacctacaggctcagggtggccagcaccacctcgctcgcttctctcaacctcgcgatcgggaatcacaagctgacggtggtggaggccgacggcaactacgtggacccattcgttgtggacgacatcgacctctactccggcgacagctactctgtcctgctcacgacggaccaggacacgtcctcgaactactgggtcagcgtgggcgtgcgcggccggctgcccaagacggcgccggcgctggcagtgctcaactaccgccccaaccgcgcgtcggacctgccagccctcgcgccgccggtcaccccggcgtgggacgactacggccacagcaaggcgttcacgtacaggatccgcgcgcgcgccgggacgcccccgccgccgccgacggcggcccgccgcatcgagctgctcaacacgcagaaccggatggacgggcgcatcaggtggtccatcaacaacgtgtccatggttctgcccgccacgccgtacctgggctccctgaagatggggctcaagtcgacgctggcggcggcgcgccccgcggagacgttcagccgggaatacgacgtgacgctgccgccgccgaaccccaacacgacggcgggggacaacgtgtacgtcctggcgcacaacaccaccgtcgacgtgctgctccagaacgccaacgcgctgtcgcgcaacgtcagcgaggtgcacccgtggcacctccacggccacgacttctgggtgctgggctacggcgacggcgcgtaccgcggggacgccgccgacgaagcgcggctcaacctccgggacccgccgctgcggaacacggcggtcatctttccgtacgggtggacgatgctccggttcgtggcggacaacccgggcgtgtgggccttccactgccatatcgagccgcacctccacatgggcatgggcgtcatcttcgctgaggctgtcgacctcgtcgccaaggtgcccaacgaggctgtatcctgtggcgccacggccaccgcgctcatggccggcggtcacctgtgattgccatcaaatattggtggccaggctagggaaccgcgcgccttgcctcgcgcgcatgcatattaatgcccttctgtcgtacgagatctctggtcattaattagtgttatttattaatatttcttctatctttttttccgtttattgagacgtgaacctagagtgtttgtgcttggctaaccatcccatcttagataggttgttgcatcgtaagccaattccttaaattaatgaaaatgcctttttctcaggtgttggtagatcacctctattccacaattgaaacaaaatttaaggcctgagaaagtgatggactattctataccaaaaaaacaaa

SEQ ID NO: 152743 - DNA, 150 bp, Zea Mays
atgggatcgaggaacggaaacgtggtacgcggtacgctacaaaaactaggatttaacactaccggaacgagattgttcccacattcccagaacggaacgaacgttcccggaacgaggaacgtggccaagttcccagttcccggttactaa

SEQ ID NO: 152744 - DNA, 1044 bp, Zea Mays
cacactcaaaagaagtgcctcgaaaaggaaacgagcaacaggagacagtgaaggggaaggagggggagcgaccaatcggactatcggagcatccaatccaccaccggccgctcgctgttcatccgttacactagcagtataaaacaaaaccctgtgcctctcctttgccggcgcgcagtccagcggcctttccttccttccttcctgtccggtcgcgttccattgctcaccctcctcctccattctccactggtatcgtcgtttcgttccagagagccgtgaaaggcgtaaggcgaaacgaagcgcgaggggcaggatgccgtaggtggcgaccgtttgtgccgctccgatcgtcgggaggtcggcgcctgaggaggccgtgctttgagttcgactggaggagagccttggcgccggtcgttacggcaagtggcgccgtcgccttctacgcaactttgccaggtcagcgcagcctcacgtcgtcgtcgacgattcaggtctccttccttccgttgcattgttcaaaattctcttagagcttttcttttccccttggcattgccgcgcagctgctgtaaactgtaagcatcgcaccgtcacctgttcattcctacgtgggtgagcaacttggtgcagtctgttatgctacgactaacgtagaactgtagatcggaaagcgatcggggtccactacgtggcggctctcgacgtcaacggcgagggatagggcagcgtgtttgacgaaatgctttgcgcagtcaaaagatggccaccacctcgctactctgtttttagttgtacatcctcctctgttctgcgacatcctcgcgcttctaatggacttcccataggatgataagctagtttatgagtcggcaagcgcatccaaaaaaaataaaaacaaaaactcgcaaccatacgttgtcgccacctttaaccggcattgctgttcacgaattggtagacacttgtgctcgctttagcttttcgctctaatatcgtcgtgcactttgctatgtacaacttgccaaattgctctagcag

SEQ ID NO: 152745 - DNA, 1585 bp, Zea Mays
cacactcaaaagaagtgcctcgaaaaggaaacgagcaacaggagacagtgaaggggaaggagggggagcgaccaatcggactatcggagcatccaatccaccaccggccgctcgctgttcatccgttacactagcagtataaaacaaaaccctgtgcctctcctttgccggcgcgcagtccagcggcctttccttccttccttcctgtccggtcgcgttccattgctcaccctcctcctccattctccactggtatcgtcgtttcgttccagagagccgtgaaaggcgtaaggcgaaacgaagcgcgaggggcaggatgccgtaggtggcgaccgtttgtgccgctccgatcgtcgggaggtcggcgcctgaggaggccgtgctttgagttcgactggaggagagccttggcgccggtcgttacggcaagtggcgccgtcgccttctacgcaactttgccaggtcagcgcagcctcacgtcgtcgtcgacgattcaggcccgaatacttccgccagctgctgaagcccgttgccgcacgccttccgagcaacctcaaacccgaaccaaactaaccgaaacgcaatttttggattcagttcctagcaatccaaacacaaacacagccagggatcaagcaacacgactcgagtggtccaatgcagggagaccccggttacgggtacggtggctacggcgccggcgccggcggctacggctacgactacgacgtcgccgccaactgcgccggaggcggctactactcggcggcgaacgaccggtaccctgccgcgcctccgcctgctgcagcctatgaggatccgctcggtggtcggaggcagcacgacttcccggcgccgctcacggggctggagttccagccgtcggacacctgtcccaagaactacgtcatcttcgaccagacgtacgaccggagccgggtgatgttccacccctccctggccaacaacttcggttcctctgccggcggatacgactacggcaaccactgctacggctacgaccagacctaccccggcgagagcgcctaccacggctgcggcgacgacgccggcgccggcgccggcggcgtctcggtccggcagaaggaggacaccgacgagatcgacgcgctcatgagcacggaggaaggcgacgaagaggacgacgtgctcagcaccggccgcacacccggatgccgcgccggcggctccccggattccacgtgctcatccggcgggtacgctgggaacagcagcggcggccggaagcacgagacgggcggcggtgagaagaagaaggagcggatgaagaagatggtgcggacgctcaaggggatcatccccggtggcgaccggatggacacgccggccgtgctcgacgaggccgtgaggtacctcaagtcgctcaaggtggaggtcaagaaggccggcgcgcgtgggtcaagcagctagctttccagctgcaactggtagtctggctttgggctttggcagtcgaaataggagttatctccccgcgcaccggcagataagatgagaccgaccgcctctcattttgattttggcatcagatgccattctgtgt

SEQ ID NO: 152746 - DNA, 1791 bp, Zea Mays
cacactcaaaagaagtgcctcgaaaaggaaacgagcaacaggagacagtgaaggggaaggagggggagcgaccaatcggactatcggagcatccaatccaccaccggccgctcgctgttcatccgttacactagcagtataaaacaaaaccctgtgcctctcctttgccggcgcgcagtccagcggcctttccttccttccttcctgtccggtcgcgttccattgctcaccctcctcctccattctccactggtatcgtcgtttcgttccagagagccgtgaaaggtatggtgatcttcaccatcaccaccaccactgccgctacatgctggctgttccagttttctagagacttcatcagagctttgctgtttcaggcgtaaggcgaaacgaagcgcgaggggcaggatgccgtaggtggcgaccgtttgtgccgctccgatcgtcgggaggtcggcgcctgaggaggccgtgctttgagttcgactggaggagagccttggcgccggtcgttacggcaagtggcgccgtcgccttctacgcaactttgccaggcccgaatacttccgccagctgctgaagcccgttgccgcacgccttccgagcaacctcaaacccgaaccaaactaaccgaaacgcaatttttggattcagttcctagcaatccaaacacaaacacagccagggatcaagcaacacgactcgagtggtccaatgcagggagaccccggttacgggtacggtggctacggcgccggcgccggcggctacggctacgactacgacgtcgccgccaactgcgccggaggcggctactactcggcggcgaacgaccggtaccctgccgcgcctccgcctgctgcagcctatgaggatccgctcggtggtcggaggcagcacgacttcccggcgccgctcacggggctggagttccagccgtcggacacctgtcccaagaactacgtcatcttcgaccagacgtacgaccggagccgggtgatgttccacccctccctggccaacaacttcggttcctctgccggcggatacgactacggcaaccactgctacggctacgaccagacctaccccggcgagagcgcctaccacggctgcggcgacgacgccggcgccggcgccggcggcgtctcggtccggcagaaggaggacaccgacgagatcgacgcgctcatgagcacggaggaaggcgacgaagaggacgacgtgctcagcaccggccgcacacccggatgccgcgccggcggctccccggattccacgtgctcatccggcgggtacgctgggaacagcagcggcggccggaagcacgagacgggcggcggtgagaagaagaaggagcggatgaagaagatggtgcggacgctcaaggggatcatccccggtggcgaccggatggacacgccggccgtgctcgacgaggccgtgaggtacctcaagtcgctcaaggtggaggtcaagaaggccggcgcgcgtgggtcaagcagctagctttccagctgcaactggtagtctggctttgggctttggcagtcgaaataggagttatctccccgcgcaccggcagataagatgagaccgaccgcctctcattttgattttggcatcagatgccattctgtgtatctgactactacctagcttggccgctgggcctcccaactcaacggcgtctgcgagaagatggtcaaggaggccaacggtgggcaggcttggacgcggtcatccatgagtggttccgacagtggtggtaatggattggaatcttaaacc

SEQ ID NO: 152747 - DNA, 1770 bp, Zea Mays
gtccagcggcctttccttccttccttcctgtccggtcgcgttccattgctcaccctcctcctccattctccactggtatcgtcgtttcgttccagagagccgtgaaaggcgtaaggcgaaacgaagcgcgaggggcaggatgccgtaggtggcgaccgtttgtgccgctccgatcgtcgggaggtcggcgcctgaggaggccgtgctttgagttcgactggaggagagccttggcgccggtcgttacggcaagtggcgccgtcgccttctacgcaactttgccaggcccgaatacttccgccagctgctgaagcccgttgccgcacgccttccgagcaacctcaaacccgaaccaaactaaccgaaacgcaatttttggattcagttcctagcaatccaaacacaaacacagccagggatcaagcaacacgactcgagtggtccaatgcagggagaccccggttacgggtacggtggctacggcgccggcgccggcggctacggctacgactacgacgtcgccgccaactgcgccggaggcggctactactcggcggcgaacgaccggtaccctgccgcgcctccgcctgctgcagcctatgaggatccgctcggtggtcggaggcagcacgacttcccggcgccgctcacggggctggagttccagccgtcggacacctgtcccaagaactacgtcatcttcgaccagacgtacgaccggagccgggtgatgttccacccctccctggccaacaacttcggttcctctgccggcggatacgactacggcaaccactgctacggctacgaccagacctaccccggcgagagcgcctaccacggctgcggcgacgacgccggcgccggcgccggcggcgtctcggtccggcagaaggaggacaccgacgagatcgacgcgctcatgagcacggaggaaggcgacgaagaggacgacgtgctcagcaccggccgcacacccggatgccgcgccggcggctccccggattccacgtgctcatccggcgggtacgctgggaacagcagcggcggccggaagcacgagacgggcggcggtgagaagaagaaggagcggatgaagaagatggtgcggacgctcaaggggatcatccccggtggcgaccggatggacacgccggccgtgctcgacgaggccgtgaggtacctcaagtcgctcaaggtggaggtcaagaaggccggcgcgcgtgggtcaagcagctagctttccagctgcaactggtagtctggctttgggctttggcagtcgaaataggagttatctccccgcgcaccggcagataagatgagaccgaccgcctctcattttgattttggcatcagatgccattctgtgtatctgactactacctagcttggccgctgggcctcccaactcaacggcgtctgcgagaagatggtcaaggaggccaacggtgggcaggcttggacgcggtcatccatgagtggttccgacagtggtggtaatggattggaatcttaaacccaaatagagaagttttattaaaaatctaaggaaaagaattcatcatccaatctatttcagttccaaatcactgatgtccagtctaattcaattgttttagagtccaaatccatcccggacgattcaaataatgccagaagtattatgttcatatgttgacatcatgtttgaagctgcaccttagtactaaaatctcacgccttcaaattttgataaacttaaccaaaattggttcgagattattcgat

SEQ ID NO: 152748 - DNA, 180 bp, Zea Mays
aggatgtatccagaaacatgtgaaatgcttagggctagaagaaggttatcgtgtgactttttactacacaggggcagctggctcaggcatgttgagctagcttcttcactgttgaggccatgttcttgccctggtgctcggcaagggcaagtttggtctcactgggttgtttgatgccat

SEQ ID NO: 152749 - DNA, 2063 bp, Zea Mays
aaagacgcaaaacgtccgtctgcccctctctggttataattttgggcattaattgcacgtctcctccccacctctccttccctccacccgtgccgtcgcctcgcctatccgatctgccacctcctcccgtctcgcacgttccttcccaactccgcagcgtagcctctccgcggcgcgatccagatccaggtttttcagcatgggcctggtgaaggaaggcatcgacatggaggagggaacccttgagatcggcatggagtacaggactgtatctggtgttgctgggcctctggtcatattggataaagtaaagggcccaaagtaccaagaaattgtaaacatccgacttggagatggcaccaatcgccgtggtcaagtcctggaagttgatggcgaaaaagctgttgtgcaggtctttgaaggaacttctggaatagacaacaaatacacaaccgtgcagtttacaggcgaggttttgaaaactcctgtctcacttgatatgcttgggcgcatttttaatggttctggaaaacctattgacaatggccccccgatattgcccgaagcctacttggatatctctggaagttctattaaccccagtgagagaacctatccagaggagatgatccaaactgggatatccaccattgatgtcatgaattccattgctcgtggacaaaagattccactgttttctgctgctgggctccctcacaatgaaattgctgctcagatttgtcgtcaggctggtcttgtgaagacattggagaaaggaaagcatgctgagggtggtgaagatgacaactttgctattgtgtttgctgctatgggagtgaacatggaaacagctcaattcttcaaacgtgattttgaagagaatggttccatggagcgggtcaccctttttctgaatctggctaacgaccccaccattgaacgtattatcacccctcggattgctctaacaacagcggaatatttggcatatgaatgtgggaagcatgtacttgttatcttgacagatatgagctcttatgcagatgcacttcgtgaggtttctgcagcccgagaagaggtgccaggtaggcgtggttatcctggatatatgtatactgatttggcaacaatatatgagcgtgctgggcgtattgaaggaagaacaggctccattacccagattcctattctaacaatgcctaacgatgatatcacacacccaactcctgaccttactggatacattactgagggacagatatacattgataggcagctccataacagacagatttatccacctattaatgtcctgccatctctttcacgattgatgaagagtgctattggtgagggcatgacacgtcgagaccattcggatgtatctaatcagctttatgccaactatgctattggaaaggatgttcaggccatgaaggctgtcgttggagaggaggcactctcgtctgaggatctgctttacttagagttccttgacaagtttgagaggaagtttgtgacacaaggagcatatgacacacggaacatcttccagtcactcgatcttgcatggacattgcttcggatcttccctcgcgaacttctccaccgtattccagcaaagaccttggaccagtactatagcagagatgcttcccactgaatcactgatcgttgatcagtgttccaatattttggcaagtgcagctttgaataaattgaacagattggcctcgtggccattttcctgtatttatctgtagtcaggtccaattcttttctgttggtgagcgcaagttattcatagatgactcggtcatgggaatatttgtaatattatgtcatgtatcgttaaatttcagttgttttgtttcagctgccagaactgttagcaagagtattctggagctggaagctcgaacgcaactggttgtatctatatccgtgaatgccgaataaaggaggggcaataaactgcagcgaaatatgtgctgtcagacattgttgaaaattttctcgattttgctgttttgagatgtgagaaatcttttcactgaaccaaa

SEQ ID NO: 152750 - DNA, 1835 bp, Zea Mays
gccgtcgcctcgcctatccgatctgccacctcctcccgtctcgcacgttccttcccaactccgcagcgtagcctctggtcatattggataaagaaattgtaaacatccgacttggagatggcaccaatcgccgtggtcaagtcctggaagttgatggcgaaaaagctgttgtgcaggtctttgaaggaacttctggaatagacaacaaatacacaaccgtgcagtttacaggcgaggttttgaaaactcctgtctcacttgatatgcttgggcgcatttttaatggttctggaaaacctattgacaatggccccccgatattgcccgaagcctacttggatatctctggaagttctattaaccccagtgagagaacctatccagaggagatgatccaaactgggatatccaccattgatgtcatgaattccattgctcgtggacaaaagattccactgttttctgctgctgggctccctcacaatgaaattgctgctcagatttgtcgtcaggctggtcttgtgaagacattggagaaaggaaagcatgctgagggtggtgaagatgacaactttgctattgtgtttgctgctatgggagtgaacatggaaacagctcaattcttcaaacgtgattttgaagagaatggttccatggagcgggtcaccctttttctgaatctggctaacgaccccaccattgaacgtattatcacccctcggattgctctaacaacagcggaatatttggcatatgaatgtgggaagcatgtacttgttatcttgacagatatgagctcttatgcagatgcacttcgtgaggtttctgcagcccgagaagaggtgccaggtaggcgtggttatcctggatatatgtatactgatttggcaacaatatatgagcgtgctgggcgtattgaaggaagaacaggctccattacccagattcctattctaacaatgcctaacgatgatatcacacacccaactcctgaccttactggatacattactgagggacagatatacattgataggcagctccataacagacagatttatccacctattaatgtcctgccatctctttcacgattgatgaagagtgctattggtgagggcatgacacgtcgagaccattcggatgtatctaatcagctttatgccaactatgctattggaaaggatgttcaggccatgaaggctgtcgttggagaggaggcactctcgtctgaggatctgctttacttagagttccttgacaagtttgagaggaagtttgtgacacaaggagcatatgacacacggaacatcttccagtcactcgatcttgcatggacattgcttcggatcttccctcgcgaacttctccaccgtattccagcaaagaccttggaccagtactatagcagagatgcttcccactgaatcactgatcgttgatcagtgttccaatattttggcaagtgcagctttgaataaattgaacagattggcctcgtggccattttcctgtatttatctgtagtcaggtccaattcttttctgttggtgagcgcaagttattcatagatgactcggtcatgggaatatttgtaatattatgtcatgtatcgttaaatttcagttgttttgtttcagctgccagaactgttagcaagagtattctggagctggaagctcgaacgcaactggttgtatctatatccgtgaatgccgaataaaggaggggcaataaactgcagcgaaatatgtgctgtcagacattgttgaaaattttctcgattttgctgttttgagatgtgagaaatcttttcactgaaccaaaggtgttag

SEQ ID NO: 152751 - DNA, 1200 bp, Zea Mays
ttgtgacatcttgttaacactctgaatggatactggaaatgtgccttgaatggatgcttatggtactattttgttcttcattaaaaatcaactcagaaatgtttatcatgcatcccattttatatatttaagattaaccttttctattagctaattaaatgacaaattgatgtcgttgtttctaataatgctacatgggcattgtgcttttttgtaggtttctgcagcccgagaagaggtgccaggtaggcgtggttatcctggatatatgtatactgatttggcaacaatatatgagcgtgctgggcgtattgaaggaagaacaggctccattacccagattcctattctaacaatgcctaacgatgatatcacacacccaactcctgaccttactggatacattactgagggacagatatacattgataggcagctccataacagacagatttatccacctattaatgtcctgccatctctttcacgattgatgaagagtgctattggtgagggcatgacacgtcgagaccattcggatgtatctaatcagctttatgccaactatgctattggaaaggatgttcaggccatgaaggctgtcgttggagaggaggcactctcgtctgaggatctgctttacttagagttccttgacaagtttgagaggaagtttgtgacacaaggagcatatgacacacggaacatcttccagtcactcgatcttgcatggacattgcttcggatcttccctcgcgaacttctccaccgtattccagcaaagaccttggaccagtactatagcagagatgcttcccactgaatcactgatcgttgatcagtgttccaatattttggcaagtgcagctttgaataaattgaacagattggcctcgtggccattttcctgtatttatctgtagtcaggtccaattcttttctgttggtgagcgcaagttattcatagatgactcggtcatgggaatatttgtaatattatgtcatgtatcgttaaatttcagttgttttgtttcagctgccagaactgttagcaagagtattctggagctggaagctcgaacgcaactggttgtatctatatccgtgaatgccgaataaaggaggggcaataaactgcagcgaaatatgtgctgtcagacattgttgaaaattttctcgattttgctgttttgagatgtg

SEQ ID NO: 152752 - DNA, 839 bp, Zea Mays
ctcatattgatatagaatgtgaagtctttgtttatttttactaccttgatagcttatctgtgttgatgtgatggcattatattctttcagatttatccacctattaatgtcctgccatctctttcacgattgatgaagagtgctattggtgagggcatgacacgtcgagaccattcggatgtatctaatcagctttatgccaactatgctattggaaaggatgttcaggccatgaaggctgtcgttggagaggaggcactctcgtctgaggatctgctttacttagagttccttgacaagtttgagaggaagtttgtgacacaaggagcatatgacacacggaacatcttccagtcactcgatcttgcatggacattgcttcggatcttccctcgcgaacttctccaccgtattccagcaaagaccttggaccagtactatagcagagatgcttcccactgaatcactgatcgttgatcagtgttccaatattttggcaagtgcagctttgaataaattgaacagattggcctcgtggccattttcctgtatttatctgtagtcaggtccaattcttttctgttggtgagcgcaagttattcatagatgactcggtcatgggaatatttgtaatattatgtcatgtatcgttaaatttcagttgttttgtttcagctgccagaactgttagcaagagtattctggagctggaagctcgaacgcaactggttgtatctatatccgtgaatgccgaataaaggaggggcaataaactgcagcgaaatatgtgctgtcagacattgttgaaaattttctcgattttgctgttttgagatgtg

SEQ ID NO: 152753 - DNA, 118 bp, Zea Mays
gatccagcccaggtatgggaagaaatccctccagtcgacctcgattgcacacatcatcatgtcagccacagcagtctgtaatatggcattttttcgaagcaaaagggtggtcgtttaa

SEQ ID NO: 152754 - DNA, 1834 bp, Zea Mays
ataaagaatgcttacatccttctattttttcagtattaaatcagagattacatttgtacctttggctttgcgaagcttataatacgaaggaagaattgtagcttcgtagatgggaacaatcaactctttctctgatgagaagatccctaaatgcatagcactattcctctatttataggcgcagagtacattctttggtaaaattacatttgcatccttaagcctatatatttcaactatttaacatggcaggggtaaggatgtctattcctttcgttagcttggcgaacggacccgaggagacttgctttggctttctctggctttgtccctggtccctttgtgatggcaacccaaagcttgtacatttgcctttaatcaattcaccaaagaagcttttggcagaggtacctataatacttagaaatagttcagaagacaaccattatcttagtgttttgaggaccttcaaaagaaagagacccccaaaagtagccccttgcggtattagttcgtttttttgcaacaagctcagatcccgaaacaaatgaaggtcatgtgccgaaggtatgaaaaacaccttctccgagcttaataacgaacaatgaaagtgattcgtaagagtcaatgtgggacccatttataacgtggcttgctgaaattataaacggccagcaaagcgcaagcgccggcgagctgagcatccatgacggacgacagcaggatcgatcgattgcgcacaaaggtgggtggctcggtgagcaagtctatggacgaacgcaggggtgagattgagcaggtggaggcgctgtccatgatttaccgaggccaagcgcgacgaggggcgagctgggcactgagcagaggtcgagctggatggagccgccacgggaggggcagggaagaaataccacgacgcgaagggaaggaggcctcggcacggcggccaaggccggacagacagcaggggcgcggtttggcgagggaggagctcggtcgggcgccatggggcgagctcgctgcgcggaggtccgacgagctaaagccgggcgcgatggacggcgcgggaaattgagggaggtttgccaaggggagagaggagggagcggctgggcgggcaccaatagggaagaagacgcgccagggagctgcgcacgcggcaagcagagagggaggaagatgggcacgcgaccatggaagcagggcgtggccaggcgagcagaaagccgcacgaggaagcagagcgcgcgtaggggtgatgggcagggcggagatcgaattcgggcgagcaaggagcagcggctggactggagtagggagatgcgcgcgcgcagggagcttcgacgacggcgactaccggtgaactccatgaccgggaggatgcggcgtccaagagcttacgctgggagagagacgtgccatggcgacgagctggagaccgatagagcgtggacggtgaacagggagcagagaggaaggagccgagcagggagccggcgcgccatggaacttcgcggctggggaagaggagtagagcgcgctgggaggagggaggaagaagagggcttgggcgcgcggcgagccaggcgagcgcagggagcagcgtgcgcgggaagccgctcggctgtgcgcgcgccggagctgtgcggtccgccgagtagagagggaggtggagggcaggctgggagaggaagccgtggtgctgaagaagataaggagagagagatgcagtggaaaaatctttaagggaggcggcggcggcagatttttttttgaagaacccaggggcggcggctcggcgttggggctggagggagatgaacggaggcagccg

SEQ ID NO: 152755 - DNA, 474 bp, Zea Mays
aatcagagtattgccgcgcatgtgaagcacactctcactgctgaaaaaaagggggtgtcgacagaacagcggcgcgccatctgcgaggcttttgagtctgccaataacacccatggcttaaacctgactgcccataaatacccgggcttacgcggcacactacaaaccgcatccactgactgcgacacaattgtggaagctgcagcactattacccgcttttgatcaggcagtggaaggcaaccgccaccaggatgattacggttcaggtcttgggatggccgaagagaaatttcactattatctcgatctcaatgaccgctatgtctatttttatgagccggttaatgttgaatactttgcgatgaataactggtccttcctgcagtcaggaagtattggcatcgatcgcaaagatattgaaaaggtatttaccgggcgtaccgtattgtcgagcatttaccaggatcagcgt

SEQ ID NO: 152756 - DNA, 85 bp, Zea Mays
gggcactgcattgctattgctttagtggacaaattgaagctaaatttaccatgcaggagtgatcatgatgtacaacagcacaatg

SEQ ID NO: 152757 - DNA, 781 bp, Zea Mays
tttagctcctcaccaatcaatttatcatggcaaagggatattgttggaaacaatctaacagcgtggaaccggttattaccacacattgctagcattgccttgagccaagattaggatgagtttagatggaatctccacccaaatgggcagttctctgtgaaatctcattatctggccttgatttagaacgatgtcccgaacttaaacaaaagattgtggaagcttaaaactccactgaaaattaagatctttttgtggtatttacaccgaggaatagtcttgacaaaggataacatggccaagagaaattggcagagcagtaaagtttgttgttttggtcataaagatgaaacgattaatcatttattttatgaacgttgctttgctcgagctgtgtggacgtgtggttcatgttgtttttgtcacaaaggaatgtttcgattcatgctgcttttgggttttccaggcctcatagtgtttctcacatgttcggatcttggttgtggggcattggaaaagaaaaaaaacaactagttctattaggggcggctgctacttgctggtcgttatggttttacagaaatagtttggtatttgataaaaacataacttacctcctttgcaggttgtcttcaaaattgttcattggctctgttcatggactattttgcagcgaccaacttcacgggacgtagttgttgcgacatatcaacacttgatgctagtggccaagggtttttttacccaggcacatggttggcagtctagccttaggatcgat

SEQ ID NO: 152758 - DNA, 816 bp, Zea Mays
cgctcaggcaccggagtcacaccatcctcgctgtcaatctcgtcgcaaaccctccgcccctctccggtctggcactaccacgagcttccagaccccccgcccgagaaatgttgtagcgtctcatgctgggatgggcggcgtcagcgccgtctctcgccctgctgtggtcctcctcctctaggtggagtcctgcacttctttattgtctcgtcttgctcgctcgtcccctaaatcatgtctgcgtcgccccctccatttcacgagtttgctcgcgttggccgggggacgggggtccggagcctcgtgccgcactccatcagagaccctgcaacctttccgcgagcgctgttgttcctgctcctgccggcggccttgctaccaacccgagcgtgcgtgtgttggtggagccaggcaattccagtgcacggcgtggattcagttttcgatcagtgaattgcacatacagctacccttgagtcaaattgattgtatccgcttgtttctaacatctcccttccacagttccacttcggcgaccggtgtgacgaagcaggttagtctgtaagttgttgagctgtggagcaatcgtttcctaatgggaaattcgatctgaaatggcaaaggacctgatggtggaagtaaatcgtacctatgcaacctatattcaacaagccctaacagtgtgcaattgcaaaaaaatgccaaagtcttaatttaggaatttaaagaaaggaaaagttaactttcagacaattggaggcgtgtgttcgatgggggggtattttgtgctgaccactcatcacacatatgcatggc

SEQ ID NO: 152759 - DNA, 321 bp, Zea Mays
caccatcctcggcggtggcctgcacgacagccgccatgctgctggacccggaccaccttacgccgtctcttgaacggcagcgaccggtccacacgtccactctctttcaacttcaccttggggtgtgctggtgcggccacggcggcgtcgttgggcgaggcggccttgccgctgagcgctgagtgggtcggcgccactggccccgagccggccatcgtcgccccgccgcgcctgccgctgcctgataccggacaccttgcaaagcgactgcgggtctgcgccatgcaaaaaaggtacatacagtcatgggctttgcagtaa

SEQ ID NO: 152760 - DNA, 653 bp, Zea Mays
acggctgcaaatgagagagagagagaagctaagcacaagtcgataatagccgatagaatatcaaaagaggagatgtctacctggaaagctcacacgagaggtgaaaatccaggcaggacagcagacggctcacgggcaggcatggtcactaaaatgacagaagaggtgagcacgtattagtcacatagtcataagtatatgaaatgtgaataaatacatacacagagaaatatggagatggtttagctggcatgaagcaaggggatcttatcatctggtatgttgagcagcagaatgccaaaggggcatatagttctactgcagaggtgaaggaagaagtgaagtgtatcaaggccattatagagagacttatacagcgggaaggccatcttatagtcattgacgacggtactgcagccgcagccgaagatggcagtggcgcaaggagaacatcagagagtagaatactggcagttaacccgaactatgttattgattagcaacggcatcttaacatgctgttaacccaagccagttgatgtgttagctaactgaagctatgaatctggtgatgtgtcgtagtgctctagagtagtgtacatctcgtcactggtgtgctcgttccaagggagcacattgatctctcaaactac

SEQ ID NO: 152761 - DNA, 1265 bp, Zea Mays
ctcacctccaccaaacacgcatccacccgccagcactactgctgcgtggcaaaaatccctggatcagcattgtccaactccgacacgtctctctccctagcttcaatcttcagccaccgctttatataggatattttcctcatcgtgttcaacaggtgcttggaatcagcctcaggtttcttcctcccagtccgtaggagccacgtagctctctgcgtcttccatggtcacttctccggcgttactccagctcgccccgacccttgcgccttagtgtttatccatgctccatgccatggcttctcctaggtcgctctcttcgcgggccgtgatgcccctctgctcctgcctcgcctagccgtgtgcgtgctctctccgcgtcgagcactcactgcagctcgacaccgaccccctcccacatctcccccacaccatcgtctttccctagtggcgagctcgcctagtgatggtcgtcgttggtccctgcgtccttccccggtcgtctcacctcccttcgacgcccctgttttttttcagcttcggcgtccatcgcgtcctgctccttccattcgtatgctctggtgatcgtccaccccggcgtccagcgctgcccttgtctcttcgggttttgtctccccaacaccagtcggacgctccttccattcatatgctctggtggtcgtccaccccagcgtccagtgctgctctcgtctcgtcgggctttgtctccccaacatcagtcgctgcttcaactcatgttcgtggatgccgtatctacgactccgacactccctacacataatctgtgttttgtgttcatcgccgaataaaaatccctggcgttttggagaaaggaagatgaagtctgctcttcgatccctaggtgttcagtgttatgcgcgaaccagaaatcgttgccgatatcacggtcttcaagttgagtttattttattggtacgttaagtgatcacgtgatgtggaggaccagagctgagtcgaccacaagatgttgttaagcgtgggcttcttcgcaaggtgatgctgatggacgaacctaaggatggatgacctgatcaagaaccatgatgaagatgatcgtcaagtgaacgtcgtctaacaaacactaacgtagtgtttattccaggcaagccctggtgcatgcaaccccttccttgtgtttttaaataatttttacacactttaagtctagtgatatatgcactaggtttataggagttgcttggaaaccatttgatgcattgact

SEQ ID NO: 152762 - DNA, 1392 bp, Zea Mays
ctcacctccaccaaacacgcatccacccgccagcactactgctgcgtggcaaaaatccctggatcagcattgtccaactccgacacgtctctctccctagcttcaatcttcagccaccgctttatataggatattttcctcatcgtgttcaacaggtgcttggaatcagcctcaggtttcttcctcccagtccgtaggagccacgtagctctctgcgtcttccatggtcacttctccggcgttactccagctcgccccgacccttgcgccttagtgtttatccatgctccatgccatggcttctcctaggtcgctctcttcgcgggccgtgatgcccctctgctcctgcctcgcctagccgtgtgcgtgctctctccgcgtcgagcactcactgcagctcgacaccgaccccctcccacatctcccccacaccatcgtctttccctagtggcgagctcgcctagtgatggtcgtcgttggtccctgcgtccttccccggtcgtctcacctcccttcgacgcccctgttttttttcagcttcggcgtccatcgcgtcctgctccttccattcgtatgctctggtgatcgtccaccccggcgtccagcgctgcccttgtctcttcgggttttgtctccccaacaccagtcggacgctccttccattcatatgctctggtggtcgtccaccccagcgtccagtgctgctctcgtctcgtcgggctttgtctccccaacatcagtcgctgcttcaactcatgttcgtggatgccgtatctacgactccgacactccctacacataatctgtgttttgtgttcatcgccgaataaaaatccctggcgttttggagaaaggaagatgaagtctgctcttcgatccctaggtgttcagtgttatgcgcgaaccagaaatcgttgccgatatcacggtcttcaagttgagtttattttattggtacgttaagtgatcacgtgatgtggaggaccagagctgagtcgaccacaagatgttgttaagcgtgggcttcttcgcaaggtgatgctgatggacgaacctaaggatggatgacctgatcaagaaccatgatgaagatgatcgtcaagtgaacgtcgtctaacaaacactaacgtagtgtttattccaggtactagatttgtgctactgtggatggtgttaagcgccaattggcacgaccttcttataagtctaagtacctctcctataattcttattgaggattgtcattgagctagcatatatttcaaaattataaataatttataacatttcaaagtttaattctttgaatcacttttgcaatcactccgataaacataatgtaaatttgttgtaacttgtaacttttgtaataaagaaattccgctgcaaaaa

SEQ ID NO: 152763 - DNA, 1602 bp, Zea Mays
aaacgtgggaaaattcccgccactctcaaatggtgaaatggagcagtggctggcgctgttccgccacctcctcacctcccccgccgccaacgccgccgccttctcctcttccccttcctctggagactgccccagcgcgcctccttcggccgccgcgctcctgcgcctccttctctcgccagcgcccacgctcccggcctccgaccccacggccgccatcctcttccagaccctacctcccttccttcagtcccaggcgctctccttcctcgtctcctctgctggcctcctcgatccgcacctcctccgtaccctcgcagcccgtgtcctctccgctccacatggcctgtatggactatgggtcctccgcggcgcccgtcatctgatcgacggattgcctgaagaggaaggcgtccctggtgttgcctccgaggagtttatcgatgggtttcacgatccgccaacgtggcttcaagaagcgggcgcgcgggcgcatccggtcttgccgtggctccctgttgattgccggagcttgatgggtagcgggtgcgggacccgtgctggtcgtggcggtgagtatggttcggacgggattgggttggagaacttggtgttggtgcaaaacgaggacgtggagatgcaggaggctggacgtgttcttcctcctcaagctcctccgcttgaggactcaatcatgcagagagtcgtggctctgcagaaggagattgtgacagtggaatctgtcttggcggcccggcgggtggcgaaggatttgcaggacctttgcgttgagtccaggaatgctgcaggagtgcttagcttagtacagccgtgggaagctgacgatgacactctgagggtcttgctttccaatttagtgcttgaggaagatggggtggatggaaaaggaccagcacttgttctgtgttctgttttcttaccacagttactggagcttcaaagaccagcttcatccgttctcctttccactgcattgggtctctgcaagcgccacccagctgcagcactggaagctgtactctttccactggttcttagaaagggcggcctaaatgttccccagtgtgatgtgttaacacgtattatcaaggaatgcatgcatccactgcaagttactgctttctgccataggctgctttcaggaaaggagcaagagaggaaaccaatctgtatgcctcagcatatggagaatatcggtactcatttggtgtggacggaatctctgtttgcactattttacaacattcttagtcaagatatttacttgacaccaagcaccgttaatgagctaatttctgtgattgatgaccgggcatcagagttcccgaggtcattgaaatttggcaactttctgctgtgcttcttatcaaagtgttggcatgaatgtaagcatcagagggttttacttgagagagctgccaagagaaccaacactttccttactaaagctatattggcgaaactgcgccctgccagttgaaattatatttctaaagcatttaaatttgaacaacttgtgagtctcatttctactcagaaatatgacgatttaattttctttgagggtatgttcaattttat

SEQ ID NO: 152764 - DNA, 1646 bp, Zea Mays
gatcagttttcggtcagctcatgctacacgtggttgtggacttctgatacacatggcaatgcagtcctgcgagggggaagcagtcacagcggcggcgcccgagcagattgatcaagtcggcgaagtggtggcagccgcagcggcggcgtcggaacccgacgccacgagcgaagcgcgtgtggtggagacgccacaagaagaagcagaagaccccgagccggcgcaccgcggtagcaagagccggaccccggccccagcaccagcgtcgccatccacggtcaaggagcggcagatcccggtggacccggcgtcgctgcgccgtctgggcatggtggccgatgaggactggccactttccgcgccttccgtgctcacggaggtggtggtgcagttcccgatcctgcctcctctccgtcgtcccacgttcgttggcgccagcctgccgtgctcagcggcctcctcccccgtgcacggcgctcgtccaggtgctggcgccaagttggaggagcagcctgctgcccacagtccgacgtctgcgctacgctccctcgcccgccagcactccgccgcgctcgcccggctcgtcgccgcgccgtccacgctgtcaaggtccgcgtcccgcgccgagggcaggaccatggcgccgcacgacgacgaggagccggtccagctccagcccaagacgatcgccgcggaggacggcttcacgtgcggcgcgctgtgcatgctcttccccggcttctccaagaggaggcccgccttctccggcacaaccgctggcacggccgtgtcgtccagcatgcagaggcagcagtcgggcttgaggcctcgtcgtcgctgcagcgcgtcgcgggtggcgtcgctggagaggttcgagtgcgggtcgtggagccctcctcttccgccgccgcatgtggccgcgcagcacgacgccgtcgactgccacgcgacggaggtggccaagaccagctgcgcggatgacgacgcggaggcgccggtcaagatggcgttcgtgttcgacggcgaaccacccgcggcgaagaaggggatactgaagaactcggcatcgtcgcggctcgactcggccagggcgtcgacgtcttcgcagaggcacgtgaggttctcgacggtggcggcggcggatgcgtcgtcgtcgtcgtcgtgcccatcatcgccgtgcatcacgccgcgtctggcgagggccagggcggagttccacgcgtttttggaggcgcagagcgcttagagccagttgctgtgcgcactgatattctcctgcgtggcaacgttggctcttggctgcgggcctgctgccatagaccgggaacatttttcacctttcatccattgccattgttttccctgcttggggttgggtctgagtcgaatttattttccctatcgcggagaccgagggattcatatatgtagagctaaatgcatatagctcagccaggcttcgtagatgcaacatgcaaattattggttgcctgaatcgatcgttaggcctggcccatacagatccgtagaaacgataatagaaacatctcaggtggcgtttggttgagcgctggtaatggtaatgttaatgtaaataaatatattgatatctgttaccatgtgaataaaaagtgctaattatttgg

SEQ ID NO: 152765 - DNA, 1544 bp, Zea Mays
gcgccgacgtggcccgctttccattcacaggcatatagcatagccccaccaaccggaagccgatagatgcccgaccaatctaatagcgccgcaacgcgaagcgcgaagccgcgaagcctcgcctgtctggtcagttccttcgcgcaccggcaccgcggcggcagttcagcatggtggcagcatccgtagccgagcgggcctatgaggcggcgacgcggtccgcgctggtggcgctggagcgcaacctcatcccggacgcggtgacccggcgcctgacgcggctcctgctagcgcagcgcctccgccagggctacctcccctccgcgccgctccagctgcagcagctcctccagttcgtccactctcttgaagagatgcccattgccattgaaacagacaaagctaaagcccaacactatgagttgccaactacatttttcaagctagtgctgggaaagaatctcaaatacagttcctgctatttccctggtgattcaagcaccctagaagatgctgaggttgcgatgatggatctgtattgtgagaggtcgaaactacaagatggccaaagtatcctagatgttggatgtggatggggatccctttcactgtacattgcaaagaaatataggaactgcagtgtaacagggatatgcaactctactacacagaaggcttttatagaagagcaatgtagggataacgagctgtcaaatattgagataatcgtagccgacatcagcaagtttgagatggagcgctcttttgacaggatcgtatctatagagatgtttgagcacatgaaaaactacaagtcgcttcttaagaagatatccaggtggatgaaagaggatggcctactattcgttcacctcttctgccacaaagcatttccatatcactttgaggataaaaacgatgatgactggatcacgaggtatttcttcactggaggaacaatgccatctgcaaacctacttctatactttcaggaggatgtatctgtggtagatcattggcttgtcagtggcacgcattatgctagaactagcgaggagtggctaaaacgtatggacaagagcatcacttcaataaggctgatcttcgaggaaacttatgggaaggaatcgactaccaaatggatagcttattggcggacgttcttcatctcggtagctgaactttttggatacaacaatggagatgaatggatggttgcccattacttgttccgaaagaagtagaggctactgcttggaagtacccaatcaaaaatcaatgttttcagtaattttgtcatgtacatcgacgaacaactccttttctggcacgtagttgtatctcgtaccgacttcgtagtggtttcaaaaacaaaatctggaatccctgttgtgaaatttcatcttggacagcgcctgcatatgctttgcagagttaggctaattcttgcaactatgccttcagatgtttgtagagttaggctcattcttgaaagaaaacaaaggattgtttttttagataataatggaattaaggttctggct

SEQ ID NO: 152766 - DNA, 2108 bp, Zea Mays
cccgctttccattcacaggcatatagcatagccccaccaaccggaagccgatagatgcccgaccaatctaatagcgccgcaacgcgaagcgcgaagccgcgaagcctcgcctgtctggtcagttccttcgcgcaccggcaccgcggcggcagttcagcatggtggcagcatccgtagccgagcgggcctatgaggcggcgacgcggtccgcgctggtggcgctggagcgcaacctcatcccggacgcggtgacccggcgcctgacgcggctcctgctagcgcagcgcctccgccagggctacctcccctccgcgccgctccagctgcagcagctcctccagttcgtccactctcttgaagagatgcccattgccattgaaacagacaaagctaaagcccaacactatgagttgccaactacatttttcaagctagtgctgggaaagaatctcaaatacaggtttgtgcgcactccttagttttagcaaaagacatgttctcttcggctctgatgatactaggaacaggtctgtttatatgagtggctgaaggtgcagtgtgtagtcccactccttggttttaacaagagacattctctttggttaatccacaaatacattgaatcttccagttcctgctatttccctggtgattcaagcaccctagaagatgctgaggttgcgatgatggatctgtattgtgagaggtcgaaactacaagatggccaaagtatcctagatgttggatgtggatggggatccctttcactgtacattgcaaagaaatataggaactgcagtgtaacagggatatgcaactctactacacagaaggcttttatagaagagcaatgtaggtaagtttaatggtttcagtgcttcggttgtatgtcgagtcgactattttaatatctagtgccaacatatgttctatgtaacccttctaagtgactattgcagcctattcgtgtcactgcaatctgtttcttggtcagcatgttgttatattgctgttaattttgcagctattgcgaacttgcaaataatgaagtgcaaatactattgacagaaatactattgcaaacttgcagctgtttaaggatataagacctatttctattatttcaaccatactattgacagaaattatctttcatatgcatgtacatttgctagatacgcagacagatcttctaccgccatatggtctattttgatttcccttctggtaatgctttgttatgccacattgtcacttcaattctgtttcagggataacgagctgtcaaatattgagataatcgtagccgacatcagcaagtttgagatggagcgctcttttgacaggatcgtatctatagagatgtttgagcacatgaaaaactacaagtcgcttcttaagaagatatccaggtggatgaaagaggatggcctactattcgttcacctcttctgccacaaagcatttccatatcactttgaggataaaaacgatgatgactggatcacgaggtatttcttcactggaggaacaatgccatctgcaaacctacttctatactttcaggaggatgtatctgtggtagatcattggcttgtcagtggcacgcattatgctagaactagcgaggagtggctaaaacgtatggacaagagcatcacttcaataaggctgatcttcgaggaaacttatgggaaggaatcgactaccaaatggatagcttattggcggacgttcttcatctcggtagctgaactttttggatacaacaatggagatgaatggatggttgcccattacttgttccgaaagaagtagaggctactgcttggaagtacccaatcaaaaatcaatgttttcagtaattttgtcatgtacatcgacgaacaactccttttctggcacgtagttgtatctcgtaccgacttcgtagtggtttcaaaaacaaaatctggaatccctgttgtgaaatttcatcttggacagcgcctgcatatgctttgcagagttaggctaattcttgcaactatgccttcagatgtttgtagagttaggctcattcttgaaagaaaacaaaggattgtttttttagataataatggaattaa

SEQ ID NO: 152767 - DNA, 580 bp, Zea Mays
ggcaacgaatgccatctaaataaatgctcgaaatgaatcgacatacagcaaagtgtagtattaactaacttgagcacttggggtcatttttgtgtagcgaggagtggctaaaacgtatggacaagagcatcacttcaataaggctgatcttcgaggaaacttatgggaaggaatcgactaccaaatggatagcttattggcggacgttcttcatctcggtagctgaactttttggatacaacaatggagatgaatggatggttgcccattacttgttccgaaagaagtagaggctactgcttggaagtacccaatcaaaaatcaatgttttcagtaattttgtcatgtacatcgacgaacaactccttttctggcacgtagttgtatctcgtaccgacttcgtagtggtttcaaaaacaaaatctggaatccctgttgtgaaatttcatcttggacagcgcctgcatatgctttgcagagttaggctaattcttgcaactatgccttcagatgtttgtagagttaggctcattcttgaaagaaaacaaaggattgtttttttagataataatggaattaa

SEQ ID NO: 152768 - DNA, 678 bp, Zea Mays
tataaaaaaattccttgcacctatttggggattcctctgccgattcgtaagctctctaactccgatctcttgccactggttgataaagttgctgataaacttctaggatggaaagccaaacttttgagtcgggctggtcatcttgtcctggttaaggcagtgttgtcttctatccctatctatcttatgcttgcgctggaactccctaaatgggtttttaaggcaattgataagaggagaagagactttctttggaaggggcaaggtgatgcaaatggaggtaactgccttatgtcttgggaaactgtccagtagcctttacagtatggtggtctggatattctcaacctggagatgctaggatgggccttacgtgccaggtggctttggttacagaagactgatgcatcaagaccatgcgctggactccctatccgagtgcaccataatgcaaaaacactctttgatgtggttgttatctccgtggtaggcagtggtgaatctgtgaagttttgatctgatcgttggcttcttggtaaaactatggctgaacattatccaaccttgatccaaataatttctaaaaaagctttaaagaggagaacagtagcggaggggctcacagatcgtaaatgggtgttagatataaggggagtatctacagctctggaacttggt

SEQ ID NO: 152769 - DNA, 156 bp, Zea Mays
atgacacacttaaatatctggcttcattggccaagacatgccttcagtctctggacttcacctacgaggttggagttcatctcacaagcatccttcaagatttcaaatctccggtcaagctcactgctcttggaatcctgtgcgatgccttgctga

SEQ ID NO: 152770 - DNA, 1578 bp, Zea Mays
taatcaaacgcataactctctacctggtaaggaggtttgcctttatttcataaaacaacacataaaactactataaccaaggactaaatcaccaaaaagaaaagcccaaagccaaatcgaaaacaaataccaagacagcgaggaaaacaaaaaatttaaagaaaagctccccccatccacgaacaaaagatcgcgaagcgagagggaatgatggaggcataggcactagcacctcctcgcctccacctccgtcctcttcgatcccgtccaatcccccgcgccccggcgcccctctccgccggcggctttgctgggtcccgcgctcctcctcctcctaggctgttctggttggggctgcggcggagggaactagcggcagcagcgatgccatcgcacgcggatctggaccgccagatctcgcagctgcgggattgcaagttcctgcctgaggcggaggtcaaaacgctatgcgagcaggccaaggcgatcctcatggaggagtggaacgtgcagcccgtgcgctgccccgtcactgtctgcggcgacatccacggccagttctacgacctcatcgagctctttcgcatcggtggcgacgcgcccgacaccaactacctctttatgggcgactacgtcgaccgtggctactactcagtggagactgtgtccttattggtggctctaaaagtacgttatagagacagaatcacaatattgagaggaaatcatgagagtagacaaataactcaagtgtatggcttctatgatgaatgcttgcggaaatatggaaatgcaaatgtgtggaagtactttacagacttgtttgattatttgcctctcacagctcttatagaaaatcagatcttctgcctacatggtggtctctctccatcactggatactttggataatgtccgctcccttgatcgcatacaagaggtcccgcatgaaggacctatgtgtgatcttttgtggtctgacccggatgacagatgtggatggggaatttcaccaaggggtgctggatacacatttggccaagatattgcacaacaattcaaccatacaaatgggctaagtcttatttcaagagctcatcaacttgtaatggaagggttcaattggtgccaggataagaacgttgtgacagtgttcagcgcgcctaactattgctaccgatgcgggaacatggctgcgatcctcgaaattggcgagaacatggatcagaacttcctccaattcgacccagctccgcggcagattgagccggacatgacgcgcaagaccccagactactttttgtaatcagcatgctggctttctttcaacttgtctactgcagcgccagcacctgtagatctccttagaaaatggtgtttcctctagccgccttgtacccccatcattcttttggtgtggagattttattgccgcttctcagaacattgaggttgttgaaagtacatggcattgggtcttcctttttttttgccgtcttgtatctccattttgtatgattctgagacaaaagagaagagaagctgcaatagaattgtctcgaaatatattgtcctgtcc

SEQ ID NO: 152771 - DNA, 1539 bp, Zea Mays
tttaaagaaaagctccccccatccacgaacaaaagatcgcgaagcgagagggaatgatggaggcataggcactagcacctcctcgcctccacctccgtcctcttcgatcccgtccaatcccccgcgccccggcgcccctctccgccggcggctttgctgggtcccgcgctcctcctcctcctaggctgttctggttggggctgcggcggagggaactaggtaagggggaaggaaaggggaggtttgagggagagcgcagcggcagcggcagcagcgatgccatcgcacgcggatctggaccgccagatctcgcagctgcgggattgcaagttcctgcctgaggcggaggtcaaaacgctatgcgagcaggccaaggcgatcctcatggaggagtggaacgtgcagcccgtgcgctgccccgtcactgtctgcggcgacatccacggccagttctacgacctcatcgagctctttcgcatcggtggcgacgcgcccgacaccaactacctctttatgggcgactacgtcgaccgtggctactactcagtggagactgtgtccttattggtggctctaaaagtacgttatagagacagaatcacaatattgagaggaaatcatgagagtagacaaataactcaagtgtatggcttctatgatgaatgcttgcggaaatatggaaatgcaaatgtgtggaagtactttacagacttgtttgattatttgcctctcacagctcttatagaaaatcagatcttctgcctacatggtggtctctctccatcactggatactttggataatgtccgctcccttgatcgcatacaagaggtcccgcatgaaggacctatgtgtgatcttttgtggtctgacccggatgacagatgtggatggggaatttcaccaaggggtgctggatacacatttggccaagatattgcacaacaattcaaccatacaaatgggctaagtcttatttcaagagctcatcaacttgtaatggaagggttcaattggtgccaggataagaacgttgtgacagtgttcagcgcgcctaactattgctaccgatgcgggaacatggctgcgatcctcgaaattggcgagaacatggatcagaacttcctccaattcgacccagctccgcggcagattgagccggacatgacgcgcaagaccccagactactttttgtaatcagcatgctggctttctttcaacttgtctactgcagcgccagcacctgtagatctccttagaaaatggtgtttcctctagccgccttgtacccccatcattcttttggtgtggagattttattgccgcttctcagaacattgaggttgttgaaagtacatggcattgggtcttcctttttttttgccgtcttgtatctccattttgtatgattctgagacaaaagagaagagaagctgcaatagaattgtctcgaaatatattgtcctgtccagaagaacaggtgtggctccaaaaaaaaaagggaaaaaataaaagagagacaacaaggaaagatgcagg

SEQ ID NO: 152772 - DNA, 2463 bp, Zea Mays
atgaatgagagctcagcagcggccagtagttatctcctcctcacattgattattcatctgctgccgttcgtctcagcccatgatttcctgtcagccggttcgtctctctccgtagagcacagctctgatgtgctccactcgcaagatggcactttcacctgcggcttctaccgcatctcccccaacgcctccaccttctccatctggttctccggatcatcggaaagaaccgtcgtctggagcgccaaccctctccaccccgtgtacacctggggatccaaagtcgagctagacgccgacgggagcatggttctaaaggactacaatggccagatcgtgtggaccaacaacgcgagcgtttcggacgctgggcatgttcaagctcggctgctgggcaccgggaacctcgctgtggagggaagaggtggcgccatcctgtggcaaagctttgattctcctactgacaccttgttacctactcagagaatcactgcttccacaaagctggtctctactaacaggttacttgttcctggccactacagcttccgtttcgacgaccagtaccttctttctctgtttgatgacgagaaaaacatttctttcatctactggccaaatccgcgtatgactatctgggcgaagggtagagtgcagttcaacagcaccatgtctggggctcttgacaccttgggacatttccttgcaagtgacaatgcaacctttacagctgctgactggggccctggtatcatgaggcggctaacactggattacgatggcaacctcagattgtacagtcttaatgtggcagacagaacatggtcggtcacatggatggcgtttcctcagctttgcaatgtacacggtctgtgtggcgaaaacggaatttgtgtgtatacgcctgtgcctgcttgtgcgtgtgcccctggttttgaagtcatcgacccaagtgagcggagcaaaggctgcagaccaaagaccaacatcagttgtgatgtggagaaggtggattttgctaagctaccccacactgatttcttggggtatgatatgactgcccatcactccgtttctcttgacttttgcaagaaggagtgcctgcatgattgcaactgcaagggttttgcatactgggaagggattggtgattgctatccgaagtctgttcttgttggcggtgtaaccctgcagaactttgctagtactggtacgatgtacatcaagattcctaatggattacaagtgttggatgcctcaattccgcaatcacaaccttttggtcccaagtatagtcctgactgtggtacaacaaatagatacttcatagcagattttctggataagcttaagagagatcatagtggatcaaagtatctgtacttctatggattcttgtcagcaatatttctggcagaggtagtgtttgttggattaggatggtttattttgaggagggaatacagagaactgagaggagtatggccagctgagcctggatatgaaatgatagccaatcattttcgcaggtatgcctacagagagttggtgacggcgaccagaaagtttaaggacgaacttggaaggggtgcatcaggcattgtatacaaaggcgtcttggaagacaagggggcagtagctgtgaagaaattagcagaaataaaccaaagtgaagaagaattccggcatgaactgagtgtgattagcatgattaaccatatgaatctagtgagagtttggggatactgttccgacggtccacacaggatactggtttctgaatgttttgagaatggttcgttggataaaatcttatttggtagcaagggttcagaaatcttgcttggatggaagcaaaggtttgatattgcgctgggggtggctagaggattggcctatcttcaccacgagtgttcagagtgggtcatccactgcgacgtgaagcctgaaaacatactgctggatgagaacttggtgccaaagattgcagactttggccttgcaaagctcctgaacagaggtcgatcaaacctaaacgtttcaaagatccaaggaactagaggttacttggcgccggaatgggtttctagcctcccgatcacagcaaaggttgatgtctacagctttggagtggtgctactggaactactaataggagcacgtgtctcaaacatgggaaatgatgaggatgtggaagcagagatggtccttggaagggtgtcaaggctggtcaaagaaaagctgcagtcggatgatactgagccgtcttggatcgccgacttcattgactctagactgaacggtgatttcaacaatttgcaggcaagaataatgatgaggctgtccatttcatgcctggaggaagatagagacagaagaccaaccatggaaaatgcagttcagatacttgttttaactgaagatgtcagtggcgcaaatgtaatgaaaaagttttctttgtaa

SEQ ID NO: 152773 - DNA, 946 bp, Zea Mays
cacttccagtaactgaactctattttttagttgttcccataatagtcagccacctggtatactgttattgtctttcagatttcagacatcaaccccttgcaagctatctgaaatgcagtgtttggttggggcgagggagatcgggaaggaagtgggggagagcgtgctcccgacaccgctagagagttttcagttttttctcttatatcacgttcctaggagcttcgtgttgtttgcatgtgttgatgtatatataaggaaatatatcctttttgtgttctgcctgtaaccattctgaacatgtaattttggattcttaattcatgtattggtgctacttggttatgttatcagttgctgttatgagaggatatattgatgcttgacaattcaaatatttgttgctaacttgaagattgttattttacttctcattgcagtctattctagaaagtgtgagccatggaacaaagctggttgaaaaaagaactacatgcatttaccatgtttttggtttcatcttattctttctttcacacgctttattgtaggtggttcggagttctgtgtatcacatgaggcatctaggttgacctcactcttcttagtgttcatgcccactgcgcaagacaacaccgcaacactgatggaattggaagatttcatcaggctcgactagatctggatgagatggactctgctcgtaaggagagagagcgtgcttggcttgggaggagcatatttttgttcatccttttcatgagtcatgttacctgtcatgtcagattatgtaacttcggatatttctgtttttgttagagaagaaccaaaatagtttcacttcatggctactctcagatgtgttcttgccgctgccactaatcatataagggtaacactgtatttgttagccaacaatttttgagatattaaagtcggtgataat

SEQ ID NO: 152774 - DNA, 123 bp, Zea Mays
atggaagataacgagggtgaggaagtggagatggtccttggaaggatggttaacgataatctgcagttggatggcagcactgagcagtcatggatccctgacttcgttgacacgctaggctga

SEQ ID NO: 152775 - DNA, 79 bp, Zea Mays
gtattctgttattttgattctagggttgaggagatgtggcaagagctgcagacttagatggttaaactacctgaggcct

SEQ ID NO: 152776 - DNA, 441 bp, Zea Mays
atggatttgtgcgagggagaaagaaagggaaggaaaggggataggacgggaggaggagcacgactgcttaccacgggtagatttctcttgctctatgtagtcgcagaggtagcaaggaagcttggaatactagtcatcgctgatgaagtgtatggaaacctggtgtttggggacaccccttacgtcccaatgggtgtctttggccacattgcccctgtcttgagcataggatcactatcgaagagatggatagtgcctgggtggcgacttggttgggtagctgtatgtgatcccaacaggattctgcaagaaaccaagatcattgcatcaataacaaacttccttaacgtttcaactgatccggcaacttttgttcagaaattgaaatgcagtttcagcatttttaccaaacttcagacttctattgtgataaacccctaa

SEQ ID NO: 152777 - DNA, 785 bp, Zea Mays
atggatttgtgcgagggagaaagaaagggaaggaaaggggataggacgggaggaggagcacgactgcttaccacgggtagatttctcttgctctatgtagtcgcagaggtagcaaggaagcttggaatactagtcatcgctgatgaagtgtatggaaacctggtgtttggggacaccccttacgtcccaatgggtgtctttggccacattgcccctgtcttgagcataggatcactatcgaagagatggatagtgcctgggtggcgacttggttgggtagctgtatgtgatcccaacaggattctgcaagaaaccaagatcattgcatcaataacaaacttccttaacgtttcaactgatccggcaacttttgttcagggagcacttccccatattcttgagaacacaaaggaagatttttcaggaggatcattggtctgctagcagaaacctcagagatatgttacagagaaataaaggacatcaagtgcatcacctgccctcacaagccagacgtttccatgtttgtcatggtgaaattaaatttgtatcttttggaggggatttatgacgatattgatttttgttgcaagctggcaaaagaagagtctgtgattttgtgtccaggtgagatggatttgatttgttggaaaaaatcatatctgacaaaaactcattttggctctagcagttgtctatttcgggttacaggtattccaggcctaaactgtatgtttgcgctcagaaatgctttaagaaaacagtgaattaatgctgtaatacaa

SEQ ID NO: 152778 - DNA, 1434 bp, Zea Mays
cgaccttatccctcacgccgcgcgctctccctggtgcttcctgctcatccatggcgcgctccaatccagctccacgacctccctccgcccctcccatccatggccgccctctctgctcgctcggcttccaggtccatggccgagctcccatcccccgtgcgcgcgccccaggcccctgctcggatttcgcccatccgagctccctcgctatggccgtctcgcccctgctccagctcggctcctcaccagcagtttctttggtgctactacgagcttgtcgtacctccgctccatgccctgcgtcttccccaccaagtccccctctgctctagcccttgaccatggcgtctggcactctggctcctcccctctgctatctccctcctcaagccatgcactcgggtgtcgatcccctgcgccacagcaaccgtccagtcacgcccaggatcgttttggtgtgcgcgtcgttttcctggctctcctcacgccgatggttgctgctccccatcacgccgagctcctcactgtcgtgcgtcactacgggcttgtcctcagtcaacgcgttgttgccggacgtggttgtctccgtcacttgcgtcagctcaccagccctacagctctttacgccaccatcttgtatcgccgtcgatctcgccgtcgaacgtcattcgtggcgtcatcatcgtccctatccactcgtttaggttctcgccatgccatggcgcacgggaaggttggccggagttggccatggtggttgggcactgctattttatgcgccatgctatggtcgcacccccttccatgctattgtgtcgtggctgtcctcgtctcctttgtcgtgcattttcgactccaaccactgcttgcagcatcgtcgatgtcacgcctttgttagacttgacatgtcaaactccttcccgtcgcgcctcgtgtgccacttgttcggctaaatgtgagactcggtcgtcgacacgctggccgtctcttgggattcgacgtcgtcatcgcttccaccaccagatgctcaatgaaacgcctaaccctcggaactgtcatcattccaacagcttcgccgcgtcttgcgtcccagctggtgagactcgcagtcctcgctctgtttaatttctcatcagacgccgatgtggctagctatggatttatgtatgtatgtgtgtttgcgtggaggtccctattcgctgtccacctattgcgcgacgaaaggctcgaactgggcatcgttgtcaatctcgtggtttcaagtcggatttaggtaatagtagccagttcgttacttccgctattggtcgaatgaatttagttaaacatattagttgtgtcatttctctcgtcgatagcatgtgcggtgtggtcataagaataatgtttattgaaatgctcgagtcacttcctgtgataggatcgtgtgtatgg

SEQ ID NO: 152779 - DNA, 378 bp, Zea Mays
atgggagatggtggtcggtaccggcgtttagaaccagcaactggtggagctcagcgccgtggaggagcaggagatgggacggcgctggggcgtggcttgggaaatggcataggggaggagtcggccagggagttcaggcttggggagctgtggtcgacgatggaggctgggcgcagggaggcgcgcgctggagcagcgacgcgggcggccgagctggagtcgggcgcaatccgagctgggcgagctgggcgcgcggccgactggagcagtgcgcgtgcagagggcagggagggcacgggcctagggagaagacgagggaggcggccagcaggggagatgacggttggagagaaaaatggagagggagcttgcggctga

SEQ ID NO: 152780 - DNA, 405 bp, Zea Mays
atgtcccgcccggcggtccgagactcccaacacacggctgaccagggcgacgcgaactggagagctaggcgaatactgcggcatgattattacctcagctggcgctgtggcagaggtttgccacggcacacatccacatcgcggcggcgctgctacaccggcggaaaatcaccgacctcacggctgcgatccccgcctgccgaggtcaagcgcacgcgcggcagcatcccacgacgcgctaagaacacccccgaggtcggggagttacccacggaggagatcgatggtggcggcatcatttctctctccaccatggcgaacttggatcacggtggcatgtgttgtttcggcctgcgcacccgggtgagaggaggagcgtctggggacttataccgatgggagtaa

SEQ ID NO: 152781 - DNA, 104 bp, Zea Mays
ggggatgatcttgttcagtttcgaaaccaaactctgaacgtgaatgaaatagccctactgcaccatctgcacctccctattcaagccttgttattgcacgaatc

SEQ ID NO: 152782 - DNA, 207 bp, Zea Mays
atgacgaggtgggagaggttgtggcggcacgacggtggatctcggaggcacacgagcgacgacgacacccctaaggcgcgcacgacggcaaggtgggagcgactgctgcggcggatccctggatgcacgcgcgcgggggtcgaccccttagccgcgcatgactgcgacgccatccaaggtgggagcggcaacgacggacttccctag

SEQ ID NO: 152783 - DNA, 935 bp, Zea Mays
aacagcccaccacgtgaccacagacagccagatggctgagagcctgagacgggcgacgcccgcacgcccgcacaagctgctccgggctccgctgctaggctagggtttggactttggattggagccgcaccgccgcaccgccaccgcagccgccgcagtgccgcacagccgccactcccgtcttggtcttgcggccagtcgccctcgggcctcgaccatcagcccctcgcccgctcgccgagacaccgagtcggcatcgaccgtcgtcgcgtctccgaggtccagcgcctagtggcccagctccaagcctccagccatcggcgcccgccctcctccgccgagacgccgagtgccgagcgcccgagcaccccggtccccagcgcccaacaagctagcaggctgcaggtatgcgctctttgttgatgcgtccaaggagttgagctgaatgcccagaaggctagcaggctgcagaaactgaaggaaaaggcggcattcaggaacccggatgagttctattttaaaatgatcaacagtaggactgttggtggaattcatagacctaagcctgaagataataagtatactgaagaggaacttcatctgttgaaaaataaagatatgggatatatcctttagagcgttcaaagtgaaaaaggtttgtgacattttaaagtattcattagcaaataagtacaattcggtgtcttgtggctgaatgttttactatgttttaattgggatggatcacttcgtagaaaatcgaaaagctaagctcaacacttcatgaacttgataacaagcctcaaaacaagcatgcttattttgctgaagacaggtacagataatgagttcttttgcttaccattttggaactatctgctagttaagcttgtgccgacatttaggtggctcttttatttcagagaagaagcgaa

SEQ ID NO: 152784 - DNA, 2340 bp, Zea Mays
aacagcccaccacgtgaccacagacagccagatggctgagagcctgagacgggcgacgcccgcacgcccgcacaagctgctccgggctccgctgctaggctagggtttggactttggattggagccgcaccgccgcaccgccaccgcagccgccgcagtgccgcacagccgccactcccgtcttggtcttgcggccagtcgccctcgggcctcgaccatcagcccctcgcccgctcgccgagacaccgagtcggcatcgaccgtcgtcgcgtctccgaggtccagcgcctagtggcccagctccaagcctccagccatcggcgcccgccctcctccgccgagacgccgagtgccgagcgcccgagcaccccggtccccagcgcccaacaagctagcaggctgcaggtatgcgctctttgttgatgcgtccaaggagttgagctgaatgcccagaaggctagcaggctgcagaaactgaaggaaaaggcggcattcaggaacccggatgagttctattttaaaatgatcaacagtaggactgttggtggaattcatagacctaagcctgaagataataagtatactgaagaggaacttcatctgttgaaaaataaagatatgggatatatcctttagagcgttcaaagtgaaaaagaaaatcgaaaagctaagctcaacacttcatgaacttgataacaagcctcaaaacaagcatgcttattttgctgaagacagagaagaagcgaaagaaatacaatcaaggataggacaaagcagcaacatgactgatcctttgtttttactgtttatggagagtcatttttactgtttattagtctcaacatttatatttgtgtccatttaactaggaccaatatggttggaatgggattatgatattaatatattatgcagttagttagttgactggtatctcatgttgtctaatcctttgtttttccccaggaaaattgcacgcgcggtgttctagtctgtttattttgccttccctttttctgattaattcacggagtttggtggactacggttagtcggtttattttctaggtagagggacaattatgcgtgactaataaaaagggtttcattccatggctaaatatatcatttgcatgatgctagttggagctagcatccttgttcaaacaaagcatcgtataacattttggatctacatattaaattgatggctagggcctaggtgcatgcatatgtacttgaacagcagggcttttatgatcttctgatcagcagaatccagcatctgtttttctcaaactgttatgcttttagatcgcgggtacttgttagtatccatgcacagcacacggtgtggctgtgtggtgaacatatctcttttcagatttgcgctcagctcatcgtgtgtggtgtacctaattaagcttccgtttcttttctgtattctttctttccttttttataagggcgctcctgttaaatcggttgaaacagaagtgacatcattggttattagcaaatcctggagaatgcatgcaagttcttctttatttgtatcactatctcttagcacagttctctaactttcgatgcacgtacaagtctatttttataaaaaaaaactgtctatatatgggggcacacaaaattctgtggacgtgtgcatcaatcatcacatgctgttatgcctgatgtcctgtggattggtgttcgatctcgtgaattcgagttgtcctccatttggaactgttatttttgcagctacatatataccaactgacagacatttggaactgtttttttgtgtgtgtttaggttactgaattggaatgggaaaaaatctataaagtgctaaagactaagtggatcgagcgcgcgcgagggttgtcgtaaaatgtccaccgttattaagagggctaatgaattcccagtcgattgtagctacatgcatggaggagtgcacacacatgcctatgttgtttgaattaatcaaattgcttgtttgttagtaattattaccgcctccaactaggctctgtacgtccacaagatcgtcagctatttcatgcaagcatccgcacaagtgtcctactgctatatgttattgtgttctgatacttgagacttttattatgactatgtatgagatattgtctcttattagtactggatgagatgtgtcttatttatgattatggatgagacttttgtgatgtaattgatgagactatgaatttaaatattgttatgtgattgtgtgtgagatgttttatgtgaaaatatgttgtgttatatatttgttatgttgtgaaatgtggtgtaaaataaaaataaacaata

SEQ ID NO: 152785 - DNA, 1180 bp, Zea Mays
aacagcccaccacgtgaccacagacagccagatggctgagagcctgagacgggcgacgcccgcacgcccgcacaagctgctccgggctccgctgctaggctagggtttggactttggattggagccgcaccgccgcaccgccaccgcagccgccgcagtgccgcacagccgccactcccgtcttggtcttgcggccagtcgccctcgggcctcgaccatcagcccctcgcccgctcgccgagacaccgagtcggcatcgaccgtcgtcgcgtctccgaggtccagcgcctagtggcccagctccaagcctccagccatcggcgcccgccctcctccgccgagacgccgagtgccgagcgcccgagcaccccggtccccagcgcccaacaagctagcaggctgcaggtatgcgctctttgttgatgcgtccaaggagttgagctgaatgcccagaaggctagcaggctgcagaaactgaaggaaaaggcggcattcaggaacccggatgagttctattttaaaatgatcaacagtaggactgttggtggaattcatagacctaagcctgaagataataagtatactgaagaggaacttcatctgttgaaaaataaagatatgggatatatcctttagagcgttcaaagtgaaaaaggttactgaattggaatgggaaaaaatctataaagtgctaaagactaagtggatcgagcgcgcgcgagggttgtcgtaaaatgtccaccgttattaagagggctaatgaattcccagtcgattgtagctacatgcatggaggagtgcacacacatgcctatgttgtttgaattaatcaaattgcttgtttgttagtaattattaccgcctccaactaggctctgtacgtccacaagatcgtcagctatttcatgcaagcatccgcacaagtgtcctactgctatatgttattgtgttctgatacttgagacttttattatgactatgtatgagatattgtctcttattagtactggatgagatgtgtcttatttatgattatggatgagacttttgtgatgtaattgatgagactatgaatttaaatattgttatgtgattgtgtgtgagatgttttatgtgaaaatatgttgtgttatatatttgttatgttgtgaaatgtggtgtaaaataaaaataaacaata

SEQ ID NO: 152786 - DNA, 1847 bp, Zea Mays
tttgctttggaataccaaatgtgcgatacgtcatgtcctgcttgctggccgttgtctcattgtctggccgccggaccaaatccgaaaacccaccgagtaactgacaatctcgatccccgcagtcatcgcgggatcggcccgtcctcgccggcgactcattcccgcaactcacctgctctcaaccgcgaactcggcgccctgcacggcctccaagtcgcacgatgcggcggcgcccacatcatacgtggctgcgtctccgcctccgctttcgccgcgccgacgtgtcagcttcccgtccactacagagtccacattgtcctcctattacttgctccgccggcaactattagcccctccccagtcgccactaaatccgctgccgtttcttctcgagtgtgaccatggcggctcagggatccctcgtcatgtggagggcggtcttcgcagcgctgggcttgctcatggtggccacgctggtgtacaccttggccaccgacggctcgccgttccgccttgagctgtttacgccgtggatggtggcaacactggctgatttttatgttaatgttattgcaatctcggcttgggttatctacaaggaagcaaactgggttagttctgctgtgtgggtggttctgttgttttgctttggcagtgctgtcacttgcgcttatattgttaagaaacttcttgaagtaacatctgcagggtcatcccaagatcctcttgaccttctatttatcaggcaaggtaatctatcccaaagaaagtgctcttatgttgtaattggaagggttattttcagcattttggggatattcatggctgcggttgtcacatatactgtcatcactgatggactaccttttaggaaggaattgttgacaccgtggatggcggcaaccttaattgatttctacataaatgtctttgcgatatcggtctgggttgctcacaaggaatcatcatggatatcaactaccatttggattgtcttgctgatatgctttggaagcatcacaacatgcggctacattgtcatccaacttttcaaagtatcatatcaagatccaatctaccacgtgctattgaactcccacagcaagaagatttgaaaatttattgaagttttatgtgcagcttggctggtaatattaaaatgttccttctatctatatgtaaggtaccacaattaaggggacaggaggatagcaattagacaagttgttttactttgaataaaataactcatgtgctgagttatctgctaaatgaactgtaacgtgaaatcctttattgtatttctgattgaaattgcttgaacaataatctcctttgttatggtttcattgcaaacaatttagaagatcgagtgatggtttaattttgaatgacggactagaagtcagcagctcagtctcagcattcagttgggcagattagctcagggccaagccctttgagaatggaccgaggccaagcctctttcagttgggcagatttagcaatgatcagatcagcaacaggaggatcaggaggtgagagccccctccagggggcaggaaaggaaacaaaaggttgttctgcctcgaacaaaaattcaagaaaccaaagatctctagagaaactcgtatggcactacaagcagtaatacgaacaccgagaacatgaggggtacatatgtattttcagtgaagaggagccacagtttactctgcagcagccccaaatccagtctaccctctaacagtctggttgtatgcactctcaccagcttgaggtgactaggtaaggagggatgtttggcaacaatgtttttcaaaattatagttttacaatactttgtc

SEQ ID NO: 152787 - DNA, 1365 bp, Zea Mays
ggccgttgtctcattgtctggccgccggaccaaatccgaaaacccaccgagtaactgacaatctcgatccccgcagtcatcgcgggatcggcccgtcctcgccggcgactcattcccgcaactcacctgctctcaaccgcgaactcggcgccctgcacggcctccaagtcgcacgatgcggcggcgcccacatcatacgtggctgcgtctccgcctccgctttcgccgcgccgacgtgtcagcttcccgtccactacagagtccacattgtcctcctattacttgctccgccggcaactattagcccctccccagtcgccactaaatccgctgccgtttcttctcgagtgtgaccatggcggctcagggatccctcgtcatgtggagggcggtcttcgcagcgctgggcttgctcatggtggccacgctggtgtacaccttggccaccgacggctcgccgttccgccttgagctgtttacgccgtggatggtggcaacactggctgatttttatgttaatgttattgcaatctcggcttgggttatctacaaggaagcaaactgggttagttctgctgtgtgggtggttctgttgttttgctttggcagtgctgtcacttgcgcttatattgttaagaaacttcttgaagtaacatctgcagggtcatcccaagatcctcttgaccttctatttatcaggcaaggtaatctatcccaaagaaagtgctcttatgttgtaattggaagggttattttcagcattttggggatattcatggctgcggttgtcacatatactgtcatcactgatggactaccttttaggaaggaattgttgacaccgtggatggcggcaaccttaattgatttctacataaatgtctttgcgatatcggtctgggttgctcacaaggaatcatcatggatatcaactaccatttggattgtcttgctgatatgctttggaagcatcacaacatgcggctacattgtcatccaacttttcaaagtatcatatcaagatccaatctaccacgtgctattgaactcccacagcaagtatggaattccaacttcactgtgataattcatcttctatgatcctgatttgaaaatttattgaagttttatgtgcagcttggctggtaatattaaaatgttccttctatctatatgtaaggtaccacaattaaggggacaggaggatagcaattagacaagttgttttactttgaataaaataactcatgtgctgagttatctgctaaatgaactgtaacgtgaaatcctttattgtatttctgattgaaattgcttgaacaataatctcctttgttatggtttcattgcaaacaatttagaaga

SEQ ID NO: 152788 - DNA, 1707 bp, Zea Mays
gtctcattgtctggccgccggaccaaatccgaaaacccaccgagtaactgacaatctcgatccccgcagtcatcgcgggatcggcccgtcctcgccggcgactcattcccgcaactcacctgctctcaaccgcgaactcggcgccctgcacggcctccaagtcgcacgatgcggcggcgcccacatcatacgtggctgcgtctccgcctccgctttcgccgcgccgacgtgtcagcttcccgtccactacagagtccacattgtcctcctattacttgctccgccggcaactattagcccctccccagtcgccactaaatccgctgccgtttcttctcgagtgtgaccatggcggctcagggatccctcgtcatgtggagggcggtcttcgcagcgctgggcttgctcatggtggccacgctggtgtacaccttggccaccgacggctcgccgttccgccttgagctgtttacgccgtggatggtggcaacactggctgatttttatgttaatgttattgcaatctcggcttgggttatctacaaggaagcaaactgggttagttctgctgtgtgggtggttctgttgttttgctttggcagtgctgtcacttgcgcttatattgttaagaaacttcttgaagtaacatctgcagggtcatcccaagatcctcttgaccttctatttatcaggcaaggtaatctatcccaaagaaagtgctcttatgttgtaattggaagggttattttcagcattttggggatattcatggctgcggttgtcacatatactgtcatcactgatggactaccttttaggaaggaattgttgacaccgtggatggcggcaaccttaattgatttctacataaatgtctttgcgatatcggtctgggttgctcacaaggaatcatcatggatatcaactaccatttggattgtcttgctgatatgctttggaagcatcacaacatgcggctacattgtcatccaacttttcaaagtatcatatcaagatccaatctaccacgtgctattgaactcccacagcaagtatggaattccaacttcactgtgataattcatcttctatgatcctggttagcttacagttgtctaaacttcagcttgtcatctggtcattgatttccattcataattcacttgtttgaaatgtaggaagatttgaaaatttattgaagttttatgtgcagcttggctggtaatattaaaatgttccttctatctatatgtaaggtaccacaattaaggggacaggaggatagcaattagacaagttgttttactttgaataaaataactcatgtgctgagttatctgctaaatgaactgtaacgtgaaatcctttattgtatttctgattgaaattgcttgaacaataatctcctttgttatggtttcattgcaaacaatttagaagatcgagtgatggtttaattttgaatgacggactagaagtcagcagctcagtctcagcattcagttgggcagattagctcagggccaagccctttgagaatggaccgaggccaagcctctttcagttgggcagatttagcaatgatcagatcagcaacaggaggatcaggaggtgagagccccctccagggggcaggaaaggaaacaaaaggttgttctgcctcgaacaaaaattcaagaaaccaaagatctctagagaaactcgtat

SEQ ID NO: 152789 - DNA, 1358 bp, Zea Mays
cattgtctggccgccggaccaaatccgaaaacccaccgagtaactgacaatctcgatccccgcagtcatcgcgggatcggcccgtcctcgccggcgactcattcccgcaactcacctgctctcaaccgcgaactcggcgccctgcacggcctccaagtcgcacgatgcggcggcgcccacatcatacgtggctgcgtctccgcctccgctttcgccgcgccgacgtgtcagcttcccgtccactacagagtccacattgtcctcctattacttgctccgccggcaactattagcccctccccagtcgccactaaatccgctgccgtttcttctcgagtgtgaccatggcggctcagggatccctcgtcatgtggagggcggtcttcgcagcgctgggcttgctcatggtggccacgctggtgtacaccttggccaccgacggctcgccgttccgccttgagctgtttacgccgtggatggtggcaacactggctgatttttatgttaatgttattgcaatctcggcttgggttatctacaaggaagcaaactgggttagttctgctgtgtgggtggttctgttgttttgctttggcagtgctgtcacttgcgcttatattgttaagaaacttcttgaagtaacatctgcagggtcatcccaagatcctcttgaccttctatttatcaggcaaggtaatctatcccaaagaaagtgctcttatgttgtaattggaagggttattttcagcattttggggatattcatggctgcggttgtcacatatactgtcatcactgatggactaccttttaggaaggaattgttgacaccgtggatggcggcaaccttaattgatttctacataaatgtctttgcgatatcggtctgggttgctcacaaggaatcatcatggatatcaactaccatttggattgtcttgctgatatgctttggaagcatcacaacatgcggctacattgtcatccaacttttcaaagtatcatatcaagatccaatctaccacgtgctattgaactcccacagcaagtatggaattccaacttcactgtgataattcatcttctatgatcctggaagatttgaaaatttattgaagttttatgtgcagcttggctggtaatattaaaatgttccttctatctatatgtaaggtaccacaattaaggggacaggaggatagcaattagacaagttgttttactttgaataaaataactcatgtgctgagttatctgctaaatgaactgtaacgtgaaatcctttattgtatttctgattgaaattgcttgaacaataatctcctttgttatggtttcattgcaaacaatttagaaga

SEQ ID NO: 152790 - DNA, 1804 bp, Zea Mays
ccgacgctacgaccgagcaatggcgctcaccgccgtcctaccttcatatacctagcagtgtctctgcatagaaagataaaaggtaggaggaggcgcagtgcgtggtgggattatttgtgaggagatattggagttattatatatatatatataggtagacgatagatagacagctagatctatataaccatggtggatgggttccgatggatcagaccgggctctttcgtcctgtacttggtcttcttcttcctgtccgcagccctgtcggaggccaatatcggcgacttcgatgaatactggcagcagcgcaagctcatggccgacgccgcggctgaggccacgtacaagcatgacccggtcgaggtcgccaaccaacttaaccgtgcagtccacagatccgtcgagaaggaggacattggcacgaggcgggagatgatggggacgacgacgaggaagtctaagttcagcgggccgtgcagggcgacgaacccgatcgaccggtgctggcggtgccggcaggactgggcgacggaccggaagcgcctggcgcggtgcgccaaggggttcgggcgcaacaccaccggcgggctggccggcaagttctacgtggtgacggacggcaccgacgacgacgtggtgaacccgcgccccggcacgctccggtggggcgtcatccagatcgagccgctgtggatcaccttcgccaagaccatgatcatcacgcttaaggaggagctcatcatccgcggcgacaagaccattgacggccgcggcgtgcaggtgcgcatcaccaacggcgcgcagctcacgttgcagttcgtcaacaacgtcatcatccacaacatccacatcaacgacatcgtctcctccaacaaggacggcggctacgtccgcgactcgccggaccacttcggctggcgcaccgtctccgacggcgacggcatcaccgtcttcggctccaccaacgtgtggctggaccacctctccctctccaactgccaggacggcctcatcgacgtcatcgccaagtccaccggcgtcaccatctccaactgccacctcaccaaccacaacgatgtcatgctcttcagctccagcgacaagcatcccgaggaccagatcatgcagatcactgtcgccttcaaccacttcggcagaggcctcgtgcagaggatgccaaggtgccgctggggcttcttccacgtggtcaacaacgactacacgcactggctcatgtacgccatcggcggcagcaaggcccccaccatcatcagccagggcaaccgctacatcgcgccgcccaaccttgccgcgaagcaggtcaccaagcagcatgacacgccggagtcggtgtggaaaaactgggtgtggcactccgagaacgacctcttcatggaaggcgcctacttcaccgtcaccggcggccagatcaacaggcagttcaacaagaaggacctcatcaagcccaggaacgggtcctacgtcaccaggctcacgcgctacgccggctccctcgcctgcacgcccggcaagccctgctagatcaagccaccagcgaggacggccgacgaccagaggcagaccatgcattcgccggctcgccatgtaagaaacaggggagttgaaagtgcgacacaccagagaacgtgtctgtgtatactgtgtaaaggtcctaaaggaaagagaagatgcacatattcaaagcctcggaactaattgctctgttgtccactatgttatccaagtatatatttgttcttcacttgtgttgagcaccgtttgtgtcactggacatggacat

SEQ ID NO: 152791 - DNA, 2441 bp, Zea Mays
agtctcctctggcatcgccgcatcgggcatctggtatcccagatcgatctgaattctgaaccccgacttcacttgtgacctccgcatctccgtccggccggcgggcgaccatggctcttcccccaccccaaaccctaattctcttcttcctcctggcctcgctggcccccgcggtcaccgcggtggcgttctcgggcctcgacgcttttttcgcgtcggcagccgcgcgcgacccgtctgccggcaacgacaccttcgccgctctaccggccgccctccggcgcgcgctctccgcacgtacctccctcctcccttccttctttctcaacctctctgccacggtccccgtccacgtccgcctcgccggttcctccttcccggcctcatccgggcggtcccttccttccctcgtcaacgccgccgtctcctcagcccagttcctctccagccgccgcccacaccgtctcgcggtctcccacacccttcaccttgacgtcaccggccccgtcgcggcgtccaagctcgcctctaaagctggcgccgccgtccgcgcgcatctcgacaagtcccccgcgccgttccacaataacgcgctctcaggcgttccctactcgcttgtggacgatctcgtcgctgaggactaccgcgcgctagccggctccggccccgctgaggccgtctacatctacttgctcgaccttggcaagcagtcgcgccagtatgcctacaccgcggcctcctccggcactgatgcctcctcgcctgggtactcccgctgcctcggccccgtctgggctggtaagaatcggtacatttggatcgacctgggtgccggtccagtgaactacggtccagcgctctctggcgatggcgtgctcccccgtggtgagttccaccctcttgccacccttcacggcaggcccaagtcggagaaagctctcctcgcggatcttgcgtcgctggttcttagtgcatacaagtctttgctagtgccttcgctcagaattccagtgcattatgagaactcgttgcttattcggttcattcacatccatggggaccggaaggaagaagaagggcttgattttcgtgtgatagaacagtcaattcgtgacggggatctaccttatggtggacaaagcttgaagtttgatctgcatacggtcaagtactctgaatgcccaatttgctcattcgcagttgctaggtcgacaaactcgtttacatcgaggttcctgtttgagaactacacattgatagtgaatgagtacttggactccaagcggttgaggcaggtgctgtcagactcgtcggatgagatacatcgtttggctggggtccatgaaaattatgagcatgacaaggtggtgccagtttatgttttcgatttggattatgataaacttttgcctctggatagataccaccaggcagtggcatttggggatatggtggttgctgtgaggacgcggagctcacaaacagtaagtgactacacctgtaatggtcgacatgtgcttacaatgactagaaatcttgagcgcgcaatcattggctcacttctgcagagcatgtggggggtttcacccacacatctgtcatggagtcctgagcatcatgccacagttgttgattacacttggagcactggacatacaccatttggtcctttttcagagaccaaatcactgtcttttgtgcagaaagatgcagctcgtaggaatgttcttctcacaaccctgaactacacaatcaccagcacaatagatgttttggagtcgatggtggcacatggtggggagaaaatacttagaaagaaaaggcatgttgaattcattcagaggtggaacctgctcacgtataaactggagaaggtggtctcagccatgtcacgcttggactacgacaaggcaatgtactatttgaggtcttcagaccacgatctgtatgaaattcactcattggtgtatcaggcatcacaggagcttgaagcttcactggtttgcttcaaagatccaccattcccgtgggtatctgtttccatgtctgggttgtttgtttttggtttcttttatatgtactcaaaaagagacaagttgtttaggagcaaaaggaaacaattttgagtttgggcagcattttagttcatggatactgtccaaatgtttgatcctggtcataccatagctagacagcaccaaggatattgcaaccctgcatattacatggatctgtaagcgtacacgggctgcatcttgtttcaaccagatgaatttacatgtatgagatatacttccacttgtcttattagttctattgcttgaatttttctttgatacatagtactttccatctagatattttagagtttattttgcactgtgggttgtcctatttccttcgtgttctccgaatggattgccttgcagatgttgtgctca

SEQ ID NO: 152792 - DNA, 1727 bp, Zea Mays
ctctcggctgctcaccaccccagacaagtccagtcctctccctcccctcaacctagtgccgccactcgtgcccaccatgccgtcgcaccgccgccgccgctggtgaacggatccgtgcaccccgtacacctgccttggcctcctcccccctcccctcaacctagctccaccactcgcgcccacctccgtccgccggtggcgcaggggaggagccggccatcctcagggtggcgctgggctccggcaagctgcgcatcgaggggtcgctgggctttggcaagcttccgcacgcggcgccagctcaccgaccgcgccgtgctcgtggagcagagctggtggaagctgctggactgtgccgtgctcgaatttggacgcctctctctctctctcatgttgccatgctggacgcaagaaccgagcagcgggcagatgaaggagcagttcgtcgtggagatgctcgctaggccctcgagtgcggcggggtcaggccccgggagatcgcagcagcgtcaggaggacgcctcctcagctcaaggcagcaggccgcagtcgtcggctgcttctgatacaccggtggcgcagcaacctgacgcgaactctgtgcgagcgaagctcgagctcgccaagaacaccaagctcgaggcggccaagaggaagctccaggaaggctaccaagagtttgataatgcaaagaagcagagaagcatacagatggttcatccccagaacctgcccaagcaagcgaacaacacccagaatttccaacctagcgggccagcggcaagccaaggaatggcagcaacaggaattggtagcagttccaattccttttgagcgccaccagggatcatagacttcaaatcccttcctccctctttcttcctttggttcttgatcgactactaagatttttttagaccatgcgagtacagaaaacagcaataaggctagtttcgaaagtgcatggagacgtggagtctattgaaagttctggtcaattttgacgaacttttttgagagctcgtcaatctgcttgtgctctgtcctctgtggcttgcagcttccaggcaacaggattctttcgtgtgaacaccattaacttagtatggtgaccatctaaaatagaaaacagcaggacaattgctatgtcatcaaacatgatcatcatcagtactagggtttctttaggccatgttattagtcttgatctgtctaggcagcattgatgcatgttcatgtgttctttttcttaaactgtcagtcattatttgactatgttgtattgttgttggcatgtaccaatatttcatggcaaatcttatatcccaagtttttatatgccgcagaggactaagtacaacaacatggagccggatgctgttgatttctttggggaatgtatgaatagtccccgaaatggtcatactctgcttgcaaatgagatatatgagaaaatggttgccgagaaggaaagagagctagaagaaggagaagcacaaaagtcaccctccaagattgttgctgatagtctcagcccagatcagtcgctcatccaccttccttccaaacattggtgtctgtttgaatgcttcaaacctttgtggtggaacctttgtatgtttgaacctctgttgtggaagaactagtgtgctggaattatgtatgacttgtgatgagaatgttgtgtatgatggcttttctgtgtattatgattctgtgagctatca

SEQ ID NO: 152793 - DNA, 1915 bp, Zea Mays
tgggtcccctgcgaaccaacctcccaaaaagggtagcggattgggctttcccctccgcctccctcccctcacaaaaaggcggcagcacagcgccacccctcctgtcccgccgagttcggagcgcagcgcaaggcggggggaggagcaagaagccgccggcctccctcctccggctcaccaccaggcttactccgcaccgcgctgccacgggtaggagcggcgtcaaattcgggattcccaagcggcttcagcccggaggttgagccaaagctattttctaagaaaaatggcggcaatgatggtggcgatgactgcgaggagcaagaacagcatattacccatggagaagaagcagggctggtctattcagctaccagagctccggttcccttgggattcacatgaagacaagggtttctctctgagtctgcaaggatctggaccttctcatggcggcctgtttgctagcgtgggtcttaaagtgtcgacaggtgccccagcagtggcgcccggaccgggtgacaaggatattaagattccattcactgatcattgtatgaagtacgtgtctgaggcagttgggtaccaggttattagcactgaagcggagtcagtggaggaggtggtggatgctaaggcaaagaaggcagccaagaaacgtgggctgcagctgaaaattaagattgggaacccacatttgaggaggctggttagtggagctattgcaggtgctgtttccaggacttgtgtggcaccactggagacgatcaggactcacttgatggttgggagcaacggtgactccatgacagaggtgttccagtcaatcatgaacactgaggggtggactgggcttttccgtgggaatcttgtcaatgttatccgagttgcgccaagcaaagcaattgagctttttgcttttgatactgccaagaaattcttgactccaaaggctgatgagtctccaaagaccttcctacctccatcacttattgctggagcacttgcaggagtcagctcaaccctgtgcacatatcctttggagttgattaagaccagattgacgatagagaaagatgtctataacaacttcctccatgctttcgtcaagattttacgagaagaaggtccatcagagctctaccgtggtctgacaccaagtctgataggagtggtgccatatgccgcgactaattactacgcctatgacaccctaaagaagctctataggaagacgttcaagcaggaggagatcagcaacatcgcaactctcctaattggttcagccgctggtgccatctccagcactgccaccttccctcttgaggtggcccgcaagcaaatgcaggtaggagcagtaggagggaggcaggtctacaagaatgtgttccatgcgctctactgcataatggagaaggaaggggttggcggcctgtacaaggggctcggaccgagctgcatcaagttgatgcctgcagcaggcatctcgttcatgtgctacgaggcctgtaagaagatcctggtcgaagacaatgaggatagtgagtgaagctgaagcatgtatgcccctgaggaggggtatgactgatgtgccaggctagaagaggtttgggttgggttggggagtataccctagtattatcaactgatgaaaatgtagatccaagatatttgaacgccctttagatcataatttggttcagttttgtgttgaaatccataaacaatacacttacttgatggtgcatgttgcggggggcaattttgtcatgtggccatgtctgggtctgtcgaagggctcgtaacttctgtcgctacctttgttaaaactcattttgtaacctattcgatcagtcctgaaaccagtgacgaaagcatttagattttgtgcagaagcatgatcaattgttcattt

SEQ ID NO: 152794 - DNA, 1795 bp, Zea Mays
tttctagtggggagggtaggtggtattcttcattcatagtgccgagctcttcttatttagaaccaacggtgtcaagcttttggaattggtggctgagaatataccccttgttgtggccgtcagtgcaccgcagctgaaagcctgagcctccaatgtgtgtcctgcaggttgagccaaagctattttctaagaaaaatggcggcaatgatggtggcgatgactgcgaggagcaagaacagcatattacccatggagaagaagcagggctggtctattcagctaccagagctccggttcccttgggattcacatgaagacaagggtttctctctgagtctgcaaggatctggaccttctcatggcggcctgtttgctagcgtgggtcttaaagtgtcgacaggtgccccagcagtggcgcccggaccgggtgacaaggatattaagattccattcactgatcattgtatgaagtacgtgtctgaggcagttgggtaccaggttattagcactgaagcggagtcagtggaggaggtggtggatgctaaggcaaagaaggcagccaagaaacgtgggctgcagctgaaaattaagattgggaacccacatttgaggaggctggttagtggagctattgcaggtgctgtttccaggacttgtgtggcaccactggagacgatcaggactcacttgatggttgggagcaacggtgactccatgacagaggtgttccagtcaatcatgaacactgaggggtggactgggcttttccgtgggaatcttgtcaatgttatccgagttgcgccaagcaaagcaattgagctttttgcttttgatactgccaagaaattcttgactccaaaggctgatgagtctccaaagaccttcctacctccatcacttattgctggagcacttgcaggagtcagctcaaccctgtgcacatatcctttggagttgattaagaccagattgacgatagagaaagatgtctataacaacttcctccatgctttcgtcaagattttacgagaagaaggtccatcagagctctaccgtggtctgacaccaagtctgataggagtggtgccatatgccgcgactaattactacgcctatgacaccctaaagaagctctataggaagacgttcaagcaggaggagatcagcaacatcgcaactctcctaattggttcagccgctggtgccatctccagcactgccaccttccctcttgaggtggcccgcaagcaaatgcaggtaggagcagtaggagggaggcaggtctacaagaatgtgttccatgcgctctactgcataatggagaaggaaggggttggcggcctgtacaaggggctcggaccgagctgcatcaagttgatgcctgcagcaggcatctcgttcatgtgctacgaggcctgtaagaagatcctggtcgaagacaatgaggatagtgagtgaagctgaagcatgtatgcccctgaggaggggtatgactgatgtgccaggctagaagaggtttgggttgggttggggagtataccctagtattatcaactgatgaaaatgtagatccaagatatttgaacgccctttagatcataatttggttcagttttgtgttgaaatccataaacaatacacttacttgatggtgcatgttgcggggggcaattttgtcatgtggccatgtctgggtctgtcgaagggctcgtaacttctgtcgctacctttgttaaaactcattttgtaacctattcgatcagtcctgaaaccagtgacgaaagcatttagattt

SEQ ID NO: 152795 - DNA, 243 bp, Zea Mays
tggcaatctattttgacatgtattgctcttcttgtttataggcacatgatgtttcagcgattttgaattttagtgagaattgtacaccagaatttttgacgccttacctggatggaatcgtgaataaattacttgttcttattcataatggcaagcaaatggtgcacgggggagcattgacagctctagcgtcagtagcagattcatcacaggtgttgttcacttgggagttttatgcatagt

SEQ ID NO: 152796 - DNA, 2055 bp, Zea Mays
atgggttctagaattgagttgataaggaaacatttgaaacaggaggaggaggatgatgagttattttttgtgttagttccagctatatatgcttccctttattctgaaaagaggccagtacacacttcttgtcatagtggtgcacaaaaaattagagaaatgctcgatggtcatgagagctggtgcaaatctgagtttcgaatggagccggagatctttagagctgtagcaagctatcttataagggaaggattgttgcaagacacttcaaatatgagcattgaggagcatcttgggatattcatgtacatgatatctcaaaatgctagcaatgcgatcttacaaaaagaatttcagcatagcggggaaaccatacatagaaagataagcgagttctttggtataatccctgctctaactcaaagatttgtgaagctcccaagtgtaaaccacccacatgtgaagattacatccaatcctcggttttggccttactttcaaaattgcattggtgcaattgatgggacacacgtccccataactattagtgaagagagagcccctccatttagaaatcgaaaaggaaccctttctcaaaacgtgatgttggcgtgcaacttcgatttgaatttcacattcatctcatgtgggtgggaatggtccgcatctgatgcgggggttcttcaatcggctttaagaaagggtttcagagtgccagatggtaaatactatcttgtagatgggggatatgcaaacactccttttattgccccatatcgaggagtttcttaccatctcagtgaatatcggaggcgagggtcgagtactgtatatgctgattataaggagttatttaatcattctcatgccctccttcgcaaccacatagaaaggtccatcggtgtcttgaagaagcgatttcccatcctcaaagtgggcaccttttatcccgtagagactcaggttttgattccatcagcagcagtttcatttcataacatgattagaggtttaaatggtgaagatggatggttggatcaacacccaactaacatcaattctagtcaatttgttgaattaccagagggagatagcaattatcagtatagtagtcagtccaatgctggaaatgttcttagagatcaaattgctatgcagatgtggaatgattataataatcattagtattattttgatgtaatagtcattggctattgtatactatgtagtcatggctagagcttcgtggaatatgaactatgagaagattcttgttgacatcttgcacgagcacaatcatgtgaagtaccggggccagaatggttgggcaccagaaggttggcgttctatgacgcaaatgttcaatgagaagtgcccgttggctaagtttacaaaggcacagatccaggaaaaagaaaaggaacttaaggcaaactataaggtgctgaaggaagcccacaagcaaagtggtgttggatggaatgaggccatgggtatgatcattgcggaaccacaaatatgggcaaatataattgtcagtaatccaaaggtcaagaagtttcaatcaaggccattccctttgtataatcagttgtcagcactctatgatggaagttgtgccaccggtgatctcaattttacatcaactcaacaacatacatcatcccgacaacaattacatattcaagatgaagctgaagctatgagctctttcaggattgatgacgaccttggggttaaccctgatttgaacccattctcttcaaatttgcatgggttggaagcttcgagtacccgtgttgagcttggtggacatgaacgcaccccggcatcttcagaacaacgagcggagagtcatggaaggaagcgtaagcaaagtcagattgctggggttcttgaggaatatttggattacaaaaggcaacataatgataagttgcttgatgtggtaaatcagattgatcaacaagctgagggatgtaacaagaaggaagaatattgtattggaagtgtgttcgtgtgttagagtcgatggaagagttaactgaagaggag

SEQ ID NO: 152797 - DNA, 175 bp, Zea Mays
gctatgcattcagaagatgatgctaaactgaataagcacatcaatctgatttttctatgcactgagactatgtttgtattattgttatgctatgcaatctatgcactgaaacgttcaactctgtttgatccggctgacatattcagaattataatacgctgctgccaatttgcaa

SEQ ID NO: 152798 - DNA, 444 bp, Zea Mays
atggcgcgcccccagcctctgctcctcggttctcctttcctgtgcgccatcacatctcccctcatccatggtagctccctcacggcgctccctctgctctctcccatggcgcctccccttgctaggattccagcgcccggatcttctctctcccatggcgctcggtcctgctcgacgccctgtctctctccctccgctcacgcccgcttcctggccgcggtttctcccttccccgaagctccctcctccagccgcaagctccccctgctcggccttcgtccccatggcggcttcccctcctcgagctctctcgccgtggattctccctgcgtggacaccagccgagccccctgcgtcgcgccttgttccccgcgcgcgctccagctgctctactccggctcgcggagctcccttccctgcatccatggcagccatcgctgttga

SEQ ID NO: 152799 - DNA, 558 bp, Zea Mays
actattcaacgacctagattttattatggctataccttatcacacctccacggcttagatcaaatcacccagatgatacgcctagcgccaaatcacggtcgttgcacgctggatcaacggcgcaagcttgcccccacctcacgtcatccaagcacggcggcgccaccagcctagacggcggagagatggccggagttcggccaccccgtccaggagggccttatactctaatctaaagtgtgaatcatatagtgcaaggcatggcgaacgcaggggaagagttctcaccggcagggacgaagcatagaggcccgaccgcggagagtgggtggtccgcggcggattcagtcaccgacgagaaattcaccgagccctggccgcccacggccccggaattccacacggcgacgtccgcaaaccttgacaaagctttcccgagcgcacgttttgccctaaatggacggtaatcaccgagggccgattacggcggtggtgctcggctttccctcccccttctcattgtttctcttgcggtggcttagaaatctgcagacgagc

SEQ ID NO: 152800 - DNA, 257 bp, Zea Mays
gcctgtcgtagatagcagagagagagatcgtgatgtgagggagaggagggaagccgcctccgccgttcatcgtccacaatgtcgatggggcctcgatggttggtcggggggtctctgccttggtgcaaggagggtcaccatggccgcgcggtgaggtactccccgaggcagccgcaattcctcgcgggatccagaaccagccgggaccacgccgctcgggagcaacacgttttcccatcgccattcgttggtatggt

SEQ ID NO: 152801 - DNA, 189 bp, Zea Mays
atggagatcaaactcggctgcagcataagccttagggtcgtcttggggagcatcactacatcactggaggtgcgcccgtggtcgtggaagggagaatcgactaaagtggcggcctcaatagctcactggagctatgcatccgcggtggcaccgctcttcgtcgtggccgggccgctcgggtctccttag

SEQ ID NO: 152802 - DNA, 1680 bp, Zea Mays
ttttttttatataaaccgattgaatttgcttatttccggatttctaaatcatctcccgattcctccgctcgtcaaatcctcgccgtgtccgtgtagcaattccttgcgttggcgaatcatagcagtctcctctctccggcggcaaatcgtcgaactgccacgcctggccccgccgccagcctcctcgtctgaagaagaacggaagacgtcgggctccggtggttctgaacggcaggtagccagtcgcgcttctcacgccggagactcgattggcgttgtatttgcctttccgtttgttgagttctcgaagcaaaacgatcggatgagattcttcaaggggagcaaggtggaggtattgcaggaggcagaggtgccatttggttcttggaggcctggtgagatcatctccggcaatggacacacctacctggtgagatatgatgaaagtcccgttgactctagcgtggctgttgaaaggatgccaaggaggttgattagacctagccctcctacggatgatcctgtacgctggagtttgggtagtattcttgaggcctttgacagctactcgtggaaggttgctgaggtggtgagagtgcttagaaagaatcaatatctagtcaggctccttgggtcgtcgctggagttgagtgcacatgcatcagatcttcgattgaggaagctttggttagatgacagatggattgtgactcagaagtattccgcaagatgcttggatggtgcattcagaggtcaatctgaagatggaaatttagactgcaacttgagaaaggacagccatattcaacttgagaaccggaatgcttttgagggtgatacatctagaggcatgaagagaaaatcgtctgctatatcaacacatcctcattgcagcgacatcagtaagagattgcaatgcagtgacgccactaagagattctggacactaaatagagatggaaggcacacaaagctggttgatagaggttttttccctttggctgaaaaggtagatgctgttgattccccatgcttaatgctgcgtgggaaatacatgcatgctagtcataaagggcatactagaacaactgaagaatttagtgacacagagagtacctcatcttctgttggtagttctagtcctaatagtaccccccatagatcacagtattataatttggtcaaccaaagtggagatatctgtagtagaactgatggtgatgaagcttttacattcgaaagagaaacatcagaacatggtaacgatggatcgaggggagaaacccatttgctggaattacatgcttatcgtgcgacaatgttagccttgtatgcttgtgggtcaattagctgggagcaagaggctttgttgactaacctaaggttaacactgaacatctcaactgatgaacatctagctgaattgaggagtttggttacccatgctgttacttccagatagccttttcttgttaatttcctggggacatttcatatattccaaattattgtaagttgggaaatctcattaaggggttgaggtgttggagtacttcatgtgtagaattatacttgtcaaaagagtcacttgggaaattttgtactgttgatatctcaagacttctgaatttttgggacagtcttgaagtattaatatttttcacactgaaaccttttttt

SEQ ID NO: 152803 - DNA, 1622 bp, Zea Mays
aatcatctcccgattcctccgctcgtcaaatcctcgccgtgtccgtgtagcaattccttgcgttggcgaatcatagcagtctcctctctccggcggcaaatcgtcgaactgccacgcctggccccgccgccagcctcctcgtctgaagaagaacggaagacgtcgggctccggtggttctgaacggcaggtagccagtcgcgcttctcacgccggagactcgattggcgttgtatttgcctttccgtttgttgagttctcgaagcaaaacgatcggatgagattcttcaaggggagcaaggtggaggtattgcaggaggcagaggtgccatttggttcttggaggcctggtgagatcatctccggcaatggacacacctacctggtgagatatgatgaaagtcccgttgactctagcgtggctgttgaaaggatgccaaggaggttgattagacctagccctcctacggatgatcctgtacgctggagtttgggtagtattcttgaggcctttgacagctactcgtggaaggttgctgaggtggtgagagtgcttagaaagaatcaatatctagtcaggctccttgggtcgtcgctggagttgagtgcacatgcatcagatcttcgattgaggaagctttggttagatgacagatggattgtgactcagaagtattccgcaagatgcttggatggtgcattcagaggtcaatctgaagatggaaatttagactgcaacttgagaaaggacagccatattcaacttgagaaccggaatgcttttgagggtgatacatctagaggcatgaagagaaaatcgtctgctatatcaacacatcctcattgcagcgacatcagtaagagattgcaatgcagtgacgccactaagagattctggacactaaatagagatggaaggcacacaaagctggttgatagaggttttttccctttggctgaaaaggtagatgctgttgattccccatgcttaatgctgcgtgggaaatacatgcatgctagtcataaagggcatactagaacaactgaagaatttagtgacacagagagtacctcatcttctgttggtagttctagtcctaatagtaccccccatagatcacagtattataatttggtcaaccaaagtggagatatctgtagtagaactgatggtgatgaagcttttacattcgaaagagaaacatcagaacatggtaacgatggatcgaggggagaaacccatttgctggaattacatgcttatcgtgcgacaatgttagccttgtatgcttgtgggtcaattagctgggagcaagaggctttgttgactaacctaaggttaagcagggccaagagtgtggttccagattggtactggttgctggataaaagggtcaaattggattagtttatgatccaaacaaaaaggtgatctgattgttgtgtgaattttcacagaacaagcataatccctcttaggtaagtgctcctgtaactcttggttttatttaaatcctttttggaggagaaagatttgaatgatacttacaaggtatactaaaaatgtattttgatcattgtacacatttttcatgtaataaagcaactggcagtcttagctgt

SEQ ID NO: 152804 - DNA, 821 bp, Zea Mays
gaataggtaagccagtccaaggacgtccagggtcagtttttttgtaaccaaagccatctgtaccccatgccaccaagcaatgctctactacgatttttgtaaaagcatacaaatgtgccctagttcaggacttgcagctgatttccatgtacacacaaaacgttgggattacatggtctggccttgcatcaaagaatacttgcagaagtgatcgttgtgcagttgaaggaacatgtttgaaatgcaatggataggccatcacatattttcagaagtgaagtggtaggcactggtggttctgatgagcaagcaagcttatgttataggctggcgctccggtcccggtggtgcccatctgctgctgccgccactgacgacaaacaatcgtcgtcagccataatgatggtgcgttatgggcctgagatggctgctgatgctctgggcagtgagcacaggctttgtgcacagcattgataccaaccatgcccgaacagaatggcatcgccagtatctttctgctgccctgcacatgcacagtacactccatcagtactgcaggaatgtgtctgtctggcaacaacatgtgtcaagggtttcgtcattctccagcctcagcctctgcaccaaccagtttaaagattcattaacctctctcggtctacttgcactctaaccgttacagttaaccaaccattggacgagtcctgtagccgaccatcctaattctcggacgtcacggcgtttggccgccggaacacaagcagccaactgcattcattgttgaataattagacaaattccagtttaaattccgaatataa

SEQ ID NO: 152805 - DNA, 376 bp, Zea Mays
gaacagttagttacttatatatagcagtagcaatctcacctaatgcgtggttgcaatcacagcataccagaagttgcaatcatttttatttaacagaatttcggagagttagttacagaatttcccagagttatatagtacatgcaatcacaacacagtagttgcaattataccacaccaacagtttgcaatcatatttgtgtaacagaatttcccagagttattcagtactttgcaatcacactagaccagcagttgcaatcacagcacaccagcagttgcacatcctcctgttattctcactaatccatccgttttttttgttgctgcaggagaattttgttggagtttggccttcttgttggactcactggcg

SEQ ID NO: 152806 - DNA, 1215 bp, Zea Mays
gccagatgcagctccatcttctccagagcgcctagccaaggtccctcccacgagcgctcctcatctccccctcccatggccacgccggtgctcctgcaccatcgcgcgcgccggcttggagctcaccggtgacggcagagctggccgtccttgctccctcggcggcctccctgctcccctctcccttatctcccatggcgcctggccgcagctcggatctcgcccgaccccaagctgagctccatccatagccgtcggtcagcccctgctccatgtcccacgcgcgctcctcctcaagctcatccccatggccgccgcaccctcccctgcatgcagccgagctccctacccggctgcgcccctagcactcctcgacgtcggcgtcttctccctctcctcgccatggcgctgagccgacctggaagatccgcgctcgccaggtcatgcgccgttgcccagctcaccccagctccttgcttccatggccacctctccctgcccctccccagcgtccagacgagccagctcgctccagactcgacctcgccgtcgtcttggtcatcgacaccacgcaatcgtccacgcgttgttgtcctcgcggacgccgcttcacaccatcaccctgttttcaccatccgtggcatcggtgtcgtgatgtcttggctgcagcaccaacgtcctcgacctcgccaaatacgttcgctgctaggccctatgtcgttaggctagtcgaccatggtcgttgccacacgcgcttgtccctgatgcacatcgcgtagtattcggatctcgtcgattgactcccgccatccgccgtgctgtgtgccggcgttccctcgcgacagaccacgccgtcgtctaaccttgttcgcgttgctgcagcaccatcgtcatttgccagctccatcactagcctttcttagtattttttcccaacaccgagcctctctgacctcgctgttcgtcggtgcaatttatgtgtgtggatgaagaaagcgaagcccgtgtacatagctcgcaaggtgttcagttgaaagcttcacctggtgcttgtcgtcattcttgcgggattcaagtttgatttagtatagtaagacgattcactactcctgctatcgattcgatgtccgaattggttatatatatttgtcgatgattatcttgtttgcaatgtatgcattgtggcggcattagacatttgttaaaatgcttcat

SEQ ID NO: 152807 - DNA, 103 bp, Zea Mays
gtaaaatattgcagtataaattctaatgaagataaatcatagccatgggattcaaactagaaataattattgtgctaaaaatacactggagagaagattatag

SEQ ID NO: 152808 - DNA, 257 bp, Zea Mays
gccacgcctagctattaagttgcatgcaccaaccaattcaacccaaaagcttaagctgatgggaagaggtgtgcaattcacttatattatattccaacactccccctcacgtcgagcctttcttgggtctcagacgtggaataggagcaagcaacaattattttatttaattgcgctagccaggattcgaacttatgacctctagctctgataccatattaagttgcatgcaccaaccaattcaactcaaaagctta

SEQ ID NO: 152809 - DNA, 578 bp, Zea Mays
gcataactaagaaatgctgtaaagctatagcaatacacacagaaaaatgaagatggagaaatatgatttgaataaagacaatgcagcatggggtgaagtggtggacaaagcaatcagagaactttgaagaccacaaatggatatatcaacaaacatagatacttcagatcatatgaactcctcattttgcttcgttgcatctcaaaaacttggcaagacatataacttagaaatttgaagctatgattcaaggagagaaaaaatgaacgtaacaaagtatcatttggataaggagtgggtaaaggaaacaatcagagaactttgaagaccatgaatgtatgtatcaacatcagatacttcagaatgtatgacctcctcatgttgtttctcaacgacttaaacactacagttaagactcaagcatcactaaggtcatattcagatggctacagttcagacccaagcatcactaaggccaaattcagatggcataattcaaaagctttcacatgaaagaaaagctttggacatgaagcgatcagagaactttgaagaccatatatgtgtattatccacat

SEQ ID NO: 152810 - DNA, 97 bp, Zea Mays
tgaaacccccatcttgagcctagtgctcgtgtgtgccagcactagtagcggattattctgcacttgttgtcacgatccacgccttaataacattcct

SEQ ID NO: 152811 - DNA, 654 bp, Zea Mays
ccccatgtgcgctcgctcctcatccatcgggtttcggcatgttcgtgtttgtcgtcgaggcgtcgagtcgtcgaacccgtcattccctgctcgactcccaagcaaacccccttatccacgtcctgctcatcgtcgactctcggcaccacaagctcattttccctagtgcacatctccacagaccctgtctcatcacgcgtatgcgttatcgatctcgtcgtcgtttcgtgcatcctcaagaaatacaaagcgtcgggtgaagacgaagctagcagcgtgatattcaccaagtgctcaacaaaaagctcgaacaagtcatcgatcgtcatccgcgtctacgccaagatccgaaaagattaggtgcagaggaaaataaatcagtacgcgaccagagaattctcgatgtggataaagatgaagcacgattcgacgcagcactcaccctattttcggtgaaatgctgagctgaaaggcatcatcgatttcgtggtttcaagtcggatttaattgatggtaagttgattcgttattccagtcaactaggtatataaatagatcaaatagaattgttggtcgcgataattattattaatttagcatatgtatattgtgatgttcgatttagataaatcggtaaatcaagttaattaagat

SEQ ID NO: 152812 - DNA, 1645 bp, Zea Mays
ccagggtcctcatcagtacgttgcagtcgcgcagcggcatggcctggtggcacgccgtcgccatcgtgggacatgtggccctgtgggtaggaggcgccaaggtggaatcttttggggggccgtacgtatagaaacgggagagcgacgcggatggttgtggacctgtggccttgtggggcaattggctagatgggaaagaaggtggctgttgtggtgggagggagcgttgctgggctagcgtgcgctcacgccgtggctggcgcgggatgggaggtggttgtgctggagaaggcggcagcgccggcggcggggagcggcacgggcgccggactgggcctcgacgcgcagtctatggagattatctcgcgctggatcccggggtggggaatcgacgcggtcacgctgccgctcgccgtcgatctgaacatagccacggacagcgcgacgaaggcggcgcggacgctggcgagggacgaagacttcaaattccgcgcggctcactggggcgacctgcaccggcggctgcacgaggagctgccgcccgcggtgaccgtgctgtgggggcaccagttcttgtcgttcgaggcgccggacgacacacgcggggtcgtcgcgacggcccgcgtgctgcggacgggagggacggttgaggccacgggggacctgctcatcgccgcggacggctccacgtcgtctgtccgtcgcagcttcttgccagacctcaagctcaggtactccgggtactgcgcgtggcgaggcgtgtttgatttcagcgggaaagagagctctgacaccatgaccagcatccgaagagcctacccggagctcggcaactgcctctacttcgaccttgcttacaagacccacgccgtgctctacgagctgcccaggagcaggctcaactggctctggtacatcaacggcccagaaccggagctcgcggggaactcggtgaccatggaggcgactgacgccatggtgggacgaatgcggaacgaggcggagcgcgtctggtgccccgagctggcgcgtctggtcagggagaccgcggcgccgttcgtaaacgtgatctacgacgcagacccgctgcggcggttgtcgtggacgggcggccgcgtggtactggtcggcgacgcggcgcacccgacgactccgcacgggttgcggagcaccaacatgtcggtcatggacgcgtgcacgctcgggcagtgcttggcgaactggaactcagagccgacgcctgcgcgcgcgctggcagagtacgaggcggtgcgcctgcccgttgtggcggaacaagtgctccacgcccgccagctcgggcggctcaagcagggcctgccagtggacggtgaggcggaggacgggtttgacgtgacgacggcaaaggccgaggtgctgcagctacggcagaggacaatgccgttcttcgatggcgcacctgccgcagttggcggtgattttcctctcgttggcagtacaagatgaatcgagacagcattacctgtatgactctatgacatttaatcatggtttggcatagcttcaccaaatacaattaaaaaatatatagtttagaattacctgtatgactatgaaatttaatgatggcttggcatagcttcaccaaatacaattaaaaaatata

SEQ ID NO: 152813 - DNA, 2393 bp, Zea Mays
cgctccccgttgactgccactctccttgcgtgcactatcgtcccggcgacgactccgctgccgtcgccgcctacgccaggttccgaagtcttcgtgagccccttctcctacaacgagcactcacaccaatcaccagtgatttattgcgcatgaggactgcatctccccttgaaatttgaggctttggaaaactgctgaatggagtattcctcaagtgaagacgagggattggttggagattttatcgacgctgaggataatacgttcactaagaatattgaccaaggaactggcgtgatggcttcccagatccatggtgatgatccctcggtgggatccatgccacctgttattggaaatgagctgctgatggcagctgatgtattggccaaaaatgacgaacctcgtatgggcatggaattcgactctgatgctgctgctcgcgcattctacaatgcatatgctttatgctttgggtttgggattcgtgttgcccgatcccgtagtgagcgaagaaagggcgtcgaggtgctcgtcatgaagcgttttgtgtgcttgaaagagggacatcacaggaagaagaagccagttgagcctagcaataagaaaaagaggaaacgactctctatacgggatgggtgcccagcaatgatggaggtggtgcgtaggggcccagataggtgggtcatcacgaagttggtgctggagcacacccatgttattgttagtgcagaccgggcacgggaggtccaactccatcgcctctctggaaagtttcaggaacatgagaaccagttgcaggaggtgcgaaggaacgtgtttggagatacgaatgcgcaagggctctttaattacttcaagaaaatgcaatcagataattctagttttttcttttctatacaagttgacagtaaaaactatgtgagcaatgcagtttgggttgatgcaagagctagaatggcatacacgtactttggggatgctgtttactttgacactacttgtagtcaaaatgagaacatgctgccctttgcagctttcacaggagttaatcaccatggtgacactgttgtttttggctgtgccttaattttggacaggacggaatcttcatacggctggatttttgagacgtggttgacagcaatggatagtaggttgccattttccttgactaccgatgaaggtaagggaatagcagctgctgttgcaaaagtatttcctcagtgtttccatcgtctttgcagatggcgcatcttgtctagatgcaagaagagactgactgatgcccgcacaaggtttcctgggttacatgaggagctcaagagatgtgtcaatgggtgtgataccgcggttatttttgacatgctctggggctccattcttgacaagtatggcctgagagacgataattggctgcagtcactgtatgaaattaggcacaaatgggttcctgcatacctaaccagcttcttcttcgctgagctttccttaactcacagagtagaaacagtcagtaagttttataggaataacttcagttcaagagtttctctgaatacttttataagtagatttgatcaatatatagatggtctgtatgcaagtgaagcccagaaagacatcacttctttttctcctgaacagtttctgaaaaccgacatggtcttggaaaaacaagcgaggagtatctacaccagagctgcatttgaaacattccagctggaattggttgaagcaatgcaacattatgccgtcaaggttcaggatggatcatacatgaaatactacgtcgaaagaaacggtgatcctcctaccaggcacaccgttttctacaacgttgctgagaagaaggcatggtgcgagtgctgcagattcgctttctcggcgatactgtgcaggcatgtccttagtgtgttcctcttggccggtgtcatcatgcttccagagccttgcatcacaaagcgatggacaaagaaggctaagtcagggcctgaactcatcgggcttaacgttggaaatggaagtagcagtccagattctgtggcatcaagatataatgatctcgttcgtgatgcgatcaagtgtgcagagaagggaactgtatcggccggcgccttcagagttgcaaaggaagtgctgcgcaaagccttcatggatatcaggggtcacggggagaaactgtgcaaggatgctctgcgctctgcatcaagccgatagcagcgattcgttattttagagggcatttgagagattaacctgctatctttgccgctaaatttgttgagcgaacacgaggaacttcaagtgcttgcgacagtgacttaagccgcatgtcaggttgtcatgaaaaatccagatttgctaatcgagacatgtttagtcttgtttgc

SEQ ID NO: 152814 - DNA, 1656 bp, Zea Mays
tctatatagtaaaacgcgaagagagagatacttctgcggaaacgaatggcagcagcaatggccaacaccacatgcctccgctcccgcctcctcgtcctcccaccgccaccggcgccccgcaccgtcgtgtcctttcgtctccgcccatgcgctactacgatctcctcgtcctcccgaaagaggagaccccgtctcgcggcacgggcggcgccgcccggcggcgctgtggccccggcgtcggccgcgtcgaaggaggatgaccagggggagatgggcagcggcgggggcctctctgcggatgatgcagagaggctgtgtcagtttctgcgggccgacctgccgcacctgttcgacgacgtcggcatcgaccggtccgcgtacgatgaccgcgtgcggttccgcgaccctatcacccgccacgacaccatcgacggctacctcttcaacatccgcctcctcaagctcctcttccgccccgacttctacctccacgccgtcaagcagacagggccgtacgagctcaccacgaggtggaccatggtgatgaagtttatgctccttccctggaagccggagctggtcttcactggcctgtcgatcatgggcgtcaacccgaagaatctcaagttcaacagccatgtggatctttgggattcgatacaaaacaacgagtacttctcttctgaaggactatgggatgttttcaaacagctacggatttacaagacccctgacatagaaacaccaaattaccttattctaaagaggactgcacattatgaggttaggagttatgcgccattcttagtggttgaagcaaaaggtgataaactgacaggatcgtcgggcttcaacaatgtaaccggatatatatttggcaataatgcttcatctgaaaagattccgatgactacacctgtcttcactcaagcttctgacaacacactttcagatgtatccatccagatagttctgccaatgaacaaagacttggacagtttaccagctccaaatacagcagttactttgcggaaggtagaaggaggcattgctgcagtgaaaaaattcagtggacgaccaaaagaagaaattgtgctccagaaggagaaggatctgcgctcccagttacttaacgatggattgaagcctcatccaggctgtttgcttgcacgttacaatgatcccaggacaaagagcttcttaatgaggaacgaggtgcttatacggctaattgacttcacactggagttgtaatcgtcaatactggcatcagatcgatgtaacacactgggcttggagcttccagtgagtcattagaaaggtaaatctgattctatttgtgtactttacctgaaaagaagtcgaagggttggctacagtagtgagagttatctcaccaagttacaaggtttaaacaatccctaaggcctggtttggtgaccagggaccacgagagaattcctcctcatggatccctccgtcatcctagtcaccaaacctatcctaagtatttgtagggaaaaaacttgcctctgaccctactgatgcaggaggctatggcaccggtcctgtcctttttttacctgcacataagtcatgtaaagctacttatcatttttcttcaaaacaatctttacatgttaaatttagagcact

SEQ ID NO: 152815 - DNA, 1866 bp, Zea Mays
tctatatagtaaaacgcgaagagagagatacttctgcggaaacgaatggcagcagcaatggccaacaccacatgcctccgctcccgcctcctcgtcctcccaccgccaccggcgccccgcaccgtcgtgtcctttcgtctccgcccatgcgctactacgatctcctcgtcctcccgaaagaggagaccccgtctcgcggcacgggcggcgccgcccggcggcgctgtggccccggcgtcggccgcgtcgaaggaggatgaccagggggagatgggcagcggcgggggcctctctgcggatgatgcagagaggctgtgtcagtttctgcgggccgacctgccgcacctgttcgacgacgtcggcatcgaccggtccgcgtacgatgaccgcgtgcggttccgcgaccctatcacccgccacgacaccatcgacggctacctcttcaacatccgcctcctcaagctcctcttccgccccgacttctacctccacgccgtcaagcagacagggccgtacgagctcaccacgaggtggaccatggtgatgaagtttatgctccttccctggaagccggagctggtcttcactggcctgtcgatcatgggcgtcaacccgaagaatctcaagttcaacagccatgtggatctttgggattcgatacaaaacaacgagtacttctcttctgaaggactatgggatgttttcaaacagctacggatttacaagacccctgacatagaaacaccaaattaccttattctaaagaggactgcacattatgaggttaggagttatgcgccattcttagtggttgaagcaaaaggtgataaactgacaggatcgtcgggcttcaacaatgtaaccggatatatatttggcaataatgcttcatctgaaaagattccgatgactacacctgtcttcactcaagcttctgacaacacactttcagatgtatccatccagatagttctgccaatgaacaaagacttggacagtttaccagctccaaatacagcagttactttgcggaaggtagaaggaggcattgctgcagtgaaaaaattcagtggacgaccaaaagaagaaattgtgctccagaaggagaaggatctgcgctcccagttacttaacgatggattgaagcctcatccaggctgtttgcttgcacgttacaatgatcccaggacaaagagcttcttaatgaggaacgaggtgcttatacggctaattgacttcacactggagttgtaatcgtcaatactggcatcagatcgatgtaacacactgggcttggagcttccagtgagtcattagaaaggtaaatctgattctatttgtgtactttacctgaaaagaagtcgaagggttggctacagtagtgagagttatctcaccaagttacaaggtttaaacaatccctaaggcctggtttggtgaccagggaccacgagagaatccataagaaggaattcctttgttattcaattgaataaacaagggaattcctcctcatggatccctccgtcatcctagtcaccaaacctatcctaagtatttgtagggaaaaaacttgcctctgaccctactgatgcaggaggctatggcaccggtcctgtcctttttttacctgcacataagtcatgtaaagctacttatcatttttcttcaaaacaatctttacatgttaaatttagagcactatcattctttctgctacactttcagccatttttctttaaaacaacatttacatgttaaatttagagcactgtatcattcttgctgctacactttcggtcatttttctgtaaaacaatatttacatgttaaatttagagcactatatctatcattcttgctgct

SEQ ID NO: 152816 - DNA, 1489 bp, Zea Mays
tctatatagtaaaacgcgaagagagagatacttctgcggaaacgaatggcagcagcaatggccaacaccacatgcctccgctcccgcctcctcgtcctcccaccgccaccggcgccccgcaccgtcgtgtcctttcgtctccgcccatgcgctactacgatctcctcgtcctcccgaaagaggagaccccgtctcgcggcacgggcggcgccgcccggcggcgctgtggccccggcgtcggccgcgtcgaaggaggatgaccagggggagatgggcagcggcgggggcctctctgcggatgatgcagagaggctgtgtcagtttctgcgggccgacctgccgcacctgttcgacgacgtcggcatcgaccggtccgcgtacgatgaccgcgtgcggttccgcgaccctatcacccgccacgacaccatcgacggctacctcttcaacatccgcctcctcaagctcctcttccgccccgacttctacctccacgccgtcaagcagacagggccgtacgagctcaccacgaggtggaccatggtgatgaagtttatgctccttccctggaagccggagctggtcttcactggcctgtcgatcatgggcgtcaacccgaagaatctcaagttcaacagccatgtggatctttgggattcgatacaaaacaacgagtacttctcttctgaaggactatgggatgttttcaaacagctacggatttacaagacccctgacatagaaacaccaaattaccttattctaaagaggactgcacattatgaggttaggagttatgcgccattcttagtggttgaagcaaaaggtgataaactgacaggatcgtcgggcttcaacaatgtaaccggatatatatttggcaataatgcttcatctgaaaagattccgatgactacacctgtcttcactcaagcttctgacaacacactttcagatgtatccatccagatagttctgccaatgaacaaagacttggacagtttaccagctccaaatacagcagttactttgcggaaggtagaaggaggcattgctgcagtgaaaaaattcagtggacgaccaaaagaagaaattgtgctccagaaggagaaggatctgcgctcccagttacttaacgatggattgaagcctcatccaggctgtttgcttgcacgttacaatgatcccaggacaaagagcttcttaatgaggaacgaggtgcttatacggctaattgacttcacactggagttgtaatcgtcaatactggcatcagatcgatgtaacacactgggcttggagcttccagtgagtcattagaaaggagaaatgttgtagatgtcagatttgctttatgtaaatgtaaactctaaaaggtaataagctacatgctaaaacgacaggtcattttgattcgtttatcgaccaaaaatattgattaaaatataggaaaacattaaaatgaaaatacatgagaagtgcccttttactt

SEQ ID NO: 152817 - DNA, 2222 bp, Zea Mays
ttttttttctcaacaatcatacatgccttcgtacttcttggcaaaaggtggcataatattttcaggtgccagctgcacagtgcggtgcccagctcaaatccttttggggccaaattagatttacagaactttacggaggggctagatgaactttcctcttcaacggcccccttgtcttctccatttgttcatttcgcgtggcttcccttgccccctattaaaccaccgagctgggcgcctccccgtggcgctcgcggccgcattagcgcggagatcgagagacaagagagggaaggcggcggcttgccggcttaagccttctctccctccgtcgtcgcctcctccttacgtccgcttcttcctcctgaatggagacgtcagcgccgcccaatgcccccgctccgccggcgcagccacggaggcggttgccggacttccagcagtcagtgcggctcaagtatgtgaagctggggtaccactacctcatatcccacgggatgtacctgctgctgtcgccgctgatggcgctcgtcgccgtgcagctctccaccgtctccccgcatgacctcgccgacctgtgggagcagctccgcttcaacctcctctccgtcgtcgcctgctccacgctgctcgtcttcctctccaccgtttacttcctcacccgcccgcgccccgtgtacctgctcgacttcgcctgctacaagccggagtcggagcgcaagtgcacgcgcgagaccttcatgcactgctccaagctcaccggatccttcacggacgagaacctcgagttccagcgcaagatcctcgagcgctccggcctcggcgaggacacgtaccttccccccgccgtgctccgggtgccccctaacccgtgcatggacgaggcgcgtaaggaggcgcgcgccgtcatgttcggcgccatcgaccagctgctcgagaagaccggtgtcaggcccaaggacattggtgtcctagtggtcaactgcagcctgttcaacccgacgccgtcgctgtcagccatggtggtgaaccattacaagctgagggggaatattgtgagctacaacctcggcgggatgggctgcagcgccgggcttctgtccatcgacctcgccaaggatctgctgcaggtgcaccccaactcttacgccctggtgatcagcatggagaacatcacactgaattggtactttgggaacaaccggtccatgcttgtgtcgaattgcctgttccggatgggtggcgcggccatcctgctctcgaacaggcggtctgacaggcggaggtccaagtatgagctggtgcacacggtgcgcacgcacaagggcgccaacgacaagtgcttcggctgcgtgacacaggaggaagatgagattggcaagattggcgtgtcactgtccaaggacctcatggcagtggccggagacgcacttaagaccaacatcaccacgctggggccgttggtgctcccattatcagagcaacttctcttcatgggcacattgattgccaagaaggtgctcaagatgaaaatcaagccatacatccctgacttcaagctggctttcgagcacttctgcatccacgcaggcggccgcgctgtgctggatgagctggagaagaacctggagctcactgactggcacatggagccatcgaggatgaccctgtacaggtttggcaacacatcaagcagctcactctggtacgagctggcgtacactgaggcaaagggtaggatcaggaagcgcgacaggatctggcagatcgcatttggttctggattcaagtgcaacagcgccgtctggaaggcactccggacggtgaacccggccaaggagaagagcccctggatggatgagattgacaacttcccggtggatgttccaaagatttcaaaggttggtggcgcttgaagaaccattcttcttattattaggtggcaagtggagttgggtgattgtcaggggctgggcagagatttattccatcgtttccaccgttggttcttgtattcagttgtagcatggcatctgtgaaggaacttgagtagatgattcggttaggtagaaagggtgtgttcttcggctcgctagggttgtctgaatgcctgatatgtcctatttattcagattggagagagcaatcgatttgcattctttgctgcgtgattgagatgttcccattgcaggccaacttaaacttgaaattcccctatccaa

SEQ ID NO: 152818 - DNA, 2389 bp, Zea Mays
ttttttttctcaacaatcatacatgccttcgtacttcttggcaaaaggtggcataatattttcaggtgccagctgcacagtgcggtgcccagctcaaatccttttggggccaaattagatttacagaactttacggaggggctagatgaactttcctcttcaacggcccccttgtcttctccatttgttcatttcgcgtggcttcccttgccccctattaaaccaccgagctgggcgcctccccgtggcgctcgcggccgcattagcgcggagatcgagagacaagagagggaaggcggcggcttgccggcttaagccttctctccctccgtcgtcgcctcctccttacgtccgcttcttcctcctggtacgcctgaaaaccttgatgactcgcccgcgttagatttggattttctgcggtttccaatctgaaccacgattttagagatccagaagttcttggctgagatcctggcatttgggactttctgacagcagtctctattgttttcagaatggagacgtcagcgccgcccaatgcccccgctccgccggcgcagccacggaggcggttgccggacttccagcagtcagtgcggctcaagtatgtgaagctggggtaccactacctcatatcccacgggatgtacctgctgctgtcgccgctgatggcgctcgtcgccgtgcagctctccaccgtctccccgcatgacctcgccgacctgtgggagcagctccgcttcaacctcctctccgtcgtcgcctgctccacgctgctcgtcttcctctccaccgtttacttcctcacccgcccgcgccccgtgtacctgctcgacttcgcctgctacaagccggagtcggagcgcaagtgcacgcgcgagaccttcatgcactgctccaagctcaccggatccttcacggacgagaacctcgagttccagcgcaagatcctcgagcgctccggcctcggcgaggacacgtaccttccccccgccgtgctccgggtgccccctaacccgtgcatggacgaggcgcgtaaggaggcgcgcgccgtcatgttcggcgccatcgaccagctgctcgagaagaccggtgtcaggcccaaggacattggtgtcctagtggtcaactgcagcctgttcaacccgacgccgtcgctgtcagccatggtggtgaaccattacaagctgagggggaatattgtgagctacaacctcggcgggatgggctgcagcgccgggcttctgtccatcgacctcgccaaggatctgctgcaggtgcaccccaactcttacgccctggtgatcagcatggagaacatcacactgaattggtactttgggaacaaccggtccatgcttgtgtcgaattgcctgttccggatgggtggcgcggccatcctgctctcgaacaggcggtctgacaggcggaggtccaagtatgagctggtgcacacggtgcgcacgcacaagggcgccaacgacaagtgcttcggctgcgtgacacaggaggaagatgagattggcaagattggcgtgtcactgtccaaggacctcatggcagtggccggagacgcacttaagaccaacatcaccacgctggggccgttggtgctcccattatcagagcaacttctcttcatgggcacattgattgccaagaaggtgctcaagatgaaaatcaagccatacatccctgacttcaagctggctttcgagcacttctgcatccacgcaggcggccgcgctgtgctggatgagctggagaagaacctggagctcactgactggcacatggagccatcgaggatgaccctgtacaggtttggcaacacatcaagcagctcactctggtacgagctggcgtacactgaggcaaagggtaggatcaggaagcgcgacaggatctggcagatcgcatttggttctggattcaagtgcaacagcgccgtctggaaggcactccggacggtgaacccggccaaggagaagagcccctggatggatgagattgacaacttcccggtggatgttccaaagatttcaaaggttggtggcgcttgaagaaccattcttcttattattaggtggcaagtggagttgggtgattgtcaggggctgggcagagatttattccatcgtttccaccgttggttcttgtattcagttgtagcatggcatctgtgaaggaacttgagtagatgattcggttaggtagaaagggtgtgttcttcggctcgctagggttgtctgaatgcctgatatgtcctatttattcagattggagagagcaatcgatttgcattctttgctgcgtgattgagatgttcccattgcaggccaacttaaacttgaaattcccctatccaattgattggttctgttctaac

SEQ ID NO: 152819 - DNA, 965 bp, Zea Mays
atgcaaattttcaaaagatcacgatgtctcaaatggcccaattgtgagccgccgcagccaagagcaagcgcgggcataggagctgccactgggagcaagcacggggagaaggggaagaaacgtggaaggaaatctgcagctgtctacgttggagatgggaagaacattgtgcattcatggcttcactttgtatgtgcttgtcccaaggaatttgagcctaatgcaaacacagtggaaatcgccagggttgctggaatcatgctaatgaatagatgcaaactgacatcatctatgagcactgggatattcttcccccctaagcaaattaaggacccagagactaagaagcctgagaactgggaagacaaggagtacattcctgaccctgaggacaagaagccagagggctatgatggtattcccaaggaaattactgaccctgatgctaagaagcctgaggaccgggacaatgaggaagatggtgaatggactacccatttgctcgtaccattcccaaccaaaatacaagggaccatggaaacaaaagaaaatcaagaactcgaactaccagggtaaatggaaggcccatatgattgacaacctagatttcaaggatgatccatatatttatgcttttgacagcctaaaatacattggcattgagatctggcaggttaaatgaggcactttgtttgacaacaccatcatcactgatgatcttgcgttggccaagacttttgcagaggagacatggggcaagcacaaggagatactgtgttcttatgcttggagtgaagatggttgccactctgaggttcctgagcttcaagaagaagcatagggggagggaggtcactgtcatcgactacacgtcgccgaccgtgccctggccagccgacgacaccagcggcaggtggcagcctgctagctggtgggtcgggcaagcgcaggatgggctcctctga

SEQ ID NO: 152820 - DNA, 228 bp, Zea Mays
attgtgctttgtacatgtaccgtcattcttactctggtgttcttttaatgcaaagtttgacacaatatatttttatacgagagaccgaaggttacttagtattgttttctgtttcttttatcctctttgcagatctatgtttggatgatgaaataagtgcttgaggaccttttctcataacaatatattacatatttgtacataagttatcatggtattatatattcc

SEQ ID NO: 152821 - DNA, 1817 bp, Zea Mays
accctagggcgcgttccttataaaacctatctccattctgttctcactctcagacaccagacgcagtcggctgccgcagactggtagtagccggcgcgccgtcaccgtatcctcagatcagaggcgagcagaaaccacaccactctactgacgcccgacgagcagtgtaacattttccttcagccatgggtaaggagaagactcacatcaacattgtggtcattggccatgtcgactctggcaagtcgaccaccactggccacctgatctacaagcttggaggtattgacaagcgagtgattgagaggttcgagaaagaggctgccgagatgaacaagcggtcattcaagtatgcgtgggtgcttgacaagctcaaggctgagcgtgagagaggtattacaattgatattgccctgtggaagttcgagaccaccaagtactactgcactgttattgatgccccgggacaccgtgacttcatcaagaatatgatcactggcacttcccaagctgactgtgctgttcttatcattgactcaaccactggtggttttgaggctggtatctccaaggatggccagacccgtgagcatgctctccttgctttcacacttggtgtgaagcagatgatttgctgctgcaacaagatggatgctactacacccaagtattcaaaggcccgttatgatgagattgtgaaggaagtctcttcctacctgaagaaggttggatacaaccctgataagatccacttcgttccaatctctggttttgaaggtgacaacatgattgagaggtccaccaaccttgactggtacaagggcccaaccctacttgaggctctggacttgatcaatgagccaaagaggccttcagacaagcccctgcgtctcccccttcaggatgtgtacaagattggtggtattggaactgtccctgttgggacgtgttgagactggtgtcattaagcctggtatggttgttacttttgggcctactggtcttactactgaggttaagtccgttgagatgcaccatgaggctctccaggaggcccttcccggtgacaatgttggcttcaacgtgaagaatgttgctgtgaaggatctgaagcgtgggtatgtggcctccaactccaaggatgaccctgccaaggaggctgctagctttacctcccaggtcatcatcatgaaccaccctggccagattggcaatggctatgccccagttctggactgccacacctcacacattgctgtcaagtttgctgagctcgttaccaagattgataggcgatccggcaaggagctggagaaggagcccaaatttctcaagaacggtgatgctggtatggtgaagatggttcccactaagcccatggtggtggagaccttttctcagtatcctcctcttggtcgatttgctgtccgtgacatgaggcaaacggtggctgtcggagtcatcaagagtgtggagaagaaggacccaactggagccaaggtgacgaaggctgctgccaagaagaaatgatctatctgtctggtgctgtgcttgcttgttggttacctcgtggaagcttaaaatatctcgtcttgttgacatccttgcagttgtcgcgtgaacaagtaatctatgatggcaatgtttgcctggtcatgaagtattattactttcgttgaaaccgtgatgctattaagacttaatttttttatggaacatcgaatgtaaggcatacatggttatgagttttgtactaccctttgcagtgtgttcctgtttaccttttgtgctgatgattcgcttgtctttgtgtcttc

SEQ ID NO: 152822 - DNA, 1814 bp, Zea Mays
accctagggcgcgttccttataaaacctatctccattctgttctcactctcagacaccagacgcagtcggctgccgcagactggtagtagccggcgcgccgtcaccgtatcctcagatcagaggcgagcagaaaccacaccactctactgacgcccgacgagtgtaacattttccttcagccatgggtaaggagaagactcacatcaacattgtggtcattggccatgtcgactctggcaagtcgaccaccactggccacctgatctacaagcttggaggtattgacaagcgagtgattgagaggttcgagaaagaggctgccgagatgaacaagcggtcattcaagtatgcgtgggtgcttgacaagctcaaggctgagcgtgagagaggtattacaattgatattgccctgtggaagttcgagaccaccaagtactactgcactgttattgatgccccgggacaccgtgacttcatcaagaatatgatcactggcacttcccaagctgactgtgctgttcttatcattgactcaaccactggtggttttgaggctggtatctccaaggatggccagacccgtgagcatgctctccttgctttcacacttggtgtgaagcagatgatttgctgctgcaacaagatggatgctactacacccaagtattcaaaggcccgttatgatgagattgtgaaggaagtctcttcctacctgaagaaggttggatacaaccctgataagatccacttcgttccaatctctggttttgaaggtgacaacatgattgagaggtccaccaaccttgactggtacaagggcccaaccctacttgaggctctggacttgatcaatgagccaaagaggccttcagacaagcccctgcgtctcccccttcaggatgtgtacaagattggtggtattggaactgtccctgttgggacgtgttgagactggtgtcattaagcctggtatggttgttacttttgggcctactggtcttactactgaggttaagtccgttgagatgcaccatgaggctctccaggaggcccttcccggtgacaatgttggcttcaacgtgaagaatgttgctgtgaaggatctgaagcgtgggtatgtggcctccaactccaaggatgaccctgccaaggaggctgctagctttacctcccaggtcatcatcatgaaccaccctggccagattggcaatggctatgccccagttctggactgccacacctcacacattgctgtcaagtttgctgagctcgttaccaagattgataggcgatccggcaaggagctggagaaggagcccaaatttctcaagaacggtgatgctggtatggtgaagatggttcccactaagcccatggtggtggagaccttttctcagtatcctcctcttggtcgatttgctgtccgtgacatgaggcaaacggtggctgtcggagtcatcaagagtgtggagaagaaggacccaactggagccaaggtgacgaaggctgctgccaagaagaaatgatctatctgtctggtgctgtgcttgcttgttggttacctcgtggaagcttaaaatatctcgtcttgttgacatccttgcagttgtcgcgtgaacaagtaatctatgatggcaatgtttgcctggtcatgaagtattattactttcgttgaaaccgtgatgctattaagacttaatttttttatggaacatcgaatgtaaggcatacatggttatgagttttgtactaccctttgcagtgtgttcctgtttaccttttgtgctgatgattcgcttgtctttgtgtcttc

SEQ ID NO: 152823 - DNA, 1724 bp, Zea Mays
ttctgttctcactctcagacaccagacgcagtcggctgccgcagactggtagtagccggcgcgccgtcaccgtatcctcagatcagaggcgagcagaaaccacaccactctactgacgcccgacgagccatgggtaaggagaagactcacatcaacattgtggtcattggccatgtcgactctggcaagtcgaccaccactggccacctgatctacaagcttggaggtattgacaagcgagtgattgagaggttcgagaaagaggctgccgagatgaacaagcggtcattcaagtatgcgtgggtgcttgacaagctcaaggctgagcgtgagagaggtattacaattgatattgccctgtggaagttcgagaccaccaagtactactgcactgttattgatgccccgggacaccgtgacttcatcaagaatatgatcactggcacttcccaagctgactgtgctgttcttatcattgactcaaccactggtggttttgaggctggtatctccaaggatggccagacccgtgagcatgctctccttgctttcacacttggtgtgaagcagatgatttgctgctgcaacaagatggatgctactacacccaagtattcaaaggcccgttatgatgagattgtgaaggaagtctcttcctacctgaagaaggttggatacaaccctgataagatccacttcgttccaatctctggttttgaaggtgacaacatgattgagaggtccaccaaccttgactggtacaagggcccaaccctacttgaggctctggacttgatcaatgagccaaagaggccttcagacaagcccctgcgtctcccccttcaggatgtgtacaagattggtggtattggaactgtccctgttgggacgtgttgagactggtgtcattaagcctggtatggttgttacttttgggcctactggtcttactactgaggttaagtccgttgagatgcaccatgaggctctccaggaggcccttcccggtgacaatgttggcttcaacgtgaagaatgttgctgtgaaggatctgaagcgtgggtatgtggcctccaactccaaggatgaccctgccaaggaggctgctagctttacctcccaggtcatcatcatgaaccaccctggccagattggcaatggctatgccccagttctggactgccacacctcacacattgctgtcaagtttgctgagctcgttaccaagattgataggcgatccggcaaggagctggagaaggagcccaaatttctcaagaacggtgatgctggtatggtgaagatggttcccactaagcccatggtggtggagaccttttctcagtatcctcctcttggtcgatttgctgtccgtgacatgaggcaaacggtggctgtcggagtcatcaagagtgtggagaagaaggacccaactggagccaaggtgacgaaggctgctgccaagaagaaatgatctatctgtctggtgctgtgcttgcttgttggttacctcgtggaagcttaaaatatctcgtcttgttgacatccttgcagttgtcgcgtgaacaagtaatctatgatggcaatgtttgcctggtcatgaagtattattactttcgttgaaaccgtgatgctattaagacttaatttttttatggaacatcgaatgtaaggcatacatggttatgagttttgtactaccctttgcagtgtgttcctgttta

SEQ ID NO: 152824 - DNA, 1961 bp, Zea Mays
cgcgcgcgcttctcttccttcttttttcgctcgacgaggtactctgcttcacgcgcgggcgcgcttctcttccttctcttttcgctctgccttgagcctgttcgtttgatgcccagatctactaggtttgtcgatcgtcgttatgtgtgatgagctgagccgattcatgcactgtatttttaattaacagtgtaacattttccttcagccatgggtaaggagaagactcacatcaacattgtggtcattggccatgtcgactctggcaagtcgaccaccactggccacctgatctacaagcttggaggtattgacaagcgagtgattgagaggttcgagaaagaggctgccgagatgaacaagcggtcattcaagtatgcgtgggtgcttgacaagctcaaggctgagcgtgagagaggtattacaattgatattgccctgtggaagttcgagaccaccaagtactactgcactgttattgatgccccgggacaccgtgacttcatcaagaatatgatcactggcacttcccaagctgactgtgctgttcttatcattgactcaaccactggtggttttgaggctggtatctccaaggatggccagacccgtgagcatgctctccttgctttcacacttggtgtgaagcagatgatttgctgctgcaacaagatggatgctactacacccaagtattcaaaggcccgttatgatgagattgtgaaggaagtctcttcctacctgaagaaggttggatacaaccctgataagatccacttcgttccaatctctggttttgaaggtgacaacatgattgagaggtccaccaaccttgactggtacaagggcccaaccctacttgaggctctggacttgatcaatgagccaaagaggccttcagacaagcccctgcgtctcccccttcaggatgtgtacaagattggtggtattggaactgtccctgttgggacgtgttgagactggtgtcattaagcctggtatggttgttacttttgggcctactggtcttactactgaggttaagtccgttgagatgcaccatgaggctctccaggaggcccttcccggtgacaatgttggcttcaacgtgaagaatgttgctgtgaaggatctgaagcgtgggtatgtggcctccaactccaaggatgaccctgccaaggaggctgctagctttacctcccaggtcatcatcatgaaccaccctggccagattggcaatggctatgccccagttctggactgccacacctcacacattgctgtcaagtttgctgagctcgttaccaagattgataggcgatccggcaaggagctggagaaggagcccaaatttctcaagaacggtgatgctggtatggtgaagatggttcccactaagcccatggtggtggagaccttttctcagtatcctcctcttggtcgatttgctgtccgtgacatgaggcaaacggtggctgtcggagtcatcaagagtgtggagaagaaggacccaactggagccaaggtgacgaaggctgctgccaagaagaaatgatctatctgtctggtgctgtgcttgcttgttggttacctcgtggaagcttaaaatatctcgtcttgttgacatccttgcagttgtcgcgtgaacaagtaatctatgatggcaatgtttgcctggtcatgaagtattattactttcgttgaaaccgtgatgctattaagacttaatttttttatggaacatcgaatgtaaggcatacatggttatgagttttgtactaccctttgcagtgtgttcctgtttaccttttgtgctgatgattcgcttgtctttgtgtcttcaagttaatcttgcacttaactgtttttaatatgccagatcgtttcaaaagatttgaaatttggattcttccgaaacgtttttttgataataatgtagtcctgaaaacatgattttgatt

SEQ ID NO: 152825 - DNA, 1873 bp, Zea Mays
tgtaactgagtttccgagatctataatattacgtggctgaggcgcttcatctctgttttgtttgtatgacagtaggagtactaatccaagtttagcttccgcttcttcatctacctttagtatgtatttcgtatataaatacgattgcagtttgcaactgattctcggccatagatgattaccgttgcgttgttcatcgggtctagtttcggatctctgatgttgtgtgggtggggtacttcgacttgggttttcctgccctttgtttgattactggtttattgacatatatttatctattgactttttatctgctatgtttgatgtaagcagcagtgtaacattttccttcagccatgggtaaggagaagactcacatcaacattgtggtcattggccatgtcgactctggcaagtcgaccaccactggccacctgatctacaagcttggaggtattgacaagcgagtgattgagaggttcgagaaagaggctgccgagatgaacaagcggtcattcaagtatgcgtgggtgcttgacaagctcaaggctgagcgtgagagaggtattacaattgatattgccctgtggaagttcgagaccaccaagtactactgcactgttattgatgccccgggacaccgtgacttcatcaagaatatgatcactggcacttcccaagctgactgtgctgttcttatcattgactcaaccactggtggttttgaggctggtatctccaaggatggccagacccgtgagcatgctctccttgctttcacacttggtgtgaagcagatgatttgctgctgcaacaagatggatgctactacacccaagtattcaaaggcccgttatgatgagattgtgaaggaagtctcttcctacctgaagaaggttggatacaaccctgataagatccacttcgttccaatctctggttttgaaggtgacaacatgattgagaggtccaccaaccttgactggtacaagggcccaaccctacttgaggctctggacttgatcaatgagccaaagaggccttcagacaagcccctgcgtctcccccttcaggatgtgtacaagattggtggtattggaactgtccctgttgggacgtgttgagactggtgtcattaagcctggtatggttgttacttttgggcctactggtcttactactgaggttaagtccgttgagatgcaccatgaggctctccaggaggcccttcccggtgacaatgttggcttcaacgtgaagaatgttgctgtgaaggatctgaagcgtgggtatgtggcctccaactccaaggatgaccctgccaaggaggctgctagctttacctcccaggtcatcatcatgaaccaccctggccagattggcaatggctatgccccagttctggactgccacacctcacacattgctgtcaagtttgctgagctcgttaccaagattgataggcgatccggcaaggagctggagaaggagcccaaatttctcaagaacggtgatgctggtatggtgaagatggttcccactaagcccatggtggtggagaccttttctcagtatcctcctcttggtcgatttgctgtccgtgacatgaggcaaacggtggctgtcggagtcatcaagagtgtggagaagaaggacccaactggagccaaggtgacgaaggctgctgccaagaagaaatgatctatctgtctggtgctgtgcttgcttgttggttacctcgtggaagcttaaaatatctcgtcttgttgacatccttgcagttgtcgcgtgaacaagtaatctatgatggcaatgtttgcctggtcatgaagtattattactttcgttgaaaccgtgatgctattaagactta

SEQ ID NO: 152826 - DNA, 1354 bp, Zea Mays
ccttcagccatgggtaaggagaagactcacatcaacattgtggtcattggccatgtcgactctggcaagtcgaccaccactggccacctgatctacaagcttggaggtattgacaagcgagtgattgagaggttcgagaaagaggctgccgagatgaacaagcggtcattcaagtatgcgtgggtgcttgacaagctcaaggctgagcgtgagagaggtattacaattgatattgccctgtggaagttcgagaccaccaagtactactgcactgttattgatgccccgggacaccgtgacttcatcaagaatatgatcactggcacttcccaagctgactgtgctgttcttatcattgactcaaccactggtggttttgaggctggtatctccaaggatggccagacccgtgagcatgctctccttgctttcacacttggtgtgaagcagatgatttgctgctgcaacaagatggatgctactacacccaagtattcaaaggcccgttatgatgagattgtgaaggaagtctcttcctacctgaagaaggttggatacaaccctgataagatccacttcgttccaatctctggttttgaaggtgacaacatgattgagaggtccaccaaccttgactggtacaagggcccaaccctacttgaggctctggacttgatcaatgagccaaagaggccttcagacaagcccctgcgtctcccccttcaggatgtgtacaagattggtggtattggaactgtccctgttgggacgtgttgagactggtgtcattaagcctggtatggttgttacttttgggcctactggtcttactactgaggttaagtccgttgagatgcaccatgaggctctccaggaggcccttcccggtgacaatgttggcttcaacgtgaagaatgttgctgtgaaggatctgaagcgtgggtatgtggcctccaactccaaggatgaccctgccaaggaggctgctagctttacctcccaggtcatcatcatgaaccaccctggccagattggcaatggctatgccccagttctggactgccacacctcacacattgctgtcaagtttgctgagctcgttaccaagattgataggcgatccggcaaggagctggagaaggagcccaaatttctcaagaacggtgatgctggtatggtgaagatggttcccactaagcccatggtggtggagaccttttctcagtatcctcctcttggtcgatttgctgtccgtgacatgaggcaaacggtggctgtcggagtcatcaagagtgtggagaagaaggacccaactggagccaaggtgacgaaggctgctgccaagaagaaatga

SEQ ID NO: 152827 - DNA, 92 bp, Zea Mays
atccaatccaccacttgtgtaagcaatcatgccggaactcactgttgtcaaaggaacaatggattttattttctatcacggcagatcccaac

SEQ ID NO: 152828 - DNA, 89 bp, Zea Mays
ccaggatggagggcaacaagctgggggaagaaggaaccgaggaataccagtcaggtacagggattagtactctctttatccgatgaggg

SEQ ID NO: 152829 - DNA, 115 bp, Zea Mays
caaatcatacgccatagcaaaaagatacttttccgcgttatctcaagaaaaaggacgaagaattatagaattgtcgtgtatgttactttgtgggtgtggccattttgaatcccat

SEQ ID NO: 152830 - DNA, 679 bp, Zea Mays
agcaaatacaatatacgtacgagattaaaatcctctgcatgaatatatggctgcgacaatgttttcgaggggcttatagcatatggacatagccccagaaggaacatgtatgggaagcactcactccccttcatacatttgtagcttacagatcaatacttacaacacccatttgtgcgaccgaagattgtcatgcacatgaggcctcccttgtcttcgatctccccccgcttctgtctcttccagtccattgttcacactatttatatctcctctattgttcacacttcataattaaattagtttaggtctcgccctgtgtgacttgcttccaatagaggacgctagtaaccattctgatctttttgccaaatagtagtagtttgttgccaaaatcaccatcccgaacgtctcacacaattcaaattgaagatggaacaactgtttcttgggccttggttctcttaggcctccacatggtccgggccttcaccatggtcggacctgattcaaggctcagcacatgctcacagtgcaaggttgtttctccagactcactgttgcaatccgtgtgcacagaggtgtgtgattgcagcacactatcccggccacactcccttttgtaatccagcacaatgctcgccagctcatgattctcaagaatagagatgggtgcact

SEQ ID NO: 152831 - DNA, 444 bp, Zea Mays
atggcgaagcacacgtgcacgggggagccccgcgcgaaccccgccgcgcgggtgcgcgactgccacgccttggcgatcagcacctcgaacgcgctgcaccgctgccccgcctgctccaggaaccgcgccttcaggtgctcgatgtattccgtcgagatgtccatggcgaggtactgcagccggagctccgtcgggaccggcagcgcgcccaccgccgcgccgggagggttcgggatcgcctcgcggccccaagccggggccaccaggggcgccgcgtgcccacgcgccatgtcgccgacggcggccatgaactgggccgcgccggggccgtccgcgaccgcgtggctgaaccggaacccgaccacgaacccgccgcacgcgaactgcgtcacctggacaaggaggatgagcgagtcctcggggaggaggtcagattcgggatag

SEQ ID NO: 152832 - DNA, 1926 bp, Zea Mays
ccggataccgcagcacggcagcaccatctactcgggcctcggggttaccgggttaggcatatgcaggcagtcagggaagcgagggtgccacacacacagcacagacccacacacgcgggcgcgctagctagtgagagtcggagatgtcgccgcggccacacttcctcgtgctcaccttccctttccagggccacatcgccccggctctccgcctcgccaggcagctgctcgcggcggcgcccgacgcgctcgtgaccttctccaccaccgaggtcgcgcacaggcgcatgttcccggcaaagcccaacgacggcgccaaggactccgacgaagacggccgcctcgagttcctcccgttctccgacggcacggaggccgggtacgtccggagcgccgacctgggctcgttcaacgcctacatggcgtctttccacgccgcgggggcgcgcagcgccgcggagatcgtggacgcgctcgcggcgcggggccgccccgtgtcccgcgtcgtgtacacgctgctcctcccgtgggcggccgacgtcgcgcgggaccgcgggatcccgtccgcgctctactggatccagccggtctccgtgttcgccatctaccaccactacttccacagccacgccggcgtcgtcgccgaccaccttcacgacccgtcgttcgtcgtggagatgccgggcctggcgccacagccggtcggcgacctgccgtccttcctcaccgactccaccgacccttccaatatgttccacagcgtcttcaccacgatccgagacctgatcgaaacgcttgacaaggaaagccccaggtccactgtcctcgtcaacacgtgccgagagctcgaggtgggcgcgctcgccgccgtgggggcgcaccacgacgtgctccccgtcggcccggtgctcccatccggcggcgacgccggcatcttcaagcaggacgacgacgccaagtacatggagtggctcgacgccaaaccggcgaattccgtggtgtacgtctccttcggcagtctgaccacggtggcgagagaacatctcgaggagctgctccggggccttgaggagagcggcaggccgtacctctgcgtcatccggaaggacaacaaggctgcactcgcggatgccgagacgaaggtagacgaggagctcaagaacggcatcgtagtggagtggtgcgaccaggtgcgggtgctgtcgcacgcggcggtcgggtgcttcgtgacgcactgtggctggaactcggtgctggagagcctggcggcgggggtgcccatggtgtgcgtgccccggatgtcggaccagcgcaccaacgctcaacttgtcgtgcgcgagtggcgcgtcggcgtgcgcgcgcaggtggacgatggtggcgtgctgcgagcggcggaggtgcggcggtgcatcgacgaggcgatggggaatttggaggccgccgcggaggtgcgacgcatggcggcggagtggaagcaggtagtgacaaaggccatgggaaaaggagggtcgtcggatcgtaatctcatgacgttcgtggatggcgcgaggaacgccgtttgaagattggcatgtgtttctttctttcttcacgttcggttacaccaatccagaaaaagattagcttgttcggttacattaatccaaaagaggattggttacatcaatcaaccaatcctattctgaattggtgtaaccgaacaaaccataagtggtcaaaggcggatggcttccggccattgacgtacggggtcagacaaccgctggctccacgcgttattgactgctccacaactacttttctagaagttacggtataggatccagttgtgttaactgtggacattatgttgtcagtagctgttaagcttttcaacgtctgcttgactagacgactgctcccgataaactaggttatcttatattc

SEQ ID NO: 152833 - DNA, 1454 bp, Zea Mays
cgaacatcgttgtagcagtaggcacgaagatggtaagctcacctgattctgtgccggccagatcgaggccgatggcgacgatacaggatcacttcctgtttgtgaccgatccgatgcaaagccacatcaacccggcgcggcggctggcggtgcgcgtcgcggcggcgatgccgaacgcgcgcgtcaccttctccaccgccgtcagcggccaccgccacatgttcccgcacctgacgtcccccgacggcgaggtcgtccagggcgtcgtctcgtacatcccctactcggacggcttcgacggcgggttcaacccggaggcgcacggcgtcggcgcgtacagggagcgcgcgcgccaagtcgggtccgagacgctcgcgtccatcgtcgcccgcctcgccaggcggggtcaccccgtgacgcgcgtcgtgtacaccgcgctcgtcgggtgggtccccgcggtcgtgcgcgcgggcggcgtccccgcggcgctgtactgggtaaagccggccactgtgttcgccgtgtactaccactgcttccacggccacggcgcgctcctggactcctgcgcgggcgacgccgacgcggaccctaacgccaccgtccgcctgccgggcctcccgccgcttaaggccgacgccctcccgtccttcgcgtccatggcctcgccggggagccgcaactacctgacgctcgacatgctgcgcgacatcttcctggcgcttgatgaacacgggcccactgtgctcgtggacacgttcgacgcgctggaacccgaggcgctgcgcgcggtgccgcggttcaacctcatcgccgtgggcccggtggtggtggatgagccgtgcaggccatgcgtggagttgttccagcccaacgatgccaccgcgtgcatgggctggctggacacgatgccggcgcgctccgtggtgttcgtgtccttcggcagcatcctctcgttgagcaagcggcaggacgaggagctgaggcgcggcctggaggccaccggccgggcatacctcctggtggcacgcaagggcaacaatggtggtagcgatggtagcgggaaggggatggtggtggagtggtgcaaccagacgaaggttctgtcgcacggcgctgtcgggtgcttcgtcacgcactgccggtgggactcgacgctggagagcattacaggcggcgtgccgatggtagccgtgccgaggtgggcggaccagccgaccgtggcagcactagtggaggcatctgcgggcgtgggcgtgcgtgcgcgggtggacggcgacggagtggtggagcgtcgtgagctgcagcggtgcgtcgagaaggtcatgggaagcacggacagcgcttcggcagtgagggcacgcgcagagtgctggggccaacgcgccaaagaggcggccgccgtaggggggacgtcgcagaggaatctccgagcgtttgcgtccgggctgtga

SEQ ID NO: 152834 - DNA, 692 bp, Zea Mays
aagatcatcttaccttcaacaacgcaaaggaggacacaccgccggcaacaagaaaggtgcataaatactctggaagtgtgtacttcacaccatagagaagagttcccatcaacattactaaataaattgaataggaagttagaggagaagcccgggtagctgatgtacttgagagcctcgatccccatggtcggcccgatggtattggtgacgctgacgccccagtacttccatatcggtgcgctgccattggagctactcccgcccgaccacagcttaatcacttgaaaagaccagacgaagcagatgacgttctgcgcgaagttgaggaacgcgaggtgctcgaaccgccgcgcatccggcccgaaccgcttcgtcgatctgaaccaccggcgagcaaactcaccaaattgaccccggcttgtctaattgtgtagcggacttcggacagcaattagagaggggggggggcttacagagtctcctggaggacgccctggtagatgtaggcggaccagatccctgcgacacagaaggcgaggacggccacgcgccccgccatgctcccgccgccgatgccgcggtcgcgggggcggggacggacgacgccgttggcgccgtcgccacggccccggcgcgcagcggccatggtgtcgattctccggccgttgtcggcgagggatcagcagaat

SEQ ID NO: 152835 - DNA, 303 bp, Zea Mays
atgtgctgctcaagccggagcaacgtagatttgctcggtttgggtgctttcctaccatttcctcgcaccaggaggctccgccgaggacccgaaacactcatcaaattcagctccgagccccggctgcctcacccggtcgcccccgacctggcgaccaaagccgtgcggtgcctactgcctaccgagcccctctcctcggcgaccgtctctctgttcctcgctctcgccgacggcagccccgtcctcgccctcaacgcgcgcgccgctgtaggcgtcccacgcttgaaaggctactcaatttaa

SEQ ID NO: 152836 - DNA, 779 bp, Zea Mays
aagtcctatcaacagcgtgctcgagattataagcacaaggaaatacaaggaaataagagtacagagatgccaactggtaggctgagcggcaacatcacccaggactgggagccggtggttctgcgccgtacgaagccgaaggcggcggacctcaagtcgtcgaaggcggtgaaccaggcgctgcggtcgggcgcggccgtggagacggtgcgcaagtcagcggcgggcatgaacaagcactccacgacggtggcgcccgcgcgtaagctggacgagacgacggagcccacggcggtggagcgggtggctgtggaggtgcgcgcggccattcagaaggcgcgcgtggccaagggatggagccaggcagagctggcgaagcgcatcaacgagcgcgcgcaggtggtgcaggactgcaggagtacgagagcggcaaggcggcgccggcccaggccgtgcttgccaagatggagcgcgctctcgaggtcaagctccgcgggaagggcgtcggcgcgccactggcggccgtcgggaagtgatctgatgtgatggggacttgtgcagattgcaacgttgatagcttaacctctttttttgaatcggctggttcggatgtgcagtttgtgtttgtaggatcgtaattgggggaatactatatgatgtgaaggacttgttgcgatgtttgattggtaaatggttgcggatgttgagcattatttgtagcactgtatgcatgcgtatagtcggtctgtgcgcgtggaaagtatgtgatagtattagat

SEQ ID NO: 152837 - DNA, 2234 bp, Zea Mays
catcctccgtgattgccatccatcgccggcgtgtggctctagacatcgcaatttctcatcggtctgatgcgggcaccaccgtgtcgccctacccgtggccagcgctcgtttcgtcgcggttcgccggtaagccaccccatacagttccctggcccctgggcatcgtgtcggtcacttcggagtagaggatagggctagatcgtctccggcgatgtccgccaccgtctacacccacggcgccaccgttcgtcgcccgcttggggggggctgaagcggtgtgtgggattgtccgtcgtcggatgctcgttcgacgatcgggatcgggtgctggacctgagaggatatatgaatctggggtcgtccgatcgttgttgagcggatgagattagatcgcacaaacaatgcttcaggtatgtagatctggagcattggtctgcgggctgccagctaggattaggggtcgggtaacgattcggtatggggccatctcgaccgttgatcggctgacgttcgacccagaacggaacatgcaatgccgctatgttgtatttgctaaagagacccccgtagatagttaaatcaacccgcggtccactgctgtgtaaaagcaattacacttgggtcttgaaattcacagatcagaccctggggtttataagaatcgtgtccgcagtccagaatgcttaggaaattcataatcaataaagaaaatgggtttttagtataaaaataaatctataaacttgtttaattcatattaaatccatcttaactccaaattgacccattccagttgcaataaattcatattaatattatttatcatctagtaaccctagtttgttatgaaacataggtaggaattatgcacttaatttctttttgtacctaacatttaaatcttcagtaaattgtaactcaataaccttaactccgaatttagcgattcttgttcctatgatctcgttatgacgcatagattattattatgcagtttgttcttaagtttagtgtgatgttaattttgcctataccctgtttgtttgtattgctacgactaacgtgaggttacgagtcacttgaagatcatcttggtacctggaatctcgagtcccaggcaaccatgacatgctcaggttaatttgatgggacccaataggtttccttagcattgtttatccctcaccttgcaagcataagagtttttggtagtcttgctattgctctatttggttttgggaaactaatgtttcactatgatcatgttccaattatgttgttgtttaattattgttcatgataagatcatattgttaattggaacatggagaaccacccgggaaaataatgctaccacaagggaggtaggggatgcccttggctgactaattaggaaagctagtggatgactattttacccgaaagggacaaggacattaggggagtggtcagtgtagggaggtccttgggttgattttgctgcgatggcggtcaggcgagggatccctgcattggagcttcctagaaactgtagcaggttttctaaagctagtggaactttgtaaaggccttgtagtggatccctatccattcacctcggtagtgtctaagggtctagctaaccctgacgatatgggatacacgacttgtgggtacagggtacaacctctgcatagtgtaaaactggtatactagccgtgctcgcggtcatgaacagctcaagactctcgcatgattaaattatggaattaaattcaatttgtcatttccatcgcattgggatttattattaattttgatctattattattttggtttggtacttacttacatctagtaaatggtaataaaatttgaccaacttattaaaagcaatgctcagctttaacccatattgttgatcagccttacatttcacatgaactctcacctttggtgagttcatgcacattattccccacaacttgttgagctatgatcttttatgagctcactcttgcgatatataaccccccataggagaagaacaggtggtccaggaggagccgtacaatgaggagtacgagttgatctaggtggcgtctcctagtcagctttgtgtcgccaaggaataatacttagttcgcttatttattatcatttatttttgtaagacttcagttatgtaataatgatatttatgatacttgtgacatttatctctatacactttgtcattatatgtgatgttcttc

SEQ ID NO: 152838 - DNA, 1226 bp, Zea Mays
gcaggctcacctcgctcaccgacacctgggccctaaccccggcaactcgtgctcgccacccgattggccggtataaagccggtagcgcgtcgcgtgagccacacgcgcacggcgcacacatatcccttccttcactggctcactgcggtcccggcaaaagtcagtcaactcagccaacaagcgctgctgctcgggcacgggtggtttgggaggccggacgcaacgtcgggatgcagtcgctgcaggacaaggcgtcggagtggagcggggtggcggccgccgatgcctttgccatcgacgacgtcaacatattcgagtacctcggcggcactccgcagccattcgtcgacctctccaccaatttctacaccagggtttatgaggacgaagaggagtggtttcgggagatattcggggggtcgaagaaggaggatgccatccagaaccagtatgagttcctgatccagcgcatgggcggcccacctctattctcccagaggagaggacaccctgcccttataggacgacaccgaccattcttggttacccaccgagctgcagagcggtggctacaccacatgcaacaagctttggacgcaactgaaagcatagatgtggactcaaaaacgaaaatgatgaacttctttaggcacactgcttacttccttgttgctggcaatgagatgacaaggcaacagggccatggagtagcctgcaaacatgcaacaagtaaaccagctgagtaaccattttagccgtggagctggtaaccattggaataattactgataagccttttatccagtgtgcctttatagcattccgtatacaatggagttgaaacaacctccacattcaaagaaacaatggtactgactctttgtaggctttatagccattcttgagcagagagtgtactcaaagtggatagttgtagcttctgccaatatgtttatccttcttcgtctcttgtgctcaagagttattcacagcagtttttcaaatttgacctcaccctagcaaggttaccacaccacatgttaaccatgccacacttatttaaggtcatatttgtttaattttcataagtttgggagccaaagaaagtcattgcctatttaggtcgctgccgagtagagcctagctggctggcagggacatgcggaaaacttatttggttcattgaatcaaaaagatcaggctgagtggagcgtttgtttgtttgg

SEQ ID NO: 152839 - DNA, 317 bp, Zea Mays
cattgctttcctgtcctcaatagctattgtcgttgtatactgacagcaacacctgtcttaagggttgctgcaaaggtcattggtgaagttcaggcaatgatagctttccacttttgttgtgcctgatcctttctatcttttatatgttctggttttctgctacactccatctcttcagctctggtcaagttatccgaaatgattgcaatactgattgttgttcatatgatctgaagctgggaaaagtaaattgtgacaactgctgtgggtacaacatccattacacccctcatatcagcattgccattctattccac

SEQ ID NO: 152840 - DNA, 2184 bp, Zea Mays
attttcctgtcggaaacaaccctggccttaggaggccaggcgattctccgccgcctcgtctcgtctttgctatgcgccacgagcgcctccgccgctccaacgctccaacgccctgagcgcctccaacaccactccaacgccacgagcgcctccgccgctccaccgaacaactccaacgccactccagctcttgcagcagtagaactctactgcagccagctacgacaccctgcgcttgccgcactagggcatcgacgccgtgctcttcgtgccggatgacgccaaggccacgcagaccgccgacccgaacaggaagcctcccgccattgtcacccacaagaagaagatcaagctccggtgagatatgggttcttgggagaagcaagttagacaatttttgttagatgaggaagaagacgatgatgagttgttctttgttattctccctgctataattccatacctctcagaagagaaagagcccatccacacctcctcactcactggcgctaaaaagcttcctagctctgtccacactcatacaaaaatcgcaacagattctaggttcatgccattttttcagaactgcattggtgcaatcgacggtacacatatacccatcaccatagcagaacatagggcccctccatatagaaacaggaaaggaactctttcacacaatgttatggtagcctgggacttcgacctcaatttcacatttgtttcatgtggatgggaggggtcagcctcagatgcaggggtgcctcgatctgctattagcaaaggatttagtgtgccagaaggaaagttttatctagtagatggtggttatgcaaatacgtcatccttcattgcaccgtatagaggggttcgataccatctcaacgagtttaggaggcgtcgttcatcacaaagtggttatgcgaactacagagagttgttcaaccaccgccatgcaattctccgtaaccatatagagagggccatcggtgttctaaagaaaaggttcccgattctaaaagtaggcacatttcatcccatagagaaccaaatcaagatcacagctgcaactgttgcatttcacaacataattagagggcaaaatggagacgaaagatggcttgacaaccaaccaaattacatctctccaagtcaatatgttgatgttccagagggagataccaactatctcaatgacacagaatcaagtgatggaagcgctctaagagatcagatcgctcttcagatgtgggcttcctacaatatatagatgtgtgatgcctactattattacttatgaagtctttatggtttgtagtttgtcatgtagctagttatgaataaagttgcttagttatgtactattatttccacaatttcagttttgaataaaggatgatttggaacaatgtgtacgagaaaggcttagtcgatgtgatgcatgatcacaaagataatccaaaattcaaaggtcaaaatggttggaatcgtgatggatggaatagtatcactaccaagttcaatgaaaagttccctctagctcatttctctaaacaacaactgcaagagaaggagagagagcttaaaggatactacaaggcaataagggattcaagaaaagaaagcggggttggttggaatgacaccctatgcatggtactagctgaaccagaagtttggccaaggctgattcgcgtatcaaagtttcgcaataggccattccctcttttttacagtttagaagggctatatgaaggtagtgtggctaccggagagttgaatttcacatcaaccgctgttgatcttcctccaccttcagctccatccaggagtgtgtctggacaaagtctcagtcctttgagtactaattcacttgatttggatggacaagaaaccacaagtgtgttcaatctatcttgtgatgctcaatctgtccgagtcaatactaatgaacccactgaagctcaatttgtcccatctaatcaagaatcaagccagagagaaggtggcagtgggagaaagcgtaagcaaagccatgttggattagctcttgaaagttatgtggagtttaaaaagatccaaaatacagaaacacttgaaactcttaaagaacataagaggcaagaggatcaattttctattagcaagtgtcaggctgaattgaaaggaatggatggattaaca

SEQ ID NO: 152841 - DNA, 2432 bp, Zea Mays
attttcctgtcggaaacaaccctggccttaggaggccaggcgattctccgccgcctcgtctcgtctttgctatgcgccacgagcgcctccgccgctccaacgctccaacgccctgagcgcctccaacaccactccaacgccacgagcgcctccgccgctccaccgaacaactccaacgccactccagctcttgcagcagtagaactctactgcagccagctacgacaccctgcgcttgccgcactagggcatcgacgccgtgctcttcgtgccggatgacgccaaggccacgcagaccgccgacccgaacaggaagcctcccgccattgtcacccacaagaagaagatcaagctccggtgagatatgggttcttgggagaagcaagttagacaatttttgttagatgaggaagaagacgatgatgagttgttctttgttattctccctgctataattccatacctctcagaagagaaagagcccatccacacctcctcactcactggcgctaaaaaggttagagaaattcttaaaggacatgagagttggtgcaaatccgagtttagaatggagccaacaatattcaaaaccatatcaaattttcttagaagagacaatttactgcgagacacacaagcaacttgggatgttcatgtacatgatctcccacaatgctagtaaccaaatgctgcagaaggcttttcaacatagtggagagactatccatagaaaaatatctgaagtatttgatcttgttcccacactaactcagtgttttgtgaagcttcctagctctgtccacactcatacaaaaatcgcaacagattctaggttcatgccattttttcagaactgcattggtgcaatcgacggtacacatatacccatcaccatagcagaacatagggcccctccatatagaaacaggaaaggaactctttcacacaatgttatggtagcctgggacttcgacctcaatttcacatttgtttcatgtggatgggaggggtcagcctcagatgcaggggtgcctcgatctgctattagcaaaggatttagtgtgccagaaggaaagttttatctagtagatggtggttatgcaaatacgtcatccttcattgcaccgtatagaggggttcgataccatctcaacgagtttaggaggcgtcgttcatcacaaagtggttatgcgaactacagagagttgttcaaccaccgccatgcaattctccgtaaccatatagagagggccatcggtgttctaaagaaaaggttcccgattctaaaagtaggcacatttcatcccatagagaaccaaatcaagatcacagctgcaactgttgcatttcacaacataattagagggcaaaatggagacgaaagatggcttgacaaccaaccaaattacatctctccaagtcaatatgttgatgttccagagggagataccaactatctcaatgacacagaatcaaggatgatttggaacaatgtgtacgagaaaggcttagtcgatgtgatgcatgatcacaaagataatccaaaattcaaaggtcaaaatggttggaatcgtgatggatggaatagtatcactaccaagttcaatgaaaagttccctctagctcatttctctaaacaacaactgcaagagaaggagagagagcttaaaggatactacaaggcaataagggattcaagaaaagaaagcggggttggttggaatgacaccctatgcatggtactagctgaaccagaagtttggccaaggctgattcgcgtatcaaagtttcgcaataggccattccctcttttttacagtttagaagggctatatgaaggtagtgtggctaccggagagttgaatttcacatcaaccgctgttgatcttcctccaccttcagctccatccaggagtgtgtctggacaaagtctcagtcctttgagtactaattcacttgatttggatggacaagaaaccacaagtgtgttcaatctatcttgtgatgctcaatctgtccgagtcaatactaatgaacccactgaagctcaatttgtcccatctaatcaagaatcaagccagagagaaggtggcagtgggagaaagcgtaagcaaagccatgttggattagctcttgaaagttatgtggagtttaaaaagatccaaaatacagaaacacttgaaactcttaaagaacataagaggcaagaggatcaattttctattagcaagtgtcaggctgaattgaaaggaatggatggattaacagcagtagacaaatcatatgctttggagcttttcgtatctgtgacaaaccgagaaattttcttaacaacaacagagcatgatgttagagaaatttggctcaagcgcaaaattaggttgcttcgtggtagtgatgcatggcctgaacaaatgatatgagcaaatttg

SEQ ID NO: 152842 - DNA, 1718 bp, Zea Mays
attttcctgtcggaaacaaccctggccttaggaggccaggcgattctccgccgcctcgtctcgtctttgctatgcgccacgagcgcctccgccgctccaacgctccaacgccctgagcgcctccaacaccactccaacgccacgagcgcctccgccgctccaccgaacaactccaacgccactccagctcttgcagcagtagaactctactgcagccagctacgacaccctgcgcttgccgcactagggcatcgacgccgtgctcttcgtgccggatgacgccaaggccacgcagaccgccgacccgaacaggaagcctcccgccattgtcacccacaagaagaagatcaagctccggtgagttttgaataaaggatgatttggaacaatgtgtacgagaaaggcttagtcgatgtgatgcatgatcacaaagataatccaaaattcaaaggtcaaaatggttggaatcgtgatggatggaatagtatcactaccaagttcaatgaaaagttccctctagctcatttctctaaacaacaactgcaagagaaggagagagagcttaaaggatactacaaggcaataagggattcaagaaaagaaagcggggttggttggaatgacaccctatgcatggtactagctgaaccagaagtttggccaaggctgattcgcgtatcaaagtttcgcaataggccattccctcttttttacagtttagaagggctatatgaaggtagtgtggctaccggagagttgaatttcacatcaaccgctgttgatcttcctccaccttcagctccatccaggagtgtgtctggacaaagtctcagtcctttgagtactaattcacttgatttggatggacaagaaaccacaagtgtgttcaatctatcttgtgatgctcaatctgtccgagtcaatactaatgaacccactgaagctcaatttgtcccatctaatcaagaatcaagccagagagaaggtggcagtgggagaaagcgtaagcaaagccatgttggattagctcttgaaagttatgtggagtttaaaaagatccaaaatacagaaacacttgaaactcttaaagaacataagaggcaagaggatcaattttctattagcaagtgtcaggctgaattgaaaggaatggatggattaacagcagtagacaaatcatatgctttggagcttttcgtatctgtgacaaaccgagaaattttcttaacaacaacagagcatgatgttagagaaatttggctcaagcgcaaaattaggttgcttcgtggtagtgatgcatggcctgaacaaatgatatgagcaaatttgacaactgcagttctgttatggtgaatggtgattgtagttcagtttcagctctaacctatggaaaattgaatggcagttgcactaatctgttggtggaatgattttcccagtaatttcctggacaagcagatcactgagaaccatttaccttatgagaaatgatgccctgtatggttcagtatagttcttgtattgctagtttaaattaattcttgtatggcagttgcactaaactgaatggcagctgaactttgagatatgcttctattgttggtttaaaaccatggtgatgactgttcttgtatgcattctgtatgcattcttgtttataacctggttgcttatgtatgcattcttgtatgccgtgtatgcatggtgactgttcttat

SEQ ID NO: 152843 - DNA, 935 bp, Zea Mays
atggccgccaaacccccctgccctctccatctcgactcctgggcatcaacccccatgccagaagctagccatctcggctcctgggcatcaacccccacgctagaagctagggcactgctccagtcccatggtgagctcgccctgccccctgtacgacgccctccctgctcctctccacacgatcacgcatgcctgagcaccagccgttcccaccgttctcgcccgccatggatctcgcccagcctttccccatttcctccccacctcctagatgctcgcgtgcccagtcccagctcacccagccccctctctgctggtggtcggccacctctgctgctcccatggtgatctcatcccttccctactctccgtttcttcctcggatggacgccaacaacagcagccccggatctgcacagccccgaccttgttatcgacctcattgagcacctgcaaccctttcagtttttgcgctacatgtgtttgataaaatgactaaacatgtgaattgtgtgtatatgtatgtggttatgtgcgagatatgaggagagaaacccctgggctctgatggtgaagaaccgaaacccatgtgaacattattaagtgttcggtagaaggaccgaacctaaaaccatcgccgtggttgtggacgtcgctttgagtttagtcatggtttcgaaaattggattgttcggctaagctaaactgagaatcagcctttagtaattatagaatagttgtagtactttttttaagttttccaacaaattttggatcaccctttttggtggtctagagaccaagttacagctgtttgaactatagagtctgaatctgtccaaatctagatagagaagtctgtttgtattaactgactttgatattcattgaattaacctgagatgtttataaattaattgtagaaaattctacta

SEQ ID NO: 152844 - DNA, 876 bp, Zea Mays
atggacaagctcaaagggaagaagcgcggagatcgtggtgactcctcgaggtcacggtcgactaggggttcaggtggtggggatacatcctctatgttgttccagggctctacaacgtcaaggcaacggctagagcagctccttggttgcatggaggagcaggggcacgaagtggcaagccatagtgcacctgggcaagagcgcgaggtggcaggccatagtgcacctgggcaagagcgcgaggtggcatgccacaatgcacttgagccggagcgtgaggcgataggctcaagtggacctatgctagagcaggaccacaatgcatttgagcaagcgcgcgaggcggcagaccacaatgcacctagtcaggaggacgagctggcacgccaaggttcaccaatgcgtgatgatgatgactatggggaggactacgatggagaggccgatggagaggccgatgacgaggttgttacaatgacacaggcaacgaacttcaggttggggatcggtgatggggttgtgagtcgcgatagctttggtcgtcggtctgtttcctcggtggggagtagatctcgaacttcaacttcgagggaatcagagcttgatgagcaactaagacagcaacaacaacaagttcaacaactatctcaacaagttcagatgatgcagggaatgctgatgcagatgtatagtgctcagatgggatctccaatgggaccccagttcacctgtccatcacaatttggacagaccccaaacaccaacgaaacacagggttctgagaccggacaaggaaacccacagatggacattcagtggtcgatgcctcctagaggacatattcttcctcctccacaaccaggtatgggatattag

SEQ ID NO: 152845 - DNA, 1723 bp, Zea Mays
ttctaaggccgaggcctccacgtctctggaaccgttttacccgccattttcctctcctctcctctcctctccctccatctaaggagaggagagatatgcagctcacgagctccaccaaatcctgacctcccaaagctgtggtcgcgatccaaacagaagggaaatgatcaggcgacaacccggcatggatcggttcctgcagctgctggccgccggcgtggccgtgctactgctagtggcaccgccggccatggctgacgacgacattgtagaagtcggcgtcaactggggttcgcagctctcgcacccgcttctccccggctccgtggtgaagatgctcaaggcgaaccgcatcgccagggtcaagatgttcgacgccgactcctggcccgtcggcgcgctcgtcgactccggcattgaggtcatgctcggcatccccaacgacatgctcgagaccatgagcagcagctacggcaacgcccaggattgggtcaaggagaacgtcaccgcctacggtgacaagcttaagctcaagtatgtggcagtggggaacgagccatttctcaaggcatacaacgggtcattcatgaagaccaccttcccggcgctcaagaacatccagaaggcccttgacgaggccggcgtcggcaacaccgtgaaggcagtcgtcccgctcaacgccgacgtctacgtctccccggacgacaagccatcttccggcgcgttccggcctgacatcaacggcctcatgaccgacatggtcaagttcctgcacgaccacggcgcgcccttcgtcgtcaacatctaccccttcctcagcctgtaccagagcgacaacttccccttcgagttcgccttcttcgacggcggcaagaacatccaggacaagggcggcgtcacctactccaatgtgttcgacgccaactacgacacgctcgtgcacgcgctgaagaaggccggcgtgcccgacctcaaggtcatcgtcggcgaggccggctggcctaccgatggcaacaagtacgccaacttcaagctggcgcggcggttctacgacgggctcctcaggaagctggccaagaacgaaggcaccccggtccggaagggcaagatggaggtctacctgttcggcctattcgacgaggacatgaagagcatcgcgccggggaacttcgagcggcactggggcatcttcacctacgacggcaagcccaagttccccatcgacctgacggggcagggccacgaaaagctcctctccccagttaccgacgttaagtacctcccgaaccagtggtgcgtgttcgacgacggggccgaggacaagtccaagctgcctagcaacgtccagtatgcatgtgcgagcggcgactgcacggcactcggctatggctgctcctgcaatgggctggacgagaagagcaacatctcctacgcgttcaacatgtacttccagatgcaggaccaggatgtgcgcgcctgcgacttcgaagggcttgccaagatcacagacaagaacgcctccacgcgcggctgcctgttcccggtccagataatcagtgccagtgctcgggtggcgccagctctattgctggcggcgctattggcattgcttgtgattgtgttcgtgtagagtggggatttcgtcacttcgtgtagaactgtgttcgcgtgaccaaaaaaataatatgaattccttgctggcataaaagatgggctagacatc

SEQ ID NO: 152846 - DNA, 254 bp, Zea Mays
atgcagcggatacgctcagatgcttcgtttcccgccggccatgctcccctgaggcaggccatgggcgttcgcccaaccaatcagctggagactgaacgtagatgggagacgaagcctccggtccgcgtctcttcgtcccgagatcttgtgcccgcgctcgatggaaggctggcctccggtcactggcacacagtacgcatcgtcattggacttgctctgactcttcgcctatagcaccctgaatgactacaaga

SEQ ID NO: 152847 - DNA, 480 bp, Zea Mays
gttaggatcttaacccttaatgcttcatacttcttgaagaacgatggccattttgtcatttcaattaagggtaattgtatcgactccaccctgtctgctgagaccctgttcgctgttgaagttggagaagctcaaagcacatcaattcaagcatgcctagcaggtgacgttggagccctacgagcatgaccatgcatgtgttgtgggcggttatagaatgcccaagaagcagaaggctacctgatcacctcattgatcataatcggcgctcatcttgtctaataaggatgcttcgttgtattgtggtttattaagatgtctgcatgataatgatagttacaatattgtggtggttagttgcaatgtagtggtaaaatagctagattaaaataacaaaatttatgtatggctaggagcctaggatcacaaatagattatgaaatcttttttataataatataacacacattcgtatataaa

SEQ ID NO: 152848 - DNA, 954 bp, Zea Mays
agattgtgttgtgttgtctccaagatgaacgacctgttctcgtcgagctcgttcaagaagtatgcggactccagcccggcgacgtcggcggggggcacggaggccggcggcggcgagagcggggttgacctggacaagttcttcgaggacgtggaggcggtgaaggaggacatgcgcgggctggagggcatgtacaagggcctccagtccaccaacgaggagaccaagacggcgcacgacgcccgcaccgtcaagtccctccgctcccgcatggacaaagacgtggagcaggtgcttcgccgcgccaaggccatcaagggcaagctcgaggatctcgaccgctccaacgctacctcacgccaggtgcccgggtgcgggccggggtcctccaccgaccgcacccgcacctccgtggtcgctggcctcggcaagaagctcaaggacctcatggacgacttccaggggctgagggcgaggatggccgcagaatacaaggagacggtggcgcggcggtactacacggtgacgggggagaagccggaggacagcacgatcgaggcgctcatctcgtcgggggagagcgagtcgttcttgcagaaggcgatccaggagcaagggcgcgggcaggtgatggataccatctcggagatccaggagcggcacgacgccgtgaaggacatcgagcgcagcctcatggacctgcaccaggtgttcctcgacatggcggcgctcgtcgaggcgcagggccaccagctcaacgacatcgagagccacgtcgcgcacgccagctccttcgtgcgcaggggcaccgtcgagctggagtccgcgcgcgagtaccagaagagcagccgcaagtggatgtgcatcgccatcctcgccagcatcgtgctcatcgccgtcctcgtcttgcccgtgctcatcaacctccgcatcttgacactccccaccaaatga

SEQ ID NO: 152849 - DNA, 3565 bp, Zea Mays
gccttttccggttcccgcggcgggttcttgatccaggcagcggaggttgttgttgataataatggcgcaccaccggcgtgcccggctcttctctgcggctgtggtcgtcgccgccgcgctcgtggcgctgtcggtcgggacggcccagccggccgcggcgctgtcgccggacggcaaggcgctgctgtcgctgctgcccggcgcggcgccgtcgcccgtgctgccgtcgtgggaccccagggccgcgacgccgtgctcgtggcagggggtcacgtgctcgccgcagagccgggtggtgtccctctcgctgcccgacaccttcctcaacctgtcctcgctgccgccggccctcgccacgctctcctcgctgcagctgctcaacctctccgcctgcaacgtctccggcgccatcccgccctcgtacgcgtcgctctccgcgctgcgggtcctcgacctctcctccaacgcgctcaccggcgacatccccgacgggctcggcgcgctctcggggctccagttcctgctcctcaactccaaccgtctcaccggcggcatcccgcgctcgctcgccaacctctccgcgctccaggtgctctgcgtccaggacaacctcctcaacggcaccataccggcctcgctgggcgcgctcgccgcgctccagcagttccgcgtcggcggcaacccggcgctgtcgggccccatcccggcctcgctcggcgcgctctccaacctcaccgtcttcggcgccgcggtcaccgcgctctccggtcccatccccgaggagttcggcagcctcgtcaacctccagacgctggcattgtacgacaccagcgtgtccgggtctatacccgccgcgctcggcggctgcgtcgagctgcgcaacctctaccttcacatgaacaagctcaccggcccgataccgccggagctcgggaggctgcagaagctcaccagtctgctcctctggggcaacgccctctccgggaagatcccgccggagctatccaactgctccgcattggtggtgctcgacctgtcgggcaaccggcttaccggcgaggtgcccggggcgctcggccggctcggcgcgctcgagcagctgcacctatcggacaaccagctcacggggcgcataccgccggagctcagcaacctgagcagcctcaccgccttgcagctcgacaagaacggcttctctggcgcgatcccgccgcagcttggagagctgaaggcgctgcaggtgctgttcctctggggcaacgcgctgtctggcgcgatcccgccgtccctgggcaactgcaccgacctgtacgcgctggacctgtcaaagaaccgcttctccggcggcatccccgacgaggtgttcgggctgcagaagctcagcaagctgctcctcctgggcaacgagctctccggtccgctgcccccgagcgtcgccaactgcttatcattggtgcgcctccggctcggcgagaacaagctcgtgggccagatacccagagagatcggcaagctgcagaacctggtgttcctggacctgtactcaaacaggttcaccggcaagctgccaggcgagctcgccaacatcacggtgctggagttgctggacgtgcacaacaacagcttcaccggtggcatcccgccgcagtttggggagctcatgaacctagagcagctcgacctgagcatgaacgagctcaccggcgagataccggcgagctttggtaacttcagctacctcaacaagctgatcctcagcggcaacaatctgtccgggccattgcccaagtcgattcggaacctgcagaaactgacaatgctggacctgagcaacaacagcttctccggccccataccgccggagatcggcgcgctgtcgagcctgggcatcagcctggacctgagcttgaacaagttcgtcggcgagctgcctgacgagatgtccggtttgacgcagctgcagtccctcaacctcgcgagcaatggcctctacggcagcatctcggtccttggtgagctcaccagcctgacttccctcaacatctcgtacaacaacttctctggcgccatcccagtgacgccgttcttcaagacattgtcgtccaactcctatattggtaatgccaacctctgtgagtcctacgacgggcactcctgtgcggcggacacggttcgcaggtctgccctgaagacggtcaagaccgtgattctcgtctgcggcgttctggggtcggtggcgctgctgcttgttgtggtttggattctgatcaacaggagcaggaagctggccagccagaaggcgatgagcttgtctggtgcttgtggtgatgatttctccaacccctggacgtttacgccgttccagaagcttaacttctgcatcgaccacatcttggcatgcctaaaggacgagaacgtgatcggcaaaggttgctcgggggtggtgtacagagctgagatgccgaacggggacatcatcgcagtgaagaagctctggaaggccggcaaggacgagccgatcgacgcctttgcagctgagatccagattttggggcacatcagacaccggaacatcgtgaagctactcggctactgctctaacaggtctgtcaagctcctgctttacaactacatccccaacggcaacctgctggagctcctgaaggagaacaggagcctggactgggacacgaggtacaagatcgccgtcgggacggcgcagggcctggcctacctgcaccacgactgcattccagcgatactccacagggatgtcaagtgcaacaacatactgctcgattccaagtatgaggcctacttggctgattttgggctggccaagctgatgaactccccaaattaccatcacgccatgtcacgcattgccggttcttatggatacattgctccagagtacgcgtacacgagcaacatcacggagaagagcgacgtttacagctacggcgtggtgctgctggagatcctaagcgggcggagcgccatagagccagtgctgggtgaggccagcctgcacatcgtggagtgggcgaagaagaagatgggcagctacgagccggcggtgaacatcctggacccgaagctgcggggcatgccggaccagctggtgcaggagatgctgcagacgctgggcgtggccatcttctgtgttaacacggcgccccacgagcggccgacgatgaaggaggtggtggcgctgctcaaggaggtgaagagcccgcccgaggagtgggccaagacctcgcagcagccgctaatcaagcccggcagccagcaagggtgaccgttaccgacggcgttggaccggtttatggtttcgcatggttggcggagcaacaggatcgagcattcgttgtagtgagagtgacgcagattgcaacaggtagaagaaaagaagggaagcagagtagtttttttttttttttgataattcaagggctaggcggctagcttagctttggttaggcgattcttgtacagtaccggatggtctcgcagcccgttttagcaggggaacttgatgaatgaaaacttatcttgcaataca

SEQ ID NO: 152850 - DNA, 159 bp, Zea Mays
actaggtgccggcaacacgaaaacaaaggcgagcgtcgatagccagcttggagactcggcacggctgagaaggggctcggcgagctcgatgaatggacgaggagtgaggggacgccgacgaggtggctccacggtggggcgaagcacagatgctaggag

SEQ ID NO: 152851 - DNA, 853 bp, Zea Mays
cttagctatttagatctttcatcatcattatggtttaccgtgttgccatttgcaggattggttaagattctcaagaaatatgacaagagaactggagccctgatccggctgcccttcattcagaaagttcttcagcagcctttcttcaccactgatctcctgtataagcttgtgaagcagtgtgaagccatgctggagcagctccttccggttagtgaggcatctgtctcaagtgaagatggaaaaggagactctaatgatgaagagaagctggcgaagccaagttcttccttggtaaatggtggtggcatgccagagttagatgagatcgagtacatggagagtatgtacatgaagagcaccgtcgcggcccttaggtcactgaaggagatccggggcaagagctctactgtcagtatgttctcgttgccacctcttcagggcaacaatgcacaggacagctaccagatccgggcagagcaactagatgaggagccggagaggtggagcaaagtaacagtgatagagcaggcggccaaatgacagaccgaatgggcaaaacatctgatggctgaacttaaaaattttagacttggacatttgctggagatgggactgggatcccaatctcccattcagaaatttgtatgaattcaggattcctaacagctgcgaaatggtggacatgttaaatcatagaattcccagcacaaccatcggacagaattgggctgattttattcactattgtgaattgatcatgtgtttctactgatatacaaccttatgattcggtgtggcttctgattgtgataatgaaagagaaaacaggttttggcttgctactccagac

SEQ ID NO: 152852 - DNA, 586 bp, Zea Mays
accgcattaacgctgccctgcggacgcaagtacagtgcgggggtagcgctaaaatattcaccggaatggaagggaaagagggccggccggccggcatctacacatacccacccccactccctgatccggaggcactcactcactcgcatcactgactgactggactgctgctcactccttccttccttcccctggcagagaatctgcagtgcttgccggccggcccgtccctgccctgcagagcgcggggatctgcaggcatcatggtgcaatcaaagaagaagttccgcggcgtcaggcagcgccactggggctcctgggtctccgagatcaggcacccgctgctgtaagaaactggtggccccccatgctagatcttcttccctcagctctactagctagccacgctgctctctagtagtagtagtagatgcctcggtctttctctttcgccatgcgttctgacgatggcggcgtggtgggcatgcatgcttgaatcgaatatgcagtaagaggagggtgtggctgggcaccttcgagacggcagaggaggcggcgcgggcgtacgacgaggccgccgtcctca

SEQ ID NO: 152853 - DNA, 292 bp, Zea Mays
cctcctaaaaaaagacgtctgtaaaaaaaaaataaaaccgctttcaagagaaataaacgattcaatgatcaaataatactagtctgttatggttcgagaagagataacaggatccactcaaacactagagtggaagtgtgttgaatcaagagtagatagtaaacgtctttattatggtcgtttcattctgtctccgcttagaaaaggtcaagcggatactgtcggtattgccttgtgaagagctttacttgcagaaatagaaggaacatgtatcacacgcgccaaatttggg

SEQ ID NO: 152854 - DNA, 2338 bp, Zea Mays
cccccggcccgaacggcagtcccccgcattcccctaacgttcaatcgcgtaccgtcgctcgccgtattcccctgccgcgcacagttcactcgcgcacctctcgccccctcgctctacgacgactagtgggccgccggcgctggcgccgccttacgccaggtgccgaggtcttcgttgatctcttcgccggcgacgagcacccaccagctgggaaaaaatctatagccaaacataataatggctatgattgatgaacctctctacccgattgctgtactgattgatgaactgaaaaatgaagatattcagttgcgccttaactccatcaaaaagctttctacaattgcccgggcattgggtgaagaaagaacaaggaaagagctgattccattccttagtgaaaacaacgatgatgaagatgaggtgcttcttgcaatggcagaagagttgggcgtttttattccttatgttggaggagtagagcatgcacatgttttgcttccaccactggaaacattgtgtactgtggaggagacctgcgtcagagacaaggctgtggaatcactttgtcagataggagcacagatgaaggaaaatgatattgtggactggtttgcccatgtcgtaaagaggttggcggtaggtgagtggtttacagctcgagtttcttcatgtggcctttttcatatcgcctatcctagtgcacctgaacaactgaaggcagaactgaggacaatttatggccagttatgtcaagacgacatgcctatggtacggagagctgctgcatccaatcttgggaagttcgctgcaacagtggaacaaagtcatttgaagacagaaatcatgtcaatgtttgatgatctaactcaagatgaccaagattcagtgcgactattggcagttgagggttgtgctgctcttgggaagttgttggagccccaagattgtgcagcacatattctcccagttattgtaaatttctctcaggataaatcttggcgtgtgcgctatatggtggcaaatcaactgtatgaactatgtgaagctgttggtactgaacccacaaggggtgatctggtgtcagcgtatgttcgccttctctgtgacaatgaggctgaagtgcggattgcagctgctggaaaagttacaaaattctgcaaaatattaaacccacaaattgcaattgaacatattcttccgtgtatcaaggaattatcatcagattcatctcagcatgttcgttcagctttggcatcggttattatgggaatggctcctgtattgggaaaggacgccactcttgaacaactgcttcccatttttctttctttgctgaaggatgagttccctgatgttcgactcaacattataagcaaacttgatcaagttaaccaggttattggaattgacttgttgtcgcaatcacttctgccagccattgtagagctctctgaagataggcactggagagttcggcttgccataattgagtacatacctttgttggccagccagttaggtgttggtttttttgatgacaagttaggggcactttgcatgcagtggttggaagataaggttttctcgatcagagatgctggtgccaataatttaaagcgtttgacagaggaatttggccctgagtgggcgatgcaacatataattcctcaggttttggagaagataaacaacccacattatctgtatcggatgaccactttgcaagctatttctttgctagctcctgtcatgggtcctgatatcacatgccaacagttgctccctgtcgtcattgcttcttcaaaggacagggttccgaacatgaaattcaatgttgctaaagtcctgcaatcacttgtaccaatccttgaccaatctgttgtggagaagacagtgaaaccatgcctagttgagctcagtgaggacccagatgtagatgtaagatactacgcacaccaagcccttcgggcgtgtgaccaaatggtgatatctagttgactagcctgtccaggaattagcaaatgagatacatattggtctattctttttgaacattttaaagtgttatgtagtcttaaaaattattgtaccaccaatgaagttgatgcatctttttattaattatgtgttttttgatttaggtttagtttagtttttggatttaatcaaccatgggaagtaggtgcacacatgatatttgtgtgattgacctgtgcatgtcttgtgctgttggtaggtcactagtgtaagcacattattttatagtctgctttgcttagcgttgtgcgcggaaactgtatgcgttgcttgttcagacatgaagtttgcgcagaaa

SEQ ID NO: 152855 - DNA, 3512 bp, Zea Mays
gtaggcattagtgaaaagagctgacacgctgcggtccacgtgtctacagcccaataaaagcccaaataaaaagatggtccagtaggttagatccaaatataatttttgaagaaagaaaaacaaaagcccaagattgtcgttggtgccatttgggcccgcggggtcatttctgttgcctgttgttgtggccgacgattcgagttcatcgtctttgcactgcacgatcttttgtctgcttctttgctctgattttgaatctaacttcttcccagatctcgtatggctgcctgtgtctgcgacttcatgtgatcatttcgaatggcctcccccatcgacagtgcgatggatagtgtgagcatctttggacttcgatgaccagacgctgacgcactgacagagtcacagttcattgcgcactggactctcccagatctgctctgattcctcatcagtctcagggcttcagccaatcgtctgctaattaatttccttcctgttggcatgttccatcccgaattaatccccacttaatttctccgcacattctctaactctgaatcatttccaaatcagccagtcttaatttcttgctacgcttggtgatttttttttttttgttggcatcacgcgcatccactttgacgaaagctggtagagtgacaggtctctgtctctcacctattggcacatcgtttcctccgttctggaactggaagttggaaggtgaagttatcttggacaacagcagcacaagcgagctgtggaggaggtggaggtgcagccatggcgcacctgctgctgcacggcactctggatgcgaccatcctggaggccgaccacctcaccaaccccacccgggccaccggcggcgcccccgggatcttccgcaagttcgtggaggggttcgaggactcactcgggctcggccagggctccacgcggctgtacgcgacggtggacctcggccgtgcgcgcgtgggccggacgcgggtcatcaccggcgaccccgtgaacccgcgctggtacgaggtgttccacatctactgcgcccacttcgcctccgacgtcgtgttctccgtcaaggccgcgcagcccatcggcgccacgctcatcggccgcgcctacctccccgtccgggacctcatcgctggccaggagatcgagcggtcgctcgacatcctcgacgccagcaagaagcggctcccgcacgggcccaagatacgcgtgcgcctgcggttccaggacgtgtccgccgacccccgcgggtggggccggggcgtcggcggcgcgcggtaccctggcgtgccgtacaccttcttctcgcagcggcccgggtgcagggtcacgctataccaggacgcgcacacgcccgacgcgttcgcgcccaggatcccgctcgccggaggccgcctctaccagccgggcaggtgctgggaggacgtgttcgacgccatcagcaacgcgcgccacctcatctacatcaccggatggtcggtgtacactgagatcacgctgttgagggacggcagccggccgcgccccggcggcgaagccactctcggcgagctcctgaagcgcaaggcgagcgaaggagtgcgggtgctcatgctggtgtgggacgaccgcacctccgtcgagtccctcgggatgaaatgggggttcatgagcacgcacgacgccgagacggcggagtacttccgcggcagcggcgtgcactgcgtgctctgcccccgcaaccccgacgccggcagcagcgccgtcatgggcgcgcagatcgcctacatgatcacgcaccaccagaagatcgtcgtggtcgaccacgaaatgccggcgaagcgcagcgaccgccgccgcatcctcagcttcgtcggcggccttgacctctgcgacggccgctacgacacgcagttccactccctgttccggactctggatacagcgcaccacaaggatttccaccagcccaacctcgccggtgcgtccattgacaacggcgggccgagggagccatggcacgacatccactccaagatcgaaggcccagccgcatgggacgtgctctacaacttcgaacagcggtggaggaagcaagggggcggcattgatctcctcgtcaacctcaaagctatggcggacctgatcataccgccgtcgccagtgatgttcccggaagaccaagattcatggaacgtgcagctattccgctccatcgatggcggcgcgtgttttggcttccctagcaccccagaggccgcagctcaatctggccttgtcagtggcaagaataatgtcctagacaggagcatccatgatgcctacatccacgccatacgccgtgccaaacacttcatctacatcgagaaccagtacttcctcggcagctcatttgcgtggaaagccgacggcataaagccagaggagattgaagcactgcatcttgtcccaagagagctctcgctgaagattgtgagcaagattgaagctggcgagcattttgcagtctatgtcgtcctgccaatgtggccagaaggccctcctgctagtgggtcgattcagggtatactggactggcagaggaggaccatggagatgatgtacaatgacatctctgttgcgctcgaggcaaagaggatcgacagggacccgagggattaccttacattcttttgcttggggaacagggaggtgaagatggatggtgagtatgaaccttcaggtcgtccgcttgatgggacagactacgctcgggcgcagaatgcacgccgcttcatgatctacgttcactctaagatgatgatagtcgacgacgaatacatcatcgttggatctgccaatatcaaccagcgctcaatggatgggggcagggactcggagatcgccatgggcgcgtaccagccgtgccacctgaacaccaaaggccaggtcgcccggggtcaggtccacggcttccggatgtcgctgtggtacgagcacctcggcatgctacacgacgatttcctcaacccgggaagcctggagtgtgttcgaagggtaaaccagatggcagacaggtattgggacctctacgctggcgacagcctcgacgccgacctccctgggcacctgctcaggtacccagtcaccgtcacgaaggagggcacggtgacagagctcccgggggccaagttcttccccgacacacaggcgcttgtgcttggggcgctatcgaagctgcctcctattctcactacatagagaaaccttctgtactgttgccatgtgacgtttgcgggctgaattggttgaggtttttgctactccgtattatgctactactggtaatgttattgtatggtttcttcctaataatagtatttatagttttggacttatctaaaatagtatttatatgtgtctaaaatagtatttcagttttatttcattcatatatattttattttcttattttctaccacttatagctgatttaataaatagcaagaggatttctctccataaatccacttgggatc

SEQ ID NO: 152856 - DNA, 2529 bp, Zea Mays
ggtgaagttatcttggacaacagcagcacaagcgagctgtggaggaggtggaggtgcagccatggcgcacctgctgctgcacgtcgtgttctccgtcaaggccgcgcagcccatcggcgccacgctcatcggccgcgcctacctccccgtccgggacctcatcgctggccaggagatcgagcggtcgctcgacatcctcgacgccagcaagaagcggctcccgcacgggcccaagatacgcgtgcgcctgcggttccaggacgtgtccgccgacccccgcgggtggggccggggcgtcggcggcgcgcggtaccctggcgtgccgtacaccttcttctcgcagcggcccgggtgcagggtcacgctataccaggacgcgcacacgcccgacgcgttcgcgcccaggatcccgctcgccggaggccgcctctaccagccgggcaggtgctgggaggacgtgttcgacgccatcagcaacgcgcgccacctcatctacatcaccggatggtcggtgtacactgagatcacgctgttgagggacggcagccggccgcgccccggcggcgaagccactctcggcgagctcctgaagcgcaaggcgagcgaaggagtgcgggtgctcatgctggtgtgggacgaccgcacctccgtcgagtccctcgggatgaaatgggggttcatgagcacgcacgacgccgagacggcggagtacttccgcggcagcggcgtgcactgcgtgctctgcccccgcaaccccgacgccggcagcagcgccgtcatgggcgcgcagatcgcctacatgatcacgcaccaccagaagatcgtcgtggtcgaccacgaaatgccggcgaagcgcagcgaccgccgccgcatcctcagcttcgtcggcggccttgacctctgcgacggccgctacgacacgcagttccactccctgttccggactctggatacagcgcaccacaaggatttccaccagcccaacctcgccggtgcgtccattgacaacggcgggccgagggagccatggcacgacatccactccaagatcgaaggcccagccgcatgggacgtgctctacaacttcgaacagcggtggaggaagcaagggggcggcattgatctcctcgtcaacctcaaagctatggcggacctgatcataccgccgtcgccagtgatgttcccggaagaccaagattcatggaacgtgcagctattccgctccatcgatggcggcgcgtgttttggcttccctagcaccccagaggccgcagctcaatctggccttgtcagtggcaagaataatgtcctagacaggagcatccatgatgcctacatccacgccatacgccgtgccaaacacttcatctacatcgagaaccagtacttcctcggcagctcatttgcgtggaaagccgacggcataaagccagaggagattgaagcactgcatcttgtcccaagagagctctcgctgaagattgtgagcaagattgaagctggcgagcattttgcagtctatgtcgtcctgccaatgtggccagaaggccctcctgctagtgggtcgattcagggtatactggactggcagaggaggaccatggagatgatgtacaatgacatctctgttgcgctcgaggcaaagaggatcgacagggacccgagggattaccttacattcttttgcttggggaacagggaggtgaagatggatggtgagtatgaaccttcaggtcgtccgcttgatgggacagactacgctcgggcgcagaatgcacgccgcttcatgatctacgttcactctaagatgatgatagtcgacgacgaatacatcatcgttggatctgccaatatcaaccagcgctcaatggatgggggcagggactcggagatcgccatgggcgcgtaccagccgtgccacctgaacaccaaaggccaggtcgcccggggtcaggtccacggcttccggatgtcgctgtggtacgagcacctcggcatgctacacgacgatttcctcaacccgggaagcctggagtgtgttcgaagggtaaaccagatggcagacaggtattgggacctctacgctggcgacagcctcgacgccgacctccctgggcacctgctcaggtacccagtcaccgtcacgaaggagggcacggtgacagagctcccgggggccaagttcttccccgacacacaggcgcttgtgcttggggcgctatcgaagctgcctcctattctcactacatagagaaaccttctgtactgttgccatgtgacgtttgcgggctgaattggttgaggtttttgctactccgtattatgctactactggtaatgttattgtatggtttcttcctaataatagtatttatagttttggacttatctaaaatagtatttatatgtgtctaaaatagtatttcagttttatttcattcatatatattttattttcttattttctaccacttatagctgatttaataaatagcaagaggatttctctccataaatccacttgggatc

SEQ ID NO: 152857 - DNA, 2104 bp, Zea Mays
atacacatccgcgcatattcccttccctccccttcttcccccgtcgcctttccctcccccgtccgctgcattccttcccgtcccatccccgagcagaaaccaaccccaccaccaccgcgccctcctcctccgcccggtcgccggcgccatgaccggcgcggcggcccccgcggcgcccccccgcggcggcgcctccgcgtcccagccccacgccgcggcgcccgcggggaagagagcgggatgcgagccggtgcggaaggcggggcccgtgaccatggagcacgtgctgctagcgctccatgagacggaggccgagcgggaggcgcggatccgggacatgtttgccttcttcgacaccgcgggcagtgggcagctcgactacgcgcagatcgaggctggcctcgccgctctgcaggtgcccgccgagtgcaagtacgcgagggagctgctccgcgcctgcgaccgcgatcgcgacggccgcgtcggctacgatgacttcaggcgctacatggatgacaaagagctcgagctctaccgcatcttccaggccatagacgtcgagcacaacggatgcatcctccccgaggagctctgggacgcgctcatcaaggctggtatagagattaatgatgaagagctggcaagatttgttgagcatgtggataaggacaacaatgggattattacttttgaagaatggagagattttcttctactgtaccccaatgaggcgaccattgagaacatttatcatcactgggaaagagtctgccttgttgatataggtgaacaggctgctataccagaaggcataagtaaacatgtcaatgcaagcaaatatcttattgctggagggattgctggtgcagcatctcgtactgcaactgctcctctggatcgcctcaaagtgatcatgcaagtacaaacaacacgtacttcagtcatgcatgcaattaaagatatctggactaaaggtggcatgctgggattttttagagggaatggattgaatgttgtaaaagttgctccagaaagtgcaataagattttatgcctatgaaatgttaaaagaatatattatgaagagaaaaggagaaaataagagtgaagttggtgcttctgaacgtctcattgctggtggtttagcaggtgcagtggctcaaacagcaatttatcctatagagttagtaaagactcgtctacagacttattcaggtgaggttggttatgttcctagaattggtcagctctcaagggatattttggtgcatgaaggtccccgagctttttatagaggtcttgttccatctttgcttggtatcgtaccttatgctggaattgatcttgctgtatatgagactttgaaagatgtgtcgaagacatatatactgaaggacagtgatcctggtcctctagtacagcttggttgtgggacggtctctggagccctaggggcaacatgtgtttaccctttacaggttatcagaacaagactgcaagctcaacaagccaattcagaatctgcctatagaggaatgtctgatgtcttttggagaaccctacatcatgagggtgtttctggattctacaagggaattctaccaaatctccttaaagtggtgcctgctgcaagtattacctatctagtttacgaggcgatgaagaaaaatttgtctcttgattaaattgtggagttgttggtgggaaaaacagccatcattattggcatggctgactgtagagataatgacgacacatgaattttactggttgaatagttcctttttgaagataaagatggtgccttcaatatagaactagaagcaacggtggcattttcctcctaattttgattcagcagaaatgaagtgataattatgagatcatcgagacatccatgcctggcatactggtaacaatctggttattgatttgtactaccaccattacacttgatacacccttttgtcctccatcctaatttccttttttgggtgcatggttatcctttggagttagtgctgtttttttttggctatgagcaacttatattgtatctggctaactgccttcacctatttggtaaatgggattcaaaggaaaga

SEQ ID NO: 152858 - DNA, 2487 bp, Zea Mays
atacacatccgcgcatattcccttccctccccttcttcccccgtcgcctttccctcccccgtccgctgcattccttcccgtcccatccccgagcagaaaccaaccccaccaccaccgcgccctcctcctccgcccggtcgccggcgccatgaccggcgcggcggcccccgcggcgcccccccgcggcggcgcctccgcgtcccagccccacgccgcggcgcccgcggggaagagagcgggatgcgagccggtgcggaaggcggggcccgtgaccatggagcacgtgctgctagcgctccatgagacggaggccgagcgggaggcgcggatccgggacatgtttgccttcttcgacaccgcgggcagtgggcagctcgactacgcgcagatcgaggctggcctcgccgctctgcaggtgcccgccgagtgcaagtacgcgagggagctgctccgcgcctgcgaccgcgatcgcgacggccgcgtcggctacgatgacttcaggcgctacatggatgacaaagagctcgagctctaccgcatcttccaggccatagacgtcgagcacaacggatgcatcctccccgaggagctctgggacgcgctcatcaaggctggtatagagattaatgatgaagagctggcaagatttgttgagcatgtggataaggacaacaatgggattattacttttgaagaatggagagattttcttctactgtaccccaatgaggcgaccattgagaacatttatcatcactgggaaagagtctgccttgttgatataggtgaacaggctgctataccagaaggcataagtaaacatgtcaatgcaagcaaatatcttattgctggagggattgctggtgcagcatctcgtactgcaactgctcctctggatcgcctcaaagtgatcatgcaagtacaaacaacacgtacttcagtcatgcatgcaattaaagatatctggactaaaggtggcatgctgggattttttagagggaatggattgaatgttgtaaaagttgctccagaaagtgcaataagattttatgcctatgaaatgttaaaagaatatattatgaagagaaaaggagaaaataagagtgaagttggtgcttctgaacgtctcattgctggtggtttagcaggtgcagtggctcaaacagcaatttatcctatagagttagtaaagactcgtctacagacttattcaggtgaggttggttatgttcctagaattggtcagctctcaagggatattttggtgcatgaaggtccccgagctttttatagaggtcttgttccatctttgcttggtatcgtaccttatgctggaattgatcttgctgtatatgagactttgaaagatgtgtcgaagacatatatactgaaggacagtgatcctggtcctctagtacagcttggttgtgggacggtctctggagccctaggggcaacatgtgtttaccctttacaggttatcagaacaagactgcaagctcaacaagccaattcagaatctgcctatagaggaatgtctgatgtcttttggagaaccctacatcatgagggtgtttctggattctacaagggaattctaccaaatctccttaaagtggtgcctgctgcaagtattacctatctagtttacgaggcgatgaagaaaaatttgtctcttgattaaattgtggagttgttggtgggaaaaacagccatcattattggcatggctgactgtagagataatgacgacacatgaattttactggttgaatagttcctttttgaagataaagatggtgccttcaatatagaactagaagcaacggtggcattttcctcctaattttgattcagcagaaatgaagtgataattatgagatcatcgagacatccatgcctggcatactgcttacgacaccatcgacaccgagttaactgttcatgaatttccgaaggcttgttttatcccccgtctggggcgagttttgttagtctgtaacacactgggaaactctcctaacttaattgcaatcccttgtgctcctcaacttgactggagctgtgacatttgctgacagccaaaaaaaaaacccggcaaaaagggtgctggtgatacctgtacgtattttccacggcgacttggcataaatcaatgcctagtgaatgtaataatccgcccgttcccgttagtcttacttatggtttccaatgaccctgttgcatatatttgcattgccaaagcaaggtgtgtgtgcataaaaagtgccaaagcagatggcaaacaactcacaaggtgcataaggggtttgtagacaaccgcaaggtgcaaaagctgcttagtgcttcatgaggaacatgagcatgccccccacgttgtacgggtaggttcgtgaaataggagtggtaacggatcatgatttaaatgatttttttacaatttatttgagtctttaattaattttagttcaaaaataaataaaaata

SEQ ID NO: 152859 - DNA, 1680 bp, Zea Mays
tcccttccctccccttcttcccccgtcgcctttccctcccccgtccgctgcattccttcccgtcccatccccgagcagaaaccaaccccaccaccaccgcgccctcctcctccgcccggtcgccggcgccatgaccggcgcggcggcccccgcggcgcccccccgcggcggcgcctccgcgtcccagccccacgccgcggcgcccgcggggaagagagcgggatgcgagccggtgcggaaggcggggcccgtgaccatggagcacgtgctgctagcgctccatgagacggaggccgagcgggaggcgcggatccgggacatgtttgccttcttcgacaccgcgggcagtgggcagctcgactacgcgcagatcgaggctggcctcgccgctctgcaggtgcccgccgagtgcaagtacgcgagggagctgctccgcgcctgcgaccgcgatcgcgacggccgcgtcggctacgatgacttcaggcgctacatggatgacaaagagctcgagctctaccgcatcttccaggccatagacgtcgagcacaacggatgcatcctccccgaggagctctgggacgcgctcatcaaggctgtttgctgtctgcaggtatagagattaatgatgaagagctggcaagatttgttgagcatgtggataaggacaacaatgggattattacttttgaagaatggagagattttcttctactgtaccccaatgaggcgaccattgagaacatttatcatcactgggaaagagtctgccttgttgatataggtgaacaggctgctataccagaaggcataagtaaacatgtcaatgcaagcaaatatcttattgctggagggattgctggtgcagcatctcgtactgcaactgctcctctggatcgcctcaaagtgatcatgcaagtacaaacaacacgtacttcagtcatgcatgcaattaaagatatctggactaaaggtggcatgctgggattttttagagggaatggattgaatgttgtaaaagttgctccagaaagtgcaataagattttatgcctatgaaatgttaaaagaatatattatgaagagaaaaggagaaaataagagtgaagttggtgcttctgaacgtctcattgctggtggtttagcaggtgcagtggctcaaacagcaatttatcctatagagttagtaaagactcgtctacagacttattcaggtgaggttggttatgttcctagaattggtcagctctcaagggatattttggtgcatgaaggtccccgagctttttatagaggtcttgttccatctttgcttggtatcgtaccttatgctggaattgatcttgctgtatatgagactttgaaagatgtgtcgaagacatatatactgaaggacagtgatcctggtcctctagtacagcttggttgtgggacggtctctggagccctaggggcaacatgtgtttaccctttacaggttatcagaacaagactgcaagctcaacaagccaattcagaatctgcctatagaggaatgtctgatgtcttttggagaaccctacatcatgagggtgtttctggattctacaagggaattctaccaaatctccttaaagtggtgcctgctgcaagtattacctatctagtttacgaggcgatgaagaaaaatttgtctcttgattaa

SEQ ID NO: 152860 - DNA, 1497 bp, Zea Mays
cgctgcattccttcccgtcccatccccgagcagaaaccaaccccaccaccaccgcgccctcctcctccgcccggtcgccggcgccatgaccggcgcggcggcccccgcggcgcccccccgcggcggcgcctccgcgtcccagccccacgccgcggcgcccgcggggaagagagcgggatgcgagccggtgcggaaggcggggcccgtgaccatggagcacgtgctgctagcgctccatgagacggaggccgagcgggaggcgcggatccgggacatgtttgccttcttcgacaccgcgggcagtgggcagctcgactacgcgcagatcgaggctggcctcgccgctctgcaggtgcccgccgagtgcaagtacgcgagggagctgctccgcgcctgcgaccgcgatcgcgacggccgcgtcggctacgatgacttcaggcgctacatggatgacaaagagctcgagctctaccgcatcttccaggccatagacgtcgagcacaacggatgcatcctccccgaggagctctgggacgcgctcatcaaggctggtatgtgtttcctaggccgaaccacgcttctcgcctccctgatccccagtatctgtgcagccgcgcccgtgattctggccaccttggtgctgtgctgacgcacgacgcgtgcgcggtaccaggaatccggcgctttgtgcgtaatgtagttgctgtggcatagtaacgtctgtttgttgttgggtgcgtgtgtgtcagacaattagaacccagccgttgcagtttactggagtaccttttactttacttattttgttaactacgttactacagtagatgttagtgagtgttgctaggtgtcggacggaaaatgttctctgcaaatggagttaccgatacaaattacttactgatacttggacttgcagttcctggcgcattcttctgcaagtattcagtaatacatgagagtagcagagagtttgacctctaagatgtcttcaaatatgcaaaatgtgtaaaatggttatctatcattatccctcttaagtaagaacatgttaagccaattggccgtcacattatctattgccataatgctataactgttactactgttgcaaaattgagaatcagattaattaaatttccattaacttttcctggataagatgtatggttactactaccatgatagctttctgtgctatataaacattcaggttggatgcagtgtgtaaaccatcatgcctgagcttgtcgtagttccatccttctattcctgtatagatttctatattggttaatattttttatttgagtggaggttaccacctacttctgttgattttagatgctagtttctgctcacaatatgctagcaggatactaatttcatttccttcgtaattttgatttaaatcaacacgttcacttggttcgtgggttcataaattacttgtatctgacatctggtgcaaaatcataaccagcaacatatttctac

SEQ ID NO: 152861 - DNA, 736 bp, Zea Mays
cttcccgtcccatccccgagcagaaaccaaccccaccaccaccgcgccctcctcctccgcccggtcgccggcgccatgaccggcgcggcggcccccgcggcgcccccccgcggcggcgcctccgcgtcccagccccacgccgcggcgcccgcggggaagagagcgggatgcgagccggtgcggaaggcggggcccgtgaccatggagcacgtgctgctagcgctccatgagacggaggccgagcgggaggcgcggatccgggacatgtttgccttcttcgacaccgcgggcagtgggcagctcgactacgcgcagatcgaggctggcctcgccgctctgcaggtgcccgccgagtgcaagtacgcgagggagctgctccgcgcctgcgaccgcgatcgcgacggccgcgtcggctacgatgacttcaggcgctacatggatgacaaagagctcgagctctaccgcatcttccaggccatagacgtcgagcacaacggatgcatcctccccgaggagctctgggacgcgctcatcaaggctgaatcacatatgatgaagatctgattacctcctgtgtctagatttctgaaaatcgcctcatgatctttgcttcgctgctagcgcttttgatatactcttctatgtctttgtgaccaggttatttcaagcttcagttaaatttgtatatataatctatcttacaagcaatgtcagtttgctgtctgcaggtatagag

SEQ ID NO: 152862 - DNA, 2022 bp, Zea Mays
cccaccaccaccgcgccctcctcctccgcgtcccagccccacgccgcggcgcccgcggggaagagagcgggatgcgagccggtgcggaaggcggggcccgtgaccatggagcacgtgctgctagcgctccatgagacggaggccgagcgggaggcgcggatccgggacatgtttgccttcttcgacaccgcgggcagtgggcagctcgactacgcgcagatcgaggctggcctcgccgctctgcaggtgcccgccgagtgcaagtacgcgagggagctgctccgcgcctgcgaccgcgatcgcgacggccgcgtcggctacgatgacttcaggcgctacatggatgacaaagagctcgagctctaccgcatcttccaggccatagacgtcgagcacaacggatgcatcctccccgaggagctctgggacgcgctcatcaaggctggtatagagattaatgatgaagagctggcaagatttgttgagcatgtggataaggacaacaatgggattattacttttgaagaatggagagattttcttctactgtaccccaatgaggcgaccattgagaacatttatcatcactgggaaagagtctgccttgttgatataggtgaacaggctgctataccagaaggcataagtaaacatgtcaatgcaagcaaatatcttattgctggagggattgctggtgcagcatctcgtactgcaactgctcctctggatcgcctcaaagtgatcatgcaagtacaaacaacacgtacttcagtcatgcatgcaattaaagatatctggactaaaggtggcatgctgggattttttagagggaatggattgaatgttgtaaaagttgctccagaaagtgcaataagattttatgcctatgaaatgttaaaagaatatattatgaagagaaaaggagaaaataagagtgaagttggtgcttctgaacgtctcattgctggtggtttagcaggtgcagtggctcaaacagcaatttatcctatagagttagtaaagactcgtctacagacttattcaggtgaggttggttatgttcctagaattggtcagctctcaagggatattttggtgcatgaaggtccccgagctttttatagaggtcttgttccatctttgcttggtatcgtaccttatgctggaattgatcttgctgtatatgagactttgaaagatgtgtcgaagacatatatactgaaggacagtgatcctggtcctctagtacagcttggttgtgggacggtctctggagccctaggggcaacatgtgtttaccctttacaggttatcagaacaagactgcaagctcaacaagccaattcagaatctgcctatagaggaatgtctgatgtcttttggagaaccctacatcatgagggtgtttctggattctacaagggaattctaccaaatctccttaaagtggtgcctgctgcaagtattacctatctagtttacgaggcgatgaagaaaaatttgtctcttgattaaattgtggagttgttggtgggaaaaacagccatcattattggcatggctgactgtagagataatgacgacacatgaattttactggttgaatagttcctttttgaagataaagatggtgccttcaatatagaactagaagcaacggtggcattttcctcctaattttgattcagcagaaatgaagtgataattatgagatcatcgagacatccatgcctggcatactgcttacgacaccatcgacaccgagttaactgttcatgaatttccgaaggcttgttttatcccccgtctggggcgagttttgttagtctgtaacacactgggaaactctcctaacttaattgcaatcccttgtgctcctcaacttgactggagctgtgacatttgctgacagccaaaaaaaaaacccggcaaaaagggtgctggtgatacctgtacgtattttccacggcgacttggcataaatcaatgcctagtgaatgtaataatccgcccgttcccgtt

SEQ ID NO: 152863 - DNA, 1065 bp, Zea Mays
gcctctgcctcagctgaatcctccctccggctcctagtagattcctaaccccctcccccaatcccagcctgacaccggtccacggcagaatcccattccgattcctccctccccgtcccgtctcccctctcgccctaggggccggggggttagggttcgcttcaccgccggcctctccctccgacgcggcaccggcccccgcgcaccgggcccggatgctatgctgctgagctgcaggaccctctccacctgggtgcgccgcctcgtcgcttgcatgggaggttgctttggatgctgtgctaagccaactccaataatagcagtagacgagccttccaagcggttgaggatccaggggcgatcagtaaggaaggctagcctctcggaggacttttggagcacgagtgcgcatgagatggagaacagcgggatccaatcgcagaggagcatgtcttcgatcagcacgttggctcagtccagcgatcagcatacggcaggaagtagcagcaacccgaatgagtttatgaatcaaggtcttatgctctggaaccagaccagacaacagtgggttggaagcaaaaaacgccactctagatctcaacagcctcgagaaccaaagttgagttggaacacaacgtatgaaagtctgctaggaagcaataagccattctcccaaccgatacctcttggcgaaatggtagatttgcttgtggacgcttgggagcaagaaggcctttatgattaggcctgtggagttcattatttgactcggattaatcgcttaatgcagaagctctaggttctcaagcgttatattttctgagcacaatggtgtaccatggatgtatcatgaaacatggcagcatccttatattaagcaattgtaatatattattcctgtcaagcttatgagaacattggatgacattgtacctggtgtttttatatgaaaactttgggtgatctaggcaactggattaaaacaaaaaaggggcatgccttgttgtaaactgagccatgggaagtgaaattaattgaaaacagaagaaatgtgaagttattgcc

SEQ ID NO: 152864 - DNA, 1070 bp, Zea Mays
gcctctgcctcagctgaatcctccctccggctcctagtagattcctaaccccctcccccaatcccagcctgacaccggtccacggcagaatcccattccgattcctccctccccgtcccgtctcccctctcgccctaggggccggggggttagggttcgcttcaccgccggcctctccctccgacgcggcaccggcccccgcgcaccgggcccggatgctatgctgctgagctgcaggaccctctccacctgggtgcgccgcctcgtcgcttgcatgggagcagaggttgctttggatgctgtgctaagccaactccaataatagcagtagacgagccttccaagcggttgaggatccaggggcgatcagtaaggaaggctagcctctcggaggacttttggagcacgagtgcgcatgagatggagaacagcgggatccaatcgcagaggagcatgtcttcgatcagcacgttggctcagtccagcgatcagcatacggcaggaagtagcagcaacccgaatgagtttatgaatcaaggtcttatgctctggaaccagaccagacaacagtgggttggaagcaaaaaacgccactctagatctcaacagcctcgagaaccaaagttgagttggaacacaacgtatgaaagtctgctaggaagcaataagccattctcccaaccgatacctcttggcgaaatggtagatttgcttgtggacgcttgggagcaagaaggcctttatgattaggcctgtggagttcattatttgactcggattaatcgcttaatgcagaagctctaggttctcaagcgttatattttctgagcacaatggtgtaccatggatgtatcatgaaacatggcagcatccttatattaagcaattgtaatatattattcctgtcaagcttatgagaacattggatgacattgtacctggtgtttttatatgaaaactttgggtgatctaggcaactggattaaaacaaaaaaggggcatgccttgttgtaaactgagccatgggaagtgaaattaattgaaaacagaagaaatgtgaagttattgcc

SEQ ID NO: 152865 - DNA, 273 bp, Zea Mays
atggacgatatagcacttcgtccgccagtttgtatagagttcgctacacttgtgatttcattaaccaaagatcttctcgcgcccgagcaggacaccatggatgcaagcggttggtggtacgggaacgtccgcaggccgaacccagtcatgtcacaggcggcgtccatattcgcacagtgcatggacatagccatggctaatgcaaattatattaagaacttagaatgtgttgggacctgcattgagtttatcctatataattatgtgctttaa

SEQ ID NO: 152866 - DNA, 202 bp, Zea Mays
acaaacaacaaataagtattttagacttaataaaattcaaacgattgacttgaggcacatttacaaaaatgaaaatatttttcacaacccagaggtagcatgtgtgataaggcatggtcttggggaaaaattagatcttgtgacttgcgtaagtgtttgtgcccatgttaaacaaaataaaatacaagcataagtgtcaaac

SEQ ID NO: 152867 - DNA, 2972 bp, Zea Mays
acgaattgcgcccaacttgggcaacttgccttccttgttcgccaccacataaaaagccagcgccaccgggcactccttccccaccgcaccaccaccaccacctcctcctcttccccaaacccgtccgttcccttcccttcatccggctcctccgccattttttccctgtcgcggtaagcgatagggttcggcttcggcgtccgacctctaaatccgccctcggatccagtggtgcagttgcttctccgcctcttcttcgttttgcttcttccggcgttctcggagcaacctttggcttcgtcgacggcgttctcggtcctttgcggcccgacatgtctccgttccagggatacagaggcgatggggttctcgccggcgtccggtcgcggaagcgcgtgttcgcgacggcggccgctgagcccgtgacggcggcggccaagagacagaagcgcagggatgagccatccctggacgcggtgccggacgagtgcctcttcgaggtcctgcgccgcgtgcagggcacccgcgcgcgctgcgcgtcggcctgcgtctcccgccgctggctcgcgctcctcgctggcatccgcgcctctgaggccgtgctcgccccggccgcccccgccgtgccggacctcaaccaggagtacctcagcgaggacgacgaggccgatctgatggaccacgacggcgacgcccgcgagaggaccctcgagggcatgttggccacggacgcgcgcctcacggcggcggccgtggccggccgtctggcttccgtctccgtccgcgggagccacccggcgcgtggcgtcaccgacgccggcgtctgtgctctcgcccgcggctgcccagagctccgctcccttaccctgtgggatgttccgcaggtgacggatgccgggctcgccgagatcgccgccgagtgccactcgctggagcggctcgacatcactggctgccctatgatcacggacaagggcctcgtcgctgtggcccagggttgcccggaactgaagtcgctcaccatcgaggcctgctccggcgtggctaacgagggtctcaaggcaattggccggtgctgcgccaagctacaggcggttagcgtcaagaactgcgcacatgtcgacgaccagggtgtgtctggcctcgtctgctctgcgacagcctcgttggcaaaggtccggcttcagggtttgaacatcactgatgcttctctcgccgtgattgggtactatgggaagtcaatcaaggacctgaccctcgctcgcctccctgctgtcggcgagaggggattttgggtgatggccaatgccctcggcctgcagaagctcaggtgtatgactgtcgtctcctgcccgggactcacggatctcgcccttgcatctgtcgccaagttcagcccaagcttgaagactgtgaacctcaagaagtgcagcaaggtctcagacggatgcctcaaggaattcgcagaatcgtccagggtcctggagagtttgcagatcgaggagtgcagcaaggttactcttgtgggcattcttgctttcctcctgaactgcaaccccaagttcaaggctctctccttgtccaagtgcatcgggatcaaggacatctgctcggcacctgcgcagctcccagtatgcaagtcgctgcgttccctgaccatcaaggattgcccaggattcacggacgctagccttgccgtggtgggcatgatctgccctcagttggagagcatcgatctgagcggtctcggtgcagtcaccgacaacggcttccttccgttgatgaagaagggttcggagagtgggctggtccgtgtgggcttgaacggctgcgagagcctcacggacgcggcggtttccgccttggcgaaggcccacggcgcttctcttgcgcaccttagcctggagggatgcagcaagatcactgacgccagcctgttcgccatctccgagagctgcagccagcttgccgagcttgatctctccaactgcatggtgagcgactacggtgtcgcggtcctggcagcggcgaggcagctcaagctgcgtgtcctctcgctgtctggctgtatgaaggtgacacagaagagcgttcctttcttgggcagcatgtcttcatccttggaggcgctgaatctccagttcaacttcatcggtaaccacaacatcgcttccttggagaagcagctctggcggtgcgacatccttgcttagagggaacaagggcgattggttgctggagactctgggtcagcaaccttttttctccagatgcagatacacgaccgtaggggtagcatatacttaagtctaagcctcgttagttgagtctggtttctggctcgtgtttgtgtcttggtggggggtctctcccgtttgtcttagggccggttgttttccgaggggcgtttttttgccgaggctcgttttttttgcaggtatcctcctgtgaggatctctgttcgctgagcctttggcagccattaccatgtggcaccctgcccccctccataccaacctaagcccttgtgatcagtcattccaccatgcagtttctctcaagtcagtgtttgaagctcaagtattctgtcaagtgcgcgttcttttccactactactggttttagagttgcagacatcaacactcctttgattgcaaatcttgctgccgagtacctgcaagtcagtgtttgttggtcatgggtggttgctattttgcggtgtccggttagggtttgccttattgcatgcaggttcgttctacagagcctttgccttgacaaccctgtgtggttgtttttcttctccggagacctgattttgcaggctggtggttggaacaccgtaatatttgcaaccttcttctgaagataaataaagcttgtgtttctgttctgaatcgtgttatacctgtatactgcctgcagtttctgttaaggtgctgtaatcctgttttatatatatatggctttgg

SEQ ID NO: 152868 - DNA, 1038 bp, Zea Mays
cctgtcgaggcgaaggctaagacgagagcagggaatgtgaggatgcggaagccctaaggcgagggagcctaacaagagggagatgagcctagaggagaagaacatgctcaggctggggctggtgagcctgcccgaagagaagatgcacaatgtgcttcagattgtgcgcaagaggaacaacaacccggagatgcttggggatgagatcgagcttgatattgatgtgatggatgttgagacacagtgggagcttgatcgtttcgttactaacttcaacaaggcgctcaagaagtcccagcgtgctgcgatgatcaatggtggcgttgctgatgtaaccagtactgctgtggctgaggatgacactgcacctgtgggcgatgtgcctacattggttgacaacgacgatgcggagagcgaggaacctgtgaagagtactacagtggctgagcaggtggatgagtatgttgatattggggatgaaatgccagcagccacttaccaatccacggagatcgagaaggacgctgagggtacgactggctctggtggttctggcagtggctcttcatcgtctagtggttctgagtcgaggagctcaggggatagtgcctcaggagctggcaatgcacattctttgacttaggggaggttggtaacaatagtatttgaaaatctgaatgatccgagttcgtgttcttgggtggtttgtggctgtgcagggctagaggtaattgtaagtatgtagctgtttctgagacatgggtgtctgtttaggcttcgattacgttagtagtagataacaaactggctttgtgggtgtctgacagcagtacagcaccatgtgtatgtaagctggaggtggaaggtactggtgtagtggtgtgagctgaccgaccttctcgtatgaagggggccagggctagtgtctgtgttcttaatggtagggttgttctggtgcagatctctcatgtaattgatgctttgtgcatgacattaaagtatggttttataagtaacaatgcagtatcatttgttggg

SEQ ID NO: 152869 - DNA, 1036 bp, Zea Mays
agaaaggtccccgtagaaattcgaaaccacaccaccacctggaaacccagacaaagcacgagccacgcacggcccccgctgcctcccttccgccgccgccgccgccggcggcgcgccaccgtcgctgctctcccgccttcaccgcgcccaactccaatccttgcctcccccgcgcgcttcagcctcttcactccccatcgttttcgcctggccagacctcgcctgccttacgcctccggtcggattcttcgccgtccttgtccccactgggcaccgctggggtggagcggagatcggatccgccgggagctgattccttctctcgcagtctagtttgacgcggattcatttgctggtcggcatagcatgatcctgcggtgattgcggatagcttgtgcaagctggtggcttgggtgttgtctttttaatctggcctaaagatatcctgagacggtagcgtcacatggatgctagtacagaggttactgatgctattggtgcggtgggctttgacaatggggccgcggggaagttgccgcccagtgatagtgtagaggggcacgcagaagaacacgatgtgctggctgatggagcccattcgggcgagagcgaggtgatcaacccatctgaagaagtagaaatggaagccacctcgcagtcccaggacataaagcctcgagttcctgagggggttcaaggccattcaatgaaggttggtactaaatctcagcgacagagccctcgaggcggggataagagtcaaactaggaaaagctcttttagtccttcttatcctaaggcgcccattgcacgggtttctgatccagatctagttgattgctctttgagcaatggtgatgctggttccagtaagaaaaaggccgaaaagagcagtttccgcccagttgccaaggagaccccatcacttgaggactcaaagtaagctgcttgtttctttgttttacacttttgatcctgtgttagtgtgttgcttcatggcttctgtttctcatttggattctgccattctggactt

SEQ ID NO: 152870 - DNA, 1914 bp, Zea Mays
agaaaggtccccgtagaaattcgaaaccacaccaccacctggaaacccagacaaagcacgagccacgcacggcccccgctgcctcccttccgccgccgccgccgccggcggcgcgccaccgtcgctgctctcccgccttcaccgcgcccaactccaatccttgcctcccccgcgcgcttcagcctcttcactccccatcgttttcgcctggccaggtaaagccgccacctttgctttccttcaccatttcctttcatgcgctcaagagccacggctcgatccagatccaggtttccttgacccagacctcgcctgccttacgcctccggtcggattcttcgccgtccttgtccccactgggcaccgctggggtggagcggagatcggatccgccgggagctgattccttctctcgcagtctagtttgacgcggattcatttgctggtcggcatagcatgatcctgcggtgattgcggatagcttgtgcaagctggtggcttgggtgttgtctttttaatctggcctaaagatatcctgagacggtagcgtcacatggatgctagtacagaggttactgatgctattggtgcggtgggctttgacaatggggccgcggggaagttgccgcccagtgatagtgtagaggggcacgcagaagaacacgatgtgctggctgatggagcccattcgggcgagagcgaggtgatcaacccatctgaagaagtagaaatggaagccacctcgcagtcccaggacataaagcctcgagttcctgagggggttcaaggccattcaatgaaggttggtactaaatctcagcgacagagccctcgaggcggggataagagtcaaactaggaaaagctcttttagtccttcttatcctaaggcgcccattgcacgggtttctgatccagatctagttgattgctctttgagcaatggtgatgctggttccagtaagaaaaaggccgaaaagagcagtttccgcccagttgccaaggagaccccatcacttgaggactcaaatgagaagaaaaaaactcagaaggcatcaaaccaacattctgtcaaaaaggatattgaagaagaatcaaatgaaagtgtgaaacctcaaagggttggcagcactccttcatatggatttagttttaagtgtgatgagagagctgaaaaacgaagagagttctactcaaagctcgaggagaagattcatgcacaggaactagagaaaagcaacttgcaggcaaaatcaaaggaaactgaagaagctgaactcaaaatgctgagaaagagtttaaatttcaaggcaacaccaatgcccagcttttataaggaaccacctccccccaaggttgagttgaagaagatacctacaacaagagctaggtcaccaaagcttggtcgctccaagaacacatcctcaggagggacagaagggaatccaaatcctccagctcgttcaggtcgactgagtctcgatgaaagggtctcccaaaatggtgtcaagaaagcacctgctgcaaatgcagtgaagaagccccaacggaaatctctacctaaactgccttcagagcaaacaaccaaagttgacattgcaccatctgttccatctgcagaagagctagaaaacaagtcgccgacgaagggtcttgatcgagagccgatccgcgctcaaattacacctgacgaacctggacttactgcataggaacctatcaagccgactcctatgaaaggagggagttgtgccccagcttcctttatcacattttgctatttctgcagtaaactgctggctggtattatgtattagaattagtctcagcaccaggagcttgaagagtggcaagtgacaccgtgtattctttatcttagtttctgttgacataccaggtatttgtagttggcaga

SEQ ID NO: 152871 - DNA, 1940 bp, Zea Mays
agaaaggtccccgtagaaattcgaaaccacaccaccacctggaaacccagacaaagcacgagccacgcacggcccccgctgcctcccttccgccgccgccgccgccggcggcgcgccaccgtcgctgctctcccgccttcaccgcgcccaactccaatccttgcctcccccgcgcgcttcagcctcttcactccccatcgttttcgcctggccagatccaggtttccttgacccagacctcgcctgccttacgcctccggtcggattcttcgccgtccttgtccccactgggcaccgctggggtggagcggagatcggatccgccgggagctgattccttctctcgcagtctagtttgacgcggattcatttgctggtcggcatagcatgatcctgcggtgattgcggatagcttgtgcaagctggtggcttgggtgttgtctttttaatctggcctaaagatatcctgagacggtagcgtcacatggatgctagtacagaggttactgatgctattggtgcggtgggctttgacaatggggccgcggggaagttgccgcccagtgatagtgtagaggggcacgcagaagaacacgatgtgctggctgatggagcccattcgggcgagagcgaggtgatcaacccatctgaagaagtagaaatggaagccacctcgcagtcccaggacataaagcctcgagttcctgagggggttcaaggccattcaatgaaggttggtactaaatctcagcgacagagccctcgaggcggggataagagtcaaactaggaaaagctcttttagtccttcttatcctaaggcgcccattgcacgggtttctgatccagatctagttgattgctctttgagcaatggtgatgctggttccagtaagaaaaaggccgaaaagagcagtttccgcccagttgccaaggagaccccatcacttgaggactcaaatgagaagaaaaaaactcagaaggcatcaaaccaacattctgtcaaaaaggatattgaagaagaatcaaatgaaagtgtgaaacctcaaagggttggcagcactccttcatatggatttagttttaagtgtgatgagagagctgaaaaacgaagagagttctactcaaagctcgaggagaagattcatgcacaggaactagagaaaagcaacttgcaggcaaaatcaaaggaaactgaagaagctgaactcaaaatgctgagaaagagtttaaatttcaaggcaacaccaatgcccagcttttataaggaaccacctccccccaaggttgagttgaagaagatacctacaacaagagctaggtcaccaaagcttggtcgctccaagaacacatcctcaggagggacagaagggaatccaaatcctccagctcgttcaggtcgactgagtctcgatgaaagggtctcccaaaatggtgtcaagaaagcacctgctgcaaatgcagtgaagaagccccaacggaaatctctacctaaactgccttcagagcaaacaaccaaagttgacattgcaccatctgttccatctgcagaagagctagaaaacaagtcgccgacgaagggtcttgatcgagagccgatccgcgctcaaattacacctgacgaacctggacttactgcataggaacctatcaagccgactcctatgaaaggagggagttgtgccccagcttcctttatcacattttgctatttctgcagtaaactgctggctggtattatgtattagaattagtctcagcaccaggagcttgaagagtggcaagtgacaccgtgtattctttatcttagtttctgttgacataccaggtatttgtagttggcagacaggcagaatttcatattattctccagggctaccagtcaattaagttgccgtccaagtaagatatgtacacgattttgcaaagctttgtgattca

SEQ ID NO: 152872 - DNA, 1815 bp, Zea Mays
agaaaggtccccgtagaaattcgaaaccacaccaccacctggaaacccagacaaagcacgagccacgcacggcccccgctgcctcccttccgccgccgccgccgccggcggcgcgccaccgtcgctgctctcccgccttcaccgcgcccaactccaatccttgcctcccccgcgcgcttcagcctcttcactccccatcgttttcgcctggccagtctagtttgacgcggattcatttgctggtcggcatagcatgatcctgcggtgattgcggatagcttgtgcaagctggtggcttgggtgttgtctttttaatctggcctaaagatatcctgagacggtagcgtcacatggatgctagtacagaggttactgatgctattggtgcggtgggctttgacaatggggccgcggggaagttgccgcccagtgatagtgtagaggggcacgcagaagaacacgatgtgctggctgatggagcccattcgggcgagagcgaggtgatcaacccatctgaagaagtagaaatggaagccacctcgcagtcccaggacataaagcctcgagttcctgagggggttcaaggccattcaatgaaggttggtactaaatctcagcgacagagccctcgaggcggggataagagtcaaactaggaaaagctcttttagtccttcttatcctaaggcgcccattgcacgggtttctgatccagatctagttgattgctctttgagcaatggtgatgctggttccagtaagaaaaaggccgaaaagagcagtttccgcccagttgccaaggagaccccatcacttgaggactcaaatgagaagaaaaaaactcagaaggcatcaaaccaacattctgtcaaaaaggatattgaagaagaatcaaatgaaagtgtgaaacctcaaagggttggcagcactccttcatatggatttagttttaagtgtgatgagagagctgaaaaacgaagagagttctactcaaagctcgaggagaagattcatgcacaggaactagagaaaagcaacttgcaggcaaaatcaaaggaaactgaagaagctgaactcaaaatgctgagaaagagtttaaatttcaaggcaacaccaatgcccagcttttataaggaaccacctccccccaaggttgagttgaagaagatacctacaacaagagctaggtcaccaaagcttggtcgctccaagaacacatcctcaggagggacagaagggaatccaaatcctccagctcgttcaggtcgactgagtctcgatgaaagggtctcccaaaatggtgtcaagaaagcacctgctgcaaatgcagtgaagaagccccaacggaaatctctacctaaactgccttcagagcaaacaaccaaagttgacattgcaccatctgttccatctgcagaagagctagaaaacaagtcgccgacgaagggtcttgatcgagagccgatccgcgctcaaattacacctgacgaacctggacttactgcataggaacctatcaagccgactcctatgaaaggagggagttgtgccccagcttcctttatcacattttgctatttctgcagtaaactgctggctggtattatgtattagaattagtctcagcaccaggagcttgaagagtggcaagtgacaccgtgtattctttatcttagtttctgttgacataccaggtatttgtagttggcagacaggcagaatttcatattattctccagggctaccagtcaattaagttgccgtccaagtaagatatgtacacgattttgcaaagctttgtgattcagtgcatcag

SEQ ID NO: 152873 - DNA, 1907 bp, Zea Mays
gtagaaattcgaaaccacaccaccacctggaaacccagacaaagcacgagccacgcacggcccccgctgcctcccttccgccgccgccgccgccggcggcgcgccaccgtcgctgctctcccgccttcaccgcgcccaactccaatccttgcctcccccgcgcgcttcagcctcttcactccccatcgttttcgcctggccagacctcgcctgccttacgcctccggtcggattcttcgccgtccttgtccccactgggcaccgctggggtggagcggagatcggatccgccgggagctgattccttctctcgcagtctagtttgacgcggattcatttgctggtcggcatagcatgatcctgcggtgattgcggatagcttgtgcaagctggtggcttgggtgttgtctttttaatctggcctaaagatatcctgagacggtagcgtcacatggatgctagtacagaggttactgatgctattggtgcggtgggctttgacaatggggccgcggggaagttgccgcccagtgatagtgtagaggggcacgcagaagaacacgatgtgctggctgatggagcccattcgggcgagagcgaggtgatcaacccatctgaagaagtagaaatggaagccacctcgcagtcccaggacataaagcctcgagttcctgagggggttcaaggccattcaatgaaggttggtactaaatctcagcgacagagccctcgaggcggggataagagtcaaactaggaaaagctcttttagtccttcttatcctaaggcgcccattgcacgggtttctgatccagatctagttgattgctctttgagcaatggtgatgctggttccagtaagaaaaaggccgaaaagagcagtttccgcccagttgccaaggagaccccatcacttgaggactcaaatgagaagaaaaaaactcagaaggcatcaaaccaacattctgtcaaaaaggatattgaagaagaatcaaatgaaagtgtgaaacctcaaagggttggcagcactccttcatatggatttagttttaagtgtgatgagagagctgaaaaacgaagagagttctactcaaagctcgaggagaagattcatgcacaggaactagagaaaagcaacttgcaggcaaaatcaaaggaaactgaagaagctgaactcaaaatgctgagaaagagtttaaatttcaaggcaacaccaatgcccagcttttataaggaaccacctccccccaaggttgagttgaagaagatacctacaacaagagctaggtcaccaaagcttggtcgctccaagaacacatcctcaggagggacagaagggaatccaaatcctccagctcgttcaggtcgactgagtctcgatgaaagggtctcccaaaatggtgtcaagaaagcacctgctgcaaatgcagtgaagaagccccaacggaaatctctacctaaactgccttcagagcaaacaaccaaagttgacattgcaccatctgttccatctgcagaagagctagaaaacaagtcgccgacgaagggtcttgatcgagagccgatccgcgctcaaattacacctgacgaacctggacttactgcataggaacctatcaagccgactcctatgaaaggagggagttgtgccccagcttcctttatcacattttgctatttctgcagtaaactgctggctggtattatgtattagaattagtctcagcaccaggagcttgaagagtggcaagtgacaccgtgtattctttatcttagtttctgttgacataccaggtatttgtagttggcagacaggcagaatttcatattattctccagggctaccagtcaattaagttgccgtccaagtaagatatgtacacgattttgcaaagctttgtgattca

SEQ ID NO: 152874 - DNA, 330 bp, Zea Mays
aaactgattctcgtgtggagccgaaagatcgggagtcgtttttgtgaagaaaggtgggatctaaaaaaacctgctccaccctcccttaaaacagctcctcaaccaaccaaatatggacctttccttaaagtttgatcgaaattacccgcaattgccattggacaaaaacataacgagccaatttatggattaaacatttgagaccattttatgcactactatgatgagaatattttatatgttattgtttcatattttttctgtatatgcatcctacttattggtttgtaacaaagttgaactacaaagggtaaaacagacaatcgccac

SEQ ID NO: 152875 - DNA, 1495 bp, Zea Mays
atggctggtgtcattatttgtcgctccttccttctgtctaatttcctcaatactgctcgacatcgcatcaccaaccggcagcaggtgttcgacctcggcaagtacaacgagacgtgccacaacattgtcaccaagtacatctctgagtgggaggccatggtcacacgtacgaggaggtggattgacttcaagaacgactacaagaccatggacctcaacttcatggagagcgtctggtgggtgtttgcaaagctctgggagaaggacctcatctataagggcgtcaaggttgcatctctaacctttacaatctcagaacttgcgcgtgaagcacatgcagtacttctacgtgtagctgcccatggaggctctagagctgcgctgccggatgaaacgaatccttgtgatctggtggtggactggacgacgaggaggttggaaggatttggggagcggtggatggtggggcgatgtagtcaagaattggaatgggctggagacgacgacaaaggaagaagtcttctcttctttgttaatctatactacttcttaagactccatgtagacgttcacagaagtaatatattggcatctgaagagaatgtcagtgtgctatggttacaaaaaaatgaagaacagaccagcgtgaggcgacgacagtacgaggcacgccacccagcccgcagagagggtcatctgcacaccaacagggtctgcgacaatgtgcggaccttcattctaacagatgcaaccttcaagagcactgagattgaagaaacactgagcaagatgggtctcaatgccgtggtggccgctagctacgtctttctagtacttgtctctgtgctcacagttcgcttcttctacgtactatggcgcagtggccaaccagagtcaaggttgcgcgccaccagattgtgttgtctcattgtccttggctccgaaaaggtccagattaccagctcctggtgatgctgatgagctatctgtcattgaagaccaaattgcatggatagttcacataattgcatccattgtcaagtaaggcaggtaacaggtgttaggaagagcccacagagaggtcgagaagcaacactggatgtttctctgaagttgatcaaggcgagcacatcaaggggtctcgggcacctccctgtcattggtgtcgtcgttgaaccagttatggtacattggtatggctgcaaattgagggagaaagacctggaaacagtgatgcagcatgttcacacgaagatggcaacaatggtaacatttgcattggtcctataaataaggtattgaatatgcttgcttgatggattgaagatccaaactcgaataccttctaacttcataagttcatatcccacgagtctgattacttgtggcttgcagaagatggcatgaagatgcaagtgattattgcttgttctgtggcttatttccttttacttagttaacttcctattaggcagctactgcaccagcaaacctg

SEQ ID NO: 152876 - DNA, 795 bp, Zea Mays
gagaacataatcaaccagagatatttttctagggatgagacactacgtcttatagagatcatgcggtcaaggacttctgattttactgttgaagaccagagacctccagtatctactgcaaaaggttttgaaacaaaattttttacacctgccaaactgatcgaggctcagccatcttggaggactgatatcgttccatcatccaatgtgcatgatattggttcttcgccagttgaaattgccaaagcttttatggaagcgcagacctcagcttctgtacacgagtccaaaaagcggaaattcagagctttgagtcatggagttgcggttgacaattcgacatcagaagttttccctacaataactactgattcttctgtaagatggcctgactcagttgttcaaggtggtcccaattatcttacaccacaaagtaataaaggaaggactctgtctcagcctctttctcgcacaccatacaatagctcagttattcgaagatatattaaggttgcatgttgactttcttgcaattgatttctattctaagctatgcaatgtttcttatttgtcatcagctgtgtactagcattcaaatatcacctttgggagctaaaatgtttcatgcttatttggtctgttgctactacagaacagcaggcatggtgatatgcacaataatggacagacacaatttcccactccattttctattggaagtaaggtactagctagttgcctgtccattgcaacagattttcattatgaactactcaaaattctgctaatcattta

SEQ ID NO: 152877 - DNA, 1637 bp, Zea Mays
gagaacataatcaaccagagatatttttctagggatgagacactacgtcttatagagatcatgcggtcaaggacttctgattttactgttgaagaccagagacctccagtatctactgcaaaaggttttgaaacaaaattttttacacctgccaaactgatcgaggctcagccatcttggaggactgatatcgttccatcatccaatgtgcatgatattggttcttcgccagttgaaattgccaaagcttttatggaagcgcagacctcagcttctgtacacgagtccaaaaagcggaaattcagagctttgagtcatggagttgcggttgacaattcgacatcagaagttttccctacaataactactgattcttctgtaagatggcctgactcagttgttcaaggtggtcccaattatcttacaccacaaagtaataaaggaaggactctgtctcagcctctttctcgcacaccatacaatagctcagttattcgaagatatattaagaacagcaggcatggtgatatgcacaataatggacagacacaatttcccactccattttctattggaagtaagagaatactagaggatacacatgtatcagcaagtggtggtatagcgcagccatcatcttccaggggacagatagatgtttttggttctattctaagagaaggttcgactgcaataaacaatgttgcattcaacctgcaagagtcagatggtaaaagcatgacagaaagcagaacaacttttggacgtgcttcaggtgtagacaatatctcaagggttgcttcagtatctgttcatcccaagtcaagcgaaacagcattcaaaatacttaagcaacttgacagaactattccttcccctacatcaaagccactagggctgagacagacattagccaagaaaaatactttttctgttgctacctacagacagattaaagagcctgatatcattatcggtaatgataataaacagagcagcattaatgagagtggtagtgctagctcggagactacatatggaaaaaaggttcagcaacctcaaagcagtcctatttcaggagagtcaagtgaaaaagtccagagaagcggagctaactcagatgtttatgaagcaggcacttctcagcgtcctctgaaatcaaatctaacacccacttcagtcgccgaggtcttggataataacaacaccagcaaaggtttcagcttcacatttcctattcctaaagctccaagctctctacttgaaccgcctcctacaccaaccatggcctcgccaccaaggaccttgccaatcactaacgaggatgttcccaagttcacctttggctcatccagcatggccaacaaactcgttttctccttcaactccacaagcagttctcctggtgctggtggaacagacccaaccttcaaatttggatctgataataagcgagagcttgtgttttgatacagtttttttttgatagacaccatgcccgcggatctgaactgtaccactctatctattcttggtgtaagacgtcttaagagagttggagtgtgctacttgagctacacaacatgacattcttttcattcattagcatattcaaacattacatattttagacgtcc

SEQ ID NO: 152878 - DNA, 2183 bp, Zea Mays
ctccgcgttttcaaaaatcaaaaccccagccggaacagcgaaaccccttccaccatagcccgtaggaaacggagcagcggttgcggtttctctctccgtcgctctcaccgctcgccgccgtctccgtatccggtccgcaaggcgggcctggcgtcaaggtcctccgctccgtccccttcactcgcgaccggagtcccctcttcgttggttcgccaatctacttcgtcggcccaccccttttcccccgatcgatctctcctcgctaagcgaactatcttgacctccctccctcgtgcgagattagccagtagaaagttccccgcttttcatccaggcacacttccaccacctcgctttgctgcttcactgcttgcttctgttgggcggagtgctaataggacggcacgggagtcaagattcctcctccttaacctgccctttcgtgttgccgttgttggtggtttggtttgtgattgcggtggcgctggagttgcggtgtgtgtgaagcgagggatccgagattcttgtggattctgttctacttttcgattgctgctgattctctctcccgtgcgacggcacaagcggcggtgtggggagagcatccgccgttgcccggccttggagggccccggtccgtctatggaacttgccgccccggtgccacgccccggcccggaactgaagtgctcagcaaggcgcttcttgcctgccactctcacgctgctggtgcctactgtggcagtcccctgtttggttcccgctcctcactgaccggctacggggctgcgataatggtgcctcagatggtgctgctcctttgctgctgtctcctggcgttcccgccacatggtccgttagtcgttgaggcttttgtaggcggttatggagtaaactatgggagaatagcaaacaacatcccttcccctgacaaagtggtggagctcctgaggagagcaaagataaggaatgttaagatatacgactctgaccacagcgttctcgatgcgttcaaagggtctgggatcaatctggtcatcgcaatccccaatgagctcgtcaaggatatggctgcaaacacgagccgttcaatggactggctaaatcaaaatgtgcagccttatctccctcagacgcgcatcgttgggatcactgtgggaaatgaggtgctcggaggccaagatcaaagcttgtatcagccacttgttgatgctgtgaagaatgtgtatgatgggctcaagaggctccacttggagagaaaaattgagcttttcacacctcattcggaagctgtttttgctacttcttatccaccctccgcatgtgtgttcaaggaggaactcatgccatacatgaaacctcttctcgacttctttgcaatgattggctcacctttctatgtcaacgcatacccctttttggcttacataagtgatcctgaacatatcgatatcaattatgctctctttaaacccaacaaaggaataattgatccaaataatagcctgcactatgacaatatgtttgatgctcaggtagatgcagcttatgctgctctacatgctgctggttatgataacatggaggttcgggtggcagagactggttgggcttctagtggggatcaaaatgaggcaggagcttcatctgagaatgcaaggacgtacaatttcaatcttcgtaaacggctatttctgaggaccggaactcctctgaagccaaagagaccagtcaaagcgtatatatttgcgttgtttaatgagaatcagaagcctggagctggctctgagaggcattatgggctgttccttcctgatggaaggatttcatatgacatcggtgtctcaggtctactaccttcatctgcatcctcatccgtgctgtccattaagaatgttcaagctgggggttggattttacagcattgggctacagttcttttatgtagttttcattttttgagggccatagtgacttgaggacggcatacacatccgtagtaaagggtacaattgagcaagttagaatgttgctattgggaagttcacaatgaaaatccaaataatagtaccgctgcaataatctcttctcctgaggctgtcctgctttgctgcttaaaaccgtactcagttattgttctaaaaaatgattcatacctgctgaaaaccgttctcactctatct

SEQ ID NO: 152879 - DNA, 799 bp, Zea Mays
acacacacatgacacaccctctcaaaactataaaaaaaaaaacccgaaaaaacaccgagatccgcgcgttcctcggcgtccgcacggcccgcgcacgcacccacgcacccatccggttgccaacccatcccccgaccgacgccaccccacatacatgccgccgcccagcctcaccgccgccggcaccaccaccaccacaacccgccgccgcaacgaccgagccgcgaaggtccaccaggtactgggcgaaggcgcggggacggaggagatgggcgcggtggcggacgggtggacgcggcccgagtggtgctcggcggcgggcgtcgcgggcgtgctgcggcggcacccggcgcccgcgctcttcgggtgcggcctcctgctcttcatggccgtcgagtacaccatccccatggtcaagccggacgcgccgccgctcgacctaggcttcctcgccaccgcgggcatgcacgccgccatcgccgcgaggccctggcttaactcgctcctcgccgcgctcaacacggtcagtgacccacacgccgcctgcctagatttcctttcagtttccgccatctgcctagcttcaatgcaccgcctcctctttaattttgccgccgttgttggccaccaattattgttcgaacaagtacctgtacatttctcggctttggtttcgactgatgagtaattccagcgacccatattcgtactttcttcccagcatttttcaatttaactggacccttgtgtgttcgtcagatctcatacagaaacagcatcacacatttcttacttttac

SEQ ID NO: 152880 - DNA, 1316 bp, Zea Mays
acacacacatgacacaccctctcaaaactataaaaaaaaaaacccgaaaaaacaccgagatccgcgcgttcctcggcgtccgcacggcccgcgcacgcacccacgcacccatccggttgccaacccatcccccgaccgacgccaccccacatacatgccgccgcccagcctcaccgccgccggcaccaccaccaccacaacccgccgccgcaacgaccgagccgcgaaggtccaccaggtactgggcgaaggcgcggggacggaggagatgggcgcggtggcggacgggtggacgcggcccgagtggtgctcggcggcgggcgtcgcgggcgtgctgcggcggcacccggcgcccgcgctcttcgggtgcggcctcctgctcttcatggccgtcgagtacaccatccccatggtcaagccggacgcgccgccgctcgacctaggcttcctcgccaccgcgggcatgcacgccgccatcgccgcgaggccctggcttaactcgctcctcgccgcgctcaacacgcttcttcatggtcccccggctccctcgccgcggaaccggggctgagcgcgacgtcaccagctcactcggcccgacgctgacagacagccacggctcacgtgcgcctgcaggtcttcgtcgcgatgcaggcggcgtacatcctgtgggccatcctcgccgagcagcggccccgcgcggccgtcgccgcgctcatgatgttcacttgccggggcgtgctgggctgcgccacccagctcccgctgccggaggagttcctgggctccgggatggacttccccgtgggcaacgtctccttcttcctcttcttctcgggccacgtcgcgggcgcggtgatcgcggcggccgacatgcggcgcgaggggcggctggcgccggcgcgcctcttcgactcgctcaacgtgctccaggtggtcaggctgctcgcgtgcaggggacactacaccatcgacctggctgttggcgtcggcgcgggcatcctcttcgacacgctctccggatggtacttcgacgccaagaacggcgacagcagcaacgcaccggagaagcagtgccggagctgccagtgccacaaggccctcctttcacactagtagtactattatattttgctagctctgcaagtgccaaccatcaacggccaagtgagcattgatagctaattcgtgtcatttttttaagtttcttctcttttatggaatcattttggtgtaagataatgtatccaaatgctacttacggatatgtaactgtacaaattgttcgcccggtgcgacctgtaacatttttatctgaa

SEQ ID NO: 152881 - DNA, 1239 bp, Zea Mays
acacacacatgacacaccctctcaaaactataaaaaaaaaaacccgaaaaaacaccgagatccgcgcgttcctcggcgtccgcacggcccgcgcacgcacccacgcacccatccggttgccaacccatcccccgaccgacgccaccccacatacatgccgccgcccagcctcaccgccgccggcaccaccaccaccacaacccgccgccgcaacgaccgagccgcgaaggtccaccaggtactgggcgaaggcgcggggacggaggagatgggcgcggtggcggacgggtggacgcggcccgagtggtgctcggcggcgggcgtcgcgggcgtgctgcggcggcacccggcgcccgcgctcttcgggtgcggcctcctgctcttcatggccgtcgagtacaccatccccatggtcaagccggacgcgccgccgctcgacctaggcttcctcgccaccgcgggcatgcacgccgccatcgccgcgaggccctggcttaactcgctcctcgccgcgctcaacacggtcttcgtcgcgatgcaggcggcgtacatcctgtgggccatcctcgccgagcagcggccccgcgcggccgtcgccgcgctcatgatgttcacttgccggggcgtgctgggctgcgccacccagctcccgctgccggaggagttcctgggctccgggatggacttccccgtgggcaacgtctccttcttcctcttcttctcgggccacgtcgcgggcgcggtgatcgcggcggccgacatgcggcgcgaggggcggctggcgccggcgcgcctcttcgactcgctcaacgtgctccaggtggtcaggctgctcgcgtgcaggggacactacaccatcgacctggctgttggcgtcggcgcgggcatcctcttcgacacgctctccggatggtacttcgacgccaagaacggcgacagcagcaacgcaccggagaagcagtgccggagctgccagtgccacaaggccctcctttcacactagtagtactattatattttgctagctctgcaagtgccaaccatcaacggccaagtgagcattgatagctaattcgtgtcatttttttaagtttcttctcttttatggaatcattttggtgtaagataatgtatccaaatgctacttacggatatgtaactgtacaaattgttcgcccggtgcgacctgtaacatttttatctgaagtttgcaagtagaggactagactaggctaaatt

SEQ ID NO: 152882 - DNA, 916 bp, Zea Mays
aacttggacctgacggacacgagcacagcaacgaaccggtggcgctggttcaccggcaaattaaaatcgtggccgtccagcgttcacgcaccgatttcctgataagattctgcacctcgccagcttcttcatggtcccccggctccctcgccgcggaaccggggctgagcgcgacgtcaccagctcactcggcccgacgctgacagacagccacggctcacgtgcgcctgcaggtcttcgtcgcgatgcaggcggcgtacatcctgtgggccatcctcgccgagcagcggccccgcgcggccgtcgccgcgctcatgatgttcacttgccggggcgtgctgggctgcgccacccagctcccgctgccggaggagttcctgggctccgggatggacttccccgtgggcaacgtctccttcttcctcttcttctcgggccacgtcgcgggcgcggtgatcgcggcggccgacatgcggcgcgaggggcggctggcgccggcgcgcctcttcgactcgctcaacgtgctccaggtggtcaggctgctcgcgtgcaggggacactacaccatcgacctggctgttggcgtcggcgcgggcatcctcttcgacacgctctccggatggtacttcgacgccaagaacggcgacagcagcaacgcaccggagaagcagtgccggagctgccagtgccacaaggccctcctttcacactagtagtactattatattttgctagctctgcaagtgccaaccatcaacggccaagtgagcattgatagctaattcgtgtcatttttttaagtttcttctcttttatggaatcattttggtgtaagataatgtatccaaatgctacttacggatatgtaactgtacaaattgttcgcccggtgcgacctgtaacatttttatctgaa

SEQ ID NO: 152883 - DNA, 838 bp, Zea Mays
gaaccaatagggcgagcacaaccagggagttgaggtaaccgagagcatccatgggagggagaataggtccgccgcgggggaaatcaccagcgcgctggcgctaatgcctcggatggtgcatagggagcttctctagattgccaggaacctgggtgtggtggtggcgggcgctgcgatgacccggtggctcggtaattgctcgccatcgccggggatccgcgctccgccatggctagactggtcatcacaacaatcaacggtgagacacacctatccagtccgcgatcgactgagcttcgtgcaacacctatccttagtagatgaaggggcctagaacgcctggacacctcactccggcgaggcctccatcgtgcactgcagtcagcaccgtcgtgggcaacgccggaggtaggagatgagccgatgaccgttgatctggacgggagcggccacaattagattaatgggagaagagttgtgggatgttgtatcgtagatgtgcggtgttgggggccttcggcttccgaaggtcctcaaaaacagtatttaacagtatttctggagtatagtgtgtgaacaggtatcttcggagtcaagtcagcatcacagcagaccagaataatacgaaggttgatacaacgccgaaggtgtgagcaggaaagcttcggcgtggcagcaaaaaatgaaattgacttaaagatgaaaaggctattcagacctcgatagattactatagaattattatcaaatgtaaagggcataaatgtaattttgcataggctgtgtcctgtgcctataaataggtgaacagtacccccgtactgttcacgctgatttg

SEQ ID NO: 152884 - DNA, 186 bp, Zea Mays
tttctcttttttttgtttgcgatttttttcaaatatttttttatatttttctcttttgcagcagcacataagaaaaaaacacaccaagtttcagattttttttgtgcaatgacgcgtcctctggaatttctacaagtttgccctaaaatcagaataaatgtttggaaaatgagaagtcctatttcc

SEQ ID NO: 152885 - DNA, 1685 bp, Zea Mays
atgaaaaattccgctttacatttcttgcgagagaagaagcaaagcctgtgttctgcttctgcattctggaaaaacagggtccacctccgtaaaaaaaaaaagaaagcctcgcgccgccgccgccgccgaggaaggttgaggaagaggatggccgagggcggggaagaagcccgccgccgtgctgcgatcgccgagtaccgcaagaagctcctcacctgccgggagctcgaggcgcgggtcaaaactgggagggagaatctaaaaaatgcaaagaaaaacttggaaaaaactgaagaggatctaaaatcactgcaaagtgttggtcaaattatcggtgaagtgcttcgacctttggacaaggaacgatttattgtcaaggctagcagcggaccacgttatgttgttgcctgccgaagtaaagttgacaaagaaaagttgattgctggtacacgagttgttcttgacatgacaacacttaccattatgcgcattctgccacgtgaggtcgaccctgtggtttacaacatgctacatgaagatcctggcaatgtaagttactcagctgtaggtgggttgtcagatcaaataagggaactcagagaatccattgaattacctcttatgaacccagaattgtttctccgtgtcgggattaaaccgccgaagggcgtgctgctctacggtccacctggaactgggaagacgctcctagctagagccattgctagcaacattgatgctaattttttgaaggtggtgtcaagtgctatcattgataaatacattggtgaaagtgcacgcttaattcgtgaaatgtttaactatgcacgtgagcatcagccatgcatcattttcatggatgaaattgatgccattggtggccgaagatttagtgagggcacaagtgcagatcgtgagattcagaggacattgatggagcttctaaatcagttagatggattcgatgagcttgggaaggtgaaaatgatcatggcaaccaaccggcctgatgttttggatcctgcactccttcgacctggtcggttggacaggaagatcgagatcccactgccgaatgaacaagggaggatggaggtcctcaagattcatgcagctggcatcgcaaagcatggggagattgactatgaagctgtagtcaaactagctgagggcttcaatggagccgatatgcgcaacttgtgcacagaagccggcatggctgctatccgagcggagcgtgactatgtcattcacgaggacttcatgaaggctgtgcgcaagctgaatgatgccaagaagctcgagtccagtgcgcactacagtgctgacttcggcaaggattgaacggggtatcagtgtatcacctgatccggagctgttctgatcatattgcaaactgtgttaggctgtattcatcttatcctggatggaagaactctcatccagacgccctgggagcaagagcaagcaaactcttgatttttctaaattctatctgatatctgatagattccaggatggttgtggagggaaatttggcagttggatagattccaggatggatgtggagggacatctggcagttgggtcatggatgtagtctgtagacgtccaaattcatgtgaagctcttgttcttgctttttatctctcaatacagggtgcgttcttttgcttatggtatgg

SEQ ID NO: 152886 - DNA, 3783 bp, Zea Mays
ggtgtcggaggcggcggccgccgccgcggcgatgtcgctcccgtccatgacgaaaccggggaggaacagcactacgtccgtggaggcggcgacggagagcgcgctgcgggttacgccgatgaagctgctggtgcgcgtggtggaggcgcgtggcctccccgccgtgcacctcaacggctccagcgaccccttcgtgaagctcaagctgggcaagcggcgcgccaagacggccgtggtgaagcgcagcctgtcgcccgcctgggacgaggagttcagcttcctcgtgggcaacgtcgccgaggagctggtcgtgtccgtgctcaacgaggacaagtactttagcaacgacctgctgggtcaggtccgcctgccgctgtcccaggtcatggagaccgacgacctctccctcggcacccagtggtaccagctccagcccaagagcaaaaagtccaagaagaaatgccgcggtatcatcgcagttgcgcgctttctcaacctctccttctttcttcccgcaacattatccacgtggagtggagtacgatgcaaatcaaatactagagaagtttgtctgcacgtatcgttgtccacaagaacccacgtatccgaagaatcacagagcgttccccatcctgcatcagacgacctggcgtccagttcagacagcaccatcgagcacaaaacgctgtcgacaacatatagctgcatcgacctatcagccgtccccagcatcgaacgagcgtctcgcagcagcttcgagcgattcccttccagcattctggagcagccagaccggagcagcgtggaggacttagcagcccctgaccctggtggaccagcagcagccgcagacaccgacgcgatgccaaccccgtcgtcagtggtggaggtcctgtcccgctacttcttcaggaaacccgagaacgccaccgtgcagcaggtgcagcattctgtcgcatcggacaccaccgaccatccagtcgtcgaccgtcagctgcaagagccaaacgcgagctcatcagaagaccgtgagatccccgagagagtcacggtacctgagccaagcctcgacgagctgctcaaagtcatggagtcaaaagaccaaggcagcgaaatgccggccgccttgcctggtggcacgctggtcgacgagtcctacgtcgccgctcccaccgagctcaactctctcctgttctcggcgagctcagacttctggccagcagtggcggagctccaaggaacgagcgggttccagatcgagccgtggaagctcgacagcagcgagagcttcgtgcagaggacactgagctacacgaaggccgcaagcaagctggtgaaggccgtgaaagccacggaagagcagaagtacctgaaagcggccgggaactcgtacgcggtgttctccgtcgtcagcactcccgacgtcccctgcgggaactgcttcaaggtggagatactgtactgcgtcacgccgggtccccagctcccgtccgaagagcagacgtgccacctcaccgtgagctggagggtgaacttcgtccagagcacgatgatcaaagggatgatcgagagtggcgccaagcaaggcatggccgaaggtttcgcccagttctccgaggtgctgtcccagaagctcaagacggccgagcttgacgacgccaactccaacaaggagaagattctggcttcgctgcacgcgcagaaggaatcgtgctggcggctggtcgtccgcttcctcgggaacttcacgttcattttctccgtcgccatagcgctctacgtcatagcgcaccttcatctgtccaagcccgacgtgatgcacgggctcgagtattttggcctcgaccttccggactccatcggggaggttgtggtctgcgcggttttgatccttcagggacagaacatcgtcaaggtaacacggcgcttcttgagtgcgtggaaacagagaggcagtgatcatggggtcaaagctcacggggacggttggctgttgaccgtagcgcttatagaaggcactggcatcatagctactggctcatctgacctctttgatatctacgttgttttcacatgcaatgccaagaggaaaacgagctcgattaagtttcagacgtccgatccaaaatggaacgagatattcgagtttgatgccatggacgatcctccgtcaaggatggacgttgcgatctatgactcgagcggacagtgcgtcattggccacacagaagtcaactttctgaagaacaatctgtcagaactgactgacatatggcttcctgtcagtgggaagtgtgaccaagcgagcaaccctaggctgcacttgagaatattcttgaacaactcgaggggcaccgaagtcgtcatgaactacctagcaaagatggggaaagaagtcggcaagaagataaatttgcggtcagcccaaacaaacgttgcattccggaagctgttcgccctccctctggaagagttcctcatcgacgatttcacctgccatctcaaacggaagatgccgcttcagggccgcctctttttctccccgagaatagttgggttttattccaacatatttgggcacaagaccaagttcttctttctgtgggaggacgtcgacgacatccaggtcatccctgctacactgtccatcggtagcccgtctctgatgatcatccttcggaaggatagagggttggaggcaaagcatggtgccaagggaacagatcatcatggaaggctcaagtttgttttccaatctttcgtttccttcaacgatgcttacaggataatcacagcaatctggaaaatccgagcgctcagccccgaacagaagggggaggcgactgaaaaagacgaagtgaaagaactgctgcctgaagaagccggaaccttgttcactaacgcggacgttaaaatgtctgaaatattctcatcagttctttctgttgatgtcgagtccttgatggagatgttttcaggaggccccctggagcacaagatgatgcagaaggccggctgcatagactacactgccacgcagtgggagctcgtagggtgcaacatacagcagcggcagacgagctacaagctcgacaagaacctatctcggcacggaggagaagcggccaccaccgagcagaagtacagcttggtgaaccaggatggctgggccatcgagaaggtgatgaccctccaaggtgttctgctcgcagaccacttcaatctccagatgaagtactgtatcacgaacgtaccttcgaagccaaacacctgtagtgtgctggttttgctggggattgcctggttaaagagcaccaagcagcagaagaaggtcaccaagagcattatttccaatacctcgaatggattgaaggaactgtttgctgaagtcgagaaggagctcacatcaagcagcagtagccatcctaatgtagcagctggtcccactactgcttaaatgttatcagtatcacatacaaacaattattacaggattcacatcaaagcaattcaggtacaaggctaacatcagtacaacaccaaaagatagattgggcattgcatgaatcacatgcgtatgaagaagccagaagagtggatagctgtttgtgatctcttcctgttctcttctgttcacggtgtcacctgcttcagcgctcttgcactgccggtagaaagtcttacagagatgagagctaaaagggtttcaaagtaaacaggttgtttcagaaacgcttcacagaaagtggcgcgcagagtagtgtatgtgcagctgacatgtat

SEQ ID NO: 152887 - DNA, 876 bp, Zea Mays
ttcgttactactacagcagcattaacccatagagacaatttagtagatctagtagtttgattaatttattaactccatacactgttggtttcaggtggacccgaccgaggccgacggccaatcaatcaagaacgccaccgcaccgctggtcagggcgcgttgggcctgcaatggggggcgatcaccatctgcaactgcgcaggccggcgtcgatcgggaagatcgcggtgccggagaagaagtccctgttcctccacgccgccagcgcgtcgcccgggcactaccagcagcaacagggcggcgcctcctcgcacgaggcgcccgccgtgagcgtcacgccgcggacggccacgaataagcagcagctgcacctgccggcgagcccccgggcgtgcctctgctcaccaaccgtgcacgccggctcgttccggtgcaggctccaccgcggcgtcgggggtggcggcggcggtggcgattccgtcggctccggcctccaagagatgagcagcaggaagcccggcgtatgacgacgacgcggcgcggcgggcgacgagcgctcgtacgccttaccgcaaacgcgcaggtgcaatgcatggccaaggcaaacgcacaggtgcaacaatgcatggccaaggcaaacgcgcaggtccaacaatgcatggccaaggccaaatgttttagatgttctgttgttgtcccctctcatttgtcgtcgctgtatgcagaggaaggggatcttttttctttctttcttctgtacctttcctggtaagttgtaaggattcttacactctcagagccgatttggcgtggatctcctttatttctctgcccactaaatcagctcttagcaacggttcgaactacaggaaccgg

SEQ ID NO: 152888 - DNA, 80 bp, Zea Mays
ccggctgtggttgccactacgccggccctgcgtgtctactctcggcggaggtgccgtcctggggccccgcctcccctcgc

SEQ ID NO: 152889 - DNA, 916 bp, Zea Mays
tttgtgctgtcagttaactgaaactgcgttttcagtatttttcacctcactttggagaattataacccttgatctgtgcattttcggttttggactgctgcaacaaatatgcacggatatacttgatgaataaatttggctaggagaagtcgacctagtgttgtttaaagttgggagaaaatttgtgctccaagttgggctggaaggcaattggatgttgagtgtatttcagctagctaaatctgggatcggcttaggactgaagatgagatatcctctctctgctgtaccccatgtgtgtacagttggagataaggatggagtacgtgattgagggtctagaggcctcagcccctgctgcaaatatcccagttttggactgttttgtgggctgtgagcaatgaagcgttatctgctagctcattactagagtgaaccagacaaggtggatatttgtgttgagtttgtgagctggcctggtatttgtgcttgttggccacgtgtgctctcccatgaggtgctggtacccttggggcccttcttcaccaagatatggctgagctcgatgcctctgtcctcttatcctgtgtactgcagagcttggtccagtggagtttttccttgccctcgagttctagccagtgttcctcacgaggtcgaggtagttcctgtgttcaaaccagtgttagctcctcttctcagtcactaggttgttctgcctttgtgctgcgcctgccaaccctattgtctggtgaccacacccaccgaaacctcccacctcgctgtggccaaagcgttccagtgagttgcatgcccgtgtggtcttcgttccgtggtcttcaaaggccagtgaagcattggtattgctgctgtgtaaaaaaattggataaaacgtctcaaaactttcactgacagg

SEQ ID NO: 152890 - DNA, 771 bp, Zea Mays
atggatcgtagcgtcctctacgatcaaacatccaggagttttgctagggttctcatccttccgccaccgcccctgcccgccgctagcggcggtgaggatgacgcggcgtgggtgcgcgccatctccgccgccaccaagtccacctcggcgcccaagaccctcaccctcgatggcaccgtcaagtcctccatgggcggcctcccctccgccgcgctcctcgagcgcttcgccacctccctagaggaactctccatcgcgggggtgcgcctctcctcgctcacgggcctgccacgcctcccggcgctccggtgcctctccctccctgacaaccgcctctcggggtccgccgccctcgccgccgtcgccgagtcatgcggtgccacgctgcgccacctcgacctagggaacaaccggttcgcagagtgccccgtcaccaaggtcaaggggtacagggaggaggtcttcgcgctgattcccagcctcaagtaccttgatggcgctgacgctgagggcaacgagcgtttggagacggatgacgacgaggacgaggaggaggacgacgagggagaagaaggggcggagggagaggaggagggcgatgaggatgatggagaggaagaagatgacgaggacggtgaaggggacgaagaagaagaaggtgatgaggaggtgatggtttactctaaatctctctttttttatcggtcaatatctgtattcagtattgtgtttcgatatgatgcgcttcaactcctgtacctgagtaactga

SEQ ID NO: 152891 - DNA, 876 bp, Zea Mays
attcctttctttataggtgactggattctaagcgaggctactcatcacctgtaactttggaagtgtgagttagttgacatactattcacttgtacctcgtgcgatttcttatacgtgtacttgtgtgcgttctatgggacgcactgagcccataaatcgattcgtgactatgtaggtatgtgtagtgctgttgtgtgtaccttgaatttctttctacatcttcctgtggtggcatagaatgcgtgcagtaagctgcattccaccaatggtcagattgatgcataaatcatcatgtgcgtggtgattcaggataaactaattgcctgattgggttttgggtgctgccaatttatctgcataagtttttgtattgttatcatacatctccataagcttttctaatctacacaagcttttctaactggtttgaatagagaataagattaacatcttatgaaggattgttgggatatataatagtgcaaatgtagttcaggcgaccttttggatctccctgcaattacttattaactagacgtataactcagatttacaagaaggcagaaaatgatgcaaaatctacgtgtccttttggatctcaccaattgtcagcacgtctgcttataacgaagttctagagaaggaaaagatggaatgaaactcaaattttggtggctgcataagtgtggagacttgaattcatatatacttagttaggctcaacgttagcgcaaatagttgatgaccaagtttttccattagtattttagtttggatttaaagtacacttatgtatgagttatttgacaatgcttatttatgagatattgaatgatacttatctatattatattaattataatgttattaaatata

SEQ ID NO: 152892 - DNA, 210 bp, Zea Mays
tgaattgatcattgatgaatattctcatgtgtcactaattaattaatgtcgtatttttatttacagctgcacattgtgatctaatacaatggctagcgatggtgatgcttcacctccacgaaagcgtatgttgttggagttgccttgtgatgaagaaggtgttaatgtgagtcaaactgttggtgtgtccgcatcatcagccacacctgc

SEQ ID NO: 152893 - DNA, 1467 bp, Zea Mays
tgtccgttgtgaaatagcagctgagcctctcaacccaagtgagcttcctaaaatggttgaaggtcttcgtaaaattagcaagagctatcctcttgctattactaaggttgaggagtctggagagcacactattctggggactggtgaactatatctggattccataatgaaggacctgagagagctttattcagaggtcgaagtgaaggtagcagatcctgttgttacattttgtgaaacagttgttgacacttcttctatgaaatgttttgctgaaacacctaacaagaggaacaaaattactatgcttgctgaaccattagagaagggcttagcagaagatattgagaatggtcttgttagccttgattcaagacagaaagaaattactgacttctttcgccaacgctaccagtgggatgtgcttgcagcaaggtcaatatgggcttttggacctgacaagcagggtcctaacattcttttggatgacacactttcaattgaggttgacaagaacttgctcaatgcagtgaaagattcaattgttcaagggttccagtggggtgctagagaaggtcctttgtgtgatgaaccaattaggaatgtaaaattcaagatcttaaatgcaaacatagctccagaaccattgcaccgtggtggtggtcagataattcccacagcacgtcgtgttgtctactctgcattccttatggctactcctcgccttatggaacctgtgtattatgttgagatccaaacaccaattgattgtgtctctgcaatttatacggtgctatcccggcggcgtggtcatgtaacagctgatgtacccaagccaggcactccaatatacattgttaaggcatttttacctgttatagagtcttttggatttgagacagatctcagataccatacacagggacaagccttttgtttgtcagtattcgatcactgggctatagttcctggtgatcccttagataagagtattgtccttcgccctctggagccagcacctatgcagcaccttgcccgtgagttcatggtaaagaccaggcgaaggaagggcatgagtgaagatgtgagcatcaataaattcttcgacgaggccatgatgaatgagctggcccaacaggctgctgatatccacttgcaaatgatgtagtcaaaaagcgagatgaagtgcacacgtggaagatgcaaatgccctcagcttcttcataccatacatgctgcagatgggactgccggagttccagtcgcacctttatgctggcatttgcccctacctgtttcgttttgattaacacattatgattgctgggtatcatgtagcgaatgtttaaagtgggtaccgtatgcaaatcatgtatgtactgtactagtttttacaccatctgaccaatcagcacccttgaggacagagactatttttaaatgtctttattgaactctgagcggcaa

SEQ ID NO: 152894 - DNA, 1417 bp, Zea Mays
tgtccgttgtgaaatagcagctgagcctctcaacccaagtgagcttcctaaaatggttgaaggtcttcgtaaaattagcaagagctatcctcttgctattactaaggttgaggagtctggagagcacactattctggggactggtgaactatatctggattccataatgaaggacctgagagagctttattcagaggtcgaattcttctatgaaatgttttgctgaaacacctaacaagaggaacaaaattactatgcttgctgaaccattagagaagggcttagcagaagatattgagaatggtcttgttagccttgattcaagacagaaagaaattactgacttctttcgccaacgctaccagtgggatgtgcttgcagcaaggtcaatatgggcttttggacctgacaagcagggtcctaacattcttttggatgacacactttcaattgaggttgacaagaacttgctcaatgcagtgaaagattcaattgttcaagggttccagtggggtgctagagaaggtcctttgtgtgatgaaccaattaggaatgtaaaattcaagatcttaaatgcaaacatagctccagaaccattgcaccgtggtggtggtcagataattcccacagcacgtcgtgttgtctactctgcattccttatggctactcctcgccttatggaacctgtgtattatgttgagatccaaacaccaattgattgtgtctctgcaatttatacggtgctatcccggcggcgtggtcatgtaacagctgatgtacccaagccaggcactccaatatacattgttaaggcatttttacctgttatagagtcttttggatttgagacagatctcagataccatacacagggacaagccttttgtttgtcagtattcgatcactgggctatagttcctggtgatcccttagataagagtattgtccttcgccctctggagccagcacctatgcagcaccttgcccgtgagttcatggtaaagaccaggcgaaggaagggcatgagtgaagatgtgagcatcaataaattcttcgacgaggccatgatgaatgagctggcccaacaggctgctgatatccacttgcaaatgatgtagtcaaaaagcgagatgaagtgcacacgtggaagatgcaaatgccctcagcttcttcataccatacatgctgcagatgggactgccggagttccagtcgcacctttatgctggcatttgcccctacctgtttcgttttgattaacacattatgattgctgggtatcatgtagcgaatgtttaaagtgggtaccgtatgcaaatcatgtatgtactgtactagtttttacaccatctgaccaatcagcacccttgaggacagagactatttttaaatgtctttattgaactctgagcggcaa

SEQ ID NO: 152895 - DNA, 721 bp, Zea Mays
gtgtcagtaaaccgcacatgacgctccccctcggagtcgaaggtgtccacttcgtgtgtctgctctacgagcatgtccatgaacaccgtcttcccgtgctggaggtggccgacgagagtgacgttgcggacgagcgcggggttgcccgcgagaccgaggaggaagtcggtggacgcgtaggtagacgtggccgcggcgcgggtcccgacctcgaacttcacgacgcgtggtggcgcgatgatgggcatctcgagcggctgctcgtcctcgtccatgacgagcgcctccacgccaggcccgtacacctcctcggcggtgggatagtacttcttgtcctcggcgagcaccacggcctgctgggacgggtcgccctcgtcttcgtcgacgtccatgagcgccgcagggcgggagggggagcccgacggggagcgcgccgcgggggacggcgagcgggacgcggtggaggacggtgaggcgccggcggcgtcggagtcatcatcagcgtcggagtcggcgagctctgggcctatgtagtttccgaactcgtcgtagaggctgtcgtccatcgcggcggcggcgttataggaagcccctagggttttgctcggcggcggagctgggatcaggttttgggatttgggaggagggaagacagtaaactagttgtcttggtgtttgtttggtttgtaagagcaatacagtagaactagttgtcaaggaa

SEQ ID NO: 152896 - DNA, 967 bp, Zea Mays
ggaaagcaacgactccgcgtccgcctgacctgacgtccgcctgatgaccgattatcttccttctccgtccgagtaaaggaaagcaacgactccgcgtcccgcttccctttccccgcacggcggagttcacaatccccaccggccggcgtagcggatattgcgagttacgacggggaaggagaggaagatccgtcgatccgcgcagattcgtttcgatcgtggtttggtgacttggtaagaggggaggggagaagcggcgatgtcgggcgtgttcggcagggtgttcgggaagtccaaggagcagagccaggcgaccgcgctggcctcgctcgacaagctcaacgagacacttgaaatgttggaaaagaaggaaaacttgctagtgaaaaaggccaatcttgaggtcgagaaggctaagaattttaccaaagccaagaataaaagaggtagaatgtagcagtttatcaattccaaggaatttacccctctctgtctggagccccccccccccccccccctttttgggttggggggggggggttatttcaatgatgttttttatggaactattgcaatgaagttgtgtaaccacttaaatgcaatgacagtattatgattaccataatgaatttaatttcccctgttttgcatcattcagaatgtagatgcttgcatagtattcctagttcgctactgctagtgacgacctctgaagaatgttctgcaagattttcagtggtctgctttttttatgaatatagatggtaattgtcactgacatggagatgtcttgctccgtgttccattttcattctttagttccacaaatttacatatattcctattgactattgtgttactgatgacctgcactagatgacttcattttttgaaaactgcaaacatgtttctgttgaattccatcctacagttttcctgattacatcttgcaattccatggagttcc

SEQ ID NO: 152897 - DNA, 1238 bp, Zea Mays
ggaaagcaacgactccgcgtccgcctgacctgacgtccgcctgatgaccgattatcttccttctccgtccgagtaaaggaaagcaacgactccgcgtcccgcttccctttccccgcacggcggagttcacaatccccaccggccggcgtagcggatattgcgagttacgacggggaaggagaggaagatccgtcgatccgcgcagattcgtttcgatcgtggtttggtgacttggtaagaggggaggggagaagcggcgatgtcgggcgtgttcggcagggtgttcgggaagtccaaggagcagagccaggcgaccgcgctggcctcgctcgacaagctcaacgagacacttgaaatgttggaaaagaaggaaaacttgctagtgaaaaaggccaatcttgaggtcgagaaggctaagaattttaccaaagccaagaataaaagagctgcaatacagtgcttgaagaggaaaagactatacgagcaacagattgagcagcttggaaatttccagcttaggatacatgatcagatgattatgctggaagcagcaaaagctacaacagagaccgtggatgcattgagaactggagcatcagcaatgaaagctatgcataagtcaacaaatattgatgatgttgataaaaccatggatgaaattaatgacaatatggagaacatgagacaaattcaggatctgttgtcagcgcctatgggagcagcagctgattttgatgaggatgaactagaagctgaacttgcggatcttgagggggaggagttggaggcagagctgcttgcacctaccacaacagctccgtccacagctccagtgcgtgtgcgtgtacctactgctcagcagtccactaggccatctggtcagagtagcaaagctgaagacgacgagctggcagcactacaggcagaaatggctatgtaaatataggcattggcatggtcatcttggatttcagattctgcggttatctcgcaactctggtatactcatgaggatcttcctaggaagacaagctttttcagaatcacaaacacaagctgcataccagcctaactgcttatgtatcatggcatgctatgttattgttttgtaatgaaatattttataggctaataaacatatttctattaataaattgtttcgtgtcagtattatgttcttcaggctttgccatatccgtgttctagtgccaatctaattgatgatgaaactcttcacc

SEQ ID NO: 152898 - DNA, 1074 bp, Zea Mays
gcatctcctttctcccgtgcgcttcccagcctcgctccctctggcgctgtgggcccgacatgcaggcgtggttctcctccggctccgggccctcctcctcgtctgcggcgtcctcatcgcagccgtcgctgctcgcagagtggaactcctacgctgccgcccgctccgctgaggacgcgggcgatggcttcgggatcgacatcgaggcggccgtccgctccgccaacgaccgcgtcgccggcaccttcggcgtggtctcaaaaggtgttaaagggtttccaggcagctttaagtccacaacaagcagtgttccatctggcagatctctcatgtatttcggtctgtttcttggtagtggtgtattcctagttttcatcgcattcacgatatttctgccagtcatggtgataatgccacaaaagtttgcaatatgtttcacggtgggatgtgctttcataattggatcattctttgcgctgaaagggcctaagaatcagctctatcatatgatttccaaagagagattacctttcaccatgggatttgtcgggagcatggttgctacgatctacgtgtcaatggtgcttcatagctacatactttctgttttcttctctgtgcttcaggtccttgccctagcatattatgccatctcatacttccctggtggatctgctggaatgaagtttatatcttctgccgttgtgtcctcagtgttgagatgctttgggcgatgagttcacctgactgctgctttcctgtgctgattgcagtatttctagtggatgatctagcacctttgtggctttgtcgtttagcctgtgcggcttcattaatttcagaagtttgatgccagttgaagcaccgaggtgaactgtgaggaaaggatgttgtggacccagccaacgcttgttaggggcaaaaaaattgtaatgtagtacattgggaacaacagcttagtctaaaaagtacattgtacaaaacatctcactgaacactgggccacaatctaacgcccatggcgctcatttctttcatcttttctgtcgtaaaagggaaaaagaaattgcgagc

SEQ ID NO: 152899 - DNA, 1398 bp, Zea Mays
gctctgcggccacacgcgtttggattttgctcctttgctcccttgatccatccacttctgaaagggtcaccatgtctgcctttgtggggaagtacacagatgagctgatcaagaccgccaagtgcctcgcaacgccgggcaagggcatcctggcctccgacgagtcgacgggcaccatcggcaagcgcctgtccagcatcaacctcgagaacgtggagtcgaaccggcaggcgctccgcgagctgctcttcacggcgcccggcgtgttcgactacctctccggggtcatcctcttcgaggagacgctgtaccagaagacctccgacgggaagccgttcgtggacgtgctcatcgcgggcggagtggtccctgggatcaaggtcgacaagggcaccgtggagatcgcgggcaccgacggcgagaccaccacgcagggcctcgactccctgggcgcacgctgcgccaagtactacgaggccggcgcgcgctttgccaagtggcgcgccgtgctcaaggtcggccccgcggggcaggggcagccctccgagctcgccgtcaggcagaacgtcgagggcctcgcgcggtacgcgctcatctgccaggagaacgggctggtgcccatcgtggagcccgagatactcaccgacggcggccacgacatcgggacctgcgccgccgccacggagcgcgtcctcgccgccctctacaagtcgctcagcgaccacaaagtcctgctcgaggccacgctcctcaagaccaacatggtcacccccggttccgatagccccaaggtctccgcggaggtgatagcggagtacacggtggcggcgctgcggcgcaccgtgccgccggcggtgcccggggtggtgttcctgtcgggcgggcagagcgaggaggaggcgacgcagaacctggacgcgatgaacaagctggaggtgctcaagccctggacgctgtccttctccttcggccgcgcgctgcagcagagcaccctcaagaagtgggtcggcaagaaggagaacgtcgccgccgcgcaggccaccttcgtcatccgctgcaaggccaactccgaggccgcgctgggcaagtacgccggctccggcgccggggacgccgccgcctccgagagcctgtacgtcaaggggtacaagtactaaagccgccactgctgactgtgccgacccaatccttgtgtcccacgtcgcagcgctcggactgtgccgagatatatgtgctacactagtgtttgtgtactaaattctcttctcttcgtccggctcctatttgagcaaaacatacacacacacacacacacaacacgttgatctatttgcagctcgcaatgtacagtattactggaacataagtgcaatatatatagatgtgaccatcttactt

SEQ ID NO: 152900 - DNA, 1500 bp, Zea Mays
gctctgcggccacacgcgtttggattttgctcctttgctcccttgatccatccacttctgaaagggtcaccatgtctgcctttgtggggaagtacacagatgagctgatcaagaccgccaagtgcctcgcaacgccgggcaagggcatcctggcctccgacgagtcgacgggcaccatcggcaagcgcctgtccagcatcaacctcgagaacgtggagtcgaaccggcaggcgctccgcgagctgctcttcacggcgcccggcgtgttcgactacctctccggggtcatcctcttcgaggagacgctgtaccagaagacctccgacgggaagccgttcgtggacgtgctcatcgcgggcggagtggtccctgggatcaaggtcgacaagggcaccgtggagatcgcgggcaccgacggcgagaccaccacgcagggcctcgactccctgggcgcacgctgcgccaagtactacgaggccggcgcgcgctttgccaagtggcgcgccgtgctcaaggtcggccccgcggggcaggggcagccctccgagctcgccgtcaggcagaacgtcgagggcctcgcgcggtacgcgctcatctgccaggagaacgggctggtgcccatcgtggagcccgagatactcaccgacggcggccacgacatcgggacctgcgccgccgccacggagcgcgtcctcgccgccctctacaagtcgctcagcgaccacaaagtcctgctcgaggccacgctcctcaagaccaacatggtcacccccggttccgatagccccaaggcatgtcgacgactcgaccgtcgatcattcttgtccgaccatgcatataatatatcgtccattaattcatggacgcaagatttttcaggtctccgcggaggtgatagcggagtacacggtggcggcgctgcggcgcaccgtgccgccggcggtgcccggggtggtgttcctgtcgggcgggcagagcgaggaggaggcgacgcagaacctggacgcgatgaacaagctggaggtgctcaagccctggacgctgtccttctccttcggccgcgcgctgcagcagagcaccctcaagaagtgggtcggcaagaaggagaacgtcgccgccgcgcaggccaccttcgtcatccgctgcaaggccaactccgaggccgcgctgggcaagtacgccggctccggcgccggggacgccgccgcctccgagagcctgtacgtcaaggggtacaagtactaaagccgccactgctgactgtgccgacccaatccttgtgtcccacgtcgcagcgctcggactgtgccgagatatatgtgctacactagtgtttgtgtactaaattctcttctcttcgtccggctcctatttgagcaaaacatacacacacacacacacacaacacgttgatctatttgcagctcgcaatgtacagtattactggaacataagtgcaatatatatagatgtgaccatcttacttattactgaagcttt

SEQ ID NO: 152901 - DNA, 1923 bp, Zea Mays
ccttttcaaagtcacgctgaatatactcttgtatgccttttcaaagtcacataggtgatgcttcagtcttagaaagattacttttgcatgtaagaatttgtttctgtagcagttttgtagtcgcgctggtacgcgctgagtttttaacaatttctgggatgtttctaagaatttcttgtgtttgaaacaagtcagcgcagtttcgtctgtcgatacagctgtttgtagacatatgttatagaagaaactactaggagtagttgattgattatactagtctgctttgctggccggcacatagacagtggtaaacactatttgccaacaggaagaaacagtaggaacagcgttatatacagtactgaacagtggcgcgtacagctaggaaacattcgtgaacattgtatgaacagcgtcagttgccctgttggcctcggatttatttcgggttgaagaagtaataaaaaaagctacctttgtttttaaatatttgccgctagttcatttttaaactaaactgtgatagataaaaaaaacgagagattaaataatatggcgagatataaatagctgcagcatatagatgcacatatagtacagtacataatacgcgcgcgcgcgcagatgagctgatcaagaccgccaagtgcctcgcaacgccgggcaagggcatcctggcctccgacgagtcgacgggcaccatcggcaagcgcctgtccagcatcaacctcgagaacgtggagtcgaaccggcaggcgctccgcgagctgctcttcacggcgcccggcgtgttcgactacctctccggggtcatcctcttcgaggagacgctgtaccagaagacctccgacgggaagccgttcgtggacgtgctcatcgcgggcggagtggtccctgggatcaaggtcgacaagggcaccgtggagatcgcgggcaccgacggcgagaccaccacgcagggcctcgactccctgggcgcacgctgcgccaagtactacgaggccggcgcgcgctttgccaagtggcgcgccgtgctcaaggtcggccccgcggggcaggggcagccctccgagctcgccgtcaggcagaacgtcgagggcctcgcgcggtacgcgctcatctgccaggagaacgggctggtgcccatcgtggagcccgagatactcaccgacggcggccacgacatcgggacctgcgccgccgccacggagcgcgtcctcgccgccctctacaagtcgctcagcgaccacaaagtcctgctcgaggccacgctcctcaagaccaacatggtcacccccggttccgatagccccaaggtctccgcggaggtgatagcggagtacacggtggcggcgctgcggcgcaccgtgccgccggcggtgcccggggtggtgttcctgtcgggcgggcagagcgaggaggaggcgacgcagaacctggacgcgatgaacaagctggaggtgctcaagccctggacgctgtccttctccttcggccgcgcgctgcagcagagcaccctcaagaagtgggtcggcaagaaggagaacgtcgccgccgcgcaggccaccttcgtcatccgctgcaaggccaactccgaggccgcgctgggcaagtacgccggctccggcgccggggacgccgccgcctccgagagcctgtacgtcaaggggtacaagtactaaagccgccactgctgactgtgccgacccaatccttgtgtcccacgtcgcagcgctcggactgtgccgagatatatgtgctacactagtgtttgtgtactaaattctcttctcttcgtccggctcctatttgagcaaaacatacacacacacacacacacaacacgttgatctatttgcagctcgcaatgtacagtattactggaacataagtgcaatatatatagatgtgaccatcttactt

SEQ ID NO: 152902 - DNA, 719 bp, Zea Mays
atccattagccgcgcgcgcgcgcatctctcgtgatatctctctctctctctctccctctctcgcccgagagatcctcctcgtcgggtcctactcctacctcatcagtcctccggtccatctgccctcctccggcacaaggacgacgatgcaggtcacgccggcggcgaccctgcggccggcggcggcgcacgcgttgcggctgtctacagatcactgcagggaagggccaaagattagggttcggttcggatcgaggaaactatcgtggacagaaacacttgatgatgccactagtctgacgagagccaccggaaggcaacgcaggcattcctcaatcctcaaagtgagctgctgggcagctgctcatcaccaacacaattctaatccccagcactttaaggcgactggcatacgaatcgcaaagacgctgcatgccttctatcagttctgccgaccacacacaatatttggaaccataataggcattacttcggtgtctctcctgccagtgaagagcctggacgattttacgttgatagctatatggggatttctcgaggctttggtcgccgcattatgtatgaacgtttatgtagtagggctgaaccagatatttgacattgagattgacaaggtatttttttgtgttaattttaatcatgcctgctgtcgatgacattactgtgtatacatattcagaatttcgggtaaccttttg

SEQ ID NO: 152903 - DNA, 1763 bp, Zea Mays
atccattagccgcgcgcgcgcgcatctctcgtgatatctctctctctctctctccctctctcgcccgagagatcctcctcgtcgggtcctactcctacctcatcagtcctccggtccatctgccctcctccggcacaaggacgacgatgcaggtcacgccggcggcgaccctgcggccggcggcggcgcacgcgttgcggctgtctacagatcactgcagggaagggccaaagattagggttcggttcggatcgaggaaactatcgtggacagaaacacttgatgatgccactagtctgacgagagccaccggaaggcaacgcaggcattcctcaatcctcaaagtgagctgctgggcagctgctcatcaccaacacaattctaatccccagcactttaaggcgactggcatacgaatcgcaaagacgctgcatgccttctatcagttctgccgaccacacacaatatttggaaccataataggcattacttcggtgtctctcctgccagtgaagagcctggacgattttacgttgatagctatatggggatttctcgaggctttggtcgccgcattatgtatgaacgtttatgtagtagggctgaaccagatatttgacattgagattgacaaggtcaataagccaaccctcccgttggcgtccggagagttttcggtgccaactgcagtagtattagtagtggcattcttggtcatgagcattagcatcggaataagatcgaagtctgctccattgatgtgtgctttgcttgttagcttccttcttggaagcgcatactccattgatgttccattactccggtggaagcgacatgcttttctagctgcattctgtataatctttgtgagggctgtagtggtccagttagctttctttgcacacatgcagcaacacgttctgaagaggcccttggcacctacaagatcggtggtctttgcaacatttttcatgtgttgcttcgctgcagtaatagcgctattcaaggatattcctgatgtcgatggagatagagatttcggcattcagtccatgactgtacgattaggccaacagagagtgcataggctctgcattaacattctcatgacagcatacgcagctgcaattttggtaggcgcatcatctacaaacctgtatcagaagattgtcattgtgtctggtcatgtcttgcttgcctccacactctggcaaagagcacaacaatttgacattgagaataaggattgtatcacacaattttatatgttcatttggaagttattctacgctgagtattttcttataccatttgtgtagtaaagaatcatgcgaagaacagcacccgtgctatagacatgtgaaggtttattgctaatgttactctaccgaatggtctgaatgcctatgcgtcatttgtatgtaatatgactatttgttgtatcagggtaacaactggagcaaatgtaccgtatatattaagcattaatttaactttatcagttagttgtgggaatattactaactagcaagctagattatgaaccttgatctctcgatgataaaaaatatctaaaacatttggtttgtcttgagtcaaagttttgaaactttgaccaacaatatctataaaaaatatttttaaattaaagaaattatatattgcggtagatgttttaataataaatgtaatagtttaatttttatttagtcaatatttatgaatattttattattaatggtctaagtttcaaaatattgact

SEQ ID NO: 152904 - DNA, 3328 bp, Zea Mays
ggaccaggaggttgaagcgaactgttgcgcgccccttatttcttgccgccgtctcttcccacaaccactctttcgctctgaaacaatccacctgagctgcaccaaggagcgagtcgcaagaccctcgctctcgctcgctcctgctcctgcatcgtcgacctagatagcagtgtcagatccagcgctcgaccatggcggccgcctcggcgtcgctcgaagacctcaagaacgagaacgtcgacctcgagagcgtcccgatccaggaggtgttcgccgtcctcaagtcctcgccgcacgggctcacctccaccgatggcgccagccggctccagatcttcggccccaacaagctcgaggagaagaaggagagtaaactgctcaagttcctggggttcatgtggaacccgctctcctgggtcatggaggccgccgccatcatggccatcgtcctcgccaacggaggggggagaccgccggactggcaggacttcgtcgggatcgtcacgctgctcttcatcaactccacaatcagcttcatcgaggagaacaacgccggcaacgccgccgccgccctcatggccagcctcgccccacagaccaaggtgctgagggacggcaaatggtcggagcaggacgcggcgatactggtgccaggcgacatcatcagcatcaagctcggcgacatcatccctgcggacgcgaggctgctggagggcgacccgctcaagatcgaccagtcggcgctcacgggcgagtcgctgcccgtcaacaagatgcccggcgacagcatctactctggctccacctgcaagcagggcgagatcgaggctgtcgtgatagccaccggcgtccacaccttcttcgggaaggccgcccacctcgtcgacagcaccaacaacgtcggccacttccagaaggtgctcacggcgatcgggaacttctgcatctgctccatcgcggtcgggatgctggtcgagatcgtcgtcatgtacccggtccagcaccggcagtaccgcgacggcatcgacaacctgctcgtgctgctcatcggagggatccccatcgccatgcccaccgtgctgtccgtgaccatggccatcgggtcgcaccggctgtcgcagcagggcgccatcaccaagcggatgacggccatcgaggagatggccggcatggacgtgctctgcagcgacaagaccggcacgctcaccctgaacaagctcaccgttgacaagaacatgatcgagccgtttgtgagggatctggacaaggactccgtagtcctgtacgcagctcgagcatccagaactgagaaccaggacgccatcgacgcgtccatcgtcggaatgctcgcggacccaagggaggcccgtgccggcatccaggaggtgcacttcatgccgttcaaccccgtcgacaagcgcactgccatcacctacatcgactccgacgggtcatggcaccgcatcagcaaaggtgcccccgagcagatcatcgacctgtgccggctccgggaggacctcagccggcgggtgcacgccatcatcgccaagttcgcggaccgcgggctgcgctcgctggccgtggcgcggcagagggtccccgagggcaacaaggacgcgccgggcactccgtggcagttcctggccgtgcttccgctgttcgacccgccgaggcacgacagcgccgagacgatccggcgcgcgctgaacctgggcgtgaacgtgaagatgatcaccggcgaccagctggccatcggcaaggagaccgggcggcgcctcggcatgggcaccaacatgtacccgtccagctccctgctcaaggacggcgacacgggcgggctccccgtggacgagctgatcgagaaggcggacgggttcgcgggcgtgttcccggagcacaagtacgagatcgtgcggcggctgcaggggcggaagcacatctgcgggatgacgggcgacggcgtgaacgacgcgccggcgctgaagaaggcggacatcgggatcgcggtggcggacgccacggacgcggcgcggggcgcgtcggacatcgtgctcacggagcccggcctcagcgtcatcatcagcgccgtgctgaccagccgcgccatcttccagcggatgaagaactacaccatctacgccgtgtccatcaccatccgggtggtgctgggcttcctgctcctggccctcatctggcgcttcgacttcgcgcccttcatggtgctcatcatcgccgtgctcaacgacggcaccatcatgaccatctccaaggaccgggtgaagccgtccccggtgcccgatgcctggcgcctccaggagatcttcgccacgggcgtcgtcctcggcacgtaccaggccctcgccaccgtcctcttcttctgggccgtccgcgacaccgccttcttcacgaatacgttcggggtgcaccacatcggggacagcacggaggagctgatggcggcggtgtacctccaggtgagcatcatcagccaggcgctcatcttcgtgacccgtgcccggagctggttcttcgtggagcggccgggcctgctgctggtggccgccttcctggccgcgcagctggtggcgacgctgatcgccgtgtacgcgcactggccgttcgcccagatcaagggcatcggctggggctggggcgccgtgatctggctcttcaccatcgtcaccttcttcccgctggacgtgctcaagttcggtatccgctacttcctgagcggcaagcagtggagcaacgtgttcgacggcaagacggcgttcgccaacgagctggactacggcaagagcaagcgcgaggcgcagtgggtgatcgcgcagcggtcgctgcacgggctgcagcagcccgaggcgtcgggcctcttcaactcggccgacaacagcagcaacgacttcgtcgagctctctgagatcgccgagcaggccaaacgccgagcagagatcgccaggctaagggagctgcacacgctgaaagggcacgtggagtcggtggtgaagctaaaggggctggacatcgacaccatccaacataactacacagtgtgatcatgccatcgatttggggaggaacctttttgttttttgtcttttgattttttttggggggggggggggggggggtaggggaggaggaactgtaggattcagttgtctaggtgagataaataattaacttgaagaaatggtagaatttgttgatcgaagggtatgtttatctgtcgcatagctgaacagttccaaggttactgctaaagccatgcggttaggagctttgttcatatttatttgcttgtttaggcagctctagtatttttctc

SEQ ID NO: 152905 - DNA, 1439 bp, Zea Mays
tcgttcgtctccacgcccctctcattcgcaccgctcccacccacatcctcttcgcctctctgagtctctctctctctctctctctgcacgcctccgctccgcgtgtgcttccgttcggcggtggtttcatctcgcggaggcagcagaccacagcgccagcagccatgaccgcggccgacggggagtcctgcgcggtggtcgcgacggccgccgacatcatctgctctctccgtggtgcggacctcgccggctggaccccgccgtggcgcaagcacgaggccgcctgcgacggcgtccgtgaggaggagggcggtggcggcgacgaggcgcgtgatctggcctggccggcggtggcgcgcgggaagcgctcgcggtcccggcgcgagtccccgtcggcctcgggctccgccgcctccgccgacgcgaagaagaagaagaaggcgaggcgaggggtccgcggcagccccgcgtcacccctcgactacagcggcgtgtccgggtccggcgcgtccaccagcggcggcgaggacggtgccttctgcttccagccagagccagcgttcccgccggccgccgcgtgccagctcgcggagcccgccgtgcttccacccccgcccccgccccccagcgaggtgggtggcctcgccggacggcggacgatcctcccggtgccgccacctcggcccgccggacagcgggcgcggaagaagatgaggctcccggagatccagcagatggtgcggtcgctgtcggtggagaacgatgccctccgcaagacgatgaaggagctgcagagggcttgcacggcgctgtcccaagaaaacggcaagctagagacgaggctcgatcagtccactacgctaaacgaagcagtctccgtggagaacaaggggaagccgcagccccagcgtcagcgcgcagctgagcaggaagctccgagcggcttcgtgctccctgacctcaacctcccggcagacgtctgacggctgcctgaatctgtcgatcggtggccagatcgagctatagcacgctaacctcatagctaaactgtacatagaagaagaagctgcgccagaaggaggggggtggggttctgaacggccacacttaccaggatactgaggcagaagaagaacggaggttatctttgtgtcataagttgtcgacgtttagggtttagagccgtcgtgatcgtatcctccggcctgaacaacgttgtttttatgttcagagcggaggacccggcttttacgtttacctcgctcacgttttctgtcgacgacgttctttagtagtgcccccgcgcatcggtgtggatggacgcgcagtgggatatatatgtgtttccaggtagttggagattcgaaacgaaccagtgatgtagatttgtttcatctaaatatatgctatagttcaaaactgctgaagcctttttgagc

SEQ ID NO: 152906 - DNA, 432 bp, Zea Mays
ggtgccttacgcgcacaccacatcgtcgtcgcgtggttcgtccctgagtagcggacacaactcgacgggttccgtcgtggaggccacatggccggggagcaaggctggggtcgcgcccacgccatgccagggttgtacccacgccggtggggagcagctggccatggcgtcagcggtcatcttcgagacaagtgggagatccaatgtcgcatgaccgacgaggcaccagcaaggcagcgatgcggccccgatatttgaccggtatcctggcttcgccttcggggccaacgactcgaagacatcgtctttcttgtgggagtctgtggcttctacaggaaaccttttttctttctttgctcgtgaagagtagatccaatctactgatcaagaaaattataccgttcatttacgtagaggaatcgaaggctgtcg

SEQ ID NO: 152907 - DNA, 1637 bp, Zea Mays
ctcccttccccagtccccactaccactacacgcctctcgccgtcgcgtcttcaaagcctccgccacttgactcccatcccctctcgcgtggtccttctcctgctcccgctcccgctgctcctcatcttctcgcgccgcggcccccagcctttgcccgccgctacctctctctaattgggcggcggcctgccggtccgatggcgttcaactaccacgaccacgcgctggcgatggaccccgcggcggccgccgcggttggggcggccgcgaaccctagctttgtctccggaggtggcatggccggggggcccggctgggagagggagaaggcggccatcgcggcgcacccgctgtacgagcgtcttctcgaggcgcacgtcgcctgcctccgcgtcgccacccccgtcgaccagctcccgcgcatcgacgcgcagatagcggcgaggcccccgcccatggaggccgcggctgcggctgctgcggcgggcggagcacactcgggaggcgaggagctcgacctcttcatgacacattatgtgttgctcctctgttcattcaaggaacaactccagcagcatgtgcgtgttcatgcaatggaagcagtcatggcttgttgggagctcgaacaaactttacaaagccttacaggtgcatctcctggtgagggcactggggcaactatgtctgacgatgaagacaatcaggtggacagtgagagcaacatgtttgatggaaatgaggggtcagatggaatgggatttggcccattaatgttgactgagggtgagagatccttagttgagcgcgtccggcaggagctaaagcatgagcttaagcaggggtacagagacaaacttgtggatattcgggaagagatattgcggaagcgaagagctgggaaactccctggcgacactgcttctaccttaaaagcatggtggcaggctcattctaagtggccgtacccaaccgaggaagacaaggctcgactggtgcaggaaacagggctacaactgaagcagatcaataactggtttatcaaccagcgtaagcggaactggcacaacaattcggcgtcatcctcgtcggacaaaagcaagagaaaaaggaacactgcaggtgatgggaacgcagaaccagcctggtagggcatggtcggggaacgaagtttatgtaaataatgcttctactgtgaagagttccatcatatttgttgctccagaaaagaccctcagaccggtgtttcctgaacccatattcatacaaagacatcagacgatgaataatgttgcgagtagtcaaataaaataaataacttgtatagtgaataactagaaactagcattcatcgttttggtattgtatagcgctagagtgtaattgtttggtcggactgtcttgtataatggtgtaaggttcaaatgcattttgacctagcattcgatattgtattttgtgatgttaaaaaccattgtattccgttttgtgttttatccgtggaatagggacactgtttagtgttgccctcaattcggccatgtcgtgttgtcaacttcatattaaacttcaaagttgtttgtatttaataaacttcaaacttcatatataacacgaggttgtggtatagtttcacgata

SEQ ID NO: 152908 - DNA, 1197 bp, Zea Mays
atggacgacagcgagctccatgaagaggagaacccaaccaatagtgccgtaggtgagcttgacgatgcccaggacttcatcacaaccagttatgcttttggtttggtgttggtgcaagtgccgatgtcgggccgattagggttgtcaaatagctgggctctgatgtgttggagtcaggctttgagaaccataaaactgcaaaatggttttgagtatgaagatgatcctctgcaggatgacgatgacgacgaggattatgaggagcctggtggaggaaatcacttattggggtttatgttcggcaatgtagatgattctggtgatttagatgctgactatcttgatgaggatgcaaaggaacacctttttgcactggcagataagcttggtccatctctcaaagacattgacctaatgaagtcttctccagcaccaactgatccttccgaacaagactatgatgagaaggcagaagatgctgttgattatgaagatattgatgaagaatatgatggacctgaagttgaggcaactacagaggaagacaatgtgttgtcaaaaaaggattacttctcttcatctacagtgtatgcatcagtcaacagtacagtttcagtgtttgacgatgaaaactacgatgaggaagaagaaccacccaatgataatgagcctcctggtgatagtgctgcccaaaatttatcttcagtttctatcgagcaggcagatacgacaacctcaagcgataaccttgccatggaaaagattggcttgttatcacatccagaggaaaacatggactttgaatatgaagatttggagaatgaaaagggcactggggaaggccagcttgagcctgaaagtgcaacttcccttcctgttttatgcatagaggatgggaacgctatcctgagattctctgaaatttttggtatccaagagcctgtaagaaaagtgaagacagatcaccacaaacgaccagtggataaaggtattgtgcatgttgcaacaaaaagatccaagaagcaccatcctcccccatgtatgcaagacattgatagatagatggtagctggagggtgttacctgaaagcaatggttactgagcataattatccttactgcttatgttttcactttgagatgaaaaaaattaactgccactgtctatgtcaatggtttatacttatcatttctaaa

SEQ ID NO: 152909 - DNA, 1980 bp, Zea Mays
atggacgacagcgagctccatgaagaggagaacccaaccaatagtgccgtaggtgagcttgacgatgcccaggacttcatcacaaccagttatgcttttggtttggtgttggtgcaagtgccgatgtcgggccgattagggttgtcaaatagctgggctctgatgtgttggagtcaggctttgagaaccataaaactgcaaaatggttttgagtatgaagatgatcctctgcaggatgacgatgacgacgaggattatgaggagcctggtggaggaaatcacttattggggtttatgttcggcaatgtagatgattctggtgatttagatgctgactatcttgatgaggatgcaaaggaacacctttttgcactggcagataagcttggtccatctctcaaagacattgacctaatgaagtcttctccagcaccaactgatccttccgaacaagactatgatgagaaggcagaagatgctgttgattatgaagatattgatgaagaatatgatggacctgaagttgaggcaactacagaggaagacaatgtgttgtcaaaaaaggattacttctcttcatctacagtgtatgcatcagtcaacagtacagtttcagtgtttgacgatgaaaactacgatgaggaagaagaaccacccaatgataatgagcctcctgtttctatcgagcaggcagatacgacaacctcaagcgataaccttgccatggaaaagattggcttgttatcacatccagaggaaaacatggactttgaatatgaagatttggagaatgaaaagggcactggggaaggccagcttgagcctgaaagtgcaacttcccttcctgttttatgcatagaggatgggaacgctatcctgagattctctgaaatttttggtatccaagagcctgtaagaaaagtgaagacagatcaccacaaacgaccagtggataaagagcttcagatcgcaaatgttgctgacaatgttgaagaagatgaggaactaattctccggagcactatgcaaaatttctcaactttgaagcacattcatgtgaatgaagattttgttgagagtgacagtgatgagtctatttctgatgtcactttaaggctaaaggattcatgtctttcagaacaaccaatgaaagatgtgcatatggatattcgtattgtccagcgatctccaacttgtcctgatttttatccacttgagcattatgattgggaaagtgatatcatttggaacaattcaccagcaactgatcagcaggcttatgcaaaaatctgtgaatctgaagagagtgaggacactcatggtgaagaccagggtaaggattatggccaggcctccaggtgttgggatgtacagagtaaaaccaatggttctccagtaattaaagagactttttgttgtacagaaatgcctgctccagctaactactgcccccctgggaaaagttaccctccattgacaaacgaagataacttagatcacataatgccaaataacttagatgatgcagttaaaattgacaccatggtgcgtttaaataaccttagtgtactaaacagggaattattagaaggatcatggttggacaacataatttgggatcctaatgaggttaccccaaagcctaaactgatctttgacctcaaagatgatcatatgctttttgagatcctagatgaaaagaatgtggaccatctccagtctcatgctcgtgctatgattgttagccagtcaactaagacttcaacaccaacagttgacaattttggcgatcaaccaaagccattgagtggcaggttcaacatctccaatgacaagttttattcaaataggaagactccacaacaagctaaatctcatactaaaaaacgcgctttaatgggcataaaggtggtgcattctgctccagctcataagctgcaaaccatgaagccagtgttgagcaatgaagagaacaactag

SEQ ID NO: 152910 - DNA, 726 bp, Zea Mays
gaacctcatatggaagtcttttcaccagggactaagaacatgcaaaattatcttctgaaccgagttcttgcatatgtttatcgtgagtttcgtgctagagagaggcctgatgctattcctcagattcgagctgacgagttacccatacaaagtcctctgacagaagccatagtgaaaaaacgattgaagcattgtgcagatttgaagaaaggaccaaaggggcattttttctggacacagagacctgatttccgggttccatcagaagaagaactgaggagattattgacgccagaaagtgtttgctgttatgaaagtatgcaagctggtttgtatcgtctcaagcgcttaggaattctgaagcttactcagcctgttggattggcttctgccatgaatcagcttcctgatgaggctattgagcttgctgctgcatcacatatcgagagggaactgcaaatcactagctggaatcttacaagtaatttcgtcgcttgtactaatcaggacagagaaaatatagaaagattagaaatcactggtgttggagatccatctggtcgtgggttaggattcagctatgtgcgagtagcaccaaaagcacctgcctccaattcagtgctcaagaagaagtcagctgctgcaaagggtaccactgtaactggcactgatgctgatctccgcagattgagcatggatgcagcccgtgaggtaccgttgtactaa

SEQ ID NO: 152911 - DNA, 2456 bp, Zea Mays
gttgctgctaaaatttggcgtacctgaagagcaaattgataaattaacaaggtggcatcggatcgctatggtgaggaagctttcaagtgagcaagctgcatcgggaattactatcgatgaaattcctgttagtaagtttgcacgtggacaaaggatgtcttttctgcaacttcagcagcaaactagggagaaatgtcaggaaatttgggacagacaagttcagtcactttcagctttagatggtgatgacaatgccagtgacacagaagctcacagtgatctagactcatttgctggggatcttgagaacttgctagacgcagaagaatttgatgatgaggatactagtacagcagacttgagaattgacaaagcagatggaatgagaggacttaaaatgagaaggtgctctacgcaagcccaaattaacaaggaaattgaagatgatgaaacagaggcttctctggcaaagaaactacttgaagacgatggcaatgatgtgaagaggaaaaaacagcctgtggaattgacaaattgtggcacctctttagttgccaataaaatgaagcagagtaagactgggcaaacgatcaaatcatctggttatgctggtgcattaaccccaaaggagaacacaccaagagaaggaaaagaggttgaaaattcttttgttgagggtggtttgtcctcaaaactaaaaccaaagatggcactcgatgtaaatgagactgttctagttaaaaagaaaagtgttccaggaaaggatggacctaaggaaaagaaacagggtgcaagaggggatagtcttgtttgtggagcctgtagtcaggttgggcatatgcggactaacaaactgtgccctaagtatcgggaggatccagaaatgtcagaaatggatgctaattcagttaagcccaactctatggatataaaccatttgcaagcaaagacacctaaaaggttgataacaaaagtttcctctgaagttactgaaactgaagggccagaaggtattgagaagacaaaatctgtcccagtaaagttcaaagtaggggcacctgataaatccttggagaggaacatgtcagtctccgtttcactcgtttctgataaacgtgtcatggatgttacagacagtagatctaccggaaaggtaaacaagatagtgatacctaataagatgaagtctgatgatttccctcctgacactccaaagccatctgttgtatttcggcctcctgctgaagaaaaggatgtacctcgcaaaaagatcaccatcaagcagcctaaaggcatagaccagcaaagacatgttgaatctaggagtgttcaggaacccaccagaaagacaagaaaaattgtagaattgtcgagttttgaggataaaagtagagaggatgatcattgggttggtggggaacccagccaggtgaattcctcacatgggaggaggctgggtctggaaggaaaaataagcaaagccacaatggaaaatgaaagatcctggagagattttgaggagcgaagagaaatgccacaagcaaggctctttgatgctacgatatatgcatcaagggaggaagatcatctaaaggcaaaaaagaaaaacaagaaaaagaaaaaacatgaattcaaagatgatgacttacttgatcacaggccatacagaaatgacaggagggtacctgaaagacatcgagcactaaaacgatctagtccagctcctgtggttggatatgcatcatctgccaagcgtcgcagaggaggagaggttgagctctccaacatattggaaaaagtagttgatcacttgcggggtttgagtggatcactgctgtttttaaaaccagtgacaaagaaagaagcttctgattaccttgatatcatacggtacccaatggatcttggtaccatcagggacaaggtgagaaagatggtgtacagaaacagggatgaattcaggcacgacgtagcacagatacaactcaatgcacacatatacaacgacactcgctatcctcacatccctccgcttgctgacgagctcatggaggtctgcgaccatctgctttacgaaaacgcagatctgctcaccgaggcggaagatgctatcgagtagcaatataaaaagctagatttagcatttggatcttgctatatcctaacatagatgatgtatctatcttctgatctgtaggaggggaaaaggttgtacattttttgggcctagcagcaatctacatgtgatcccgaatccagccagcttctgttggtattgtgttgagaggtagtggaagtacaaaatgtctaggttagccactcaatggcctcatgttgtaaaaatgtagaatgtaatcatgtccatatacatggcatatatcggtccaataatccgattgtgttgcagtatttgatatgatatggaatggcgtttcaattgcagcgtgaatcaagca

SEQ ID NO: 152912 - DNA, 1355 bp, Zea Mays
ggccagcaagtcaggttcagggggccatggacagctggtacgcgtggctgtcgcggacggggctggcgccgtcgctggcgcacgagtacgggcgcctcttcagccggaacaagctggagccccgggacgcgccgcacttcgaccacgacctgctcaagagcatgggcatcgccgtcgccaagcaccgcctcgagatcctcaagctggccaggaagcaggacgccggcgcctcgtcgtccgcggcctcgcggctcgggcgcagggccaccaggtgcctgtcccggtgcgcgcgccggctggcaggaggcggcgcgtggagggccgcgtcgtcgtcggtcaccgtcgtcccgaggatctgcggcggcgaagacgccgtccgcgtcggagcagtgcagcggaagggcactggtagcggcaccaccaagaagatggtgctcatgatcaccgacggcggcgtcgccggaggagggtacggctacggcctcagaggccgtggcggcgcgaggctgtcgtcggcgtcgtcgcagaaggcgagtctgatgtttcatgacgggtaccaagacgaggaggaggagatgggagacgacgaggacgaggacggcggcgccggtgacggcgacatcaagtgggactccatgtttcaggacctcaaacccacgtgaggatgaagttctccgatctccagactccggctgctggagtttgatgttgctgcgtgagtgagtcggtcgtcatggctttgcttgtgggcttctggtgtgagagaattttaacaactctcctcatgctgtctgtcgttctcccttccctgagaagagaacgtaatgtcgaaaatgtgtattttcctccactggttttgcggtgttaaagcttgagcaagaaccataggtgcctgatcactgcaattgcaagaccatatttaaatgttgtcggggttttttttacttagttagtacagctagatcaacgtgcaaaatagattatgaccgaaggaaaagaaaaaaggtgtaagcatcggacaacgacatcgtcatagttattgctactgactttcatataaaggtactgactttaatatggagtcttttaagaagtctttaaaagtctaattaaaaaaaataaagagacagactctttgctaagagcccatctctacacaattattcatacatattgtttcttaaatatatttatgatctagtttctcataattgtatcacgaggtctcttaattgtctctgatccttaaaaatcgaaccagtcttaggggttgtacaagccctaacgccgcaacagttctgtagttgtttctatgcagcgcagttgaatgtggcaatagttctgtagttgttttt

SEQ ID NO: 152913 - DNA, 525 bp, Zea Mays
atggcaaatagcaaggatacacgcctacagcctccttcccctcctaccaccctttctgcgagtgctgtcagtgggaaccggggtaacatcctcaatgcgtccaattttcatcccagaacgagcaagagccctgagagcagactgagcaccaggtccaggggtcttggtcttgttgcctccagttgcacgaagcttaatgtgcagcgcggtgataccgagctccttgcaacgctgtgcaacatcttgagcagcaagcatagcagcataaggagacgactcatcacgatcagccttaaccttcatgccaccagtgatccgaaccaaagtttccctcccagacaaatcagtgacatgaatgaaggtgtcattgaaggatgcaaagatgtgagcaacaccaaagacaaactctccttcacggacagtgggtccaagggtaacgttctcctccttgggctccctggtcttcctcctcgacatggttgcgtggatcgacgggtgaccggagccgagctcgcctggggttga

SEQ ID NO: 152914 - DNA, 420 bp, Zea Mays
atggcggggtttggcggcggttccagggacagcgcgagcgggttcggcggtggtttctgggaacggcgtgcgcgacggattatgccgtgcccagtgccggcttgtgcggcggcgggtggccgggctctaggacggggcgtcagcgctcggggacggggatggggatggcgcggccgagaggtcgaggcgcggcggatttctgggctcgggggcgggacgtcggcactcggggtggggacgtgctgcagggatggcgcggtcatggtcgggctcggggctcgtcgaggctcagggatggggcgttggtgcttgcggacggggcgtcggcgctcggggacggggatggcgatggcggggagggctgagggatcggcggggatggcgcgtgggtcggcggggatggagggggtgttgttgtaa

SEQ ID NO: 152915 - DNA, 2359 bp, Zea Mays
gacagaagtaaattaaaaaatacaaatatgcaagagagatagagctcagatctctcgccacagttcaacgccccaatcctgcctcttagtccaacccggcaaccccaacctcttggtgcttcccaaattccaactcccaagcccttggtgctcaccaagattcatcttctccccccaatctcctccgcagggaaatagttgttttggtttccgactcccctgctgcatagcataggcactcattcctccctttcgacagcaagcaattttgtgttctcagttgtagattgggcgagattttccttccatccgtgggtgattcaggcattaggattcaatcggcacaatttgttcctgtatccgctcttgccaagaatttcccatctccctatttgctttctgatccatcttcgatgcgctaagaggcgagatgaatacgaattactcggctctcccattgacttccccctccatcgagctccaacccaacggggccaaatctagcgccgccgccaatggcgtcctcaacggccacgctaaaatctccaggcaggattcgttcttgggcgaggtggaggacgacggcggcggggccggtgagcacgacgagctgccgctcatcggcgacggccctgccgggccgccagaggggtccgacgtgaccgccgccgtgttcaacctcgcgacatccatcatcggggccggcattatggcgctcccggctaccatgaaggtgctcggagtcgccgctgggctcgtctcgatcctggtcatgggggtcctgtccgagatcaccgtcgagctgctcgtgagattctcggcccactgccgcgcgctatcgtacggcgaggtcgtgcacagggcgatgggccgcccggcgagcatcgtggcgcagatgtgcgtcatcatcaacaacgcaggggtcctggtggtgtatctgatcatcatcggagacgtgatgtcagggtcactgaagcacatcggcgtcatggatcagctggttggccatggcgagtgggataaccggaagctgctgatcttggtggtccttgtcatcttcctcgcaccattgtgtgcgcttgagaagattgactcactgagcatgtcatctgccgcgtcggttgcccttgccgttgtgtttgtggtggtgtccagcatcattgctttgatcaagatcgccgagggcaagatcagtatgccgaggatgggtccagatttcagctcccgtgcagcaatgctggacctgctcgtcgtgatacccatcatgactaatgccttcatctgccatttcaatgtgcagccgatctacaacgagctcaaggagaagacaccacagaacatgtacaaggttggcaggatcagcaccgtgctatgcgtggcggtgtatgccctgactgccctctcggggtacctcttgttcggcgaggacaccgagtccgacgtgctcaccaacttcgacaaggatctcgggataagattcagctctctgctcaactacattgtcaggatagggtatgtcatccacctggtcctcgtcttcccagttgtccacttctcgctgaggcagacagtggaggcgctgatcttcggggagctggcaacccctagcaggaagagaacattcacattgacagtggtgcttctagcactcatctaccttggctcgacaatgatacccaacatctggatggccttcaagttcaccggagctaccacagggctggcgttgggtttcatgttcccggccctggtggcattgaggctggacaaggaagggagtcacttgggacatggggagaggctccttgcgcttggtttgctggggctatcaattcttgttagcgtcatcggagtcgttggaaatgtatacaccttgaagagtaagtctgaatgacctccccaagatggcaagttgatagctagggttagaggaacctttgcatcatgaagacacatggtgtgttgctacaactggcatacagatcgtgtaaacatggtgactatacactaggtcaaaatgtattacattcgagagagcctcagcatcctatatccgttttttacttcagaggtttaactgtggaccattctcgagggaattctttttgtacttcggaccagattgttttcgatgtatcgatttcattgtgttcttacatgagggctctagagtcactctttgatcagcaaccaaaaaaaaagattggttctgatgtactttgaggagatttttgtttccctatgtcagtaagttggtctgtttgggggcatacaattcttgcactttttttatactaaaccttcatctaatgacgcacgatattgtctgccgtgttatgaaattcaagaagtttgcagc

SEQ ID NO: 152916 - DNA, 226 bp, Zea Mays
ctgttgttaacaccatgctttttacggacagggattgcagcttccctcttggtttcagctgaattgtgggcttcttggtttcagagcattgtattgattcatcgtctggggctgtaagattgcaacatgagtttgatgtagcaccctgacctgtgtcgtctaatcctgtcgtgtatgcataaatgcattgctgaataactcacctgatttttgcacttaatgtctc

SEQ ID NO: 152917 - DNA, 1980 bp, Zea Mays
gccaaactgactgattgtctgattgtgattgcggcagcaccgccgaccacgagcccgccgaaaggctcctccgcctgccgttccagggtgcactgccgccattgctcatctccccgtggtgcggaggtccacccgggcgccaattggtctcctctttcgttggcagactgagtggcatccaatcctgaatcaatgaggggctggggtttgctcgtgttatcgctacatgttctttcatgcctggttagtggcgttgcttctggtcgaacaagctcttatgtgcgcacagagtttccatctacagatatacctctagaaagtgaatggtttgctattccaaagggatacaatgctccacagcaggttcatatcactcaaggtgattatgatggaaaggcagttatagtatcttgggttactccagaagaacctgggccaagtgaagtattttatggcaaggagaagctatatgaccagaaagcagaaggaacaacaacaaactatacgttttacgattacaaatctggatacatacaccattgccttgtcgatggccttgagtataacactaaatattattacaagattggaagcggaaattcagctcgagaattctggtttgaaacgcctccagcaattgatccagatgcatcatacacatttggcatcataggtgatctggggcaaacatttaattctctctcaactcttcaacattatgagaaaactggaggtcaaactgttctatttgttggggatttgtcgtatgctgatagatatgaacataatgatggcattcgttgggattcctggggtcgattcgttgagcacagtactgcataccagccatggatttggaatactggaaaccatgaaatagagtacaggcctgatctgggagaaacttctgtattcaagccatatttgcataggtacatgactccatatttagcatcaaagagcagttctcctatgtggtatgctgtcaggcgtgcatctgctcacatcatcgtgttgtctagctactctccatttgtaaaatacactcctcaatggctgtggctgaagaacgaattcaagcgcgtggacagggaaaagacaccctggcttatcgttctcatgcattctcccatgtacaacagcaacgaggcacattacatggagggtgagagtatgagggctgctttcgagaaatggtttgtgaagtacaaggttgacttggtgtttgcagggcacgttcatgcttatgagagatcataccgcatttctaatgtcaactacaacataacgtcgggaaatcggtatccagtgccggacaaatctgctcccgtttacataacggtcggtgatggaggcaaccaggaaggacttgcttcaaggttttataacccccagccggattactcagcgttcagggaggccagctatggtcactcagttttacagctgaaaaacaggacccatgctatctaccagtggaatagaaacgatgatgggaatcctgttccagcagacaccgtaatgttccataaccaatattggacgagcagcacgcgccgcaggaggctgaagaagaaccatctccatctcgaggaccttgaggatttgatctccctattatagaaaaccgggttcgcaggacgcatgaactgtgtgtgggggaataatcgcaggttagcactgttgctagtgtgcccgcctctcttggaatggaagcagcagagccagctatcagactggcagtgaccaccacctcctcagctacctggttgcatgccacagatctgaaattctgaaatgctgtgactgtgactgtgaggtatgaaaaaacagtgtaaataacgcggttgcctccgtacatgtgtgacattttatacacgtgcaagaaagcatcggtgtccaccgttgtccgtgaaccattttcgcttgtatgcgcttgtgcccagtggaaatcctttccatctcgttggtttgctggtg

SEQ ID NO: 152918 - DNA, 129 bp, Zea Mays
ttaactgtcattatttactggacatgcttttttatcccctgagacatctggcaacatatgttaaaactgattcatttttgtgtactaatacaatctgttgtcaatcaaaggtgaaatggtatattctag

SEQ ID NO: 152919 - DNA, 3906 bp, Zea Mays
ttccagttccatgccgcatttcctttccatttctgttgctctcctctctttacccgtcgccgccctcgccctcgccaccacccgcacccgccgcgcggcccccattcgcctcgatttcgccggcggcgatgtacggcaacgacaactggatcaacagctatctcgacgccatcctcgatgccggcaagggcgtcgcggccgcggccgcgggcgccgtcaggggccggggcggaggctggggcggggaccggccctcgctgctcctccgcgagcgcggccacttctcccccgcgcgctactttgtcgaggaggtcatcaccggctacgacgagaccgacctctacaagacctggctccgggcgaacgcgatgcggagcccgcaggagaagaacacgcggctggagaacatgacctggaggatctggaacctcgccaggaagaagaaggagaatataaatttgaactgcatctatgtcctcctgtcctcctggatcccaagggaagagctgaactgtatagtttttctgtgctatgttaatttcgatattcagtttgagaaagaggaagccattcgcttgtccaaacaccgtttagagactaagaagccacggaatgatgctactgcagaaatgtctgaagatctttttgaaggagtgaagggagaagacgctggtgatccatctgttgcctacggtgacagcacaactgggaacacacctaggaccagtttatttgacaagctatacatagtgttgatcagtctgcatggcctgatacgtggagagaacatggagcttggccgtgattcagatactggtggccaggtcaaatatgtcgtggagcttgctaaagcattaagttcatgtcctggagtttaccgggttgatctattgacaagacaaatcttagccccaaattttgatcgtggctatggtgaactagatgagctgctggcttcgacaagtttcaagaactttagatgcgaacgaggagagaacagtggtgcacatatcatcagaataccatttggccccaaagacaagcatctagctaaagaaaatatctggcctttcattcaggaatttgttgatggtgcactaggtcatattgtgcgcatgtcaaaaactataggcgaagaaactggcagtgtgtgtccagtgtggcctactgtgattcatggccattatgccagtgcaggagttgctgctgctctattatctggagcacttaatgttcccatgttgtttaccgggcattttcttggtaaagataagctggaagagcttctcaagcaaggtaggcagacaagagaacaaataaatgtgacatacaaaataatgcgccgaattgaggcagaggagttgtctcttgatgcatctgaaataattatcgcaagcacacggcaagaaatagaagaacaatggaacttgtatgatggttttgaagtcatgcttgcgaggaagctccgtgcgttagtcaagcgtggtgctaactgttatggtcgttatatgcctcgtatggttataattcctccaggagttgaattcggccaattgattcatgattttgatatgtatggagatgaagataaccaatctccagccttggatccatctatttggtttgagataatgcggttcttcacaaatcctaggaaacctatgattttggctattgctcgtccatattctgaaaagaatattgcaacacttgtgaaggcatttggtgaatgccatccgttgagggaacttgctaaccttacactgataatgggcaaccgtgaggctatttccaaaatgaacaaaatcagtgcagctgttttgacatcggtgcttacattgattgatgaatatgatttatatggtcaagtggcatacccaaagcttcacaagcactctgaagttcctgatatttatcgtttagcagcaagaacaaagggcgcttttgtaaatgttgcttattttgaacaatttggtgtcaccttgatagaggctgccatgcacgggttgcctgttattgcaacaaaaaatggggctcctgttgaaatttatcaggttctggaaaatggtctccttgttgatccccatgatcagcatgcaattgcagatgccctctataagatgctttctgaaaagcagttttggtcaagatgtcgagaaaatggattgaaaaatatacaccaattttcttggcctgaacattgcaagaattacttgtcaaggatatcaagtcttggtccaagacatcctgcttttgcatgcaaagaagaccacaaggtgcctgtgaagtgcaggaagcatatatctatcattgctgtagactctgttaacaaggaagatttaattcaaattatcagaaactctgttgaggctacacgcactggaactatgtcaggttctacaggttttgtgctgtcaacttcactgacaatagcagagctacagtctgtaatagtacgcacaggcatgctcccgactgactttgatgcctttatatgcaatagtgggagcgatatatattatccattacagtctagtgatgtgccaagcaattcccgtgttacatttgcgttggaccataactaccgatcacatatcgagtatcgttggggaggagaaggtttaaggaagtacttagttaagtgggcttcttcagtagtagaaagaagggggagaactgaaaagcaagtcatctttgaagattcggaacactcttcaacatattgtcttgcatttagagtggttaatccaaatcatttgcctcctttgaaggagctgcaaaagttgatgagaatccagtcactgcgttgtcatgctctgtataaccatggcgccaccaggctatctgtaattccaatgcatgcatcgcgatctcaggctctaaggtatttgtctattcgctggggcatagagttgccaaatgctgtggtcattgttggtgaaactggtgattctgattacgaggaactgtttggaggtctccacaagacagtcatccttaagggtggattcaacactcctgcgaataggatccatacggtcagaaggtaccctttacaggatgttgttgctcttgatagctcaaatatcattggaattgagggattcagcactggtgacatcaggtctgctatgcaacaacagcttggtatacccacacaatgacaccaactgcaatctattttgttattaatagaaagaaagaaacagataacagaaatatacgatacaaatacttagtttccattctattggaaatgtccgattttgcctgccagtcatttaatgtatgtgtgtggtggtccctgcacgggttatgaatgacgttcccttggatcccgcactggagattttttggattgaagagcttgttaatggatacatccagctgtacagacggaacaaatttgttcaaatgttgatagtgaaaacattttgtggaagtattttcagcaaacaagcttccaatatacaaagttcacactttccatcgcttcaatgtggagcatctgattacagtgcaatcgtctaagggcttgtttgtatttacctcaattcatatgtgttgagatagattatatgtgttgagatagattgagatgtaacttaaactaatttacacaccaattcatcccaatatatgtggattaaggtgaatacgagagtgtccatataaggcctattcggttaggggttgattgagggagtttggagagaattaaatacctttcgatacaaatttatataggagaggatgtaatcctctccaatccccttttagcgcttgtttagatgttttagtattgatcccaatacacatgtgtttaaggggatagagaactaatttatactctaatccttctcaaatcatgtgtattacggtgaatactagagtttcaaacatagc

SEQ ID NO: 152920 - DNA, 1103 bp, Zea Mays
ccccagaattctcacgcggctcccgagccggcatcggtggaccttctagtgcacaaagaagcccaacccggcctccatgataagcccaccaggccaccgccgtcgccagtcgctacttccccagttcccctccgatcctcgtcgccgacgcatccacccgaaccctcctccgcgacctcgccgtcgccgcagccttggccatgtcgatcttcgagtataatgggtccgccgtggtggcgatggtggggaagaactgtttcgcgatcgccagcgaccggcggctgggcgtgcagcttcagaccatcgcgacggacttccagcgggtgttcaaggtccacgacaagctttacatcggcctctctgggctcgccactgacgcccagacgctgtaccagcggttggtgttcaggcacaagctgtatcagctgcgggaggagagggacatgaagcccgagacctttgccagccttgtctctgcgctcctctacgagaagagattcgggccatatttttgccagccagtcattgctggacttggagatgacaacgtaccatttatttgtactatggactgcttaggtgcaaaggagctggccaaggattttgttgtatctgggacagcatcagaatctttgtatggtgcttgtgagtccatgtacaagccgaacatggaacctgatgaactcttcgaaactgtatcccaagctctgaattcatcaatagaccgtgactgccttagtgggtggggtggctatgttctgattgtgacaccgactgaagtgagggagcatgtgattaagagcaggatggactaaatcatggccactatcactataattcttagctggtttccaatgcttagaccaatgttgtgtttggattctgaagtaacattgtatcatcacagctggtatgagaatgaacggttgttttatttacccctatcttgcaagacttatgcctggattccagctgaattgtggaatactgaattgataatagcctagatctgttgttctcttacagaaacgtgaatgaggttaacatgtgctgtatcgcattctatggttgcctatcgaagagagcatagatccctgtatgct

SEQ ID NO: 152921 - DNA, 164 bp, Zea Mays
cttttatgttgtggggaaatgtgtttttggcatgatttctacattagttacataaagacatgtagccatcaaaacaaagcaatcatgatgagagccggcacacgcaatgggcacatcgacaccatgaaggcacaaacgataaaaaaagaaacaaattagaaaaa

SEQ ID NO: 152922 - DNA, 2621 bp, Zea Mays
ccgcggcggaaccaaccgtggcaggggacggccaagggcggtcgctgccttgcctggcgttgacagtttgatgcgaccgcgggagcgtccgcccgaccgccaccgcgtccgcctcagctcccctcgcttccctctaatttccagcccagtagtagggagactagaatcgtcggcgcgacgccttggcagattcgtccgccccgatcccaccaccaccgtgccccgcgggtgacgtcggaccggcggcgatggcaacgtcggcggcggcgggatcgcgcaggaaggcgccgagccctccgaagcaccgccacgacggtacctcgccgctgcctctcggcatggactggagccctcccccgaagagatgggagggaaggaacaccatatggccacacaaccctcaaacaggttggagttactgtgtgatgatgccttcttggatcacccaaacacctgaaactggtgtcacagccgatagctttttgaaatctgtcgttttttacaggatacatgttggtatacaatcttcagaaggctttagctctatccatggaatcctcagaaggtttagtgactttctgaagctatcttctgatcttaagagcgcgtttcccagaaaagatgtcccatcggctcctccgaagcatgctttcttaagaataaattcaagcaggttgcttctagaagagagaaggcatgcattggaggagtggatgcagaagttactttctgacattgacttgtcaagaagtgctcctgttgctgcttttcttgagcttgaagctgctgcgcgttcatatttccaagaacggaatgggcgtccttctgaagtaggtccttctgcaaaaagcagtactaaatcttcctcacattctgatggacctgcttccggttctcttgctgagtccaatgaaataaatcaaggtcttactcgcggtagcagtctgacaggagcaactggtaatggtgtgcttggagaagctatcttagatcagtctgatgagcatgttagcagtgccttgaatcacaggaaagggaaccttgtattggaacatgatggtagaaatggttcggtagcgtcttataggggagttctttcagaagaggaccgtgattcttatcccggccatgctcggaaggactctgctgaaagtattgggagtgatttgagttctttaagaggaagtgaattatctgttccaggggctagtaattccctttgggatggtgctgtggtggatggacatgttagtcaaacagaacatcttactggtttagatatgcatcttttgtatgatatggatgcgcaagtcatccttccaaatgataaaaaacagaagttgactagacttttgatcacaatgcaacgaagaatagggacagcaaaaactgatatggaggatctcatagcacgattaaatcaggaaggagctgttaaagaatatcttactacaaaggttaaagatttagaggttgaattggaagccacaaagcaaaaaggtagagagacactgcaacaagctatcctggctgaaagagagaggattacccagatgcagtgggatatggatgagctccgtaggaagtactctgagatggagtcaaacctgaagaccgaacataatgagaaaactcgtgcggagtcagaaagaacaactgctagtggtgaaaatgaaacattacttgaagaattagaaatcaaacaaaaagaagttgagagtttgaaacagcaacttgtagaagctgaggcaaagtccaaagctgataagaaagttcttgtcaaagaggtcaagtctcttagaaactcccaaactgagatgaagaaagtgttgaatcagtatcttgaggagaagactgatttagagagagttattaatagagataaacagagatcagcacgtacaaagttatcccgagtaaaaattcttcatgagtgtcgactgctgcgggagcggctacaagactgcagtgctaaatttctagcagaagaacaagacaactttactattgatccatcatccttgcctgatgcattagatcttctagcaacatcagacaatagaatacgcctactcgttgctgaggctcaacttctagcacgagatgatgaacaaggctcttctgatggtggcgacgattctgatagtagatcctcattaactatgagcagtgaagatgcaaaagttaccgatgaagatactactaaaatgctttctgatctgctcattgacaatgcgcagctgagactacgcctcaatgctgtcatccgcaatgctgtaaatacttccgtgaagccagagaaagaaggtagtggcgaggttctccccaaaaagacagtccttaactggttgttggacagatgagagaaccaccaatatatatttatgtggattagttcttcaaacttacgcggcttgaccaaaattatatgatgagcgtacctatagtgccagggtagcatcaggaattcaggataaaaccttccctccatggagggaaggggagcctggaagcctttgtttctgttgcacgattttttatccacgcatggaagtcacggaggatggtatatatagggccacggctttggctcctaaaaaatgactgtctggcttctcttc

SEQ ID NO: 152923 - DNA, 1433 bp, Zea Mays
cggcgtcagcaacgcaacaacccaacccatcccgtcaggacccggaccagacaccaatcaagggcgtctcggctcatcacaggcgctgcggcaaccagggcacgcggcacggaggtcgattggccgaaggttgggggaccggcggtcgacaccccagccgtggatcgagtgcggagggggagaagcgtctatcccatgtcccgcgacggcggggaatagggcgacagctgcggcggggatcggctgcggcggctcgacgaggcggcggcggcggcgcgggtgggcggcggcaccatgtctgcggtagtctgtggcaagaggtcctcctccatcttcgccgacgagctcctcccgccatcccctacctcccctcactcctcccaccagccggcgcccaagaggtcccgccggtccccctcgcaccgcggcagctccgacggacaccgacgggaggcgctcgtccaccatctgcttttactcttccccgacatggatccacagttgcttgaaaaagctctggaagcatctggagatgacttggattctgcaataaagagtttgaatttgctacgcttagagtcagcagaggctatcttgtcatctactggtttcaatgaaaatggtcagcatactgcaattcagcctcctgttgaaggaattcctaatggtggtgtggatacgactacagaacatcatcctactgtagataattaccagacaagtaaaaatggctctgaatgggttgagctatttgtcagggagatgacaaatgcttctgacatagatgatgcacgggctcgtgcgtccagagctttggaggctttggagaaatcaattgtagagcgtgcaggagctgaagctacacagaaccttcataaggaaaacatgatgctcaaagagcaactgactgttgttctgcgagagaatgctgtgctgaagcgggcggttgccattcaacatgagcgccaaaaggagtttgacgagaggtctcacgaggtccagagcttgaagcaacttgttttgcagtaccaggagcaagttaggacactagagataaacaactatgccctcacaatgcacctcaagcaggctcagcagagcagctccattcctgggcgtttcaaccctgatgttttctgagcagagactaataacctacgaagataccttgttttacaactgcccctgaaatggggatacctgatgggtggattcaccgcccatgggtccaaaattttcaagttacggtttgatttaaacgcgttgctttcacccaattggatatcgatatattatgtgttccctttttcgggatatggtttacttcatccatggctatcatattcgtcaacgtaatatagaaatactactgtatcatattgcagttcagttttacttcagaaaagagttaaaagtttcggtccctaccttgc

SEQ ID NO: 152924 - DNA, 804 bp, Zea Mays
ttggcccaaaactaacttgcaaaattggccgtatcaggccctacgcgtctaccgcaagtagggccaaggacgacaaagaagaaacgaatccgaaacctctccaagaatccatcgcagccgccatcatgtccgccgccggtggccgaacccttggccggagcagcttctcccgcgccacatctaaactggtggcgtcctcatccggctctgctggcgttaagattggcccgaacggtgcttctttcgtctcctcgggcattcccgacctcgacagtgttttatcatcatcgtagttccacgcatcgtcaggcccgggcgccgcaggactaggaccgtccgcctccatctcttctgccggggcgtcgtcgaagaaggtgacgcacgtcgtcggcgaagaagaagaggccacacgcaccggtaggttcacgtcctcctgccgcagggtgcgagtggcatgcgcggacagcatggacgccacggccacggcgatggcgatcaggaggacaacactgaaggtggttcgcttgggcgccattgtttctccaaaacagttttgagcataggaattgtgttggggcttcagtcatgggcggtctagctttatatgagaaagtgtagttaattccagctccgtatctgtaacggacggagctatagttattaatggtgtttatttctagcggcatgcatgagttattattcaaccttctatgtctcataaattaaatccatgagttgatgaagctacgtgcattggtacggtgtaacttatttttcttcattacatgtgtatgtttattatta

SEQ ID NO: 152925 - DNA, 1755 bp, Zea Mays
ttggcccaaaactaacttgcaaaattggccgtatcaggccctacgcgtctaccgcaagtagggccaaggacgacaaagaagaaacgaatccgaaacctctccaagaatccatcgcagccgccatcatgtccgccgccggtggccgaacccttggccggagcagcttctcccgcgccacatctaaactggtggcgtcctcatccggctctgctggcgttaagattggcccgaacggtgcttctttcgtctcctcgggcattcccgacctcgacaggattttgggtggtggattccttcttggctcagttgtaatgatcatggaggacactgatgcgccacaccacctcttgcttcttcggtgcttcatgtctcagggtgttgtgcacaaacaacccctgctcttttcaggagctatgaaagagcctgtgttgttccttggtacactacctgctccagtttcatcttcaaaggaggatggacgacacagagcaatgggtcctgcagcaagtagtgatggacgagcaaatgatgagggtttgaggatagcttggcagtacaagaaatactttggggatgacaagacttcgcgagctgaacataaagacaataaacaggaattcagcaatgattttgatttgaggaagcccttggaaaggcatttacttaatggacagaatattgaatgtgtaagcactcaagatgctgacacactcagcagcctccaggattgttgttctgctttcgtatccaagcttccaagaaaagatggtgggagttcaactgctgggagaattgctatacaatcactctgtgcaccgcagtgcagatactttgaaaaggactgggacatggtctcatttatcagatcactgaaggccatggtgcgctcatctaactctgttgctgttgtaacatttccgagtacagttctgtcaaattcgttctgtaagagatggcagcacctggcggatacactgctgtccatcaaagcaattccagatgaggacaaagacttggcaaaactcctcacaggatatcaagatatggttggttttttgcatgtccacaaggtggcacaacctaacagtcaggtccctgtgatcttagaggcatccacgctctctctaaagctgcgaaagaggaggtccctggtcttagaacggttgaatcaggctccagtcgatgggtcaagtgggccttcgtctgctgcatcaagcagttgctcatcgcaaggttcacagcttgatttctaattggtatggctggatttccttgagaggagctcagaagtgctgtgtactagttactcgtggcagaatgcagcttttggaggtttaggttttagataggagtcagtttgatggttcactgttaaccatcctccctcatgtaaccccactttcaacagtattagaaccgtcgaaacttgtatatttttcgggtagttgtccaagtttgttgaactgccttgaacaggttacaaaagtgtggggttttcttgttttgtctgttccaaatgatcatgttttttgcgtagaacggaaatggttgagttgctgatgcaactgaagaattgttggtcttcacgaagatggagctctgtcagacaatgcagcaatcttgctatgttaatgtcaaagatgcagaaggcaattgtaacaacgggaagtagatttttgtaatactggcatcggcattcttgagcttcatggaaatggcagcgccaagcacacaattgcatttgtggcattataa

SEQ ID NO: 152926 - DNA, 1715 bp, Zea Mays
cgtctaccgcaagtagggccaaggacgacaaagaagaaacgaaaccgaaacctctccaggaatccatcgcagccgccgtcatggccgccgccggtggccgaacccttggccggagcagcttctcccgcgccacatctaacctggtggcgtcctcatccggcgcttctggcgttaagattggcccgaacggtgcttctttcgtctcctcgggcattcccgacctcgacaggattttgggtggtggattccttcttggctcagttgtaatgatcatggaggacactgatgcgccacaccacctcttgcttcttcggtgcttcatgtctcagggtgttgtgcacaaacaacccctgctcttttcaggagctatgaaagagcctgtgttgttccttggtacactacctgctccagtttcatcttcaaaggaggatggacgacacagagcaatgggtcctgcagcaagtagtgatggacgagcaaatgatgagggtttgaggatagcttggcagtacaagaaatactttggggatgacaagacttcgcgagctgaacataaagacaataaacaggaattcagcaatgattttgatttgaggaagcccttggaaaggcatttacttaatggacagaatattgaatgtgtaagcactcaagatgctgacacactcagcagcctccaggattgttgttctgctttcgtatccaagcttccaaggtgagaaaagatggtgggagttcaactgctgggagaattgctatacaatcactctgtgcaccgcagtgcagatactttgaaaaggactgggacatggtctcatttatcagatcactgaaggccatggtgcgctcatctaactctgttgctgttgtaacatttccgagtacagttctgtcaaattcgttctgtaagagatggcagcacctggcggatacactgctgtccatcaaagcaattccagatgaggacaaagacttggcaaaactcctcacaggatatcaagatatggttggttttttgcatgtccacaaggtggcacaacctaacagtcaggtccctgtgatcttagaggcatccacgctctctctaaagctgcgaaagaggaggtccctggtcttagaacggttgaatcaggctccagtcgatgggtcaagtgggccttcgtctgctgcatcaagcagttgctcatcgcaaggttcacagcttgatttctaattggtatggctggatttccttgagaggagctcagaagtgctgtgtactagttactcgtggcagaatgcagcttttggaggtttaggttttagataggagtcagtttgatggttcactgttaaccatcctccctcatgtaaccccactttcaacagtattagaaccgtcgaaacttgtatatttttcgggtagttgtccaagtttgttgaactgccttgaacaggttacaaaagtgtggggttttcttgttttgtctgttccaaatgatcatgttttttgcgtagaacggaaatggttgagttgctgatgcaactgaagaattgttggtcttcacgaagatggagctctgtcagacaatgcagcaatcttgctatgttaatgtcaaagatgcagaaggcaattgtaacaacgggaagtagatttttgtaatactggcatcggcattcttgagcttcatggaaatggcagcgccaagcacacaattgcatttgtggcattataa

SEQ ID NO: 152927 - DNA, 621 bp, Zea Mays
atgccgctcccgccgtcgctcgagctggacctattccaccgcgcggcagccgtggtcacgggcgccatcgtcgtatgcttccctttcggcagcatccccgttacgcacccgtactatttcttcgggcaggccgcagctgcagccaccgcggaagcagggtgtcgtgtgctcaagctggcgccgactgtcaccgtggcgcagagcggctcggactgttcgtcggtagtggatctgtcgccgtcgccaccaaccgctatgtcggcgaggaagaccgccgtgttcgatctcgacttgaactgctcaccgccgatggaggcgaattattttctaaagggaaacatatctcaattttctgggtttgttgggacagacaatcaactaggtgctttgattctaaaaatcacatttttaagtgaaaggtatggatctcgctctcattactcaagcacaaggagtgtggactcaagtgatgctgaaaaccctgggcttgatgatgtagatgctgctaacatgcacatggagattagtagacgcatatacggagagaggttggaaacaagtgatcgtgatgttgacatggaacaaaggtgggcatgtgtctatgctttgatatatgaatga

SEQ ID NO: 152928 - DNA, 714 bp, Zea Mays
atgatgacaaagctagatgctaggaagtttgcacgtgccaagaaggagaccatccatcttggtctcaccaagtcaaaccatatttgcatgagggggacgagagagagcaccgaaggggagcgcagacttactggtggcgccggtgatgaggatgataacggggcggcagccctcttgaacccagatggacggtgttcctacgggtgcctcaggcgggtgccagcgcgttgggacagggccgggcgagagaagcgggaggacgcccacgactgcaatgccgtggagggggaggggcgatgcttgcgcgagcccgcggctgtgatgggggcgagggatgcgtcttacgaggcgagagaagctgcgatgccgggggaggggcggccagatgctaggaagtttgcacgttccaagaaggagaccatccatctcggtctcaccgagtcggaccatatttgcatgagggggacgagagagagtaccgaaggggagcgaggacttactggtggcgccggtgatgaggacaataacggggcggcggccctcttgaacccagatggatggcgttcctgcgggtgcctcgagcgggtgccagcgtgtcaggacagggccgggcgagagaagcgtgaggacgcccacgactgcgatgccgtggagggggaggggcgatgcttgcgcgagcccgcggctgtgatgggggcgagggatgcgtcttag

SEQ ID NO: 152929 - DNA, 2351 bp, Zea Mays
gatctttcgctttccttacccagttagcgttcctgcttgatacactacgactgcagattctttggcagaccgctaccaagtgcaagtgtgcaacgcacacacatcactcacagtctcacggtgtctctgtgcgcgcgcgtgggacacaggagggagagagacacagagaggggggacgatcagctctagctcagctggtatcgtctaaactgcataaaaggggaggaaaaaaagttgcaatgatgcatcccggcgcatagatagagagagagaagagagagccccgactcgagagccaagaacgccgtgtgctgtgtttgtgtgcatctatctccgtacacgcacgcacgcacgcaccagctagcacgaccgccatggccgccaccaggagagcattcttccacagcgccgtcgacggcattgcgcgcgccgggccgggggaggccgagctgctgccggcgccgccgcaggtcgggcgaccggtggaaggcgccagcagcatggtcttcggcttccccgtgccgcggcccacgatgccggacagccggccggccgccgtcacccagcagttctttccgcccactactacggcggcgcagcaggcgacgatggaggagcaatgccacgtgcccgccggtagcgcggcggagcagtgggtccggtcgtcggcgtccaggaagagccgccgcggcccgcggtcacggagctcgcagtaccgtggcgtcaccttctaccgccgcaccggccgctgggagtcccacatctgggactgtgggaaacaggtgtacttgggtggattcgacacggcgcaggccgctgcgagggcctacgaccaagccgcgatcaagttccgcggcctgaacgcggacatcaacttcaccctggacgactacaaggacgagatgaagaagatgaaggacttgagcaaggaggagttcgtgctggtgctccggcggcagggcgccggcttcgtcaggggcagctccaggttccggggagtcacccagcacaagtgcggcaagtgggaggccaggatcggccagctcatgggcaagaagtatgtgtacctgggcctgtatgacacagagacggaggctgcccaggcatatgacaaggctgccatcaagtgctacggcaaggaggcggtgaccaacttcgatgcccagagctacgacaaggagctccagtcgcagccctgggacggcgagctggatctcgagctcggtctgggctgcgccagcagcgatccgtccacggtcgccgtcgaggcgttcagccccgcgacgagcagcagtagccgcaagcagaggacgatgacgctgacgctcggtctgccggaggaggaggaggagacgggcgccggctaccctcacagcagcagcagcaggcgtcccccggcgcctgctgccggcatgttcgggcgcccggctgacgaccacgtccacgtagcaccgccgtcacaccggcaatggcagcagcagggacggcacgcagctccagatggtacgccgctcgaccgatcgtaccatcactggtcgattcgattcgatccatgacgatgaacaacaaacagcacatgcatgcatgctaaccaccgatcgttgcttcggttcggttcccttttttgtgcgcaaacacgtactggcggccggacgacctagcagcggcgcctgagcgacgagcggcagagccagcagatcggcagcggtggggccggggcgcgcgctggcccatcgccagcggcagcggcattaactgggactgggcgccgccgtacgccaccgcccgcgccggcaccgacgacgacgacgccagcagcgccgccgctgcagcatcatcaggattcccactgtggcagctgggtgcggcgtcgtccaggtccagctggcccagccgctgagcctttcctgtcgtcccgcgccagcaacagtgacgctgctgggccacgtactgacggcgactggtgacctgctgaaaccgccgccggcctgtttcccttttctaggtaaaagcagtggcagaggggcgagctagcgacagcgtgcctcgtcatccatcgtccctgcgccgtggctggcggggtgggaaaaaggtctgagcagttttgagcgtccggaggagctcgacgatttcctgccctcgaatagtcacttggggtggccactagttattatttctttccttccccctcgttgattctgctacccattatagcttctgtatctagctacatgcatgatgctgctctagcgctgttggacgttgatggcacggtgtacggatatgggacagggttcgtgtgaccccatgtccactgctaggcctgtttccaaatggaatatttctgcagt

SEQ ID NO: 152930 - DNA, 2128 bp, Zea Mays
gcatcccggcgcatagatagagagagagaagagagagccccgactcgagagccaagaacgccgtgtgctgtgtttgtgtgcatctatctccgtacacgcacgcacgcacgcaccagctagcacgaccgccatggccgccaccaggagagcattcttccacagcgccgtcgacggcattgcgcgcgccgggccgggggaggccgagctgctgccggcgccgccgcaggtcgggcgaccggtggaaggcgccagcagcatggtcttcggcttccccgtgccgcggcccacgatgccggacagccggccggccgccgtcacccagcagttctttccgcccactactacggcggcgcagcaggcgacgatggaggagcaatgccacgtgcccgccggtagcgcggcggagcagtgggtccggtcgtcggcgtccaggaagagccgccgcggcccgcggtcacggagctcgcagtaccgtggcgtcaccttctaccgccgcaccggccgctgggagtcccacatctgggactgtgggaaacaggtgtacttgggtggattcgacacggcgcaggccgctgcgagggcctacgaccaagccgcgatcaagttccgcggcctgaacgcggacatcaacttcaccctggacgactacaaggacgagatgaagaagatgaaggacttgagcaaggaggagttcgtgctggtgctccggcggcagggcgccggcttcgtcaggggcagctccaggttccggggagtcacccagcacaagtgcggcaagtgggaggccaggatcggccagctcatgggcaagaagtatgtgtacctgggcctgtatgacacagagacggaggctgcccagcatgctaatcagggcatatgacaaggctgccatcaagtgctacggcaaggaggcggtgaccaacttcgatgcccagagctacgacaaggagctccagtcgcagccctgggacggcgagctggatctcgagctcggtctgggctgcgccagcagcgatccgtccacggtcgccgtcgaggcgttcagccccgcgacgagcagcagtagccgcaagcagaggacgatgacgctgacgctcggtctgccggaggaggaggaggagacgggcgccggctaccctcacagcagcagcagcaggcgtcccccggcgcctgctgccggcatgttcgggcgcccggctgacgaccacgtccacgtagcaccgccgtcacaccggcaatggcagcagcagggacggcacgcagctccagatggtacgccgctcgaccgatcgtaccatcactggtcgattcgattcgatccatgacgatgaacaacaaacagcacatgcatgcatgctaaccaccgatcgttgcttcggttcggttcccttttttgtgcgcaaacacgtactggcggccggacgacctagcagcggcgcctgagcgacgagcggcagagccagcagatcggcagcggtggggccggggcgcgcgctggcccatcgccagcggcagcggcattaactgggactgggcgccgccgtacgccaccgcccgcgccggcaccgacgacgacgacgccagcagcgccgccgctgcagcatcatcaggattcccactgtggcagctgggtgcggcgtcgtccaggtccagctggcccagccgctgagcctttcctgtcgtcccgcgccagcaacagtgacgctgctgggccacgtactgacggcgactggtgacctgctgaaaccgccgccggcctgtttcccttttctaggtaaaagcagtggcagaggggcgagctagcgacagcgtgcctcgtcatccatcgtccctgcgccgtggctggcggggtgggaaaaaggtctgagcagttttgagcgtccggaggagctcgacgatttcctgccctcgaatagtcacttggggtggccactagttattatttctttccttccccctcgttgattctgctacccattatagcttctgtatctagctacatgcatgatgctgctctagcgctgttggacgttgatggcacggtgtacggatatgggacagggttcgtgtgaccccatgtccactgctaggcctgtttccaaatggaatatttctgcagtaccatggc

SEQ ID NO: 152931 - DNA, 510 bp, Zea Mays
atgcagggctgcgggggaaactcggctgcgaggagctgcgccgtcgggggttggacatgcttcagccgaagtggagggggtggtgctgtccacggttgggagagggaaacaggggcgctggtcatgggaaagagcagcgaaggggcgagctcggagaggggcgctgcgcagggctgctgttttttggatcgaagaaccgggcgcagggaactcggacgccatggacagggaagtgcgcaggcttgggcgccatggctgagtgcgcgaaaatctgggcgtcgtccatgggaagtggagctcgcgcccatggaggggaggacagggagcagcagaggcgtcgaggtagagggaaagctacagggggtggcgccatggggagggagagcagaggcgccgctggggaagaaggccccctgctgtagccgctcgccaaaagaggagcagggagcgtcgctgggaaagggcgccatggctggggcgtacgcaggggccgtcgggtcctgggcgtag

SEQ ID NO: 152932 - DNA, 3715 bp, Zea Mays
ccaccgcctatatccgcgttccccccgggcgatcgatcgatcgcggctaacctcgccgccgcccccatcgaggcagccatggcggagatggccgaacggtccgtcgcgggcgagctgccggaggagccgcggccgccgcacggggaggaggacgacgaggaggaagaggagggggacgtgtgccggatctgccgcaaccgcggcgacgaggaccacccgctgcgctacccgtgcgcctgcagcggaagcatcaaattcgtgcaccaggactgcctcctccagtggctcgaccatagcaactcgcgccagtgcgaggtctgtaaacatgcattctccttctcacccgtgtacgctgataatgctccgacaagactccctttccaggaactgattgttggtgttggaatgaaagcatgccatgtgtttcaattcatccttcggcttgcctttgttctctcagtttggctcatgattatcccattcattacctattggatttggcggttaacattggtgagaagtattggtgaagcgcaaaggctgttcctcagtcacatcagtgctcagttgattcttagcgattgccttcatgggttccttctctcagctatcattgtccttatatttcttggagccacctcattacgggactacataaggcatttgcgtgaacttggtggacatgatgctgagagggatgatggaggtcgtgaaaggcatggtgctcgggctgtcaggaggctagctggtcctaataatagggttcctgcagatggaaatattgatgaattagcagaagcccaaggaatcggtgctggtgaacttttgaggagaaatgcggaaaatgttgctgctcgattagaacgacttgaggctcaggtggagcagatgcttgatggtctggatgatgctgatggagcagaggacgttccttttgatgaacttgttggtatgcaaggccctgtcttccacttggttgagaatgcaataacagttttggccagcaatgctatattcctcattgttgtgatctttgttccattctcattgggaaggattgttctgtactacctatcatggtttttctcttcggcttctactcctatgctggcaaaaatgatgcccttcacagaaacagctatttctatagctaatgatacattaaagagcgcacttaatgttgtgaagaatttttcttctgacagtaataatgaaggtgttatcgggcatgtgattgaggttgtaactcaatccttgaagataaatgccactggtctgagtgtaattcaagtcactgggaagagcagtctgatgaaaggaacagcaattggctcatcttatctttcggatctgacaactcttgctgttggatacatgttcatcttctgtcttgtacttttgtacatcggatcactggctttacttcgatatgccaggggagaacgtttcaccatcggaagactctatggtatagctactatattagaggcaatcccttctctgtgcaggcagttctttgctggaatgaagcatattatgactatggtcaaagttgcattccttctggtcattgagcttggtgtatttcctctaatgtgtggttggtggcttgatgtttgcactctaaagatgctgggcacaacaattgcgcagaggattgaattctttacagtgtcacccttagcgagctcatctatccattggctagttgggattgtgtatatgctccaaataagcatatttgtcagccttcttcgaggggttctgcgcaatggagttctttattttctgcgggaccctgctgatccaaattacaatccatttagggatttgattgacgatcctgtgcataagcatgcccgacgagttcttttgtcagttgcagtgtatggaagtttgattgtgatgttggtcttcttacctgtaaaactggccatgagagtagctccttcaatttttcctctggacatcaccatatttgatccatttactgagattccagttgatgtccttctgttccaaatatgcatcccatttgctattgagcatttcaagcctcgtgcaaccattaaatctcttctgcatcattggtttgctgtggttggttggggccttggcttaaccgatttcttgctgccaaaacctgaagaaaacggtgggcaggaaaactggaatggcagggcagaaaggagagacaggggacatggtgggcaggaaatggttgccccacaggttgaacaacttatgatacaacatgttgccgcagaacataatgacaggggaaatgcaaatgaagccaatgatgtcactgaagaatctgatgtagatgatcagggagactctgagtatggctttgtgcttcgcatcgtgctcctgcttgtactggcatggatgacactactaatattcaatgctggaatgatagttattcctatctcgcttggccgtcttgtttttgagggtgttccgcgcctgccaatcacacatggcattaagtgcaatgatctgttctcctttagcattgggtgctatattctctagagtgttgcagctgggaccagatatgccattgattacatcagatcacgacagctgggatttctggttcaacagatctgcaagtggtgctcaattgttttgaagagctcttttctcttgtcaatatggatctttgttattcctgtgctgattggacttctttttgagctgctggtcattgtacccatgagggtgcctattgatgagagccctgtcttcttattgtaccaggattgggcactggggttaatattcttgaaaatatggactagactggttatgttggatcagatggcacctttggttgatgaaagctggaggtcaaagtttgagagagttagagacgatggcttctcccgtttaaggggtctgtgggtcctccatgaaattataatgccgattctcaccaaactccttaccgctctctgtgtcccatacgtccttgcaaggggcatcttcccggtgctgggttacccactcatcgtgaactcagcagtgtatcgctttgcctggcttggatgcctgatcttcagcgcactcttcttttgtggaaagaggttccatgtctggttcaccaacctccacaactccatcagggatgaccgctatctgattggccgaaggctgcacaactttggtgaggacacacccgagccgagtgaatctggagcaactatagggtcagatgaccaggaccaagctcttgtcctgcgagatcaggaagaggaagtggggttgaggatgaggcgcaataatatgcgtgcaaaccaacaacccaggctggctttttaagaaggagatagttttggatatagagctcataaccatggtataagctttggcctgcagcttctgcttgtgctttgtaatgggcgttgtagagggggtttatgtggttgcgataggaaagagtctaaggactgttctacgacaagtctgggagaaagctaaagtggttagtgattataagaactggtggcaactccctttcctgtggtagtcttggctgactgtaaatatcgtttgacagacactaccaggccaactcagtttgttgtttcttgtaatgactaatgaattaagttgaactgttgggtagatataaggtactaggttgtatgacttccaccacttccaccattttttttgtcatctttgtttcttggcaaccgcagta

SEQ ID NO: 152933 - DNA, 1624 bp, Zea Mays
agattacgggcccgagccatcgtcatcgagacatcgaccgactccgactccgactccatccacggtctccttccgagatccctcttctcctcccgcccccgcctgaccgcctccctcctcactccggccccttccgcatgtcaatccatgggctgatactcgaagtcagagtcaccgggtgccggaagctgcgggacacggagttcttcacccgccaggacccctacgtcgtcgtcgagtacgccaccaccaagctccgcactcgcacctgcaccgatggaggaagaaacccaactttcgatgagaagttccatatacccctcattgaagggctccgcgagttgaatgttattgtgtggaatagtaatacgttaactcatgatgacttcattggaagcggaagagtatatctgcacaaggtgctgacaaatggctatgatgactcctcatggccgcttcaaacacgccacatgaggtatccctatctcatataacttgagtgcactggcctcatgaactttctgacagtgggaaatttacagatctgctggggaagtgaagctcattatgcatgttgatgtctcagcaatgaagaacaagatgggtagaagtgtcgccgcatcaagtgcacatcctgttcctgcactttcaatgccagccccatctccaaccccagccccagccccatctccagcttcggccgcaacccctgctccagcaccagcactagcatcagcgattccatacacgggagtctcaccttcatatccaccggtttcagcatatcctggtgcaaccgcataccctgcttacccaacttctagccatgcaccatataccactgctgaatatccaccacctccgcagcaaccataccaacccccacctgctggataccctccatcctatccaccacaaccatatgagcaatcttacccaccgcaaccatatgagggatcttacccaccacaaccatatgagcgatcttacccaccgcaaccatatgggcaacaaccatacccacccccgccagcagcagagtcgccgtacccaccagcgccttaccctggtacttatccaccaagaccctattgatatagcagcgtcagtaatgatctcaggtagaggcatcaaaagcaacaaacaacagccttgatgctatgtgatacgcgcctcagcgtggattctttatttctaattatttggttatgttcctaacaaaaaatagtaccaaccgtcactgagttgttgcacatctatcacaaatcagtttaaggtcagattccaatcgattggtgacaaattggagctgatggggtttcgttaagtgcaacggatggaaatgtattccttgatcagatcgtgtcaacagctcagtgaccagtcatatgtacaataggtagcttgcagattgtgtcagtgaaatccatcctatattgctttgcagtggtggtttagagaccagaactagcttccttcttctcctatcttggaatcacatctgactgatctgtgaccacacaattgtacatgtagtagggtaacctgtgaagtctgctgcttttccaaaacaacaataaatctgaatgtatttgtaacagtcaataaatttgcttcggtggtg

SEQ ID NO: 152934 - DNA, 1557 bp, Zea Mays
agattacgggcccgagccatcgtcatcgagacatcgaccgactccgactccgactccatccacggtctccttccgagatccctcttctcctcccgcccccgcctgaccgcctccctcctcactccggccccttccgcatgtcaatccatgggctgatactcgaagtcagagtcaccgggtgccggaagctgcgggacacggagttcttcacccgccaggacccctacgtcgtcgtcgagtacgccaccaccaagctccgcactcgcacctgcaccgatggaggaagaaacccaactttcgatgagaagttccatatacccctcattgaagggctccgcgagttgaatgttattgtgtggaatagtaatacgttaactcatgatgacttcattggaagcggaagagtatatctgcacaaggtgctgacaaatggctatgatgactcctcatggccgcttcaaacacgccacatgagatctgctggggaagtgaagctcattatgcatgttgatgtctcagcaatgaagaacaagatgggtagaagtgtcgccgcatcaagtgcacatcctgttcctgcactttcaatgccagccccatctccaaccccagccccagccccatctccagcttcggccgcaacccctgctccagcaccagcactagcatcagcgattccatacacgggagtctcaccttcatatccaccggtttcagcatatcctggtgcaaccgcataccctgcttacccaacttctagccatgcaccatataccactgctgaatatccaccacctccgcagcaaccataccaacccccacctgctggataccctccatcctatccaccacaaccatatgagcaatcttacccaccgcaaccatatgagggatcttacccaccacaaccatatgagcgatcttacccaccgcaaccatatgggcaacaaccatacccacccccgccagcagcagagtcgccgtacccaccagcgccttaccctggtacttatccaccaagaccctattgatatagcagcgtcagtaatgatctcaggtagaggcatcaaaagcaacaaacaacagccttgatgctatgtgatacgcgcctcagcgtggattctttatttctaattatttggttatgttcctaacaaaaaatagtaccaaccgtcactgagttgttgcacatctatcacaaatcagtttaaggtcagattccaatcgattggtgacaaattggagctgatggggtttcgttaagtgcaacggatggaaatgtattccttgatcagatcgtgtcaacagctcagtgaccagtcatatgtacaataggtagcttgcagattgtgtcagtgaaatccatcctatattgctttgcagtggtggtttagagaccagaactagcttccttcttctcctatcttggaatcacatctgactgatctgtgaccacacaattgtacatgtagtagggtaacctgtgaagtctgctgcttttccaaaacaacaataaatctgaatgtatttgtaacagtcaataaatttgcttcggtggtg

SEQ ID NO: 152935 - DNA, 3270 bp, Zea Mays
cagggcacctcaaaactggggaggattcacggccgttccgggcacctgtctactctgtgtgactgtgtctgtcctgtcgtcgcgggccgcagcctcggcttcccagttcccacaccccacgcggccacccaccccacccgcacccggcgcctcgcttctttattccgctccgctcagcccgcccgccagagcatcacatgccattgccaacctctcactgctcgtaccgcctctccactccacctgctgcccctgcgccctgaccgcgaggggagggcgctgagctaccaaggaagccaaccggcgcggaccgggtcggtcaacgcttgctgtgcacccgaccgaggaagctaggaggatcgagcacggacatgttggcctcggcgtcggtgccggccgtctaggaaaagctcgcccgcagaggtaatggatgggcggaggaggggcggcggagctatggcgtggctgctgctgcttctcgcctcgctgtgcaccggcgcgtgcgggctcaatgcggacggggtgctgctcatgtccttcaagaacacggtcaccgcggacccgctgggcgcgctggccggctggagctacagcgacgccgcgccgtgcgcctggaacggcgtcatctgcaacggcttcccgcaggacgacaccgcgccggcggcggcgaacgtgacctcggcctccgccgacggcaacggcaccgcgacggtcgcgcgcaacgccaccggagcaaccgcggcggccggcctcggcgcgtcgctggcggcggccacggtgtcgcgggtcatcagcctcgtcctacccaacgcgcagctctcggggacgctgccgcccgacctcggccgcgtcgagcacctgcgccacctcgacctctccgggaacggcctcagcggcagcctgccgcctacgctgctcaacgccaccgagctccgcgtcctctcgctcgccgggaacgcgctgtcaggcgagctcccggacgcggcggcggcctatgcgcgcggcctgcagcagctcaacctctcgggcaacgcgctcgcgggccgcctccccgccgcgctgtgcaggctgccgagcctccttgcgctggggctcgccagcaaccacctcgccggtgagctccccgtcggaggcctcgggacgttggagcttgttgacctgagcgacaacgacttcaacggctcgctcccgtcggacttcggtgggaccgcactccgcctcctcaacgtttcgtccaacaagctcgccggcgctgtgccgaccgagctggccgccgtcgtccccgcgaacgcgacggtggacctgtcgcggaacaacttcaccggcgcgatcccacaggccggcccgtttgccgcgcagccggcggcggcgtacgagggcaacccgaacctgtgcgggccgccgctgaagcaggcgtgctcgatcccgtcgtcgctgtcgaagcctcccaacgccaccgactcgccgccggcgttcgcggccatccccaagaaccccgctcgcgccccgccgcaagcccaggggcagccgccgagcgagcaggataagcttcgtcccgcgtccattgtggccatcgtcgtcggggacatcgccggcgtcggcctcctcttcatgctgttcatgtacgcgtaccacgtcaggaagaagaggcggcagcgtcgggagcaggacccgacgccgccgctgcacctgcagcagaagagcgcgcgaggtttcgacggcggcgtagtcaagacgctcgacatcgccggaggcaaagaagagaaggcgtccacgtcgacggggtgctgcattggccgtaggaacgacagctcggacagctccgagtactccgcgtcgtcggacggcgagtcctccgacgaggagggcctcaagaagaggggaagcttcatcggccggagcaccccgcaggagcacggcagcaagaagcacaacctgccccagcagcagcagcaggcgccccccgcgcctgcgacgctggtgacggtcgacggcgacggcgagctcgagatggagacgctgctcaaggcgtcggcctacatcctcggcgccacgggttccagcatcgtgtacaaggccgtgctcggcgacggcaccgcgctggccgtccggcgcatcggcgagagcggcggcgccgaaaagctcaaggacttcgaggcgcaggtgcgcgccgtcgcccggttccgccatcccaacatcctccggctgcgcggcttttactggggcgccgacgagaagctcctcatccacgactacgcccccaacggcagccttgccaacatcgcattcagcaggcgcttcgggtcgtcgtcgccgctgcacctgagcctggaggcgcggctgcggatcgcgcgcggcgtggcgcgagggctggcgtacatccacgagaagaagggcgtgcacgggaacctgaagccgagcaacatccttctgggcggcgacatggagccatggatcggggacctgggcctggaccggctggcgtcgggcgaggcggcgccgcactaccgcgcgggcgcgtcggcgcggctgttcgggagcaagcggtcgatgcactcgacgagcagcctgccggacctgtcacagatgcccgggccgggcgcgagcccgtgcgggtcggcgtccgcggcggccgcggccgccagcgccgccccggcgccgtaccaggcgcccgagtgcctgaagaacctgcggcccacggccaagtgggacgtgtacgccttcggcatggtgctcctggagctgctctccgggcgggtctactcggaggtggagctgtgccagtggcacgcggggctggtggccgccgaggagcacggccgcgtgctccggatggccgaccccacgctccgcggcgaggccgacggccgggaggacgcgctgctggcgtgcttcaggctcgccttcgcgtgctgcgccatggcgcccggcaagcggccctccatgagggacgccgccatggtgctcgagcgaacggcggcggcggcggcgcccggcgccgccgcgagcagcagcggcgccgctgtgccctgagggggaaaaaacaactgaccttgtagcgcttggagccgttactgatcgcaataatcttactgcaagtgcacggacggtggtggcggcgtcggcgttgatcgccggtggcgagcttgtgtggtagggcgtgtacgtagatctgttactgattttggaggtgctgcgagaattaattaacctactaatcatctgtgtttgtgattgtggatttgaaagcgatgcatattcctttttttt

SEQ ID NO: 152936 - DNA, 1356 bp, Zea Mays
agcgacaacgacttcaacggctcgctcccgtcggacttcggtgggaccgcactccgcctcctcaacgtttcgtccaacaagctcgccggcgctgtgccgaccgagctggccgccgtcgtccccgcgaacgcgacggtggacctgtcgcggaacaacttcaccggcgcgatcccacaggccggcccgtttgccgcgcagccggcggcggcgtacgagggcgccgaaaagctcaaggacttcgaggcgcaggtgcgcgccgtcgcccggttccgccatcccaacatcctccggctgcgcggcttttactggggcgccgacgagaagctcctcatccacgactacgcccccaacggcagccttgccaacatcgcattcagcaggcgcttcgggtcgtcgtcgccgctgcacctgagcctggaggcgcggctgcggatcgcgcgcggcgtggcgcgagggctggcgtacatccacgagaagaagggcgtgcacgggaacctgaagccgagcaacatccttctgggcggcgacatggagccatggatcggggacctgggcctggaccggctggcgtcgggcgaggcggcgccgcactaccgcgcgggcgcgtcggcgcggctgttcgggagcaagcggtcgatgcactcgacgagcagcctgccggacctgtcacagatgcccgggccgggcgcgagcccgtgcgggtcggcgtccgcggcggccgcggccgccagcgccgccccggcgccgtaccaggcgcccgagtgcctgaagaacctgcggcccacggccaagtgggacgtgtacgccttcggcatggtgctcctggagctgctctccgggcgggtctactcggaggtggagctgtgccagtggcacgcggggctggtggccgccgaggagcacggccgcgtgctccggatggccgaccccacgctccgcggcgaggccgacggccgggaggacgcgctgctggcgtgcttcaggctcgccttcgcgtgctgcgccatggcgcccggcaagcggccctccatgagggacgccgccatggtgctcgagcgaacggcggcggcggcggcgcccggcgccgccgcgagcagcagcggcgccgctgtgccctgagggggaaaaaacaactgaccttgtagcgcttggagccgttactgatcgcaataatcttactgcaagtgcacggacggtggtggcggcgtcggcgttgatcgccggtggcgagcttgtgtggtagggcgtgtacgtagatctgttactgattttggaggtgctgcgagaattaattaacctactaatcatctgtgtttgtgattgtggatttgaaagcgatgcatattcctttttttt

SEQ ID NO: 152937 - DNA, 1388 bp, Zea Mays
caattttgctgcaagtcttaaggactcgtccctttggtactgaaagaactgtcctttggttgctttgcttcatcagtcgcaaaatcagtacaactccacaacgcctaacgccttggcgttccatttttacgatcacgaggctcacttcacctgatttggtcatatggccctgtttgtttcggcttctggcagcttctggccaccaaaagctgccgtggactgctaaacgctcagcttttcagccagcttctataaaatccgttgggacaaaaaccatccaaaatcaacataaacacgtaatcggttgagtcgttgtaatagtagtaatagtaggaattcgtcactttctagatcctgagcccgtaactttatgttcctcacacgtaatcgtaatgaccggatgattttgccgcacctcctctgcagggcgcttcgggtcgtcgtcgccgctgcacctgagcctggaggcgcggctgcggatcgcgcgcggcgtggcgcgagggctggcgtacatccacgagaagaagggcgtgcacgggaacctgaagccgagcaacatccttctgggcggcgacatggagccatggatcggggacctgggcctggaccggctggcgtcgggcgaggcggcgccgcactaccgcgcgggcgcgtcggcgcggctgttcgggagcaagcggtcgatgcactcgacgagcagcctgccggacctgtcacagatgcccgggccgggcgcgagcccgtgcgggtcggcgtccgcggcggccgcggccgccagcgccgccccggcgccgtaccaggcgcccgagtgcctgaagaacctgcggcccacggccaagtgggacgtgtacgccttcggcatggtgctcctggagctgctctccgggcgggtctactcggaggtggagctgtgccagtggcacgcggggctggtggccgccgaggagcacggccgcgtgctccggatggccgaccccacgctccgcggcgaggccgacggccgggaggacgcgctgctggcgtgcttcaggctcgccttcgcgtgctgcgccatggcgcccggcaagcggccctccatgagggacgccgccatggtgctcgagcgaacggcggcggcggcggcgcccggcgccgccgcgagcagcagcggcgccgctgtgccctgagggggaaaaaacaactgaccttgtagcgcttggagccgttactgatcgcaataatcttactgcaagtgcacggacggtggtggcggcgtcggcgttgatcgccggtggcgagcttgtgtggtagggcgtgtacgtagatctgttactgattttggaggtgctgcgagaattaattaacctactaatcatctgtgtttgtgattgtggatttgaaagcgatgc

SEQ ID NO: 152938 - DNA, 810 bp, Zea Mays
ctctatggaacaaaatggttctgttgtgtagcctatggtatagcaccatcttccacctgtttacagccgtttcgtgtgaaaacttctacacaattctgttatcttacttctgtgtggtgctcttgctaaaatgctctggacacgcttccgagacaaaaaaaaaaaagaactaaaatcgttttctcctctttcaggctcctccacgtgccgatgtggtcaataatctgagaaacagtatcgtgcttaacgttgttggaatggctgctgcagttctgggcctgcaggcaactgtaggtgctttggtaggcaaggcactgactacctcattagtgccctactaccaggggataccacctggacagagtcccgttcttgctttagatatcttccttgttcaggcttcagccaacacgatcctttcgcatttccttgggctatccagctcactggagctactacggtctgtaacattgtctcagacagaagctgccccagtgccaaaaccgccattgcggtctgtaacattgtctcaaacagaagctgccccagtgccaaaaacggcatgagcgagcccgcaaatcctcctgacctgaagagtatatcaccagttttgttgttgttctcatattgtagtccaatgcggatctattgtatccatggatctccgctcgttttgaactacatgagcttaaaacaatctaagcgtctgtttggttggactgggaaaaaagttattgtggtcgcgtgttctgaaaaaaactgttgtatgttgtaagctattaaaagactaaaaattatttggtagaaacc

SEQ ID NO: 152939 - DNA, 1441 bp, Zea Mays
ccaaccaaacttccggtcttctcttctccactacccacccgcctgcccgcccgccttctcctccaccactgccccgccgctaaccaaccactcgtgcgccacaagtctcccgtcgtggaatagggcaaaggccaggcatctcgcttctgtcctctgtcgaggggatcggacccgatcggagaaagaatgggctcggaggcggactgcgacaggatcaggggcccgtggagccccgaggaggacgacgcgctgcggcggctcgtggagcggcacggcgcgcgcaactggacggcgatcgggcgcgagatcccggggcggtcgggcaagtcgtgccgcctgcggtggtgcaaccagctgtcgccgcaggtggagcgccggcccttcacggcggaggaggacgcggccatcgtccgcgcccacgcccgcctcggcaaccgctgggccgccatcgcgcgcctcctccccggccgcaccgacaacgccgtcaagaaccactggaactgctcgctcaagcgcaagctcgccgccgcgtccgccccggcgggttcctccgacgtcgaggcgcgcccgaccaagcgcgtcagcctctcgcccgacagcccgtcggggtcggggtcggggtcagggtcagggtccgggtccgggtccgggtccgaccgtagcgacctgagccacggcgccggccaggtttaccgcccagtggcgcggtccggcgggttcgagccggcggactgcgcgatgagccgtccgctggaggaagaggaggaggaaaaggaggacccgctcacctccctcagcctctcgcttccaggcacggaccagcggttccaccacgaccgcgcccacagccagttccaggagctcccggcgtcgccgccctcgccctccccgcctccgccgccggttctctcggcgtacccgttcagccccgtgttcatggaggcgatgcaggagctgatccgcacggaggtgcagcggtacatggcgagcgtgggcgtgcgcgccgggtgcggcgccgccggcggggccgacctctgcatgccgcaactggtcgacggcgtcatgcgcgccgccgccgagcgggtcggccggatgcagtagcagtagctcctgccatcaaatgctcccgaaccgtcaatcgatcttctaggacgaacgcgcagcagctgttgttatcagtagcaaacttccaagttattattttcctttttttaaaactttattctctcgaaccgctgtgaaaccgaaacagcagtgaaaagagtcagcaactgaaaaaaaaaatatgtgggaactgaaaggtggagaaaaatgtagtaaaggcttgctgaaagccgtgtaaagcgctgcctgcctcctctctctctctctctacaggaatgaatcggatcggaacggaatgaaacgagaagagggggacgacgcacattctggtttctga

SEQ ID NO: 152940 - DNA, 303 bp, Zea Mays
ccactgcatcaggaaggcgagccagagatcgagcggcccgagaaaaggaggaaacgcaagcgtaatcagaagctgaagcccagggagctcaatccaatggagtggatcgctgaagcccggcaccaggaagcaaagcctttaatattgaacgcacatgaatcactcgttaaggctaaacatctattggagtacatttccaagaccatcaaaggcaatgaacacacacttgatgcgggtactggttctgagaataatttcgttgagctttggagcctgctctgctcttctttgctcactgtggat

SEQ ID NO: 152941 - DNA, 705 bp, Zea Mays
gaccaaaataaaactaagatgttttgtggatgcacattataaacctttggtcagaaagaaaaaaatattacaactagctcacaaataatattcagttctctgtttagtgtttaattgagtactatacatccatacagaatacatatacaatgatcatcgtcactattcactatccatatctaggtattggttctcgatggcttattgaagctctagattctccaagttatgctagtcatgtgggctttgacggaccttagttaaatactgagtctatatttagtgggcctcggtgggcctttgttaaatgggtcgtgccagaccggcccgtgggcttgacttgaggcccaggcacggcccacaatgtgggtcgtgccggcccaagcccacaattaggttgggccgtgccagatatggaccgtgccagaaattgtgtgctttgggccggcctattaggcatagcacaaatgtacatctatagctctatccgaaggatagctttgatcttatttgggttagcttcgattcccttcgttgataccagacaactaaggaacttgcccttctttactccaaaaacacacttttctagatttaatttaagaccagcttgcctgaaattggcaaatgtctcttgcaagtcagcaatatgattttcttgcttcgtgctttttactatgatgtcatcaacataagtcagcacat

SEQ ID NO: 152942 - DNA, 1538 bp, Zea Mays
accgccgcttggccctctatttaatgagcaccaccagtcactagacacagcgcccgcaggccgcagctgcagtctgcagagcacagccgtgcgcggtttgcaaccgtaccagcacaagcaccccaggcgggcaggaaacaagcctcctccgctgctccgccgcaatggcgtccccgcgcggccatcgccgggccagcgtgctgcagaaggcggcggcgctcctcctgctcgccctgtcctgctgcggctgcaccggtgccggcgccggtccatcggcgccaaccccgaaggtgccggcggtgatcgtgttcggggactcgacggtggacacgggcaacaacaacgcgatcgggaccatcctgaagagcaacttcccgccgtacgggcgcgacatggccggcggggcccagcccacggggcggttctgcaacgggcgcctgccgccggacttcatctccgaggcgctcggcctgccgccgctggtcccggcctacctcgaccccgcctacggcatccaggacttcgcccgcggcgtctgcttcgcctccgcaggcaccggcctcgacaacaagaccgccggcgtcctgtcagtgatcccgctgtggaaggaggtggagtacttcaaggagtacaagcggcggctccggcgacacgtggggctcgccggtgcccgtcgcatcgtctccgacgcgctgtacgtggtgagcgtcggcaccaacgacttcctggagaactacttcctgctggtgacggggcggttcgcggagttcacggtgggcgagttcgaggacttcctggtggcgcaggcggagtggttcctgggcgagatccaccggctgggcgcgcggcgggtcgccttcgcggggctcagccccatcggctgcctgcccctggagcgcacgctcaacacgctccgcggcggctgcgtcgaggagtacaaccaggtggcccgggactacaacgccaaggtgctcgacatgctccgccggctcacggcggcgcggccggggctgagggtcgcctacatcgacgtgtaccagaacatgctggacctcatcaccgacccttccacgctggggctggagaacgtggaggaggggtgctgcgccacggggaaggtggagatgtcgtacctgtgcaacgagaagagccccgacacatgcgacgacgcggacaggtacttcttctgggactccttccaccccacccagaaggtgaaccagttcttcgccaagaagacgctggacctgtgctacgaccagctcctgctgtgatgctgatgatgcgccctagagctcagtgtggctacgtttagtccacactccacagtcaaaattgttgctgctaattcgtctccgtgtgtatagcatagctagcattcgatgtgatgtatgtagtagtatatggttgctgtgcctgtctcgatgcgtcgatcgatggattcacgattcttttgggcttaaatgctcataagggagataaaatttacacatttgacgcgagttacaattggttccggccggagccggacgtctttt

SEQ ID NO: 152943 - DNA, 931 bp, Zea Mays
ggtgcattcaacctctgaatctagccatctacgatctaccacagaggacgatcgtcatgtacactgtgcagtgtgcacagatcaggacccctgccagaggcacacctgctatgcatccgtgcaatgaattttagttctgatcttaattacttgcactgcgccgatcatggttgaggctgctagctgactgctacacaaaatctgtctggtcttctttccctgcgactgcgagcggccgtgaagtcagtgatcccgctgtggaaggaggtggagtacttcaaggagtacaagcggcggctccggcgacacgtggggctcgccggtgcccgtcgcatcgtctccgacgcgctgtacgtggtgagcgtcggcaccaacgacttcctggagaactacttcctgctggtgacggggcggttcgcggagttcacggtgggcgagttcgaggacttcctggtggcgcaggcggagtggttcctgggcgagatccaccggctgggcgcgcggcgggtcgccttcgcggggctcagccccatcggctgcctgcccctggagcgcacgctcaacacgctccgcggcggctgcgtcgaggagtacaaccaggtggcccgggactacaacgccaaggtgctcgacatgctccgccggctcacggcggcgcggccggggctgagggtcgcctacatcgacgtgtaccagaacatgctggacctcatcaccgacccttccacgctggggctggagaacgtggaggaggggtgctgcgccacggggaaggtggagatgtcgtacctgtgcaacgagaagagccccgacacatgcgacgacgcggacaggtacttcttctgggactccttccaccccacccagaaggtgaaccagttcttcgccaagaagacgctggacctgtgctacgaccagctcctgctgtgat

SEQ ID NO: 152944 - DNA, 1068 bp, Zea Mays
atgcaccagatcgggagcggcatgtacgtgtccggccccgcgccggacaggaagcgggagcggcggctgtcgtcggggtcggccgccacgccgccgtacacgggcggggacgtggcgcgctcgggcgagctcggccggatgttcgacatcgccgcgtcgcagtcgcaggcgccgtcgccggcctcctcgcgccgcagctccggcccgctgccccggccctcgccgtcgccggcgtcgggaccgctgtcgcagctctcgcacccggggctcctggtcgggccgtccccgtcccccgcgccctctccgtcgccggcggtcgggtcgtcgaggaaggggagcggcaggaggcgcggcgccgggaacgaggcgggcgcggccgtggcggcgcgcgggacggcgaggctcggcgtcccgttcgcgtgctacgtgctggtggccgtggcggccgcggccgccgtcggcgccggggccttctgcctcgtgtcgtggcgccggtgggaggtcctcgccgcggcgggcggcgcggtggccgccgtcgcggcggtgttcgcgtcgaacgcgtgccggacggcggccgaggcggagaggttcttccgccggttccccgatacggtgttcgacgaccacggcggggacatgcccatcggcgagctcgtcaagatcaccggggcacgggtgacgaacttctacatctctgacaggaactcgggcaagagattctacgttcgtgctggtgagagcgccttgatcactcctatgatcaaacagaaaacaatcagctttgacggcgacaagaaggacgcttcacaaaacttgaagagattgttggcaaccaacgagttgtcgtgcaatggagatttgactgttaaagaagggttaatcagagaaggggacacagcaagtgtgataggcatcctgaagaaacaccatgcctgtgacatcgtggatgcaccggccggtgtggtcaccaccggttgccagctgatccggtgcatgttccccgtcttcgttgaagggctcatactgatcggagatgaagaccctgacgaggctgtatatatggtctga

SEQ ID NO: 152945 - DNA, 123 bp, Zea Mays
gaataaataaggtaataaacaaatgaataaacttaatacatgaaccttgcattcatgttgaaatatatttttggtgtgcaaattagaactttgtttgaatttaaaaatctaattggaatttga

SEQ ID NO: 152946 - DNA, 297 bp, Zea Mays
atggcgccgtggcgagccggatcggctgctgccggttttcacaaggaggaagaatcgcttggcttcgctgtatccaccatgcaccagacccccgcgtgcgttggcgcgcaggccggagcttcgccctgccaaatcgcgctgatgaccatcccctccggcgagcttgtcaaggtcagtgagcctatacttgaataccacgtactgctccgtctcggtgtagcaagcggccatggcctgcgcggttatagcgtgcgacggctggaggtaggtgagagcacgtcctccattgatctgtag

SEQ ID NO: 152947 - DNA, 297 bp, Zea Mays
atggcgccgtggcgagccggatcggctgctgccggttttcacaaggaggaagaatcacttggcttcgctgtatccaccatgcaccagacccccgcgtgcgtcggcgcgcaggccggagcttcgccctgccaaatcgcgctgatgaccatcccctccggcgagcttgtcaaggttagtgagcctatacttgaataccacgtactgctccgtctcggtgtagcaagcggccatggcctgcgcggttatagcgtgcgacggctggaggtaggtgagagcacgtcctccattgatctgtag

SEQ ID NO: 152948 - DNA, 479 bp, Zea Mays
tgccctaacctagcgcgtgcgccctcttccagctgaagtcgccgccgccctctgcttctctctctctcccacccgcctcctctctcctccccctcgctcctctctccgacgcgcagccgagcataccgtgccgaccgagcagcagcagcgccgtcgcctcgctcctctctctccctcgcagttcatactatatcttccctcgcctcgctcctctctctcccgaccgagcagcagcagcgggcggcacccatggcgtccgtggcgaagctcaaggagaagcacgccgtcgcgacggcgtcggtgaactccctgctcgagcgcctccgccagcgccgggagacgctcctcgacaccgacgtggcgagatactccaagtcgcaggggagggtgccggtgagcttcaaccctacggatctggtctgctgccgcacgctgcagggccatagcggaaaggttgttgactttggtatctcacctcc

SEQ ID NO: 152949 - DNA, 106 bp, Zea Mays
gattttgtcaataattcaaattggcaaaaattcaggtgatccagtgtctctcagtaagccctcacatggtggtagggtgaagctgggtcggcctaggaagggcaag

SEQ ID NO: 152950 - DNA, 1858 bp, Zea Mays
attccacctgtacggctgtaccccaccgccaccacccacggcacgctgcgcgcccaagcaaaccagggagcgcggccgaccgaccagccagacctgcgcaatcgaaaccgatcgactcccctattattggtccccatccccatggggcggcggctgagcgcgaccgccgccgccgcggcggcgtcggcggagccgctcctcccgccggcgctgaagcgcggggtgctgatcgagcggtgcgcgtcgcacgccgacgacgagctgcagtggttccgctcctgcctgcggtgggtgtgcatggaccactcgggcccgggccaggccgcgctgtcctggctcctcttcctcgtcctcgccgccatcgtcccggccgccgcgcacttcctcctcgccttccgcgcctcgcgccgccccttctcggccgtcgtgcagctctcgctctcggccgcctccgccgcgggcttcctctgcctctcctcctccttccgccgcgtcggcctccgccgcctgctccacctcgacaagctccgcagcaagagcgaccgcgtccgggccagctacacggcgcgcctcgccttctccttccgcctcctcgcctccctcgtcgcgccgtgcttcgccgccgaggccgcctacaaggcctggtggtacgccacctccgccgaccgcgtccccttcttcgccaacgacgtcctcagcgacgtcctcgtctgctccctcgagatggcctcctggatgtaccgcagcgccatctacctcctcacctgcgtcctcttccgcctcatctgccacctccaggggctcaggctcgaggacttcgccggctccctgctcgaggaagtcgaggagggccgggccggcgtcgatgccgtgctaagagagcacctcgacattcgcaagcagctcaaggtcatcagccatcgcttccgtaagttcatcgtcgctgcgctgctcatcgccacggccagccagttcgcctccgtgctcctcaccacgcgacgcgactctgtcgacgacctcctcaacaccggcgagctcgcgctgtgttcagttgtgctcatgtccgggctcatcataatcctgagcagcgccgccaagatcacccaccaggcgcaggccctcaccggtcacaccaccaagtggcatgcctgctgcaccatcgagcccgtgctggaggaaggggagcccgggtccaaccagaactccatgatcgaccaagaacccgagagtgacagtgacacagaggacagcgaggagaccggcgacgaagatctcctggagaacaccaagattcatatgccgcacgcgcatgtcatctccttccagaagagacaggcactagtgacatacttggaaaacaacagagccgggatcaccgtgttcggtttcacgctggaccgttcgtacctgcacacgatatttatgctcgagtggactctgttcctgtggctgctcggtaagaccatcggcttctcgtgaagaagacggcgatgaaaagaagagaggtggcctgtgtccaacgtccggatggtcgtttttgagaggtttcgcatgtcgcggttgccctttttggggatggatttggatgtgctttgtttttcggtcatcgtggaagggctttttttcgcgtgagcctggctgttggcacgggagcgttgcgcgtgtacacctcaacgcctgtgtatgatagcgattttgtatgatgtgtgtgtataaattgtgaaccgtaattgtccttgtaaatgagcgttgtacagtcgtacactggtaatgctgttttttacaatctcgttgtaagccaacatgttgtagcgagaatttagattgtaaagataaagattcttgtttttttaaatct

SEQ ID NO: 152951 - DNA, 1709 bp, Zea Mays
accaatgaaaaggaaaagggaaaaccagacggccaaggcagcccccaaccccggccccagccggcagaccatctcgatacgcggccgccgcagacgagatggccgccggggacgcaggccgcgcgccgacggcagcggccgcgcaatcgctggtggagtccttctgcggcgtgacctccgcgaccccccaggaggcggccttctatctcgagagccacaactgggccctcgaatccgccgttcgctcctactacgactccgtggacggtgaagccgacgccgtcgcggccgatccagtgcccccaccaccagctgcaccagccggaggcggggaggataccgaggatgaggattgcgtggtcggcggtggcggtggcggcgacgacgacgaggatgatgaggactacgtcgatggcgacggcagcgatgatgaggacgctgcgctcgcggctgaggccgcggaggaagaggagaggaggaggcctttcaagaggctgaagagaacccacgacgcgcggggtgggagcggtagcagtgccaaggcgcgggggaatgtgaggacgctcgccgatctcgatagtggcaagggaaccgcgggttccgacgagaactccgaagacgatgatgaatggacaccaccgcccgagtacgagacgagagatcgatcaagacgtaaaaacaacacagatgagatcttcaagcaagctaaaaagaagggggctaagcaaggtccgtttgaggctcgtccgcgatctagttcgaggaactttactgggactggtagacttctgacaggtgaaactgtagagcgtaatgcatcacagccaccagaagaaattacccataacatccacttctggaggaatggcttcacagtaaacgatggtccacttagaagttttgatgatccagcaaatgcaccctttttaaagagcatcaaggattctgactgcccaactgagcttgtgccggctgatgagaaatctatagtgaatgtgaatcttgtccggacggaagaagaatttactgagccagtcaagcgtgctgctccttttgaaggggaacgaagaaacctcatggaaccttctgataataatacttccaatgctgctgctgctgctgctgcttccagtagtgcaactgcttctcggacaatcacagtggacgattctttgccatcaacctccctccaaatcaggttcgcagacggcagtcgcttggttgcccgtttcaacacaagccacaggattagtgacgtgcgggcatttatcgacgcgacaaggccaggagccagtgattacacgctgcaggccgggttccccccaaagccgcttgaagacacggccaagaccatcgaggaagccggcgtggccaactcggtaatcattcagtcagtctagcttggcagaacaggtgccgcaaccctattccatcgaacacgctaggcatctgaagctaccaccttccttgatcttccttcattttgtttctcaaacctggcttttaaccttttatcttcatccagtagctacttctggtattgcgagtgtaaaacagtgaggtctgggtgtcctacatcttattcatctatagcatatatagtactacttgttgcatacagtactacttttgcttgtctccttcagcgtttggtcggttaaagtgccctcttgttcttgtctcattccctggttggtagaatgtcggca

SEQ ID NO: 152952 - DNA, 2942 bp, Zea Mays
accaatgaaaaggaaaagggaaaaccagacggccaaggcagcccccaaccccggccccagccggcagaccatctcgatacgcggccgccgcagacgagatggccgccggggacgcaggccgcgcgccgacggcagcggccgcgcaatcgctggtggagtccttctgcggcgtgacctccgcgaccccccaggaggcggccttctatctcgagagccacaactgggccctcgaatccgccgttcgctcctactacgactccgtggacggtgaagccgacgccgtcgcggccgatccagtgcccccaccaccagctgcaccagccggaggcggggaggataccgaggatgaggattgcgtggtcggcggtggcggtggcggcgacgacgacgaggatgatgaggactacgtcgatggcgacggcagcgatgatgaggacgctgcgctcgcggctgaggccgcggaggaagaggagaggaggaggcctttcaagaggctgaagagaacccacgacgcgcggggtgggagcggtagcagtgccaaggcgcgggggaatgtgaggacgctcgccgatctcgatagtggcaagggaaccgcgggttccgacgagaactccgaagacgatgatgaatggacaccaccgcccgagtacgagacgagagatcgatcaagacgtaaaaacaacacagatgagatcttcaagcaagctaaaaagaagggggctaagcaaggtccgtttgaggctcgtccgcgatctagttcgaggaactttactgggactggtagacttctgacaggtgaaactgtagagcgtaatgcatcacagccaccagaagaaattacccataacatccacttctggaggaatggcttcacagtaaacgatggtccacttagaagttttgatgatccagcaaatgcaccctttttaaaggtaaagaactctgttctgtgctactgtgcttattagttatcacatttctgattttactatgcctaattttatgttaggcaccacccactttttcttcaaacatatatatatatatatagcctgttcacccttattttcaatccaggatgtagttaatgtttttgtcctgttggcatgtatcctggtactgtgcaatgtgtgtcagactttatattgaaaaatagatttcggagtaacgagtgagaagaatcaaggggtcatatggaacagtattttgtttcacttggaataagtattattacttctctgctggttttcatcataatggttgacaacggttctgtttttagactggtcccctaataattatatatgaatggtgcaggacctgtttggtaggtgtgagagggaagtttttaatagccagtagcttcaaatttcctacaagggggcagattgtttctgttaactcaatctaactcaaaattcgaaataacactttggcctaaattaatcaagttttgtgaatcaaccaattcgagcataggtcaagggatcaagatttaagcaaatgtttaatcgtatcgagttctatatacttattaagcacttacctcatatatgaaggttccaccaggtactcaaagtggagtggaaggagggccatggtattttttttccttaaaacttcttaagtagtgttgcaaactcagggcctcttggctctggactaggcacaaaagccttaaattgtagacagaaggtaaactgtagatggaaggcggatagtgtatgtttcaacattaataagatattttttggtacattgtcgtttactgtcttttattatcccattcagtctgttgttattcttagctttttcttgtttagtttgtggcactgcatgttagtttcttttccccttcatatttctttttactagagcatcaaggattctgactgcccaactgagcttgtgccggctgatgagaaatctatagtgaatgtgaatcttgtccggacggaagaagaatttactgagccagtcaagcgtgctgctccttttgaaggggaacgaagaaacctcatggaaccttctgataataatacttccaatgctgctgctgctgctgctgcttccagtagtgcaactgcttctcggacaatcacagtggacgattctttgccatcaacctccctccaaatcaggttcgcagacggcagtcgcttggttgcccgtttcaacacaagccacaggattagtgacgtgcgggcatttatcgacgcgacaaggccaggagccagtgattacacgctgcaggccgggttccccccaaagccgcttgaagacacggccaagaccatcgaggaagccggcgtggccaactcggtaatcattcagtcagtctagcttggcagaacaggtgccgcaaccctattccatcgaacacgctaggcatctgaagctaccaccttccttgatcttccttcattttgtttctcaaacctggcttttaaccttttatcttcatccagtagctacttctggtattgcgagtgtaaaacagtgaggtctgggtgtcctacatcttattcatctatagcatatatagtactacttgttgcatacagtactacttttgcttgtctccttcagcgtttggtcggttaaagtgccctcttgttcttgtctcattccctggttggtagaatgtcggcacctgtggacaaagttagttgcaccagatggtccttattgcggtttagcgatgtccggacgattgcaatctgtaaggcgagtccttgtccaggttacgcatgttcacaagttacgttggcgttctttcttggtgctgcataatgaacgggtctcgtcgatcgctagtcttttttcaatgctaaagataccattcatgttctacttttgtttgaccattacttgcgctcccattccagttgtgcgttgctatctggtgaccgcccattccgttaaagtgtggaatgtagatg

SEQ ID NO: 152953 - DNA, 2690 bp, Zea Mays
gaaaaggaaaagggaaaaccagacggccaaggcagcccccaaccccggccccagccggcagaccatctcgatacgcggccgccgcagacgagatggccgccggggacgcaggccgcgcgccgacggcagcggccgcgcaatcgctggtggagtccttctgcggcgtgacctccgcgaccccccaggaggcggccttctatctcgagagccacaactgggccctcgaatccgccgttcgctcctactacgactccgtggacggtgaagccgacgccgtcgcggccgatccagtgcccccaccaccagctgcaccagccggaggcggggaggataccgaggatgaggattgcgtggtcggcggtggcggtggcggcgacgacgacgaggatgatgaggactacgtcgatggcgacggcagcgatgatgaggacgctgcgctcgcggctgaggccgcggaggaagaggagaggaggaggcctttcaagaggctgaagagaacccacgacgcgcggggtgggagcggtagcagtgccaaggcgcgggggaatgtgaggacgctcgccgatctcgatagtggcaagggaaccgcgggttccgacgagaactccgaagacgatgatgaatggacaccaccgcccgagtacgagacgagagatcgatcaagacgtaaaaacaacacagatgagatcttcaagcaagctaaaaagaagggggctaagcaaggtccgtttgaggctcgtccgcgatctagttcgaggaactttactgggactggtagacttctgacaggtgaaactgtagagcgtaatgcatcacagccaccagaagaaattacccataacatccacttctggaggaatggcttcacagtaaacgatggtccacttagaagttttgatgatccagcaaatgcaccctttttaaaggtaaagaactctgttctgtgctactgtgcttattagttatcacatttctgattttactatgcctaattttatgttaggcaccacccactttttcttcaaacatatatatatatatatagcctgttcacccttattttcaatccaggatgtagttaatgtttttgtcctgttggcatgtatcctggtactgtgcaatgtgtgtcagactttatattgaaaaatagatttcggagtaacgagtgagaagaatcaaggggtcatatggaacagtattttgtttcacttggaataagtattattacttctctgctggttttcatcataatggttgacaacggttctgtttttagactggtcccctaataattatatatgaatggtgcaggacctgtttggtaggtgtgagagggaagtttttaatagccagtagcttcaaatttcctacaagggggcagattgtttctgttaactcaatctaactcaaaattcgaaataacactttggcctaaattaatcaagttttgtgaatcaaccaattcgagcataggtcaagggatcaagatttaagcaaatgtttaatcgtatcgagttctatatacttattaagcacttacctcatatatgaaggttccaccaggtactcaaagtggagtggaaggagggccatggtattttttttccttaaaacttcttaagtagtgttgcaaactcagggcctcttggctctggactaggcacaaaagccttaaattgtagacagaaggtaaactgtagatggaaggcggatagtgtatgtttcaacattaataagatattttttggtacattgtcgtttactgtcttttattatcccattcagtctgttgttattcttagctttttcttgtttagtttgtggcactgcatgttagtttcttttccccttcatatttctttttactagagcatcaaggattctgactgcccaactgagcttgtgccggctgatgagaaatctatagtgaatgtgaatcttgtccggacggaagaagaatttactgtaagtatcataagcctgaaatgtttgattgcttcaattgttcaagtatctgaccttagttaacgataacaggagccagtcaagcgtgctgctccttttgaaggggaacgaagaaacctcatggaaccttctgataataatacttccaatgctgctgctgctgctgctgcttccagtagtgcaactgcttctcggacaatcacagtggacgattctttgccatcaacctccctccaaatcaggttcgcagacggcagtcgcttggttgcccgtttcaacacaagccacaggattagtgacgtgcgggcatttatcgacgcgacaaggccaggagccagtgattacacgctgcaggccgggttccccccaaagccgcttgaagacacggccaagaccatcgaggaagccggcgtggccaactcggtaatcattcagtcagtctagcttggcagaacaggtgccgcaaccctattccatcgaacacgctaggcatctgaagctaccaccttccttgatcttccttcattttgtttctcaaacctggcttttaaccttttatcttcatccagtagctacttctggtattgcgagtgtaaaacagtgaggtctgggtgtcctacatcttattcatctatagcatatatagtactacttgttgcatacagtactacttttgcttgtctccttcagcgtttggtcggttaaagtgccctcttgttcttgtc

SEQ ID NO: 152954 - DNA, 2661 bp, Zea Mays
atggatgatagatagagctgcggaggagcagggtgagggggaggtgctgccgcccacggtgatcatctctatggccgtgtagaggagcactgcagccggaagagattattcagagagagagagagagagagagagagagagagagagagagagagagagaagggaagcatgaagccaagaaccgcgacactggccgccggcctcctccagctcgtcgcgcttgcggcggtggcggaagccgacaccgacgccggcgacgttgccgccctggggaacctctacagctcctggaacagcccggcgcgcctcgccggctggtccgccagcggcggcgacccctgcggcgccgcgtggacgggcgtctcctgctcgggctccgccgtcacctcaatcaagctttctggtatggagctgaacggcactcttggctatcagttgtcaagcctgcaggctctgaaaacgatggacttgagcaacaactacttgcacgattcaattccttaccagctgccatcaaaccttacctatctgaacctggcgaaaaacaacttctctggtaatcttccgtactctatatccaacctggtctcgcttgagtacctcaacctcagccacaactcgttgtttcaggaaatcggagaactgtttggaagcctcagttcactctcagaactagacatatctttcaacaacctcacggggaatcttcctttctcaatgggctccctgtcaaaactttctagcctttatatgcaaaacaatcagctgtcgggcacagttgatgtcatcagcaacataagccttgcgacactagatattgcaagcaacaatttcagcggcatgataccccaagagttcagctcgatcccaaacctaatagttgcaggaaactcatttgtcaatatgcctgcctccccgccacaagctctgacgccacctccgaatccacgtggccggccagacgatcgtcggggaccaaccagcgctccaactgtcccggagactcccattgacccggacgacaagaagatgcaaacgggacctcttgtagggatagctgttggctcaatagctgctgcctcgtgcgttcttttcgcgctggtgttgtgcctccacaacgcacggaaaaaacccgatgatgggagcagtgaagcgaaaggtattgcgggttcgcatctagtagtgactacgtctagcagggaagtcatggacagtagccatgacaacgctgctgtggcaacttcagacctccaactgatccagcctgctggaaagatgactccggacgacagagcgcatggtccaaacggttgtaccgccaaaaggccaaagcagcaggttactgtgacgacagtgagttcctacacagttgctgctctccaagtcgctacgaacagcttctgccaagactctctcctaggcgagggctcgcttgggcgtgtttacaaggctgtttttcctaacgggaaggtacttgctgtgaagaagatagacagcgcttcgctgtctctgtacgaagaagacaactttctcgcggttgtgtcgaacgtgtcccggctcaggcatccaaacatcgtgccccttgcaggctactgcgtggagcacgggcagaggctccttgcgtacgagtacgtcgggaacggaacgctgcatgacatgctgcacttctctgacgacgacgggatgacgatgccgggcaagactactaggctcgcatggaacacccgcgcgaggatagcgctaggcaccgcgcgcgctctagagtacctgcatgaggtgtgcctgcccccggtggtgcacagggccttcaagtcatcaaacatcctgctcgacgacgagtacagcccgcgtctgtccgactgtgggctcgctgctctgtcgccgaaccctgagactgagagggaggctttcgctggagtggttggctccttcggatacagcgcccctgagttcgccatgtcagggacgtacactgccaagagtgacgtgtacagtttcggggtagtgatgctggagctgttgaccggccgcaagccgctagacagctccagggagaggtcggaacagtctcttgtgagatgggcgaccccgcagctccacgacatcgatctgctcgccaagatggtcgatcctgcactggatgggctgtaccctgccaagtccctctcccgtttcgccgacataatcgccatctgcgtccagtcggagccggagttccggccgccgatgtccgaagtcgtgcagcagctggtgcgcctgatgcagcgggcgagcatcgtgaggcgacaatcggacgaccagctgggctactcgtacagggttcccgagcgcgacggcggcggcacggtaggcggcgacgtcgtcgtcgcctgagctagctagctagctagaggccgcgacgagaccaaagctggcgtacactcctactcctacacaaagcgctgcacagtttatatatattcataaacaaaagagcgagcaaaagaaaagaaaagcagttggatatggatggatccttcacgttttgttaaaaagtcacccgtaaacgacatatatgtatagggtttgcagcgtactgggacgtttcttcgtgagctgcgagtgtcatgtatagtgtgcgctcttgccagtggtagatatataggataggagaaaaaaaaa

SEQ ID NO: 152955 - DNA, 2333 bp, Zea Mays
gagagagagagagagagagagagagagagagagagagagagagagagagagagagagagagagagagagagagagagagagagagagagagagaagggaagcatgaagccaagaaccgcgacactggccgccggcctcctccagctcgtcgcgcttgcggcggtggcggaagccgacaccgacgccggcgacgttgccgccctggggaacctctacagctcctggaacagcccggcgcgcctcgccggctggtccgccagcggcggcgacccctgcggcgccgcgtggacgggcgtctcctgctcgggctccgccgtcacctcaatcaagctttctggtatggagctgaacggcactcttggctatcagttgtcaagcctgcaggctctgaaaacgatggacttgagcaacaactacttgcacgattcaattccttaccagctgccatcaaaccttacctatctgaacctggcgaaaaacaacttctctggtaatcttccgtactctatatccaacctggtctcgcttgagtacctcaacctcagccacaactcgttgtttcaggaaatcggagaactgtttggaagcctcagttcactctcagaactagacatatctttcaacaacctcacggggaatcttcctttctcaatgggctccctgtcaaaactttctagcctttatatgcaaaacaatcagctgtcgggcacagttgatgtcatcagcaacataagccttgcgacactagatattgcaagcaacaatttcagcggcatgataccccaagagttcagctcgatcccaaacctaatagttgcaggaaactcatttgtcaatatgcctgcctccccgccacaagctctgacgccacctccgaatccacgtggccggccagacgatcgtcggggaccaaccagcgctccaactgtcccggagactcccattgacccggacgacaagaagatgcaaacgggacctcttgtagggatagctgttggctcaatagctgctgcctcgtgcgttcttttcgcgctggtgttgtgcctccacaacgcacggaaaaaacccgatgatgggagcagtgaagcgaaaggtattgcgggttcgcatctagtagtgactacgtctagcagggaagtcatggacagtagccatgacaacgctgctgtggcaacttcagacctccaactgatccagcctgctggaaagatgactccggacgacagagcgcatggtccaaacggttgtaccgccaaaaggccaaagcagcaggttactgtgacgacagtgagttcctacacagttgctgctctccaagtcgctacgaacagcttctgccaagactctctcctaggcgagggctcgcttgggcgtgtttacaaggctgtttttcctaacgggaaggtacttgctgtgaagaagatagacagcgcttcgctgtctctgtacgaagaagacaactttctcgcggttgtgtcgaacgtgtcccggctcaggcatccaaacatcgtgccccttgcaggctactgcgtggagcacgggcagaggctccttgcgtacgagtacgtcgggaacggaacgctgcatgacatgctgcacttctctgacgacgacgggatgacgatgccgggcaagactactaggctcgcatggaacacccgcgcgaggatagcgctaggcaccgcgcgcgctctagagtacctgcatgaggtgtgcctgcccccggtggtgcacagggccttcaagtcatcaaacatcctgctcgacgacgagtacagcccgcgtctgtccgactgtgggctcgctgctctgtcgccgaaccctgagactgagagggaggctttcgctggagtggttggctccttcggatacagcgcccctgagttcgccatgtcagggacgtacactgccaagagtgacgtgtacagtttcggggtagtgatgctggagctgttgaccggccgcaagccgctagacagctccagggagaggtcggaacagtctcttgtgagatgggcgaccccgcagctccacgacatcgatctgctcgccaagatggtcgatcctgcactggatgggctgtaccctgccaagtccctctcccgtttcgccgacataatcgccatctgcgtccagtcggagccggagttccggccgccgatgtccgaagtcgtgcagcagctggtgcgcctgatgcagcgggcgagcatcgtgaggcgacaatcggacgaccagctgggctactcgtacagggttcccgagcgcgacggcggcgaccaaagctggcgtacactcctactcctacacaaagcgctgcacagtttatatatatt

SEQ ID NO: 152956 - DNA, 1401 bp, Zea Mays
ctcggctgctcctcaggtcctccattccttccaaaataaaagcgggagcgctgagccagacggcggcccactcgttctcgctctccctccccagtcaccaccatcacgagctcgcgtgtgcccctcgcgctccgccgccaccaccttctactaccataccgctgcgtcgccgcccggaccacgcccgccaccaaggcctctcctccgcctcgtccccatcacgggcgcggcccctcgacctcggtggccggccggttcgacaccgcaccgtgaccctcggctacggagttggtgcaggaagaagacggagtggtggactgggccatagaaccatgtcaagttccataatttcaacagtggccacagagttgtcggtggctgagaagagcaggggtattgagccactaccttttattaatgacaaacatggaggtgtcatcattgagatgacgactccgatggatcctggagcgttttcagcttccttgaaagcagctctggtgaaatggagggagcagggaataagaggtgtctggatcaaactgcccatcaccctttccaaccttattccaccagttgtagaggaaggtttctggtaccatcatgcagaggaaacttacttgatgcttgcgtactggcttccaaatacaacacatacactaccagtaaacgcaacccaccgtgttagtgttggagcttttataatgaatgacaaaagagaggtcttggctgtacaagaaaagagtggtgtacttcgaggcctaggtgtgtggaaatttccaactggcgtagtagaaccgggggaagatattaacgttggagccgtccgagaagtaaaagaagagacagggattgatgcagaatttgttgaagtgctggccttcaggcagagccacaaatccttttttgataaatcagatctatttttcgtgtgcctgctacgacccctttcatacgacattacgaagcaagactcggaaatagaggcatgccagtggatgccagtagaggaatttgcagcacaaccatttgtccagaaacatgagcttgtgaagtacatcctcgaagtcggcctggctaaagttgacaaggaatatgcaggcttttcgccaatctccataaaatcggcatttacagacaaattgtccttattttacatgaaccggagggatctggacagggcctcagggtagagtatatatgtaatgacacgggcaattcaggatagttaaattttcactttggtgtgtgacagcgggctaaatcttgttagacctagggtctgtttggttgggctgtggctgtcaaaaaagttgctgtgggctgtgagctgtggaaaaagctgctgtaggctgtgagccattaaaaagctaaaaatcgtttggtagaaaccactaaaaa

SEQ ID NO: 152957 - DNA, 1354 bp, Zea Mays
aaataaaagcgggagcgctgagccagacggcggcccactcgttctcgctctccctccccagtcaccaccatcacgagctcgcgtgtgcccctcgcgctccgccgccaccaccttctactaccataccgctgcgtcgccgcccggaccacgcccgccaccaaggcctctcctccgcctcgtccccatcacgggcgcggcccctcgacctcggtggccggccggttcgacaccgcaccgtgaccctcggctacggaggaagaagacggagtggtggactgggccatagaaccatgtcaagttccataatttcaacagtggccacagagttgtcggtggctgagaagagcaggggtattgagccactaccttttattaatgacaaacatggaggtgtcatcattgagatgacgactccgatggatcctggagcgttttcagcttccttgaaagcagctctggtgaaatggagggagcagggaataagaggtgtctggatcaaactgcccatcaccctttccaaccttattccaccagttgtagaggaaggtttctggtaccatcatgcagaggaaacttacttgatgcttgcgtactggcttccaaatacaacacatacactaccagtaaacgcaacccaccgtgttagtgttggagcttttataatgaatgacaaaagagaggtcttggctgtacaagaaaagagtggtgtacttcgaggcctaggtgtgtggaaatttccaactggcgtagtagaaccgggggaagatattaacgttggagccgtccgagaagtaaaagaagagacagggattgatgcagaatttgttgaagtgctggccttcaggcagagccacaaatccttttttgataaatcagatctatttttcgtgtgcctgctacgacccctttcatacgacattacgaagcaagactcggaaatagaggcatgccagtggatgccagtagaggaatttgcagcacaaccatttgtccagaaacatgagcttgtgaagtacatcctcgaagtcggcctggctaaagttgacaaggaatatgcaggcttttcgccaatctccataaaatcggcatttacagacaaattgtccttattttacatgaaccggagggatctggacagggcctcagggtagagtatatatgtaatgacacgggcaattcaggatagttaaattttcactttggtgtgtgacagcgggctaaatcttgttagacctagggtctgtttggttgggctgtggctgtcaaaaaagttgctgtgggctgtgagctgtggaaaaagctgctgtaggctgtgagccattaaaaagctaaaaatcgtttggtagaaaccact

SEQ ID NO: 152958 - DNA, 718 bp, Zea Mays
cttggttagggtgagcagtcgaccaccacttgcttattttaatttggttgtttaaagtcaagttaaattaaatccgacgacctaaatgatgcacacatctatttgtcggttccaaattatggattcactcgaattttgctgtgagtatattatggaaaaaataataaatgtaaatatgacgactgacgagagctagctagctaccacaaaggtcgtcgtcgactatgtctgtggcgtctataaagcaaaactacatacatggcgtgtactgcaccaccgtaccttgcgtacaggctggaagaagcaaacaagaagccaagctataggctctagctagctccggcggacctcagcgactggaatcagatcggaatcagatgggcagcatgggcgtggaggcggatgacgacggcagcatcgtcaaggcgtccctgcagcggtgcgagccctctggcgatgccgcctacggcgagctcagggctctgctggcgcgcctccatgacccggccaccaggcgtgacgcgcgcctcatcctcaccgcgctccaccgccaccagcagcacagctcgtcgcgggcgggggtgtctgcgggccggggcgaagcgggcgtgccggcggtgcggggaggggcgcggcgggggcaccagcaggcgggcgtgggggcgcggcgggcggcggtgcctggcggctgcaacgaacgggagcgagaaagatgagt

SEQ ID NO: 152959 - DNA, 1287 bp, Zea Mays
atggaggccgttggcggagacgacttgacagcacggtcccgcgatccagaggggcacaacgagtggttggctgaccagctggccccgtcggtctgtgaccgaaggcggaacgcgcgagaaagagctgcggcgcgggcccgatctatcggcgagcaccacaggttggtgagaagggtggcctcacaaaaaagctgtttgattttgcatataagcggaatcttgcatcaattgtggggaattgagggtgattcctctggtgggtgcgcagggttacgcccagttccagaatggttgcataacattttcttaggttatggaaatccttctgccgcacagtggatgaatatgcctgatcttctggaagttatagatttcaaggacacttttcttgatgccaaccatgttcagcaaagttttccagactaccaggttacatttatcaattctgatggtacaaaaaacctgcatccaagtcccccttttaaaatcagggtatccaagaaaatgagggaaagcagtcatgctttacctggtaacatgaactccaatttgactgttaagagcagaaataatatggctgatggggagcctcagaaagagaaactaattgttgagacttacattccagctgatcctgggccgtatcctcaagataaacctaaacagaactcagtgaggttcacaccaactcagaagatgtacgaggatgcaagccaagtggcaactgatgctgtcggcagtatcagaaccgtggcgtcgttctgcgcagagaaaagagtggtcgcagcatacagggacaagtgtgaggctctaaggaaacagggcatccgaagcggagtcgtcggaggacttggttacggcttctcgttcttgatgttgttcttcacgtatggcctttgcttctacgtcggtgcgcagtttgtgcgccaggggaaaactacctttccagatgttttcaaggttttcttcgcgttagttctggcagctattggagtcttgcaggcgagtgcgctggcttctgatgcgaccaaagcaagggactctgctatttccatcttcagcgttctggacagggagtccaaaattgactccagcagcggcgacgggatgacgctggaggatgtcagtggcaacatcgatttcagaaacacagtggcgcttgtcggaaagagtggcagcggcaagtcgacgataatcgctttgctggagcgtttgtacgacccagatttcggtagaatatcactggacgacgttgaattgtcccagtgggtcaaggctatggtttga

SEQ ID NO: 152960 - DNA, 1337 bp, Zea Mays
aaatccaacaccaacacacgagacggggacgccacgcccgcgcctcacacggcaacggacgggacgcaccaccagtccaccgccaccccatccaatcccatccccacaaccgggtgccgccgccttctatggcggacttcggcgacgagctctttctcgacgtcggggacgatggtttcggagacctctcctacgtctccttctccgagtccatcgagttggatctcgcctgcccacgcgacgtcttttccgcggggtttgatcccgaaaccctaacccacatcccggggtccccaatctccttcgactccgaccccgacctccgccacctctctccctcgctgacctgctccccgcccttctggggctgcctcgatgacgccgctagcttcgagtgggaggagatcgcggacgctgccctcggcgtcggcggtggcgctggcggcgccggagggggaggacaaggactagaaggagacgccgatgccgacgccgacgtgttcgggttcctcgacgagcgggagatgctgggcgtgatggagggcatcgacagcggtgacgacgactcgatcttctccgatgagcctccgtttgacttcggcgatggcgacacggagcttgaaggcatcttccggagcggtgtcgggtgggagctgctcccggtgcctctggacgaggacgagttcgaggtgctgccggggcacgtcgtggaagtgggcggcgccccgccggcggcgcttgcagtggtggagcggctccaggtggtggccgtcagaggcgaggaggttgtgcaggagtgcgctgtttgcaaggaagggatggaacagggggagctcaccactgggctgccgtgtgggcatttctaccacggggcgtgcattggtccatggcttgccatccggaacacgtgcccggtgtgccggtatgagctgcctactgatgaccctgagtatgagaagcggaggacgaggcgccattctgctggtggttcaacaccacagttgggtgcaccgatgcaggtttgagctagggctgattggtgctatgtcttggatgcaattccatcattccacggaagttagaaacctcactcattgaattggcgctaggatgtttacatgccagtagaattatacttctatgatcttgattttttcaggatttagcttttgtgctcgagagttgaatggtaagaacaattatcttaacaatttgtacatacatcttgtttcaatcaaattcttccttgcttttcagagggtatagttactaccatatttgtactgctgggctaatactttgtttggcattcaacgtaattacagaatcaacattgt

SEQ ID NO: 152961 - DNA, 109 bp, Zea Mays
gttgttgcaagccgcaacggtctgttcgtactttccagggtgtttcaacgtcgaaaaatttaccattgttctatggttcagaggctatagaataaatcatggcacactg

SEQ ID NO: 152962 - DNA, 132 bp, Zea Mays
ttcggttagttcgatttcagttcttggttatttcggttcggttcctcggttccggttctttttgcccaggcctatcggcaggggccatgggaggggcctgggacgagctcgccggggcccgagctcgccgag

SEQ ID NO: 152963 - DNA, 656 bp, Zea Mays
catgcatggttagcaataaagcagtgaccaagagaacgaaggaaccggagaaagaaagctacaccagagggaggacggagatcagctactagcgtaccatagtctctcgtttcgggtagtcaagccacaacggtatgcacgggagaaccgccatggcagtggcctgccttctgtgcatgacggctctgctgctagtccaggatgtccagtccaggaggctactgtggacggagcaggagaagaaacaaacccatggtggcctcgttggcaaccatggcaccgctgaccggcgaagcacctccctggaaccgtgcagtggcgctatgggaggaggcggcacaggaagtgcagacaagcagggcgaattcccgtgtgatgatgatacgtcaaaatggacagaactgcacacggattacatatacacccaagacttcaagcacccataaactgttagctagctggctcgatcgcgtgtgccaagtttctgaagattattagttttgtctgtaggcgttgcgcgttcaatgctgtagtataggtgtataattaattagctagccagtcatcagtgactactgtagttaagacttaagagtacgctgaatgagtatcatgtatggacgcattagatggtttaatatatgcatgcatgtttg

SEQ ID NO: 152964 - DNA, 360 bp, Zea Mays
atgaggccggagagagttggatcaggtggtgtttgggtgaagctcatgggcggcgccggcgggcccccgccgagcccatggaggacgccgacaccctacatcttcctggcgctctccttcatgatgggcgtcgtcgcggtggcgctcgccgtgctcatctgcatgcgcaagaagctgccgtcgtcctcgccgcagggggccgacgagaaggcggcggccgaggcggcggcggcggcgcgggccctcgacccgctgcaccgcgagcccaaggtcgttgtgttcatgccaggcgaccacgacgcaccgtccttcgtcgccagcgccaagccgctcggcggcgacggcgcggcggcagtgtag

SEQ ID NO: 152965 - DNA, 544 bp, Zea Mays
aagatccgctcagctgtgcaactgaatcgcgccaggatccaccgaagtccctcgcccacacgaccaacggacggatggggctggccgctggcgggaccactgcctagcttcacgggtgctcctcctacctgacgcgtgcgcagtggacggagagatccgtggggtgcggatcccttgcagtcctgaggggaattgaccactcattcgctgcgcataaaaagaggaacgctcatggccctggaactcaccgccctggtcaaccagaagtaaggcagcgcgttcgcccatggtgtgccgtggccattggagagagagggtgagcgcaggaaaccaacaggggagatccgccgccgcactcgaggagagagaaagggggagttcgtcggatcatgtggagcgaaggtcgcggcgccagggcctgccagagaggttcgctgatgagcgtagaagttcatcggggtattgggtttgtttcctatggagtccgtggttcgccgccgggcagctgcaagtcgagctcgtcgccgtcgcggtcggatcctac

SEQ ID NO: 152966 - DNA, 2947 bp, Zea Mays
gtgacgcgtggaccccgcacgcaaaccctagatcggaagccgcacccgggcacatgaccgccttatccccgagtcagaccagcggcggccggaaccgggagccccgttgctggccacgcccccaccgctcgcgcgcgtcgagcagcttctcgtcgtagttgagcctacgcttggcgcctaccgccggttccgctgccgggtgtcctcccttcgtgccgctgacaccagagggtaggatccccgcgctttcgaccagcagatcccgccgcgacccaggaaggagacacttatggggaagggacaaatattagctgttcttcaaataggtggagaattcaacaccgatgaagatggacacatgtcatattctggtggagaggcacatgctatgcatgttcaaagtgactggacttttagtgcatttaagcaagagatatcgtcaacacttaacaatctgaagcttgaccagtttgcattcaagtatttccttccaaagaatgataaaactttgatctctatttccaatgacaaggacctacgacgcatggttgaattccatgcggagtcagattcgacatacatttatgtcatgaagaaagctgacaacagatcaaagaacattgttgctgtcttggacactcccacagatgcctttgcgattgtcccaacaactcaggatgggtctaagagacaaaaggtttgtgcaagttggaagaatgtgataactggagttggccaagtgtttgaaggacctaaggatttccgtgatgccttacataagtatgccattgcacatagattccattatagatttatcaagaatgactcatctcgtgtgactgctgaatgtactggtgaaggttgcccatggcgaatacatgcttctaagtcccctgcaaagaaagaatttatggtcaagaaaatatctgaaagccacacctgtgaatctgaaacagtcaaaagcaatcggttggcttctcaacgatgggttgctagtgtcataaaagaaaagttgcgtgatagtccaaactacaggccaagagatattgcaaatgatcttcaacgagagtatggactatgcctgaactattcacaggcttggcgtggaagatcaattgctcagaaggaactttatagtacacacgaagaggcctgcagtcagttgccttggttttgtgaaaggattgtagagacaaaccctggaagtgtggcaactgtagtggccttggaagattcaaagtttcgtttttttgttgcattccatgcatcgctccatggttttgagcatgggtgcaggccgctcctttttcttgaagcgataactgcaaagccgaataagcactggaagctactggctgctgcttcagttgatggtgaaggtgatgtgtttccagttgcttttggtgttgtggatgacgagtcgcgtgaaaattggcattggtttcttgagcaactaaaatcttcacttggcacatctcgaaccatcacattcatatcgaatggagaacatggactttgggatgtattatcttcagttttccaagagtgtcatcatggctactgtgtggagtctcttattgaagaatttaagatgcaactggatgatgcatggactgaggaactaaaagattcgatggttgagcatcttaagaaggccataaattcatgcacagctgatgagttcaatcagtatattgagctcatcaaaagtggttctgacaagcttgctgattggctcttggagatcaaacctgagcgatggtcagatgcttttttcaagggatcacgtcatgggcagtattcttgtaatatttttggcactgtgtctgagtggattcccacgagatatgagctttcagttgtgcaattggttgacacgataagatgcaagctgatggagatgatgtacacacgcagagagtcttccaatgcatggactgaggtattaacaccggcagccaatcagaaacttcaggaagaggtgaacaaagcccacaccctcaatgtccttccagcagaaaacggtgaaaatggcaatgtgtttaaggtctgtgatgactcagttaatgttgtcaaccttgacacatgggaatgcacctgccaaaggtggcatatttctgggctgccatgcatgcatgtgattgctgtattggagcgcactgggcaatatgcatatgactactgtgtgaagtacttcacaacagaatgctaccgcttgacctattccttgtcaataaatcccatacctgatgttattgtgccgcctacattaatcgacttagctcagagcccagcaacatacccatgcccactgcgaacccgccgtcgggttggccggccaaaagagaagcctgctgatcctcgcattgcaatcaagagggcagtgcgctgcagcaggtgcaagggttatggacacaacaaggcaacctgcaaagttcctatcagcagtttcagcacgtagtatttactcatcaaatcagttgtgcagtgtgcattagtgtggagagttgttcgtgttattctctgcaatgttagtgttgatgtttcttttgatagtctgtgatacatgctagggatgatcttagcttggctgccaagagaggagtctgctgatcctcgcattgcaattaagagagcagtgcgctgcagaaggtgcaagggttatgggcttatggccaccacaaggcaatctgcaatgttccgatcagcacatagtatttaatcattggatcagttccgcaatgtatattaaggtggagagttgttcgtgttaattctccaaaatgctagttctgatgtttcttcggatagtctgttatacatgcaagggttgatcttagctctaaattgatctgtattttcaccattgcttagactaactgtattcagcttgtgagtaaaacgccgtagcttatactcatgttgctatccactttactcactttct

SEQ ID NO: 152967 - DNA, 342 bp, Zea Mays
aataagtagctggctaccagccctctgtatgtatatacactctggacgatctaataaaagaagcccacaacaatggtctggaatcatcactttttatgggaatcgatgcaaccagaaggtggtggcttacctgagggaggtgtgctatagcagattgaaaaggattttggcttatttactaattttagggaagagtttattcggtcagccttacaactataggggtctggttgggtttggcttgcttgtaagtttctttctattttctttgaagtacagacaccaccggttcaaactactgatttcctgattgctctttctaaagctaatattctgctggat

SEQ ID NO: 152968 - DNA, 195 bp, Zea Mays
cttgtccacatatatatacacaacgaaaagctcgtccagtattgctcttatttaggacgatcagatgtacacatccttacataagttacagacgatatttgagaatagatcgacctattgacatggatgggttgattgagagacccacagaaagaccaaagatttcacatggtgatacgatcggcgcggcgtgca

SEQ ID NO: 152969 - DNA, 2207 bp, Zea Mays
gtgtccacctctgatctcttcatcctcgggtcgggactcctctgtctccttgccctgtccccaaacaacctctgaataaagggtaactaccattacgccattcgcataaaaaaaactgagcctgcccgcccgcccgcgcgctccgctccgtgaactatatctatctatcacctgctgctccaaggaggcggacagaggcaggcaggaaggcactcacttctccaggagcccggagtcggcagcaagagagaatggccgccgacgccgccgccgccgccacccttcgtactgctctctcccaaggtctggtgctgtggcatgtttagtgcaatcttcattgcttgctgtcttgctgcatttaacacagcacgagcttcagagaatagtccaagcctatctgtgttgccaagagatctcatccaaggtttacggcaatgaaccatttctaaagcacaaagacgtgatgtctttatcaattcatcaggagagcaaatggcgtcaacaggaggtcaccgacgagcggttcgtcgacatacccgaggaggtcatcgacgtgtacaagctctggcgcccgacgcccctgatcagggccaggaggctggagaagctgctcggcacgccggcgaagatctactacaagtacgaggggaccagcccggcggggtcgcacaagcccaacaccgccgtgccgcaggcgtggtacaacgccgcggcgggggtgaagaacgtggtcaccgagaccggcgccggccagtggggcagcgcgctgtccttcgccagcagcctcttcggcctcaactgcgaggtatggcaggtgcgcgcgtcgttcgaccagaagccgtaccggaggctgatgatggagacgtggggcgccaaggtgcacccgtcgccgtcgacggcgacggaggccggcaagaggatccttgaggcggacccgtccagcccgggcagcctcgggattgccatctccgaggcggtggaggtggcggccaccagcgccgacaccaagtactgcctgggcagcgtgctcaaccacgtcctgctccaccagaccgtcatcggggaggagtgcctggagcagctggcggcgctcggcgagacgcccgacgtcgtcatcggctgcaccggcggcgggtccaacttcggcgggctcgcgttcccgttcttgcgcgagaagctgcgcggcaagatgagccccgcgttcagggccgtggagcccgccgcgtgccccacgctcaccaagggcgtctacgcgtacgacttcggcgacacggccgggctcacgccgctgatgaagatgcacaccctcggccacggcttcgtccccgacccgatccatgcaggtgggcttcggtaccatggaatggcacctctgatctcgcacgtgtacgagctgggcttcatggatgccgttgctatacagcagactgaatgcttccaagctgccttgcaattcgccaggacggagggcatcatcccggcgccggagccgacgcacgcaatcgccgcggcgatcagggaggcgctggagtgcaagcggaccggggaggagaaggtcatcctgatggccatgtgcgggcacggacatttcgacctcgccgcgtacgagaagtacctgaggggagacatggtcgatctctcgcacccggcggacaagctggaggcctccctcgctgccgtgcccaaagtctgacggcgttggagccaacagcacatgcgactggaatgggacgaataatccattgatatcggcttcttgaatcttgtggtcatccatcgcccatcggcagtgggatacttgtgttccttatgaaatgaatgaataaaatttcaataaaagcattaattttatcatattcatggatatgtttgaatgtttgatcgttcttttttagggcattagtatttggtacagcatacactttcaagtttgaactctaaactccacttaaaaagaaacctggtagcatctcatacctaatataccaagatttacttccaaatagcacacttttaaccgctttatttgtttgaaaatacttgacgatacaacaacaacaacaacaacaacaacaacaaagcctttttgtcccaagcacgttggggtaggctagagatgaaaccccatatgaaaacctcagagctcaacccccaaagaacagaaaagggaaacaaaggcaaaggagaaccgaaaacaacgaaacagg

SEQ ID NO: 152970 - DNA, 475 bp, Zea Mays
ctcggaagttagtaggttctcggaagttagtagcttcacgccgtcagcgctgtcagctgattaacttcctacgactaactttctacggctgactgtagccctaggaagttagctggctaacttcctacggctgactgtagcccctaggaagttagcttcctatggctgactatagcccctaagaagttagctagctaacttcctgcgacccaataagcctctaggaagttaatttgaccaacattacagatgttgtttatttttattttacaccacattccacatcataacaaatatatagcacaacatatttttcacataaaacatctcacacacaatcacataacaatattaaatccatagtctcatcaattacattacaaaagtctcatccatagtcataataagacacatctcattcagtactaataagagaaaatatctcatacatagtcataataaaagtctcaagtat

SEQ ID NO: 152971 - DNA, 2927 bp, Zea Mays
ccctggcggcctggcccctgcggtttctggttgtccctcacgccaatgtagcttgcccctgttttgttgctttgaccaccttaaaaacctcagggccttcaaatatactcaccgaatcacatcctgtcacgcctcctgctcaaattcctaacgcccgagaaaccaagaaccggggtgaggccgctgtgcgacgccgtcaccttcacctaatcccaacttccccactagtcctcaagtgtctctcttcttctcttcggttacaagagcagaccggagttaccgggcggtggaggccgcgatgaagagccctcctgtcatggatcccgaggcgccgccatcgccgccgctgccgggcactcctcccgatgacgaggaggagaagcggggaggacggaacggggtgccatggcggatgacgctgagcctggcgtaccagagccttggcgtggtttacggcgacctcagcacgtcgccgctgtacgtgtacaaggcggcgttcgcggaggacatccagcacacggagagcaacgaggagatcctcggcgtgctctccttcgtcttctggacgctcacgctcgtcccgctcctcaagtacgtctgcgtcgtcctccgcgccgacgaccacggcgaaggaggcaccttcgcgctctactccctcctctgccgccacgcgcgcgccgcgctcctcccgccaggacgaaccgccgccggggacgaggaccagttcttggacggagccgacggtggcaccaagaaggctacggcgcagaacggcaatgcagtgacgctgggcgggggcgctgctgccagcgtcaggaggctgctggagcggcacaaggtgctgcagcgtgtgctgctcgtgctggcgctggtgggcacctgcatggtgatcggcgacggtgtgctcacgccggccatctccgtgttctctgcagtttccgggctggagctgtccatggagaaggaacatcataagtatgtggaacttcctattgcctgtatcatactggtttgcctgtttgcactgcaacactatggtacacaccgggttggcttcatttttgctccagtagtggtcacatggctcctatgtataagcgttattggtgtttacaatattattcactgggaacccactgtatatcgagcattatctccgtattacatgtacaagttcttgaggaagacacagagaggaggttggatgtccctgggaggaatactgttatgcgtaactggttctgaagcaatgtttgccgatctagggcattttaaccagttgtcaatacagattgcttttacatgcatggtgtatccagcattgatccttgcatacatgggacaagctgcttatctgtgtaagcatcataccatggaaagtgactataggattggattctatgtgtctgtgccagagaaaattaggtggcccgttatggcaattgctattcttgcagcagttgtgggaagccaagctgtcatcactggtacattctcaatgatcaagcagtgcacttctctgggctgctttcctcgggtgaagataattcatacatctgccaaagtacacgggcaaatatacatccctgagatcaattggattctgatgatactgtgcttagctgtaaccattggtttcaggaacacaaaacacttggggaatgcatcaggattggctgttataaccgtcatgctggtgacaacgtgtctgatgtccctggtgatagtcttgtgctggcataagagcatatttctggcaattggcttcattgtgttctttggaaccattgaggcactgtacttctcagcggcactcatcaagttcagggagggggcctgggtcccaatcgtccttgcttttatcttcattttgataatgtgcatctggcactatggcaccatcaagaggtatgagtttgacgtccagagcaaggtttccatcaactggctccttggtctcagcccgaacctcggcatagttcgtgtccgcggcattggcctcatccacaccgagctcgaaactggcgtcccggcaatcttctcgcattttgtcaccaacttaccagccttccaccaggtactcatattcatgtgcatcaagaacgtaccaataccacatgtccgtcctgaagagaggttcctcgttgggaggatcggcccgaagcagtacagaatgtaccggtgcatcgtcaggtacggctaccacgacttccacaaggacgacattgagttcgagaaggagctggtgtgcagcgtcgcggagttcatccggtcagggtcgtccaagttgaacggcatgcccgaggagttcgacgaggaggagcagcgcatggcggtagtccgctccaacagcatccgcatgctcgaggaagaggctacagtggagaagaccgtcggcccgtcccaggccagcagggagatacggtcgccgtcgcccactcctcccccggtggttggccccaagaagcgggtgcggttcgtgctgccggcagcgagcccgaagccgaatgccggcgtgcaggaggagctgcaggagctgtccgacgcgcgggaggccggcatggcgttcatcctgggccactcgcacgtgaaggcgaagagcgggtccagcttcctccgccggttcgtgatcaacttctgctacgacttcctgcggaggaacagccggggtcccaactacgccgtctccatcccgcacgcctccacgctggaggtgggtatgatgtactatatctgatctgatgactgaacccctgaaactgagggggagaaatataggagcaggaaaagatgaagaggaaatggaacaaaaagttttcagctgtatatgctagatcttgtaagtaactgctggtgagttccgttgtaaatgcagcttagttttcttgttaggccttcggcttctctcgtgaataggagtaccaaaa

SEQ ID NO: 152972 - DNA, 3119 bp, Zea Mays
ccctggcggcctggcccctgcggtttctggttgtccctcacgccaatgtagcttgcccctgttttgttgctttgaccaccttaaaaacctcagggccttcaaatatactcaccgaatcacatcctgtcacgcctcctgctcaaattcctaacgcccgagaaaccaagaaccggggtgaggccgctgtgcgacgccgtcaccttcacctaatcccaacttccccactagtcctcaagtgtctctcttcttctcttcggttacaagagcagaccggagttaccgggcggtggaggccgcgatgaagagccctcctgtcatggatcccgaggcgccgccatcgccgccgctgccgggcactcctcccgatgacgaggtatggtggaccggggttgcctggtgtttcgaaggtccaatcttgtcgggcggctcttgttcgccgtcgccgtggctcctgaatctcagaatgcccttgtccgtcggttttcttgcgatcttggagggttccggtcctgaaatgtgctgatttcttttgtttgtgtggctgtgctgtgcccgcaggaggagaagcggggaggacggaacggggtgccatggcggatgacgctgagcctggcgtaccagagccttggcgtggtttacggcgacctcagcacgtcgccgctgtacgtgtacaaggcggcgttcgcggaggacatccagcacacggagagcaacgaggagatcctcggcgtgctctccttcgtcttctggacgctcacgctcgtcccgctcctcaagtacgtctgcgtcgtcctccgcgccgacgaccacggcgaaggaggcaccttcgcgctctactccctcctctgccgccacgcgcgcgccgcgctcctcccgccaggacgaaccgccgccggggacgaggaccagttcttggacggagccgacggtggcaccaagaaggctacggcgcagaacggcaatgcagtgacgctgggcgggggcgctgctgccagcgtcaggaggctgctggagcggcacaaggtgctgcagcgtgtgctgctcgtgctggcgctggtgggcacctgcatggtgatcggcgacggtgtgctcacgccggccatctccgtgttctctgcagtttccgggctggagctgtccatggagaaggaacatcataagtatgtggaacttcctattgcctgtatcatactggtttgcctgtttgcactgcaacactatggtacacaccgggttggcttcatttttgctccagtagtggtcacatggctcctatgtataagcgttattggtgtttacaatattattcactgggaacccactgtatatcgagcattatctccgtattacatgtacaagttcttgaggaagacacagagaggaggttggatgtccctgggaggaatactgttatgcgtaactggttctgaagcaatgtttgccgatctagggcattttaaccagttgtcaatacagattgcttttacatgcatggtgtatccagcattgatccttgcatacatgggacaagctgcttatctgtgtaagcatcataccatggaaagtgactataggattggattctatgtgtctgtgccagagaaaattaggtggcccgttatggcaattgctattcttgcagcagttgtgggaagccaagctgtcatcactggtacattctcaatgatcaagcagtgcacttctctgggctgctttcctcgggtgaagataattcatacatctgccaaagtacacgggcaaatatacatccctgagatcaattggattctgatgatactgtgcttagctgtaaccattggtttcaggaacacaaaacacttggggaatgcatcaggattggctgttataaccgtcatgctggtgacaacgtgtctgatgtccctggtgatagtcttgtgctggcataagagcatatttctggcaattggcttcattgtgttctttggaaccattgaggcactgtacttctcagcggcactcatcaagttcagggagggggcctgggtcccaatcgtccttgcttttatcttcattttgataatgtgcatctggcactatggcaccatcaagaggtatgagtttgacgtccagagcaaggtttccatcaactggctccttggtctcagcccgaacctcggcatagttcgtgtccgcggcattggcctcatccacaccgagctcgaaactggcgtcccggcaatcttctcgcattttgtcaccaacttaccagccttccaccaggtactcatattcatgtgcatcaagaacgtaccaataccacatgtccgtcctgaagagaggttcctcgttgggaggatcggcccgaagcagtacagaatgtaccggtgcatcgtcaggtacggctaccacgacttccacaaggacgacattgagttcgagaaggagctggtgtgcagcgtcgcggagttcatccggtcagggtcgtccaagttgaacggcatgcccgaggagttcgacgaggaggagcagcgcatggcggtagtccgctccaacagcatccgcatgctcgaggaagaggctacagtggagaagaccgtcggcccgtcccaggccagcagggagatacggtcgccgtcgcccactcctcccccggtggttggccccaagaagcgggtgcggttcgtgctgccggcagcgagcccgaagccgaatgccggcgtgcaggaggagctgcaggagctgtccgacgcgcgggaggccggcatggcgttcatcctgggccactcgcacgtgaaggcgaagagcgggtccagcttcctccgccggttcgtgatcaacttctgctacgacttcctgcggaggaacagccggggtcccaactacgccgtctccatcccgcacgcctccacgctggaggtgggtatgatgtactatatctgatctgatgactgaacccctgaaactgagggggagaaatataggagcaggaaaagatgaagaggaaatggaacaaaaagttttcagctgtatatgctagatcttgtaagtaactgctggtgagttccgttgtaaatgcagcttagttttcttgttaggccttcggcttctctcgtgaataggagtaccaaaattgcctt

SEQ ID NO: 152973 - DNA, 378 bp, Zea Mays
atgtgtcaaagcttcaataacagtatcatggatgcaaggttcttttcgatggtaccaatgcatgaagcaataagaaagaagatgatggatagaattcaagagaacagagctagagcagagaaatggtatggtacaatatatcctaacatattcaaaacgttgagagtcaacatccagaaatctagaaatgtgatgttctatggaatggaaaggaaggctttgaagttcaagagaaggaggacaggagatactgggaattgtcagggttgccatgccgtcatgcaattaactgcatgtataaagcctccaagtgtttggatgactactattatggttggacagacatacaagagaagggataaggatggcgagtcctag

SEQ ID NO: 152974 - DNA, 634 bp, Zea Mays
ccaccagatcaactttccgccatcaccttcaccgctgcccaccttctccaccacaccccctcgcacttccacgaccgactgccatgcgccgccgccccatattccaagattccacaatctagaactgtccctcttcgatggcaaagaggattcgctcggatggctcaattgatgcgaacaatactttcgcggccagcgcacagttgaagaagatagggtctggttagcctcctaccacctgacgggcgcagcacaacaatggtaccatctattggagcgcgaggagccttccctgtcctggccacgtttcaagaatttgtgccaccagcggtttggtcctcccctccgacagaatgccctcggcgagttggcctggctatcttttcggacgatggtggaagactaccaagatcgcttcatggagctgctctgtcatgtggctcccctagcatcagaacagcaggtgcagttgtttactgcgggactccctgacctgattcgcatcgatgtggagctgctcaatccgccagacctcaatacggccctcgcaacatcatgggcatatgagcgccgatcacagagcttgccatggggtcacatgccagtaggacagaggcagccacggtccacacct

SEQ ID NO: 152975 - DNA, 3717 bp, Zea Mays
atggcctcggcccccttcccgccagtcgcggcgtcggcggcctccgcgccgccgcgcctggccccgcgccaccccttcgctgctgccgcagccgcgcgccgctcctcgctctcgttccgccccgccgcgcgccggcccgttctcccgctccgctcctccgcggtcgcggctaacaccctccgctgcacgcaccgccgcgccgtctcatccaggtcgaggagacgcgcgcaagaactcggcgcggcgcccgcgttggctgcgtcgacctggggcgtcggcgaggagaagggcggttgcctctcgtgcttccccaagagtaggcggggcaggtcggggctcgcgaggttcgcgccgtgcgcgctcccgcacgcgtcgggactatcgtttcgcagccggttgagcgggtccaaggtcaagcctagccatatattgcacgccgctggacctgatgaaccacatgttgcaagtccaacatggtctgatacttcccttgatacacgtgacatggatcatgctattagtaaggaggagcttgaagatgttctcaacactccgcttcctgagcatccgaagctaattcgtggtcaattgaagaatggacttcggtatcttatcttaccaaataaagttccagcaaacaggtttgaggctcacatggaagttcatgttggatcaattgatgaggaggaggatgagcaaggaattgcccatatgattgaacatgtcgcgtttcttggcagtaaaaaacgtgaaaaacttttggggacaggtgcgaggtctaatgcgtatacagacttccaccatacggtgttccatatccactctccaactaaaacaaaggaatatggtgaagacttactcccttctgtgctggatgcattgaatgagatagcttttcatccaaagttttcttcatctcgtgttgagaaggagagaagagcaattctttctgagctccagatgatgaacacgatagagtatcgtgttgattgccagttgttgcaacatctgcactcagaaaacaaactgagcaacagatttcctattggacttgaagagcaaatacagaaatgggatccggagaagatccgtagatttcacgaacgttggtactaccctgctaatgccactttatatctggtgggggaaattgatgatattcctagagctgtgcgggaaatagaggctgtatttgaacacactctttcagaaaatgaaggaaaccctgtaccgagcactagtccatttggtgctatggcaagcctttttgcaccaaaactcccaagtggctttactacaaacctaactggtgaaaaatcacctgccacagataaaataaagcctgtaaaaagggaaagacaagcagttagaccacctgtagagcataagtggtcccttcctgaagttgctcaggacgccaaacccccagcaatttttcagcatgagttgattcagagtttctctatcaacatgttctgtaagatacctgttagcaaagttcagacctacaaggacctgcgtagtgtactcatgaaaaggatatttttgtctgccctacattttcgaatcaatacaagatacaagagctcaaatcctccttttacttcagttgagctggaccacagtgactctggaagggaagggtgcactgtcactactcttactgtaacggctgaaccccaaaattggagaagtgccatcaaagttgctgttcatgaggtgcgaaggctgaaagaatttggtgttacaatgggagaaatgacccgttacatggatgcactgataaaagatagtgaacagcttgctatgatgattgacagtgttccctcagttgacaacttggacttcatcatggagagtgatgcacttggccacactgtcatggatcagttgcagggacatgaaagtttgcttgcagtagctgaaactgtcacccttgaagaggtcaatactgttggtgcggaagtattggaattcatttcagattttggaaaacccaatgctccccttcctgctgctattgtggcatgtgtacccaaaaaggtacatgttgatgacataggtgaaactgaatttgagatatatccagaagaaatcactgaggctatcaaggcaggtcttgaggaacctatttacccagagcctgagcttgaggtgccaaaggaattgatcactcaatcaaagctcgatgaactgaaattgcaacacaatccatcatttgttcctttaaccaaagaggagaatgcggtgaaagtgtttgacagtgaaactggtatatcacaacgccgtctttctaacggaatttccatcaactacaagattacacaaaatgaagctagggttggtgtcatgcggctcatagtagggggagggagagcgacagaagattctgaatcaaagggatctgtcattgttggtgttcgttccctgagtgaaggtggctgtgttggtaacttttctagggaacaggttgaacttttctgcgtcaataaccttatcaactgctcactggaatcaaatgaggaattcatatttatggaatttagatttgctttaagagacaatggcatgcgtgctgctttccaactccttcatatggtccttgagcataatgtatggctagaagatgcatttgatagagcaatccagttatatttgtcttactatcgctctatccccaaaagtttggaacgttctacagctcataagcttatgttagccatgctaaaccatgatgaaaggtttgtagagccatcgccacattcactgcagaagttgactcttcagtcagttaaagatgctgtcatgaaccagtttgtgggtagcaacatggaggtcagcattgttggtgatttcactgaagaagaagtagaatcttgtgttcttgattatcttgggactgtgagggcttcaagttctccaaccatagaggagcgtattgaaaagatttcctttcgaccatttccatcagatgttcatttccagcaagtatacataaaggacacagacgagagagcctgtgcatatattgcaggccctgctcctaaccgttgggggttcgctactgaaggaaatgacctatttaatgtcattcagagatctgacgctgatgcagaaatatctgaaccagtaagcttggatctaacagggaagagacacatcaatgttcgcagccaccctcttttctttggcatcactttgagtctgcttgctgaaattatcaattctaggctatttacaacagttcgagattccatgggattaacatatgatgtttcttttgaattgaacctttttgacaaattggatcttggttggtatgtgatcgcagtcacttcaactccaagcaaggtccataaagctgttgatgcctgcaaaggtgttctgagaggattgcatagtagccgaattgtggaaagggagctcgatcgggcaaagaggacactgttgatgaaacatgaagctgagacgaagacaaacgcctactggcttggtttgcttgcccatctacaatcttcatctgtaccaagaaaggatgtatcatgcatcaaggaattgacgacattatatgaaaatgcaacgattgaggatctgtatattgcatatgagcacctgaaagttgacgattcttctttgtttgcttgcattgggattgctggcgctgaatctggtgaagatacaaacggtaataagctactgatgctaattcaactttaa

SEQ ID NO: 152976 - DNA, 78 bp, Zea Mays
ctcttccatcttagcatttagtttgtttacagtctgttattatagttgctctaaatgcggtgatgtatctctcaagaa

SEQ ID NO: 152977 - DNA, 76 bp, Zea Mays
gtttcgatctgggtgagttacggcttacgatcggaaaacagaatctctaggggtagttcgatcattcactgttggg

SEQ ID NO: 152978 - DNA, 370 bp, Zea Mays
gcgagcggcgtcatggaaggcgcgaggtgcgcgcagcgatgatcgcgcgtgacatcctccgatccggagcagtttgggcggcccgagtgacgacctacatttgtgcttatgtcatcgacgacgtcctccgaccacaacctcattcaattcgtgttttcttttcgattattgtgttttatgtctaccacctgtattatttacgctaaaaactgtacggttttatgtttgaacacggagttcgtatatcagtttgctccatgcatattttttgcatgcacattggaaatgtaattccttgatttatgttgttcttaactatcataaaaaatcaaatcatttatgttcgtaaataccagatttttacgtctct

SEQ ID NO: 152979 - DNA, 207 bp, Zea Mays
atgaaggggacaccaaaatgtaatgaggaggatgccaaggtgaaggatgaagtggagatggatggtcgggtggtggagcagaaagtgcagatgacggcggtggcggtggagatccggaagaaggaatccggcgagctggtggccatcgggaggcagtggatgacggcctccaggcccaaagtcgctgctgctcacagcaagatatga

SEQ ID NO: 152980 - DNA, 309 bp, Zea Mays
atggcgtcgcctccgcccgatgtggacctgggcaagctgagctacgagatcttctccctactcgagagcaagttcctcttcggcggcggctccgtgccgggcacgccagcgcgggcggcggctccgggccccggggaggaccgtggcagggtgcgggtgctggcgatcgacgggcgcgggccaggccccggcgacgcgctactggcagcggccgcgctcgcgaggctggaggcggcgctgcgcgtggcggcggacgggtcgcggggcggattgatcgggcggttgtttggctggggcagtctacactaa

SEQ ID NO: 152981 - DNA, 1531 bp, Zea Mays
gaagaaacgtctagatcgctcgtccggtgtggtctctggacttgcttgccgttcacttctcttcagcggcagcgtggcaaggcaacgagagcaacgaagagtattcaaaccgaaaacaatggatccggtgcggaagagcgtgtgcgtgaccggcgctggcggcttcgtcgcgtcggagctggtgaagctcctcctctcccggggccaatacgcggtccgcggcaccgtgcgcgaccctgatgcggatagagagacgtgggaatgtggaaccgcatttttcttggaagtcgaaagaagctccagattctttataaaaaaaggtgctagcaagaatgcccatctcaaggtgctggaaggagctgaggaaaggttgcagcttctcaaggctgatctgatggactacgacagcattgcatcagcagttgccggctgtgagggtgtcttccatgtagctagccctgtcctttcccatcgaccctccaaccctgaggtggaggtcatagctcccgctgtaataggtacaaccaatgtgttaaaggcttgctatgaggcaaaagttaggcgagttgtggtggtgtcttcatgtggagctgtgtatgctaatcctatttatccgaagggtaaggtgtttgatgaagactgctggtcagatgaggattactgcaggaagaaggaggattggtatttagtttccaaaacactgtcggaacgagaggctcttgcttttgcagcaaaaacagggctggacgttgtaactgtttgtccgtcattagtatttggacccttgatgcagcctacagtaaatttgagcagcgaaatgatccttaaatatttcaaagatctcgagactgttgaaaatgtactcagtaatatggtggatattcgtgatgttgctgatgctcttcttctgacttacgaaaagccagaagcgtctggacgatacatctgcagttcacatgcaataaaaatttctgatatgataaacatactgaagaccatgtatccgtcttacccttatcccaaaaattttgtggaagatgatgtcaactctgtatacagctctgagaaactgcagaagctggggtggagcttcaagcctatagaggaatccctccgtgacactgttgaatcctacaaggcatttggcatcctgaattgaacatcgaactaggattgtttccatctgctgttgcctccgaactcctcctgaataatgtaggcgcagtgacagcagcactgccgttctctttatttttcaacactattatgtagtggttcaggccaaataagtaggcccggtgctgactgttgtatggtttgtggcctattgtcgttgctaaaaactagaaatatgcgtactaatgttgcattgctgcacttgatttgcttgtcgtcattctgatgcattttgatttgagcttttgaaagatgcagcatatgattttctgaaacggagatcgacagccagttggggtaaatgaagtgtagaggtccgttatttgtgataaaaaaggcaaactaaaaaaccata

SEQ ID NO: 152982 - DNA, 1453 bp, Zea Mays
gaagaaacgtctagatcgctcgtccggtgtggtctctggacttgcttgccgttcacttctcttcagcggcagcgtggcaaggcaacgagagcaacgaagagtattcaaaccgaaaacaatggatccggtgcggaagagcgtgtgcgtgaccggcgctggcggcttcgtcgcgtcggagctggtgaagctcctcctctcccggggccaatacgcggtccgcggcaccgtgcgcgaccctggtgctagcaagaatgcccatctcaaggtgctggaaggagctgaggaaaggttgcagcttctcaaggctgatctgatggactacgacagcattgcatcagcagttgccggctgtgagggtgtcttccatgtagctagccctgtcctttcccatcgaccctccaaccctgaggtggaggtcatagctcccgctgtaataggtacaaccaatgtgttaaaggcttgctatgaggcaaaagttaggcgagttgtggtggtgtcttcatgtggagctgtgtatgctaatcctatttatccgaagggtaaggtgtttgatgaagactgctggtcagatgaggattactgcaggaagaaggaggattggtatttagtttccaaaacactgtcggaacgagaggctcttgcttttgcagcaaaaacagggctggacgttgtaactgtttgtccgtcattagtatttggacccttgatgcagcctacagtaaatttgagcagcgaaatgatccttaaatatttcaaagcagatctcgagactgttgaaaatgtactcagtaatatggtggatattcgtgatgttgctgatgctcttcttctgacttacgaaaagccagaagcgtctggacgatacatctgcagttcacatgcaataaaaatttctgatatgataaacatactgaagaccatgtatccgtcttacccttatcccaaaaattttgtggaagatgatgtcaactctgtatacagctctgagaaactgcagaagctggggtggagcttcaagcctatagaggaatccctccgtgacactgttgaatcctacaaggcatttggcatcctgaattgaacatcgaactaggattgtttccatctgctgttgcctccgaactcctcctgaataatgtaggcgcagtgacagcagcactgccgttctctttatttttcaacactattatgtagtggttcaggccaaataagtaggcccggtgctgactgttgtatggtttgtggcctattgtcgttgctaaaaactagaaatatgcgtactaatgttgcattgctgcacttgatttgcttgtcgtcattctgatgcattttgatttgagcttttgaaagatgcagcatatgattttctgaaacggagatcgacagccagttggggtaaatgaagtgtagaggtccgttatttgtgataaaaaaggcaaactaaaaaaccata

SEQ ID NO: 152983 - DNA, 1450 bp, Zea Mays
gaagaaacgtctagatcgctcgtccggtgtggtctctggacttgcttgccgttcacttctcttcagcggcagcgtggcaaggcaacgagagcaacgaagagtattcaaaccgaaaacaatggatccggtgcggaagagcgtgtgcgtgaccggcgctggcggcttcgtcgcgtcggagctggtgaagctcctcctctcccggggccaatacgcggtccgcggcaccgtgcgcgaccctggtgctagcaagaatgcccatctcaaggtgctggaaggagctgaggaaaggttgcagcttctcaaggctgatctgatggactacgacagcattgcatcagcagttgccggctgtgagggtgtcttccatgtagctagccctgtcctttcccatcgaccctccaaccctgaggtggaggtcatagctcccgctgtaataggtacaaccaatgtgttaaaggcttgctatgaggcaaaagttaggcgagttgtggtggtgtcttcatgtggagctgtgtatgctaatcctatttatccgaagggtaaggtgtttgatgaagactgctggtcagatgaggattactgcaggaagaaggaggattggtatttagtttccaaaacactgtcggaacgagaggctcttgcttttgcagcaaaaacagggctggacgttgtaactgtttgtccgtcattagtatttggacccttgatgcagcctacagtaaatttgagcagcgaaatgatccttaaatatttcaaagatctcgagactgttgaaaatgtactcagtaatatggtggatattcgtgatgttgctgatgctcttcttctgacttacgaaaagccagaagcgtctggacgatacatctgcagttcacatgcaataaaaatttctgatatgataaacatactgaagaccatgtatccgtcttacccttatcccaaaaattttgtggaagatgatgtcaactctgtatacagctctgagaaactgcagaagctggggtggagcttcaagcctatagaggaatccctccgtgacactgttgaatcctacaaggcatttggcatcctgaattgaacatcgaactaggattgtttccatctgctgttgcctccgaactcctcctgaataatgtaggcgcagtgacagcagcactgccgttctctttatttttcaacactattatgtagtggttcaggccaaataagtaggcccggtgctgactgttgtatggtttgtggcctattgtcgttgctaaaaactagaaatatgcgtactaatgttgcattgctgcacttgatttgcttgtcgtcattctgatgcattttgatttgagcttttgaaagatgcagcatatgattttctgaaacggagatcgacagccagttggggtaaatgaagtgtagaggtccgttatttgtgataaaaaaggcaaactaaaaaaccata

SEQ ID NO: 152984 - DNA, 1465 bp, Zea Mays
tcgcagttatggcggccgaatcggccgccgtatcttaggcggggtgtggcgctggacgccagcgtccaaacaggcccttagccacaaacaaacatgcccgtgtagaatcactgtagcaataaagaagcgtctagagcgctcgtccggtctgaactgtggtctctgtacttccgttcacttcttcagcggcggcgtgacaacgagagcaagaaagtatcaaaacccgagagcaatggaggcggtggggaagagcgtgtgcgtgaccggcgcgggcggcttcatcgcgtcgtggctggtgaagctcctcctctgccggggccaatacaaggtccgcggcaccgtgcgcgaccctggtgctagcaagaatgctcatctcaaggtgctggaaggagctggggaaaggttgcagcttgtcaaggctgatttgttggactacagcagtgttgcttcagcaattgccggctgtgagggtgtcttccatgtagctagccctgtcccttccggtcggtcctccaaccctgaggtggaggtcataggtcctgctgtaacaggtacaaccaatgtgttaaaggcttgctatgaggcaaaagttgggcgagttgtggtggtgtcttcatgtgcagctgtctatgctaatcctaattatcccaagggtaaggtctttgatgaagactgctggtcagatgaagcttactgcaggaagaacgaggattggtattttgtttccaagacactggcggaacgagaggcttttgcttatgcagcaaaaacagggctggatgttgtaactatttgcccgtcattagtatttggacccttgatgcagcctacagtaaattcgagcagcaaaatcatccttaaatatttcacaggagatcgcgagactgttgaaaacatactcagaaatatggtggatgttcgtgatgttgctgatgctcttcttctggcttacgaaaagccagaagcgtctggacgatacatctgcagttcacatgcaataaaagttgctgatatgataaacatactgaagaccttgtatccatcttacccttatcccaaaaatttcgtggaagatgatgacaactctgtatacagctctgagaaactgcagaagctggggtggagcttcaagcctatagaggaatccctccgtgacactgttgaatcctacaaagcatttggcatcctgaattgaacatccagctaggactgttccatctgctgtttttgcctccgaactctttctgaataatgtatgtaggcagtgaaacagcattgccagcaggttaatcctggcatcatgctggagcagcactgtagttctatctttttcttttttttttccatccccaatactatctagtggttcaggaccaaataagtaggcccagtgctgactggtttatggcttgtggcctattgtcgctgctaaaactagaagcgttcgtactatcttgcactcatg

SEQ ID NO: 152985 - DNA, 821 bp, Zea Mays
gtccgaccccggtgagctctctcgccgcgcgcacatctcgccgagtgtaaccgctttcctcgtatggcccgtgcctcgcaggtcgctcggactcggaggccggcgagccgctcgttctgggcgccgggatgctgctcgtccatctccgcgcggcggaccggtgggagcgcgtggccgcggtgctgcccgggaggacggtggccgacgtcacggcgcactacgacgacctggaggtcgctgtcggctccatcgaggccggcttcgtgcccttccccgctacggcggctgcggcggtggcgcgtcgcagtgggccgccgggttcacgttcgagtgggacggcgacgccggcgggacgggctttaagcgctcctgccacgtggttggcggcggcaagcgcgagcgcgggccagaccacgagcgcaagaagggcatcccctggacgaaggaggagcacaagcataattgctgactcaagcctgtcgaatcatcatgaggattcccttggctctggtttaccctccatatctactggtaaaccttttgatagtgacgaggtaccaccaggagtgacattgactgcccagtttccgtaccatttggccaataagatggacctaaagcttgatatattttcacttggtgatacatcaaaggtcattggaaagctgatgatggatatgtcaagtctatatgatgttggtcgcaataagagatctgctggtctactgatcgtagatcatatagttgatctcctaactccttgcttccatggaaaatatgcgatccaattctgcagcgaaaaatccacaaactccaagtaa

SEQ ID NO: 152986 - DNA, 1280 bp, Zea Mays
ggttttatgctttattgtatttgctctgtgactcaccttcgagtgagattatggtacttgatcctgtcagtggccgtgtcggactagatccgagggattgacggattattctcatttaagtgtggtctagcctctaagacagggctcaggcacttaagttggaataattcgggcagttccgccacaccccactggatataaaagttccttttgagacagtgtttagcaaggaagaatcaaagattaggagcagtatgttatctgaaggtttcatgtcatttgcgtctggatggaactccgttgatgttgactctgaagttagctggttacctgattacgttgataaagcacatgatcacaaacttggttgtgaacttgacactataagtggctcgttcctatccaatagtgctggaatgcgctacttagaagcattgctagacagaggatcgaaagatgggttagtactgattaaaaaatggcttattgaagccttgcagcatgggaagctaacatctgcatccaaaggtcggcaaggagccacttctgtttcagagattcgatctatggtgcaaatgctttcccgagaccagttgtcattgttaaaaaacaagggtgttatctagttagcactagctgctgaaatgactctacgggagcctcaaagttctcgctgggacgcctttacaagtgccgagagaatattaagtgtgacatctgcagagacacctcaaagtcttgccagtgagcttcgtgatttcatcaacactagcactttagttgaatcacacgcacaaactacttcaatggagtcttcacagggcctacttagtttccaggacgtactgcttctaacgattatagggtatatcttagctagtgaaaatttccctacatctatggctggtggtccattttcttgggaagatgagcggtctcttaaagatgttatagtggactctatccttgaacgaccatcatctgtgaagttgcgcttccttgatggcctggatagtgaacttgaagctaaagctagatctaaagatggtgagaggaataaaaactctagcgaggtagcacccagtactgatgttgattttgatgatgaatggggtacctgggatgacagtgataatactgatcaccaaaaggaggaagcttatggggacatgcaacttaagttggaagtgcgagatagagttgatcagcttttcaaattctttcacaaattatccagtatgaggttaagaaatcaagcctttggtgaagcccttggttaa

SEQ ID NO: 152987 - DNA, 787 bp, Zea Mays
gggaatcccttgctctaaacatgccctaaactttttacaagtgggcatatacaatacagttttccataaaaagaacagccatacaatcacaacatcagaacgctctggagtcgaccgtggacttcgaaaattttcttcagcggcagcgctaaaccataacgcaatggcggcggcggcgagtgtatgcgtgaccggcgcgggaggcttcatcgcgtcttggctcgtgaagctcctcctctcccgtggccagtacgtggtccgcggcaccgtgcgcgaccctgaccgacgatctcacggcccgctgataagtgacttcaatttggatctcattggtcaaggggccaatgaaagtcagcatcaagataatgtgctcagtgctagcaagaatgctcatctcaaggagctggagcgggctggggaaagattgcagcttctccaggctgatttgttggactacagcagtgttgcatcagcaattgctggctgtgagggtgtcttccatgtagcttgccctgtcccttctggtcggtcctccaaccccgaggtggaggtcataggtcctgctgtagtaggaacaaccaatgtgttaaaagcttgctatgaggcaaaagttaagcgagttgtggtggtgtcttctgtttcagctgtattcagtaaccctaattggcctaaggacaaggtctttgatgaagattcttggtcagacgaggattattgcaggaagaatgaggtgatgcaattgtcccttagtaaagcgatgatgttgcttgtgcaaataacaacatag

SEQ ID NO: 152988 - DNA, 1411 bp, Zea Mays
gggaatcccttgctctaaacatgccctaaactttttacaagtgggcatatacaatacagttttccataaaaagaacagccatacaatcacaacatcagaacgctctggagtcgaccgtggacttcgaaaattttcttcagcggcagcgctaaaccataacgcaatggcggcggcggcgagtgtatgcgtgaccggcgcgggaggcttcatcgcgtcttggctcgtgaagctcctcctctcccgtggccagtacgtggtccgcggcaccgtgcgcgaccctggtgctagcaagaatgctcatctcaaggagctggagcgggctggggaaagattgcagcttctccaggctgatttgttggactacagcagtgttgcatcagcaattgctggctgtgagggtgtcttccatgtagcttgccctgtcccttctggtcggtcctccaaccccgaggtggaggtcataggtcctgctgtagtaggaacaaccaatgtgttaaaagcttgctatgaggcaaaagttaagcgagttgtggtggtgtcttctgtttcagctgtattcagtaaccctaattggcctaaggacaaggtctttgatgaagattcttggtcagacgaggattattgcaggaagaatgaggattggtattatctttctaaaactctatccgaacgtgaagcttttgcttttgcagcaaaatcggggctggatgttgtaactatttgcccgtccttggtatttggacccttgatgcagtctatagtaaatacgagcagtaaagtactccttaattatttcaaaggagatcgtgagactgttgaaaacagactcagaaatatggtggatgttcgtgatgttgctgatgctcttgttctggcttacgaaaatccagaagcatctggacgatacatctgcagctcacatccattaaaagtttctgatatgataaacatattgaagaccttatatccatcttacccttatcctaaaaactttgtggaaacggatggcaacatcacctgcagttctgagaaacttcagaagctagggtggaccttcagggctatagaggaaaccctgcgtgatagtgttgaatcctacaaagcatttggcatccttaactgagcatccgactgggacagtgagacagcagttccaacagtccaatccctatctcgttcatataaaccgtgaaacagaacatgctgttcatgtaaatttgcaataaaaatttgggaaatttgtagccctctactgaacacttgatcccagcaagaggcttgcaaggttgtgttgtctggtctgaaaaatatgctattctgaggctgtttggcactgctctactctttatttttcaactctgctccattcttgatttatcaaacatcctcaacttcaggatctctacaaaaa

SEQ ID NO: 152989 - DNA, 849 bp, Zea Mays
atggccaccacggagccgtcgccctcaatgggaggcgcaaccggggagccccccattgttactaacatagagcaggattggtattatctttctaaaactctatccgaacgtgaagcttttgcttttgcagcaaaatcggggctggatgttgtaactatttgcccgtccttggtatttggacccttgatgcagtctatagtaaatacgagcagtaaagtactccttaattatttcaaaggagatcgtgagactgttgaaaacagactcagaaatatggtggatgttcgtgatgttgctgatgctcttgttctggcttacgaaaatccagaagcatctggacgatacatctgcagctcacatccattaaaagtttctgatatgataaacatattgaagaccttatatccatcttacccttatcctaaaaactttgtggaaacggatggcaacatcacctgcagttctgagaaacttcagaagctagggtggaccttcagggctatagaggaaaccctgcgtgatagtgttgaatcctacaaagcatttggcatccttaactgagcatccgactgggacagtgagacagcagttccaacagtccaatccctatctcgttcatataaaccgtgaaacagaacatgctgttcatgtaaatttgcaataaaaatttgggaaatttgtagccctctactgaacacttgatcccagcaagaggcttgcaaggttgtgttgtctggtctgaaaaatatgctattctgaggctgtttggcactgctctactctttatttttcaactctgctccattcttgatttatcaaacatcctcaacttcaggatctctacaaaaa

SEQ ID NO: 152990 - DNA, 1125 bp, Zea Mays
atggcgcccttccccaacggctgccgagatgcacacgctgcggctgccgccctcgcccgccttcaacgccggcagccgcaccacaaattccttcccacgcgctgctttctccccactaacggcgcccttccccaacggctgcgaacgcccttccccaatgtctccttctacgcgcgtcttcctccccacgcgctgctctggccgagatgccgccttctacgatgcgaacgccaacagagccggagcccgagcccatcccgccttcaacgccggatctcgccccaaatcctcgcccgccttcaacgccggcagccgctccccaaattcctccccaccaacgacgcccttccccaaacccctccccgtgttcaacgcagacagctcacccaaatcctcgcccacttcccatcgatggagaaaggagtgttacttaaggaccatgccacccccaagacagataggcgttgccaacaatcccatccgggcacatctctgcgatccagctctaggctggtatatgcccgaggagattccgaaggtcttggaaatcagcggcgagcgcagcctcatctacaacttcttctcctaccacgtgtattaatcacggggtcaaaaatagaagcaatttcatacgcgataatgtccaaagatttgacaccttactccaacaaggatctacatatacattatatggagtggcgttctatgctagaattgaccttggcaactcggactgttgtggaaccattccacttgccaattcagttcccgccgtatccaaaacatcttatgccatttcatgaggtcctccaacaacctcataagaggtttatagatgtaataggaattgtcattcatttggcgccgttagagcacatcggtggaaggccgtacagagaggccatactaatggattccagacgtgttatattttattcaaacaatacaagctttatttataggtgggatataatcgtcgtgggtatatggcctgaactgttgcaaagaaatgctctacgcaattcggcgctccatgatccaaaatccgaggagtgctttaatcaacaattatctagagaggagacgggcttatctggcaacagtggtaccagatgtgtagtgtga

SEQ ID NO: 152991 - DNA, 808 bp, Zea Mays
aagaaaaagcaagcccatcgtcctaccgtattagcaatggaggcagcagcaggagaggggccgacgacgacgatgaagacggtgtgcgtgaccggcgcggggggtttcgtggcctcgtggctcgtcgagcgcctcctcgccggcggacgatacaagatccacggcaccgtccgcgatcccggcgacgccaagaacgcgcacctgctggggctggacggcgccgcggagcggctgcggctgttcaaggccgacctgctcgacttcggcagcctggcggcggccattgcaggctgtgacggcgtcttccacgtggcctgccccgtccccgactataccctcaccgaccccgagaccgagctgctggctcctgccgtgacgggcaccatgaacatcctcagggcgtgctccgacgcccatgtcaggagggtcgtcgtggtctcctctctctcggctgtcatgataaaccctgactggggcgagtgcaaggtcatggacgaaggttgctggtctgatgtcgacctctgcagaactactaagcgaaatctcatcttttcctacatgactctaagggcatgtacaatgctgaaggcaactaccatctccaagtgttttgaggaatgcagaggcaagactgtgagaaaggatgttatgtactatatttaattcatacacaatctttatcactatgcatcgatcaagaatatattggatatttgtagccattttcttgcatgtttatggtggatactaaaataaggcatgtgaatttcatgtagaatcataaatataatttatatttatataataa

SEQ ID NO: 152992 - DNA, 878 bp, Zea Mays
gaattcgacgtcggaccaacaagcctcgtccatggcctcgttctggggccagccagggttcaccatcacggcggccaccgacgacaccacgacgaccctcttcaccttggcctccgagcacgccttcaggacgttcttggtgcccgtcacggccggagcgagcagctctacctgcagcaagatgttggtgtcggccaataaagactgaacgtctgaacggacgcatggcgaagccgaaggaagaaattaagagggcagcagcgggagctgaggtgtggtgcctcggggtcaccgattggataggtcatggggactggggacgcgacgtggaagacgccgtcgcagccggcgatggccgccgccacgctgccgtagtcgagcaattcggccctgaacaggcgcagccggtccgcggcgccgtccatcgccgccaggtgcgcgttcttggcgtcgcctgcgcgccacgccacgcacgttatccacatgtcggcacgccgcacgcacgcacgcgccagttcaccggccgggagcaagaagacaagagcaagggtttcgtacccggatcacggacggtgccatggaccatgtatcggccgccggcgaggaggcgctcgacgagccacgaggccacgaagccgcccgcgccggtcacgcacaccgccggcctcgtcctgatccccgctgcgccttccattggtaccgatcacgaccgacggactcgtcttgttttccttcaccgattcggatatagcacactgattgggcagagaactggaggtgatcctgtgtgcatatggtactttgtgctcagggccgaggctgcgtgccgcacacagtggcgtgccgcccgtgccttggtgcgagccaaaactagttag

SEQ ID NO: 152993 - DNA, 77 bp, Zea Mays
ctcatgaagctgtacgaaaattacccaccatgccaccggttacgcaacatacaacttccgttctctctggcgacaac

SEQ ID NO: 152994 - DNA, 1336 bp, Zea Mays
gcagtccttaccaactgcccttccccaccccgctcccgcgtaatccaaccgctaataataaccgctgctctgattagcgcaatctccaccgctataattacgctcccgcctgcgcgcgcgggcctatcagccctagctagctacccagccgcctccgctgctcgcctcctcacttgcgcgtgtcgtgtcgtgtcgtgttgcgctaagtcagctgcttgctactagggttagggtttgcggctgcgcgctcgcgtgcgtgcatgcgcgtgggttggccgcggcagggatgacgccgcagcggtcgccgatgggtaccggaggaggaggaagtagcggcggaggcggcgggggaccgccggcgctacactacctgagcggcccgtacggagacaccacctttaccaaggttttcgtgggcggccttgcctgggagacgcgaagcgagggccttcgcgcgcactttgaggtctatggggacatcctcgaggccgttgtcatcaccgaccgcgccacgggccgctccaagggctacggattcgtaaccttccgggacccagagtcagcgaggatggcctgcatggacccatacccagtgatcgacggccggcgtgctaattgcaaccttgccatcttagggcggcctggtccagctgtgccttttgtagcacctacaaggccggtcatcccatacaatggaggtgtggcggttccagggggcatgtatgtgcaaagcccaacatatcagcaatccccttacaactactcacaggcctttgtatatccttatgggccatcagcatatggaccagaatacctatatcagcagaatgcatacggtccatatgttggacaacagtacgtgccggtttacggtggcccaaggacagtaggcccagcagtctacccatatgggcagtttggccaacctgtaccaagcgatcatgcttattctcctggttatgccccaagtcatgttctcccactgtcgaatcagaatgttagtgctgcaaatgttgtgcgcataccaccagttcagcaacaacttcctccaggagctccacgccctcagcaacagcttttggtccctgcccgtgcaccaccgttcccgcagaacaacatttctgaacaagcgacaggttgacaaggacgccagaaagtgacgaattttaggcatcctatagtctgcagcaggactaagaaaagccataccgctaaattgggcggcatgcttttttttcttgcaaattgttttcttttgcactctaaaggttagttatcacatttatctagtatctgcagcggcatcagtttatgctgcatctgggctgattgatgt

SEQ ID NO: 152995 - DNA, 1333 bp, Zea Mays
gcagtccttaccaactgcccttccccaccccgctcccgcgtaatccaaccgctaataataaccgctgctctgattagcgcaatctccaccgctataattacgctcccgcctgcgcgcgcgggcctatcagccctagctagctacccagccgcctccgctgctcgcctcctcacttgcgcgtgtcgtgtcgtgtcgtgttgcgctaagtcagctgcttgctactagggttagggtttgcggctgcgcgctcgcgtgcgtgcatgcgcgtgggttggccgcggcagggatgacgccgcagcggtcgccgatgggtaccggaggaggaggaagtagcggcggaggcggcgggggaccgccggcgctacactacctgagcggcccgtacggagacaccacctttaccaaggttttcgtgggcggccttgcctgggagacgcgaagcgagggccttcgcgcgcactttgaggtctatggggacatcctcgaggccgttgtcatcaccgaccgcgccacgggccgctccaagggctacggattcgtaaccttccgggacccagagtcagcgaggatggcctgcatggacccatacccagtgatcgacggccggcgtgctaattgcaaccttgccatcttagggcggcctggtccagctgtgccttttgcacctacaaggccggtcatcccatacaatggaggtgtggcggttccagggggcatgtatgtgcaaagcccaacatatcagcaatccccttacaactactcacaggcctttgtatatccttatgggccatcagcatatggaccagaatacctatatcagcagaatgcatacggtccatatgttggacaacagtacgtgccggtttacggtggcccaaggacagtaggcccagcagtctacccatatgggcagtttggccaacctgtaccaagcgatcatgcttattctcctggttatgccccaagtcatgttctcccactgtcgaatcagaatgttagtgctgcaaatgttgtgcgcataccaccagttcagcaacaacttcctccaggagctccacgccctcagcaacagcttttggtccctgcccgtgcaccaccgttcccgcagaacaacatttctgaacaagcgacaggttgacaaggacgccagaaagtgacgaattttaggcatcctatagtctgcagcaggactaagaaaagccataccgctaaattgggcggcatgcttttttttcttgcaaattgttttcttttgcactctaaaggttagttatcacatttatctagtatctgcagcggcatcagtttatgctgcatctgggctgattgatgt

SEQ ID NO: 152996 - DNA, 1190 bp, Zea Mays
ccgctgctcgcctcctcacttgcgcgtgtcgtgtcgtgtcgtgttgcgctaagtcagctgcttgctactagggttagggtttgcggctgcgcgctcgcgtgcgtgcatgcgcgtgggttggccgcggcagggatgacgccgcagcggtcgccgatgggtaccggaggaggaggaagtagcggcggaggcggcgggggaccgccggcgctacactacctgagcggcccgtacggagacaccacctttaccaaggttttcgtgggcggccttgcctgggagacgcgaagcgagggccttcgcgcgcactttgaggtctatggggacatcctcgaggccgttgtcatcaccgaccgcgccacgggccgctccaagggctacggattcgtaaccttccgggacccagagtcagcgaggatggcctgcatggacccatacccagtgatcgacggccggcgtgctaattgcaaccttgccatcttagggcggcctggtccagctgtgccttttgtagcacctacaaggccggtcatcccatacaatggaggtgtggcggttccagggggcatgtatgtgcaaagcccaacatatcagcaatccccttacaactactcacaggcctttgtatatccttatgggccatcagcatatggaccagaatacctatatcagcagctttgtagaatgcatacggtccatatgttggacaacagtacgtgccggtttacggtggcccaaggacagtaggcccagcagtctacccatatgggcagtttggccaacctgtaccaagcgatcatgcttattctcctggttatgccccaagtcatgttctcccactgtcgaatcagaatgttagtgctgcaaatgttgtgcgcataccaccagttcagcaacaacttcctccaggagctccacgccctcagcaacagcttttggtccctgcccgtgcaccaccgttcccgcagaacaacatttctgaacaagcgacaggttgacaaggacgccagaaagtgacgaattttaggcatcctatagtctgcagcaggactaagaaaagccataccgctaaattgggcggcatgcttttttttcttgcaaattgttttcttttgcactctaaaggttagttatcacatttatctagtatctgcagcggcatcagtttatgctgcatctgggctgattgatgt

SEQ ID NO: 152997 - DNA, 1497 bp, Zea Mays
gtcagctgcttgctactagggttagggtttgcggctgcgcgctcgcgtgcgtgcatgcgcgtgggttggccgcggcagggatgacgccgcagcggtcgccgatgggtaccggaggaggaggaagtagcggcggaggcggcgggggaccgccggcgctacactacctgagcggcccgtacggagacaccacctttaccaaggttttcgtgggcggccttgcctgggagacgcgaagcgagggccttcgcgcgcactttgaggtctatggggacatcctcgaggccgttgtcatcaccgaccgcgccacgggccgctccaagggctacggattcgtaaccttccgggacccagagtcagcgaggatggcctgcatggacccatacccagtgatcgacggccggcgtgctaattgcaaccttgccatcttagggcggcctggtccagctgtgccttttgtagcacctacaaggccggtcatcccatacaatggaggtgtggcggttccagggggcatgtatgtgcaaagcccaacatatcagcaatccccttacaactactcacaggcctttgtatatccttatgggccatcagcatatggaccagaatacctatatcagcagaatgcatacggtccatatgttggacaacagtacgtgccggtttacggtggcccaaggacagtaggcccagcagtctacccatatgggcagtttggccaacctgtaccaagcgatcatgcttattctcctggttatgccccaagtcatgttctcccactgtcgaatcagaatgttagtgctgcaaatgttgtgcgcataccaccagttcagcaacaacttcctccaggagctccacgccctcagcaacagcttttggtccctgcccgtgcaccaccgttcccgcagaacaacatttctgaacaagcgacaggttgacaaggacgccagaaagtgacgaattttaggcatcctatagtctgcagcaggactaagaaaagccataccgctaaattgggcggcatgcttttttttcttgcaaattgttttcttttgcactctaaaggttgtcgttatccatggttacccgaacttcttataatgtgagtgtctgaagatgaagcccctcttgctcagcttctgtcagtgtgtgtgtacattccccatctcctgccagaaattctgatagctggtggtctgtgcatggaccaaagtggatggccggaaatggagtccggcctccaacctgtgtataataatataggtcatgcagtaggtccaaatcgtagaacattctttcaaaacatctggttgtgtatattaattctcttcttcgcaccttctcagtacctccagtgcatgttcccatgtctcattagagcataggtatttcagtgtcactgtgtcgtcgtcagcgagtcatgtacattattatcctgaaactgtaaactatatatcacctatgtcaactgtaatcaaataatgacagccctaccttggg

SEQ ID NO: 152998 - DNA, 350 bp, Zea Mays
ggtgctcgacgaatggctggaacccggaattcgtcgtcgtttctcatccgcgatctcgtcaatctctgctcgacaagtgttcgatgaagggcctgagccaagtgttgttgctgcttccacgaatttctaatcgaataggtaatagtactctagctcgctactcctactaattaattaattcgatgaatatattggatgaatattacccgcgacgttcgaatcagatatttgtgatatgctatagtaattatctatattttattgtatatgtttgatgttaggatatttctctacgggataggatattgtatttcgatatttaatctcgtccggtacgtagacttgttagg

SEQ ID NO: 152999 - DNA, 1845 bp, Zea Mays
gtaaagcaaaaaatgggaagtgagacatttgatttgaatgagcaaccacatgaaaatgaaggtggcggcctgaattatgtgttgttgcaaaaggattgtaagaacatatgccgcaccaaagtttatgatcttcccatagaagttaaacttctagatggttctggaagtctacctccagaagggttgccatgggttcccttggagcaggtcactggccaccctgaggatgggattctataccatgggcagatgggctacctcttgctgtcgactacaaaaaaatcgggcgaggagggaatgactgccctcctggctgctattgctagatgtgggtcctcaactttccacatacttgctcctgaacctgatgaatgctcaagttttccgcatgcggtgctcttgtatgagtgtggacaaaatggccctggagattgcaaacatatggcaggaacatctgggaaacgtgtgaatagtaatgtgatgaatgcttcaaagaggccttttaagagtgactttcaatatggttcaagaaactctaagccaccacactttaaagaggaggtctgtgatagtttactgaagcccaagaagatggaaacttcacctaagcattatgatcctttcgtcacagaacaccatagactagttctggaatcctctccatgtgaatctgttgaagacagcccaagagttttgaatccggtggtaaaaaagagaatggcttctcctaccaaaaatttcattgttgcagaccctagttatctgcgaacacttagtcagacacatgctagctggatatttggagcgatagctgagctcattgataattccagagatgctggtgcatcaaggttgagtatttccatcgagcatttgttttcaaagaaagcacagaagaaaattcctgtcttatctgtaattgatgatggacatggaatgacatatcctgacatcatgagaatgatctcttttggccataaacgaccaaatggacatcgtgaggatcagattggaagatttggcattggattcaagactggtgctatgaaactcggaaaagatgcaattgttctcacacaaactaaatcctccagatcggtggcctttctttctcagtcttttaatgaagaaaaggataatcttgagatccctgtggtggcatatcgaaaggaagggcagtatatggaagttgatttgagtgtgcagtctgatgctactgcagaatataacttgaacgctattaagaatttttcttccttcaacgagtatttcattggagaaaagttgggcctatttggtgaagatactgggacacaaatctacatatggaatttagacacatggggtactgattacacattggagtggaattctggtaagtcttcagaaaatcctgtgcaccatggtcgtggagacatattaatccgttcaagaagagtcagatcacgtccaggacaaacaagtaacaaggtgctgttggattattctcttcagtcctatctggaagttatgttcttgaatcctcggatgaagatatctgtccaagggtctttggtcaaaagccgcccgttggcgaagacccttaacaagacttctgttgtgtctggtgaaattatggaaaggactattatattgactctgggaaggagcaaggtagaatgggacagaacaaactgtggaatcttcttgtattggcatggtcgtttgatagagtcttacaagcgggttggaggccaaaagcatagtactgacatggggcgtggagtaataggagttgcagatatcacaaatctcattgatgatgaagatggtaattcatgggttctgaacaataaacagggattt

SEQ ID NO: 153000 - DNA, 2751 bp, Zea Mays
gtaaagcaaaaaatgggaagtgagacatttgatttgaatgagcaaccacatgaaaatgaaggtggcggcctgaattatgtgttgttgcaaaaggattgtaagaacatatgccgcaccaaagtttatgatcttcccatagaagttaaacttctagatggttctggaagtctacctccagaagggttgccatgggttcccttggagcaggtcactggccaccctgaggatgggattctataccatgggcagatgggctacctcttgctgtcgactacaaaaaaatcgggcgaggagggaatgactgccctcctggctgctattgctagatgtgggtcctcaactttccacatacttgctcctgaacctgatgaatgctcaagttttccgcatgcggtgctcttgtatgagtgtggacaaaatggccctggagattgcaaacatatggcaggaacatctgggaaacgtgtgaatagtaatgtgatgaatgcttcaaagaggccttttaagagtgactttcaatatggttcaagaaactctaagccaccacactttaaagaggaggtctgtgatagtttactgaagcccaagaagatggaaacttcacctaagcattatgatcctttcgtcacagaacaccatagactagttctggaatcctctccatgtgaatctgttgaagacagcccaagagttttgaatccggtggtaaaaaagagaatggcttctcctaccaaaaatttcattgttgcagaccctagttatctgcgaacacttagtcagacacatgctagctggatatttggagcgatagctgagctcattgataattccagagatgctggtgcatcaaggttgagtatttccatcgagcatttgttttcaaagaaagcacagaagaaaattcctgtcttatctgtaattgatgatggacatggaatgacatatcctgacatcatgagaatgatctcttttggccataaacgaccaaatggacatcgtgaggatcagattggaagatttggcattggattcaagactggtgctatgaaactcggaaaagatgcaattgttctcacacaaactaaatcctccagatcggtggcctttctttctcagtcttttaatgaagaaaaggataatcttgagatccctgtggtggcatatcgaaaggaagggcagtatatggaagttgatttgagtgtgcagtctgatgctactgcagaatataacttgaacgctattaagaatttttcttccttcaacgagtatttcattggagaaaagttgggcctatttggtgaagatactgggacacaaatctacatatggaatttagacacatggggtactgattacacattggagtggaattctggtaagtcttcagaaaatcctgtgcaccatggtcgtggagacatattaatccgttcaagaagagtcagatcacgtccaggacaaacaagtaacaaggtgctgttggattattctcttcagtcctatctggaagttatgttcttgaatcctcggatgaagatatctgtccaagggtctttggtcaaaagccgcccgttggcgaagacccttaacaagacttctgttgtgtctggtgaaattatggaaaggactattatattgactctgggaaggagcaagtcttacaagcgggttggaggccaaaagcatagtactgacatggggcgtggagtaataggagttgcagatatcacaaatctcattgatgatgaagatggtaattcatgggttctgaacaataaacagggatttcaagattgtgaaatgtatgctaaactggaggagtggcttggtaggaaagtggatgaatactgggatacgaaatttgacagtctcacgctgagaaaaggggatgagcaccacaatactgattctgactgggttcagtgctacagctgtcgtaaatggagaatgttgaatgcaggcttcaatgtagacaatcttcctgaggaatggttctgctacatgccaccattcaatggcaaatgtgagattcctgaacaacaagcgggaccagacatcattgtgataggtgagaagagatctggacatgatgaacaaaaaaaggctgccctgcaaggaggtacaccggaggaggaaatgaggcatgagaaccacgagattcagatgattactcaagatgaatttgtgaagaatgttcaggatatgccggaggttgtccacaagcgaaagaaaatttcaagtggcaccccatcaaagccccaaaaaaaccgcgatgatgatctggaaggcgtgtcctcacaaactgaagatgacgtccctctcactaggttaaagaggctaaggagagggcctgcaaggactaacaaaaggtgacagaaagtgaaaatacacggtaaccattctgcgcctttcctaaaagttacacgccagtaaagtaatgatcactctgcttcattttccttgggcttaatgcgtctgctctttccccagccggtgcaatgcttcatttggactggacggattttggacttaacgagactgatgcatgaatcatgatgacatgagaccttcgtttagcacactgccagctataattctctagcttttgtgtagtagaatttggaaacatgcgttgctgttggattaggcgtctgtttgtaaataggtgtccctcgcattcaaatgttgcagcttaggccctgggatccattagctactattagttagctagctaatagactaagggggtgtttg

SEQ ID NO: 153001 - DNA, 2553 bp, Zea Mays
atggcggcggcgctctgctttgcttccctcacccgcgttcgtcccttcgctgctgtgctactgctgatgctactgcaacaagctcgtttccgggcgttggccgtggcgcggaccaacctgacagcgggggccaccttgacgccggccgactacatcagcagcccctccggcaccttcagctttggcttcctcgccctcgactccgacccgaccaagttcctcctcgccacgtggtttcacttcgccgacggcaacgcctcctcccaattccagccacagccgcagccgcagtccgtggtgtggtttgccaaacagtcgccctccgggagcacgtccaacgccaccgcgcagtcggttctgagcatcacgtccgacgggcagctcatgctcaccgacggccagcaggtgctgtggacgcctaccacagatcgtggatccgtgctcgcgctcctcgactacggcaacctccagttcctgagcgactccggcaaccaggtgctgtgggagagcttctcgtacccgacggacacgctcctgccgggccagtccctgtcctacgagccaaccgggtcggaagggaagctcttcgccaggcgcgcggacgcggagttcaccaccggccggttcagcatgggcgtccagagcgacggcaacgtcgtcctctacgtcgatctcctcgagggcaacgaccccgaaaacgcctactggcaggcgtacaccaacagccccgacggcaacacgacggtcaccttcgatggccagggccgcctcaactacaccctccacaacggcacggttaacagcttggttaaaccggcggcgagcttcgccgccggcgagtacttgaagttcgcccggatggaccctgacggcatcgtccgtacctacgtcagccccaagaacggcggcaccggcaacgcgtcttggaccgtgtccggcgcgttccccgactacggctgcgtcaagaggacctccgggttgcaggacatgtgcgggccggggtcgtactgcgtgtctgcgccgacgccgagctcaagggacaggctcgagtgcacgtgcccgagtgggtacaagtacaccgacgagcagcatagggacagcggctgcacgccggggttcgagccacagagctgcgacggcgagaacggcggctccgacgagttcacccttgtggagctgctcaacaccacctgggagacctcgatatactacaagaagctgtcgtcggtcacggagcagcagtgccgggacagctgcctcggcgactgcttctgcgcggccgcactgatgatcggcggatccaagtgcgcggagatggcggcgctcaccaacggttggcaggcaaacggtgccacgagtctcacgaccaaggcgttcatcaaggtgcggacaaggaatcctccggcggccgcgcctgcaaggaatagaaacgcgttggcctacaaggttgccgccatctgcttggccgtcgttttgttggtcaccgtcggcgttctcgtggcactgcattgccatcgcaggaggaacagagagagccagcggccgttcagctcgagcgtgagggcgttcagctgcaaggagctacaccaggccaccaacggcttcgagaaactgctgggcaaagggagcttcggcgaggtgtacagagggacgatgaggtcgccgcacccgcatctcatcgcggtgaagaagctcatcacctcgaacgagtacagcgagcaggagttcaccaacgaggtgcagtccatcgggcagatccaccaccggaacttggtccgcatgatcggctactgcaaggaaggcaagcaccggatgctcgtgttcgagttcatgccgggagggtcgctccgcggcttcctcttcgacccggagaagcggcctccgtggcgctggcgcgccgaggccgcgatcgccatcgcccgagggctcgagtacctccactacggctgcagcgccccgatcatccactgcgacatcaagcccgacaacatcctgctggacgaccgtggcgtcccgcggatcaccgacttcgggatctccaagctgctggggagccagcaggtgcacgctacggtgacccacgtcaggggcaccagagggtacatcgcgcccgagtggctccgcggcgacgcgcgcgtggacaccaaggcggacgtctacagcttcggcgtcgtgctgctggagatgatttgctgccggaggtgccaggagccggtggcgcttggtctgccgcatggtgcggaggacgacgagacacagacagtcaccttgttcggttgggcagcgcagctcgtgggcgcgcggaggacggagctgacgctgcacggcgacgacgctgacgtcgacagcgcggacgacatggagagggtggaccggttcgcgcgcgtggcgctctggtgcatcgagccgaacccgctgctgcgacccaccacgcaccaggtggtgcagatgctcgagaccagtgattgggctcaggttcagacactacgtatacctgaccctccagaatgttacatggaatcctcgcctttaattccacagctcaaagactga

SEQ ID NO: 153002 - DNA, 1648 bp, Zea Mays
caccaaaaccacagcaccatcgtcttccttgtctctgccttcccgctagctcggttcttgctgtgctagcctctgttcatccacacccgcgcgcgtcaatgggggagtacaacggcggcgtgagcacatcgtggaccattgggtcggcgcacggggggatggcgccacccacgcggcccaaaataaagatcatccacatcatcgcgccggagatcatcaagaccgacgtcgcgcacttccgggacctcgtgcagcggctcaccggcaagcctgcttcctgtgccgccagcagcacgggcgacgacgacgtcgcgtcgacgctgccgccggtagaagacgaggacatggagacgacgaccaagaagaggccgaggccgaggccggcaccgcctccggcggccggtgatgagaggagcgacttcaccaaggcacaagaggagccggtcaagaagaggaagatcaagtgcgaggtgaaggtggaggagcaaggagctggcttcggcgattacgacctcggccgcggcgacctgtggatggatctcaacccgggagggttcctgagcttcttggaggaggagggcgtgttccagggcctggctgctgctgaccacgacttctttcagccctttggctcgtccaggatggatttggttggtgaaatgcacgcgtcttgacaatggagaagcaagtgtaagcaagtgtgcttatatttcagacagtggagaaagtaagtgtaagcaacaccaatataaggggaagaaatcggaaatttgcatgccaacaatttaattatatgtttgtaaggaacactggtgaaatcatagaaggaactgaaaatcagtttggggaggtgtagtggtccaacttgtaaggaactgaaaatcagtttgtgtaaaatatctgccgagctttgtgagctggaagggatcagaacggtgtgaccctcgcggcgatcggatgatatcagcatggttaacctgttgctcgcgcaatgcagctacgccccctggtcgtcactccaccgtcgagcgtaattaattaaaagctggccagccctggcaaggccggtggcctcccctccatggtggttccaccaatcggatcaccagttcgcagcgcagcgcagatgccttctctgtcatgagcagcgatctagatacatgtcgttttcagtgggcaggcaaacacacactctagttaaatgtttgttttcagaagtccacctatcgcaattcgcaaacggtacgaagaaacaaggtggtgcagagcaaggcgacgatggtttctctgatgtgaatagccaagatttgccatggcgtttcctctatgctgctcctctggatgggctgttgtgcttaacaaatacgcagcggtggtgtgtgagttggctggcggaaaacgactcttgcataagataatgggcctctaggcactaggtttgcctgtttgatagggtatagtagtatatatatagtccatgttctgctgtcctaaagaagatccagtggtgttcttttattgagtctgaaactctgaataaaagaagccctcctaaactgccactggtctagagatggcaatgggacccgttattaaacctgcacgtgataatggttttgtgtactaattaatgataaaaaataaaaaa

SEQ ID NO: 153003 - DNA, 560 bp, Zea Mays
acagccgggtgccgacgagtgcgcagagttttatagaaccatgatgctgaagatggcgtggtaacgagcgaacacatggtcgagtgtcgacaaggtgtccaaatcctgtgaggcattgacgtggttgaagaagacaaccaatatcatgcgatatcgatggcagggcttccatcgacggcgactaggaaagggaacctggccacacagcttaagcgagcacttgggattgagctcaactagaggagagcagggacgcatgggtggagataaccggcggcaggcgcaccaggggcacgatcagaggcgaggacgatgatgaggcagaggtctcgcgagctcaccacagtagttggctagagaatagtgtcccagcgagcacgaccagggaggtgagcaagggacatagggtattgatgtccttcgaccagagaccgaagcacatagcacggcggatggacttagccgcggcgaggtggaccgacgagggaaacaaggaacacgacggtcagccgattgacgatcggagcatgacgcgatagactggggatgtcgtgacggcc

SEQ ID NO: 153004 - DNA, 259 bp, Zea Mays
tcaacccaagatgctacccgttgtcaatcactcatcatcaacctaaaccacaatggacaaatcagccttgtgtttgcaatctcccccttgatgagtgcattgtcaacaccaccattcaaacacataaattagcagaaggaggaataagaagggcgactcacttaaatgactaaaagatagataaaagcaaaaataggtcatccaaagtaagcaaagcttggtccccaaagaagtgggcaaggactcaacacagctaagc

SEQ ID NO: 153005 - DNA, 587 bp, Zea Mays
tccacccgccgccctcgtgggagtgaaaccctagctagggttctgcccgccgccgccttcgatcaagacgccagcagccttagcgcgagcccgccatggacacagaacgcaagcgcatcgcgccggggggcgccaacggcgcgggcggcccgaagcgcgcgagagaaaccggcggatccctcgcctgtgcgtcccctacgcctcctatcaccgacgtttcttctccgccgacccctacgctgccttctagcatcgacgcttcatctccggtgtcctctgcatcttctgcttcttctcctgcgtcctctgcatcttcttcgacgtctacgctttcgtcggaggccaccacagtcagatcccacggaccattttcctgtctttgtgtttgttttgatcgtaaaattctatcggtaaggttttcttcccggtttggccggaaaatgttctgtagctttttttgctgcaacagtggtagtggtgcaaaggtaaatcttaaggaaaaaaaggagaaggataaggaggaggaggaggagaaggataaggagaagaaaaagggcgtgccgcaagcatcattaattgatatttag

SEQ ID NO: 153006 - DNA, 462 bp, Zea Mays
aaatgttctgaacgaattgtggcaaataaggagatgatgcttgatgtgttcgactatgtcgttggtgactttgtccccaattcttatccggagccaacccttcgtttgccttctatttctcctggaagtaatgataagaaaagaacttccatgtgtttggatgaaaaggatgacagtgccatccaacatcgctctaaaagatcttgctgttcagagagtgttgatcaccatttgtctaggttgttggaccaaagagcagttgttcaagaaattttgacgggccctataagtatgaacgattgtactgaaaaacttaagaaatgtgtttttcaaaaaaaagaactttggaatgctatcgatatattgaaggctgatttagaattgcgtcaggtattcatcaaattagaagattctgaggcaaaagggtatatgatccatgccatgcgtaacagcaatgtttag

SEQ ID NO: 153007 - DNA, 249 bp, Zea Mays
atgtggaataatagcacaaaaaatgtggaatcaaaacaaaccttttggcaacgaaggaatcctctgcttgggttggaatcggtccacgaggtcagctccaacataacacctgagcacttgcaacaaacaggattatctgcatccatccatttccggtacgacaccggaggcttacgaggtgattttgaagagccagagacagatgaagtcatggagagcctctgcctaatccaaaaaccacaaaaataa

SEQ ID NO: 153008 - DNA, 121 bp, Zea Mays
gggcccaggatttagaaggcgggtattcaaaaaaagttatgataaaattttttctagacataaagcttgtttattagcatatatgtagttaattatatataatctataattaagtacacac

SEQ ID NO: 153009 - DNA, 113 bp, Zea Mays
atgggttatatcactccattggatctcattggacacaatcatacaacaatttattgggctaggtgggtatgggaagtagcaaggagattagaaatattttggtctaagttaac

SEQ ID NO: 153010 - DNA, 2873 bp, Zea Mays
tagtcccgacccgtcccaccctatcagttgcgggcgcgcgtccctgtttcgctcgtgccgttgcgctgcgccaagcctccccacctctctcgtctcttctccacccgccgccctcgtgggagtgaaaccctagctagggttctgcccgccgccgccttcgatcaagacgcctgcagccttagcgcgagcccgccatggacacaggacgcaagcgcatcgcgccggggggcgccaacggcgcgggcggcccgaagcgcgcgagaggtgagcagcttctctagctccggggaatatggattggctgttgcttcacggaaggttcggctctctagggtttatagctggtcttcgttggtcggatctgcactccgtcgttcgcgacttcgctgggaactgcggagatccgtggcttttgctgctgcattggttttcgtgttttctctgattattgggagtattgggagtttggaaagacctagaatgtttttcgtgttttctctgattggtttacgtggtagctgaaggcttgatctcgtttaggtctatccacgggattttgctcgctggacgaaaatttgagggatgaaacgagacgtagttgacgtgctagattgagattgctactgttctgttttgatagatctttcggccttttaatgctttgttgaacttttaatgcttctttgctgggctaggtagaagttctccttttagtgctttcagtggtttaagcaagtatgatttttctaataacaaatcattggattggaccactgcttgcatactggaagatataagcagcattggtgaccttttaatgtgataatcccaatgtttcttcaatgaattattatctatttatattcgtattactttaccaagcgacatgatttagtaaagcaacacattattaattggcggaagtaataaatttggtgtaacagaatcggagacaactcaaatgggtgtaggaagcaaaaccaagccgtgcaccaaatttttcaggttctaatctagcttaaaatgaactctcatctggtaacatctactatcattatatgctattccttttaattaaaatttgctatgttattaaatgatgtgcttgatgctaacaaatgggtcagcctagattctgatacaggttggttttgtctaatcattgcttaagaacactcaacggagtaaaaattggaatctactgctgtttatcactgaaaactgatgcaacaagggaacatactgctgtatatcactgaaaatctgaaccatccaacaatggttacaaggaaacaaactccctctcaaaaggaacaatcagtcagtaacaccatggaacaggttcacttgaagaaatcaagaagattagattgaacatggggactgtgattcagttttttgtgaatcgtccagttatttgttcaattacacttatcaatatacattgcagtagtagtacttttgaacaccaatatctttgaacctcgattatgtatcccatctttatcaagcatgatttgtataagattggttcgaatcatttacttcagtctttatgcattcattgcacatatatttttagcagtcatctagtgaggttacattatccagctgcatgcaacataatctcttcaatcaacatttttttgcatgtgtatcgactaatatcagtctgtaggttgtcagatatatttgcatgttctgttgcttatattatgctttcaatttgcagcactgcgggttgtccctttggttcaaattgccattttctccataacttcccgggtggctacctggcggtttcaaagatgaccaacttgggtgggccacctgttccggctcccccaggaaggatgcctatgggacctggtggtcctgatgggccaccttcacctgctctgaagactcgcttgtgtaacaagtacaacactgcagaaggatgtaaatgggggagcaaatgccactttgctcatggagagagggagcttggaaagcccctgcagatggacaactcgatgggagctcctccaatgggtccagggccaaacggtcacttcatgccacctccaatgcctatcccagacatggttcctcactccacattcggtgcttcggccacagccaagatcagtgtcgatgcatcccttgctggcgccatcattgggaagagtggtatcaacacaaagcatatatcccgagtgactggggccaagttagccatccgggacaatgaggctgatcccaaccataaaaacatcgagctcgagggaacgtttgaccagatcaagcacgctagcgcaatggtcacagagttgattgtccgcatcagtggtaaggtgcctccacaagcaaagaacaacccaggcagggggcctggttctcatgctgggggtcctgcaagcaacttcaagaccaagttgtgcgagaacttcaacaaaggctcctgcacctttggagacaggtgccactttgcccatggcgaaagtgagttgcgcaaacctgctgctgcttgatagatgtgtttagtgtggcttgcggtgattactctgcctgtgtggctgaataacaccacagtcgcctatggtgagatgtactgggccacgtgctgcctgagagagatcatttccatcgcttgcgtagagacaatggccgttttttaggatttgtaggattgccgtattgttctgttcgatttatatctaaccctgccagaatcctatttttgtaccgtttcttagctactaattggtgccagatcattgtggttctgttgactcgagaatagttgctatcgatggtatgggtttgtgaattattgatagcatttttgaaatccagatagctaagctgaaatccagacatcattagtgttc

SEQ ID NO: 153011 - DNA, 1415 bp, Zea Mays
tagtcccgacccgtcccaccctatcagttgcgggcgcgcgtccctgtttcgctcgtgccgttgcgctgcgccaagcctccccacctctctcgtctcttctccacccgccgccctcgtgggagtgaaaccctagctagggttctgcccgccgccgccttcgatcaagacgcctgcagccttagcgcgagcccgccatggacacaggacgcaagcgcatcgcgccggggggcgccaacggcgcgggcggcccgaagcgcgcgagagcactgcgggttgtccctttggttcaaattgccattttctccataacttcccgggtggctacctggcggtttcaaagatgaccaacttgggtgggccacctgttccggctcccccaggaaggatgcctatgggacctggtggtcctgatgggccaccttcacctgctctgaagactcgcttgtgtaacaagtacaacactgcagaaggatgtaaatgggggagcaaatgccactttgctcatggagagagggagcttggaaagcccctgcagatggacaactcgatgggagctcctccaatgggtccagggccaaacggtcacttcatgccacctccaatgcctatcccagacatggttcctcactccacattcggtgcttcggccacagccaagatcagtgtcgatgcatcccttgctggcgccatcattgggaagagtggtatcaacacaaagcatatatcccgagtgactggggccaagttagccatccgggacaatgaggctgatcccaaccataaaaacatcgagctcgagggaacgtttgaccagatcaagcacgctagcgcaatggtcacagagttgattgtccgcatcagtggtaaggtgcctccacaagcaaagaacaacccaggcagggggcctggttctcatgctgggggtcctgcaagcaacttcaagaccaagttgtgcgagaacttcaacaaaggctcctgcacctttggagacaggtgccactttgcccatggcgaaagtgagttgcgcaaacctgctgctgcttgatagatgtgtttagtgtggcttgcggtgattactctgcctgtgtggctgaataacaccacagtcgcctatggtgagatgtactgggccacgtgctgcctgagagagatcatttccatcgcttgcgtagagacaatggccgttttttaggatttgtaggattgccgtattgttctgttcgatttatatctaaccctgccagaatcctatttttgtaccgtttcttagctactaattggtgccagatcattgtggttctgttgactcgagaatagttgctatcgatggtatgggtttgtgaattattgatagcatttttgaaatccagatagctaagctgaaatccagacatcattagtgttcagttgatggt

SEQ ID NO: 153012 - DNA, 1476 bp, Zea Mays
tagtcccgacccgtcccaccctatcagttgcgggcgcgcgtccctgtttcgctcgtgccgttgcgctgcgccaagcctccccacctctctcgtctcttctccacccgccgccctcgtgggagtgaaaccctagctagggttctgcccgccgccgccttcgatcaagacgcctgcagccttagcgcgagcccgccatggacacaggacgcaagcgcatcgcgccggggggcgccaacggcgcgggcggcccgaagcgcgcgagagaatcggagacaactcaaatgggtgtaggaagcaaaaccaagccgtgcaccaaatttttcagcactgcgggttgtccctttggttcaaattgccattttctccataacttcccgggtggctacctggcggtttcaaagatgaccaacttgggtgggccacctgttccggctcccccaggaaggatgcctatgggacctggtggtcctgatgggccaccttcacctgctctgaagactcgcttgtgtaacaagtacaacactgcagaaggatgtaaatgggggagcaaatgccactttgctcatggagagagggagcttggaaagcccctgcagatggacaactcgatgggagctcctccaatgggtccagggccaaacggtcacttcatgccacctccaatgcctatcccagacatggttcctcactccacattcggtgcttcggccacagccaagatcagtgtcgatgcatcccttgctggcgccatcattgggaagagtggtatcaacacaaagcatatatcccgagtgactggggccaagttagccatccgggacaatgaggctgatcccaaccataaaaacatcgagctcgagggaacgtttgaccagatcaagcacgctagcgcaatggtcacagagttgattgtccgcatcagtggtaaggtgcctccacaagcaaagaacaacccaggcagggggcctggttctcatgctgggggtcctgcaagcaacttcaagaccaagttgtgcgagaacttcaacaaaggctcctgcacctttggagacaggtgccactttgcccatggcgaaagtgagttgcgcaaacctgctgctgcttgatagatgtgtttagtgtggcttgcggtgattactctgcctgtgtggctgaataacaccacagtcgcctatggtgagatgtactgggccacgtgctgcctgagagagatcatttccatcgcttgcgtagagacaatggccgttttttaggatttgtaggattgccgtattgttctgttcgatttatatctaaccctgccagaatcctatttttgtaccgtttcttagctactaattggtgccagatcattgtggttctgttgactcgagaatagttgctatcgatggtatgggtttgtgaattattgatagcatttttgaaatccagatagctaagctgaaatccagacatcattagtgttcagttgatggt

SEQ ID NO: 153013 - DNA, 116 bp, Zea Mays
tccttcttcggcaacgaacaggtatgactgcctcttcccttcccttcccgctctacgaaaccttagaagtgggggaggtgagggatgaggtccctgatttgctgcctatggtaccc

SEQ ID NO: 153014 - DNA, 1857 bp, Zea Mays
aattaaaaaccgcagaaaaggaatcaatccgaccatccataaaaaggacggcgacgcggtcaccactgcggcaccgccgccgccgccatcctcgacccctgaagtgaagaggcaacccgaggacgcctctcccatccacgcgcgaatcctaccgccctcccactcccaaaaacctagccgcgcgcgccacctgcatcccatggcggcaaccgcggccgtggcggggaccgggtcgtccctctcctcgcgccgcagtcgcagcgttgtctcctcgtccttccgcgcagctgcctcgcgcttccgctcgccgagatgcgtgctcgggagcgagcagctgcgggtggcgcatgaagggaagcggatgagcggcgccgagtccaggaccgcgtgggcgccaaaggtgcccgcaccggagtccaggcttgccgcactgccaagggagctgcgggactccaggatgaagatcttctccggcacggctaaccgtccgctcgctcaggaaattgctgcttacctgggtatagaactcggcaagatcctgatcaagcgctttgctgatggagaaatttatgtgcaactgcaagagagcgtgagaggatgtgatgtgttcttgatccagcccacatgctctcctgtcaacgaaaacctcatggagctcttcatcatgattgatgcatgccggcgggcttcagcacggtctattaccgttgttattccatactttggttatgccagagcagacagaaaggctcaagggcgtgaacccattactgccaaacttgctgcaaatttacttactgaagctggtagtgaccgtgtcattgtatgtgatattcattctacgcaagcgttggggtacttcgatattcctgtggatcatatatatggacagcctgtgattctggattacctggccagcaagacgatatctgaagatcttgtggttgtttctcctgatgtgggtggcgttgttagagcacgtgcattcgctaagaaattattgaatgcccgtttagctattgttgataaaagaagacagggtcacaacatgtcagaggtcatgaatttaattggcgacgtgaaaggaaaagtggctatcctgattgatgacatgattgatacagcagggacaatcactagcgcagcggctttgttaaagcaggagggagcagaagctgtatatgcttgttgtacacatgctgttttcagccctcccgcgattgaaaggctttctggaggcgtctttgaggaagttattgtgacaaactccatcctgctgccggaagacaaatgcttccctcagctgactgtgctttcgatggcgaaccttgtgggggagacaatttggcatgttcatcgcgatggctccgtcagcagcatcttccaatagcagaaacgagcgcgtagcatcgtcacctcgtcttgcgttcgtgtgcttggtatagagaaggcacccagtgcctgtgctgcttgcgtattttcgtagggagtcaattttggcggcaaggtataataaggttgtattgcccgatgtacggggtgataaataaggtggttattgccagtgtacgtgggataataaggttgtatgctggtgtaggtgttctgcaggctgcagcgtgttactaattaagtgcatctcttgtcctattatgtattgctgaggtagttgttgtcgagttgaagtttcagtgtctcagatacatggggatagtgatgtacccagcactcggtcactagtgaagtcctggtcattggaaatatgggagcaccaatttctgttttaaggtcggcattgtagctcaagctgttaatactcaaaattgcctgattgtctatgagcaccctgcaatattt

SEQ ID NO: 153015 - DNA, 1960 bp, Zea Mays
aattaaaaaccgcagaaaaggaatcaatccgaccatccataaaaaggacggcgacgcggtcaccactgcggcaccgccgccgccgccatcctcgacccctgaagtgaagaggcaacccgaggacgcctctcccatccacgcgcgaatcctaccgccctcccactcccaaaaacctagccgcgcgcgccacctgcatcccatggcggcaaccgcggccgtggcggggaccgggtcgtccctctcctcgcgccgcagtcgcagcgttgtctcctcgtccttccgcgcagctgcctcgcgcttccgctcgccggtgagcgtttcgtctcgtcgtggggctttctgattcacgtgtgatgcctacgaagcggtgaggtattgtgtgtttttggttggtcttcttttggtgtgcgcagagatgcgtgctcgggagcgagcagctgcgggtggcgcatgaagggaagcggatgagcggcgccgagtccaggaccgcgtgggcgccaaaggtgcccgcaccggagtccaggcttgccgcactgccaagggagctgcgggactccaggatgaagatcttctccggcacggctaaccgtccgctcgctcaggaaattgctgcttacctgggtatagaactcggcaagatcctgatcaagcgctttgctgatggagaaatttatgtgcaactgcaagagagcgtgagaggatgtgatgtgttcttgatccagcccacatgctctcctgtcaacgaaaacctcatggagctcttcatcatgattgatgcatgccggcgggcttcagcacggtctattaccgttgttattccatactttggttatgccagagcagacagaaaggctcaagggcgtgaacccattactgccaaacttgctgcaaatttacttactgaagctggtagtgaccgtgtcattgtatgtgatattcattctacgcaagcgttggggtacttcgatattcctgtggatcatatatatggacagcctgtgattctggattacctggccagcaagacgatatctgaagatcttgtggttgtttctcctgatgtgggtggcgttgttagagcacgtgcattcgctaagaaattattgaatgcccgtttagctattgttgataaaagaagacagggtcacaacatgtcagaggtcatgaatttaattggcgacgtgaaaggaaaagtggctatcctgattgatgacatgattgatacagcagggacaatcactagcgcagcggctttgttaaagcaggagggagcagaagctgtatatgcttgttgtacacatgctgttttcagccctcccgcgattgaaaggctttctggaggcgtctttgaggaagttattgtgacaaactccatcctgctgccggaagacaaatgcttccctcagctgactgtgctttcgatggcgaaccttgtgggggagacaatttggcatgttcatcgcgatggctccgtcagcagcatcttccaatagcagaaacgagcgcgtagcatcgtcacctcgtcttgcgttcgtgtgcttggtatagagaaggcacccagtgcctgtgctgcttgcgtattttcgtagggagtcaattttggcggcaaggtataataaggttgtattgcccgatgtacggggtgataaataaggtggttattgccagtgtacgtgggataataaggttgtatgctggtgtaggtgttctgcaggctgcagcgtgttactaattaagtgcatctcttgtcctattatgtattgctgaggtagttgttgtcgagttgaagtttcagtgtctcagatacatggggatagtgatgtacccagcactcggtcactagtgaagtcctggtcattggaaatatgggagcaccaatttctgttttaaggtcggcattgtagctcaagctgttaatactcaaaattgcctgattgtctatgagcaccctgcaatattt

SEQ ID NO: 153016 - DNA, 486 bp, Zea Mays
atctcaggctgtctccaacaagaactgtaaatgattatgtagtctaaatatagaggacatagacgtccgatgtgactacaacaaaatccgctaaatcgttcgctaaaatttctcgtccagcaaacctgggggactggtagaagaagacgtggagtcgccgagccgacgcagcttcgccaccaactccgcgacgttcgacgctggccaccgccgtgcgcagggcagcgaccttcctcctgcgctccttctccggcgaacgtactcctgcgctctctctccgacgagccatgccgctcggcaaccgatatcaagacagcagctcccctgttcgacgaaatgtctctaaagcaaaatagagagatcaactatgttttttttttgtccaataagaatttcttttacaaaacatacttagatagcaatttcttcagaaagaaagattactaaattcgattacataatgtaattattttcatccgtccataa

SEQ ID NO: 153017 - DNA, 1484 bp, Zea Mays
taaaatagtgttttacgcaaccacgcgtacacgatagcctaagtttaatttttgaggccgtccattgactcctgtagtacacggcacgtaattttccaagtcttcccggtgtaattttccaagtcttcccggtagactagacctcatatgtgacatttatgtctccaccaacagcaacggccatctaaaaaattttcttcagctttggcagctccttcattgctaagcctagcttatccttcagctagcacatagccaccgtttggttgatcatcgcactgatcaggcagccatggctaccaaagccaaatcaagctcctcgtcatgtctctccttcctgaaggacgcactgctccttccaaccaagaacgccaagctcttcgtccctgtcttcctcctggtaaccgctcccctcattcttctccagatcaccaatgtcttctacatccagccgcgcacagccgacatgctgcaccacatcaacgaggtcaagaacatggacccctcaagcgccgattacgccaagctcatggtggagatcatgaaggaagccaaggagcttgccatgatctccatcgcgctcctagtcatcacctttgcaggaagctttgctaaacagatcatagccttcttcgccacctccactacctacgccggtgaccgctactcgttccctgagctcttcaccaaggtgatcatgaaggggcgtcacctcaggggccctctcataaccgtcgccatggtgggcgtcctcaacgtcgcatgcgcgctcctcctcgccgcgctgctccagctcgcgatgcgccagttgggggtgctgtacacggcgatcctcttcgtgctcccgttcctcgcgttcctctacctcgacgtcgtcttctttgtcgccgtagccgcgtcggtggccgacgaggacagccgcggcgtgagcgcgctcaggctggcgtggcggctgatgacacgggtgtgcaggaaggaaggcttcgtgctggtcgtcgcggtccacctggtggcgatggttccgtccctgctctacgcggttgcgcttgcatgcttgaagaagaacatgcccatggggctggctctgttctccgtatacgcactgctctccggcttggtacagctcttctacttcgccggaattatggtgtactactacttagccatggagagcaaggaggtgatggcccatgactacgtcaacatccccaccgttgaagcaactgtgtgattgattgttgaatggtagggaaataataaatttttgtatggtgatgatgaataatatttgtccactagaaatgaacagtgtgcctttatggaggtttgtgacgagacttgtatgcaaagactttattttgcaaataaaaaaaatatccaaagaccattatgtacagcttgtgaaaacagagttagtggcaagttagctagggggtgtttgatttctagggactattttttagtccctccattttattttattt

SEQ ID NO: 153018 - DNA, 216 bp, Zea Mays
gtgacagcaccggaggggccgcctaggaggagggagtctagtgctgacctcgggcagaggtgatggccactgtcgcggcggcgattcctcaccgtcgtggtcacggtgtcgtagttccgctccgcgccgtggactgggtcagctacgtctccatccctgcgtgaggtcacgagtcacctgaagagcaagttggtacctgcaaactcaagtgtcagg

SEQ ID NO: 153019 - DNA, 2071 bp, Zea Mays
aggtgcgcgcgtgtttgttttccggccatctgctccatttgctcggggagccagctgattaataaagcatttaggcgcgcgcgaagcaacaaactaattctgggctagctatggccggtagcaacggaactctgctgctcgcactccgcatcgtcctcttctgcgccctcgcctccgtggccaccaccttgctccctctcgtcacaaggccatgcgcctactccctgccaagaaccatcctcgccgccagcggcctcgaccctcgcctcatctcctgcgcggacgacggctccgccaaggcccagctgtcggatggcgatggaggccacaacaaggccggtagcggcggcaggcccatagtcaccgacctgctgtcgtgcggcgagccccgcctcccatcccacgcgctcccgcccttccgctgctgcccgccgacgccggcgtccgacgctgccgtcgccaacttcacgttccccgacccaggcgagccgctccggacgcggcagccagcgcacggggccgccggcgcggacagcgtcgccaggtacgcgcgcgcggtggcgctgatgaaggcgcttccggagtcggacccgcgcagcttctaccagcaggccaacatccactgcgcctactgcaccgcggcgtaccggcaggcggggcggccggagctgcacgtgcagatccacttctcgtggctcttcttccccttccaccgcgcctacctctacttcttcgagcgcgtcgcggcgaggctcctgggcgaccccgggttcgccgtgccgttctggagctgggacgtgccggaggggatgcgggtgccgccggagttcgccgacgcggcgtccccgctgtacgacccgataaggaacccagagcacgcgccgcccagagtcgtggacctcgacttctcgaaagtggacaagaattacaccgacgagcagcaaatccagctcaacctccggaccatgtataaacagatggtcaccaacgcgccgctgccgtccctcttctacggccagccctaccgcgccggcgaccgggagatgccgggggctggaacggtggagctgagcccgcacaacacaatccatgtatgggccggcgacctctcgcagcccaaccacgagaacatgggcacctactactccgccgcccgcgaccccatcttcttcccgcaccacaccaactccgaccgcctctgggaggtctggcgcggcggtccggcgcgccacgcggacttcacggaccccgactggctcgactcgtcgttcctgttctacgacgaggacgcccggctcgtgcgagtcaccgtccgtgacatgctcgacatcgggaggctccgttacgcgtacgccgaggtcgggctgccgtggctcagcgcgcggccccccatcaaccctggcgacgtgaaccgcggaagagacccgccgcacctggagtccgtccgcttcccggtgtcgctcgatgccccggtgactgcggaggtgagccggcggccgggaaagccacggagccactgggaggaggtgctggtggtcgagggcatcaaggcggacggcgcggacttcgtgaagttcgacgtgtacgtgaacgcggtggatcacgagaagatcatgccgggcggtcgggagatggctggaagcttcgtgtccctgaagcaccccggaaatatggtggtgcagagcagcatgagggtggcgctgaacgagctcctggaggacctgggcgccgagggagacgacagcgttacggtgacgttggtgcccgtggaggggagggtcaggatcggaggtctcaggatagtgtacatggcggagtgaggaccagcgtaggaaccgtttactctgcagtacgtccagggaggtaaaacttcgtcaccgtcagatgctgatccaacaaaacccataaatgttgtgcttcttcccgtgagaagttaaatggtccatatgccagaggctgtgagagttttacctatccatagctttctttaaacgattttattctctatatcttctttctattcagtgtcatcatatataatccctccattcaaaaaaatatttgttttagt

SEQ ID NO: 153020 - DNA, 171 bp, Zea Mays
ttttttaacaaattactaaactttgtaggttttgaacagacccacatatctctgtattttaattatttggcagtgcaccctcacattgctagagccttcaagaagatgtcgttcgaccacaagttaatttgggctcgtaatttcgtcaatgagaagttcccaggagtgtga

SEQ ID NO: 153021 - DNA, 3340 bp, Zea Mays
gtcgatcgagcactccacgcccctctagtaccctcctctgcacctccctctctctctcctctctactgcctttgtttttgctcgcaagaaaaacccgaaaaagaccttgcgcaaatccgtcgtcctgtccaccgacgaagcttctgagtcctcctcgccgcgcgcctctacgcgtgatatcggtcttttcccctgaatggtgatgtggaggtcattctcttcaattcaaatggtccccccccgcagagcaagatgaggaaatgttcaaaatactcttaagccgtgtagcacgacaagtttgttgcagaggacaagcgacgactgggttttcttggcactttgtcaagtccgtgagtagaagtttggtgtaagcttgtcttcgaacaagatgatgcagaggccaccgctccgtccggaggagtactccttgaaggaaaccacacctcaccttggtggtgcagctgctggtgacaagctcacaaccacatatgacctggttgagcagatgcagtacctttatgtaagagtggtaaaagcaaaggaacttccgaacaaggacatcactgggagttgtgatccttatgttgaggtgaaactaggaaattataagggccaaactgggcatttcgagaagaagaacaacccggagtggaatcaggtctttgcctttgcaaaggagcgcatccagtcatcagttgtggagattctggtcaaggacaaggatcttgtcaaggatgacttcattggacgtgttatatttgatttgaatgaggtcccaaagagagtgccacctgatagcccattggctccacaatggtatcggttggaagaccgcaatgggcacaaggtgaagggggagttgatgctggctgtttggatgggtactcaagctgatgaagcgttccctgaagcatggcattctgatgcagcctccgtccctggtgatggccttgcaagcattaggtcgaaagtgtatctaactccaaagctttggtatctccgtgtaaatgtcattgaagcccaggatcttataccaaatgacaagactaggttccctgaagtttatgtcaaagcaatgctaggcaaccaagtccaaagaaccagggcattggcaagccggactttgaatccattgtggaatgaggacttgatgtttgttgcagctgagccatttgaagagcacctagttttgagtgtagaggacagggtggccccaggaaaggatgaagtaattggaaggacaatcattgcactgcagcatgtaccccggaggctggatcacaggttgctaaccagccagtggtataaccttgagaagcatgtgattattgatggtgagcagaagaaagagaccaagttttcaagccggatccacttgagaatatgtcttgaaggtggatatcatgtcttggatgagtcaacacattacagtagtgatttaaggccaactgcaaagcccctgtggaaacctagcattggcattcttgaactgggtatattgacagcacagggcctgttgccaatgaagaccaaggatgggcgtggcacaactgatgcatattgtgttgcaaagtacggacaaaaatgggtgcgtaccaggactataatcgacagtttcactcccaaatggaatgaacagtacacctgggaggtgtatgatccatgcactgtggtcacaattggtgtattcgacaattgccacctgaatggcggggaaaaggccaatggtgcgagggacaccagaattgggaaggtccgcatccgcctctcgacactcgaaactgatcgggtgtatacccactcataccctcttattgttctgacacctggtggtgttaagaagatgggtgaggtgcagctcgctgtccgtttcacgtgttcatcactgctgaacatgatgcatctgtactcacagcccttgctgcccaagatgcactatgtgcacccgctgtctgtgatacaggtggacaacctgaggcgccaagccacaagcattgtctccacaaggctgggccgtgcagagccaccgctgcggaaggaaatcgtggaatacatgcttgacgtggactcgcacatgtggagcatgagaaagagcaaggcaaatttcttccgtatcacgggtgtcctgagccccctgtttgccgtggcgaggtggttcgatcagatctgtcactggaagaacccgctgaccaccgtactgatccatgtactctttatgatactggttctatacccagagctgatactgcccacaatcttcctctacctgttcctgatcggggtgtggtactacaggtggcggccgaggcagccaccgcacatggacacccgcctctcccacgcagagaccgcccacccggacgagcttgacgaggagttcgacaccttccccacctcccgcccaccggacttggtgcggatgcggtatgacaagctgcgcagcgtcgccgggaggatccagaccgtggtcggcgaccttgccacgcaaggcgagcggctgcagtcgctgctgagctggagggacccaagggcgaccgcgctgttcgtggtcttctgcttcgtcgccgccatcgtcctgtatgtcactccgttccgcgtcgtggtcttcctcgcaggcctgtacgtgctgaggcaccccaggttccgccacaagatgccatctgtcccgctcaacttcttcaggcgtctgccggcgaggaccgacagcatgctgtaggcgcggcaggtgcatggccccatcgctggcgggtggtttcgcctctcagttgcagctcacagatggttgttgctctctcttaagtaagtgtatcaaaaaaaaaaaggggctgctagctatcttcgtttactttttgagcttctctgtgttgcatggttggttatgtattcatatggttgtgaacctttcctgtaacaactggacgcatgatgcgtgactgtgtctaggtatgcatgcatgtgtgtgatgcttgaaaactccgagctttagtgtttattgctttacctacttgttcagcggcagtgctgtcagctaacaaggctctctactgctgcatgtgcatcgtgtttggtttgcagctcaatttaccgacttgccagttgtaattgggaaatactgatctgaattttgcctagccgagagcccgagagttctcttctacgcagactggaactatttgggtgccaatctgagcagaggcgagctgttgtacttgtgaacttaatagtgatgtcatggttgaatttccttccaaacggagctgatgcttgtcttcaaaacgctcatggttagggatgtaataaatggcacggatattatctatttgtatttatatccgttcat

SEQ ID NO: 153022 - DNA, 3119 bp, Zea Mays
gcactccacgcccctctagtaccctcctctgcacctccctctctctctcctctctactgcctttgtttttgctcgcaagaaaaacccgaaaaagaccttgcgcaaatccgtcgtcctgtccaccgacgaagcttctgagtcctcctcgccgcgcgcctctacgccttcatatacttgctgcaggtcttttcccctgaatggtgatgtggaggtcattctcttcaattcaaatggtccccccccgcagagcaagatgaggaaatgttcaaaatactcttaagccgtgtagcacgacaagtttgttgcagaggtagtagtttcatcttaattcatattattgttcattaatgttctttccttgtagcaactatctaaagctagctgtttacttttcttaggacaagcgacgactgggttttcttggcactttgtcaagtccgtgagtagaagtttggtgtaagcttgtcttcgaacaagatgatgcagaggccaccgctccgtccggaggagtactccttgaaggaaaccacacctcaccttggtggtgcagctgctggtgacaagctcacaaccacatatgacctggttgagcagatgcagtacctttatgtaagagtggtaaaagcaaaggaacttccgaacaaggacatcactgggagttgtgatccttatgttgaggtgaaactaggaaattataagggccaaactgggcatttcgagaagaagaacaacccggagtggaatcaggtctttgcctttgcaaaggagcgcatccagtcatcagttgtggagattctggtcaaggacaaggatcttgtcaaggatgacttcattggacgtgttatatttgatttgaatgaggtcccaaagagagtgccacctgatagcccattggctccacaatggtatcggttggaagaccgcaatgggcacaaggtgaagggggagttgatgctggctgtttggatgggtactcaagctgatgaagcgttccctgaagcatggcattctgatgcagcctccgtccctggtgatggccttgcaagcattaggtcgaaagtgtatctaactccaaagctttggtatctccgtgtaaatgtcattgaagcccaggatcttataccaaatgacaagactaggttccctgaagtttatgtcaaagcaatgctaggcaaccaagtccaaagaaccagggcattggcaagccggactttgaatccattgtggaatgaggacttgatgtttgttgcagctgagccatttgaagagcacctagttttgagtgtagaggacagggtggccccaggaaaggatgaagtaattggaaggacaatcattgcactgcagcatgtaccccggaggctggatcacaggttgctaaccagccagtggtataaccttgagaagcatgtgattattgatggtgagcagaagaaagagaccaagttttcaagccggatccacttgagaatatgtcttgaaggtggatatcatgtcttggatgagtcaacacattacagtagtgatttaaggccaactgcaaagcccctgtggaaacctagcattggcattcttgaactgggtatattgacagcacagggcctgttgccaatgaagaccaaggatgggcgtggcacaactgatgcatattgtgttgcaaagtacggacaaaaatgggtgcgtaccaggactataatcgacagtttcactcccaaatggaatgaacagtacacctgggaggtgtatgatccatgcactgtggtcacaattggtgtattcgacaattgccacctgaatggcggggaaaaggccaatggtgcgagggacaccagaattgggaaggtccgcatccgcctctcgacactcgaaactgatcgggtgtatacccactcataccctcttattgttctgacacctggtggtgttaagaagatgggtgaggtgcagctcgctgtccgtttcacgtgttcatcactgctgaacatgatgcatctgtactcacagcccttgctgcccaagatgcactatgtgcacccgctgtctgtgatacaggtggacaacctgaggcgccaagccacaagcattgtctccacaaggctgggccgtgcagagccaccgctgcggaaggaaatcgtggaatacatgcttgacgtggactcgcacatgtggagcatgagaaagagcaaggcaaatttcttccgtatcacgggtgtcctgagccccctgtttgccgtggcgaggtggttcgatcagatctgtcactggaagaacccgctgaccaccgtactgatccatgtactctttatgatactggttctatacccagagctgatactgcccacaatcttcctctacctgttcctgatcggggtgtggtactacaggtggcggccgaggcagccaccgcacatggacacccgcctctcccacgcagagaccgcccacccggacgagcttgacgaggagttcgacaccttccccacctcccgcccaccggacttggtgcggatgcggtatgacaagctgcgcagcgtcgccgggaggatccagaccgtggtcggcgaccttgccacgcaaggcgagcggctgcagtcgctgctgagctggagggacccaagggcgaccgcgctgttcgtggtcttctgcttcgtcgccgccatcgtcctgtatgtcactccgttccgcgtcgtggtcttcctcgcaggcctgtacgtgctgaggcaccccaggttccgccacaagatgccatctgtcccgctcaacttcttcaggcgtctgccggcgaggaccgacagcatgctgtaggcgcggcaggtgcatggccccatcgctggcgggtggtttcgcctctcagttgcagctcacagatggttgttgctctctcttaagtaagtgtatcaaaaaaaaaaaggggctgctagctatcttcgtttactttttgagcttctctgtgttgcatggttggttatgtattcatatggttgtgaacctttcctgtaacaactggacgcatgatgcgtgactgtgtctaggtatgcatgcatgtgtgtgatgcttgaaaactccgagctttagtgtttattgctttacctacttgttcagcggcagtgctgtcagct

SEQ ID NO: 153023 - DNA, 2263 bp, Zea Mays
atagaagaattgaaccaaatccaccctctgaaatgtcaatatgtgaaaagatatatatggaacaagtacaagtgtaaaaccgctcaaaaactattcgattgcatagacttgatcacaccccttaataaatttctttatgaagtctgaagatatgttgctttttccaacttttcaatggccactggctccgtcccttctatttcttgcacaaccactcctccatccccaagccaaaagtcatccgcaaccttctggtcagaagaaaggccacacaagctgagtttgagcaggaagcaggaaaggaggggaacacaggcggctgctactgatcagcttctttttgtttatctccattcatcgatcatatatagcaaccttgttcttgttgttgtgaagaagaagaagaagaaggagcggaagaagaaaaaaaaaagataggagactgcttttgttggtcaggtgggatgtttcgctccatttcaagatgtgtcaattctgtatgaagtggtcaagaagcaagcatattcagagctgagttctttcttcaagaaatcgtctgaatggcttatccatccacctccgggatggtccaagcttcttcatccctccatggcagcatgagaagggatcccgaaggatatgacatgtcgtcggatctggaccaagccctactcctctacttcgatggtcagcaagccaagacatcagttcaagttcaagaacaacaaccgcagactctcaacatcttcccctcccagccaatgcacatcggcccatccccaaagggctccatggcttcttcttcagctcccgcagcagcaacacaggtcgctggcccttccaagaacccgcaggcgccgtcgtcgttgaaggtgggaggcgggccgccgccgctcgccgccggtaagagctccaaggcagcaatcaagagagaaggtagcggcagcggcaagcatcatggcgccgccgcgggagcttcgagcacggcggaccaggaggccgggccccggacgccggacccaaagaccctgcggcggctcgcgcagaatagggaggccgccaggaagagcaggttgaggaagaaggcttatatccagcagctagagacaggcaggatcaggctggcacagctagagcaggagatgcagatggcaagaactcatcagggtgcactatggggtgcaggaactctaagcccagacgcggcgctgttcaacctggagtacgagcggtggctgggggagcacagcaaggtggtggcccgtctgcgggccgccgcggaggagcaccggccggacgtcgagctgcgggcgtacgtggacgaggccgccgcgcactacggcgcgctgatgggccacaaggcccggctcgccgccgccgacccgctccacctcctctccggcctgtggaagggcgccgccgagcgctgcttcctctggatcggcggcttccgcgcctccgacctcgtcaaggtcgtggtccggcacgtggagccgctggcggagcagcaggcggcgggggcgcgcgacgtggagcaggcggcgcggcggacagaggaggcgctcgacgccgagctggaggcgctgctgcggtcgctctccgaggtcgtgtcctcggacgtgcagccgccggggccggggatgatgtacggcggcggcggccagctctaccacccggccgacgtggccggctacatggggatgggccacatgcacgtcgccctcgccatggacaaggtggcctcgctcggaaccatcctcagacaggcagacgagctgaggatgcaggcgttgcacgcgctccggcagatcctgacggcgaggcaggcggcgcgctgcttcgtcgccgccgatgactacttctgccgcctccggacgctcagcgcgctctggaccaccagccggacggcccagctggctagaggcccggccgggtagacatatctctacggcggcatgcatggacgatatggaatacgtacacgtacatacgcggccggctaggtactagcttagctatgacgtatagcaacgtagaaagcgttaaactacacatcatgcaaatgtacgtacccatgatatatatatagagatagatagacacaaaatatcgtatagaagtgctccggtggtggttctcttttcaaagttgcaacaatttcaaagcagattagtgaggtaccttccatatgtatatgtgtgtttgaactttgaagggagaaccgtcgcttgtgaatgaaaacgattgtgatattcatatactt

SEQ ID NO: 153024 - DNA, 1642 bp, Zea Mays
atggcgccactctcccctacccccgcctccgcctctgctcccgtgtcctcctcccctcgttccctcgtcccggacgcctccgccgcgccgatgcgccccgcctcgccgccgcaggagctccccgccgccgggggcgagatccaggcggcgctggcccctgccaatgcctccaccgcgggcgcccgcggaggcggaggctccttcacggcgctgctgggactccccacctcgcaggccatggagctgctcctcccccgcacgacgccccccgccctagccacagcgcccgcgccaaccttcccctccgacccgcacctcgtggaccgcgccgcgcgcttatccacgttcgcgcccccgtccccgtccccatcctccacgtccccggcccggcccctccccgccgccgctaacgccggcaagcgcaaggccgaccccgtcgaccgtgcctccaaggggaaggcggcgaagaaggggaagacggcggaggagaagctcgcgggcggcgacggcgacgacgagaagccggcgtacgtgcacgtgcgggccaggcggggccaggccacggacagccacagcctcgccgagcgggcgagacgcgagaagatcaatgcgaggatggagctgctcaaggagctggtccccggctgcagtaaggtatcaggaacagcattggtgctagatgagatcatcaatcatgttcagtctctccaaaggcaagttgagtacttgtcaatgaggctcgcagctgtaaacccaagggtcgattttggtgggctagacagctttctgaccacagagtgtggaaggatagcaggcttcaactgcaagaacggaatcgacttggagcaggtaacctggccagaaatgggtgttcatggagcaaggcagctgatgcaacttcaacagcagttctggcatggcgatttaacacatccacaccaagtggcttcacagtgggaaaagcgtggggatggccatcctcccgtctttagcaactccagtccctctctcttcggctatgatctaacaagctctggagcccagcaaaccccggcgagcaagctaaagacggagctttgagcgacgatggatggtagatagcattgtcaggagagcaggctgaacatatgcggtgggggcgcagcagcgacatgatttcagcaagttgaccaggtcaggctacaaacgggctgggaatgttgatgtgaagcgcatggagaccaacattttcagagacagagaggatgtacatatagcgatagagaatactattggtgttgagctgaagacgggaataccatagttgtattgtagagatgggcacgccctgctgctatcgctgaagagatgggagggcgagcgatactccggtctagttgctggtattcttggtgtatttcttactataatggcccaatcttaaggttatatgagcagcaatttttatgaaccaaaacccaaaaaaaaccatcatgggtcatcatatacccttctcgaatgcatttcaacaaaacatgaatgtagcacagtataactacatgtaacacacgtgcttgttacaatcctactgttccaagccattctaggttttctttaaggcatacggattttgttacatatttatatatggcttttgttatgt

SEQ ID NO: 153025 - DNA, 2042 bp, Zea Mays
tccgtgttagttttctcgtagccccaatgcccaatatactaggaccggccgtgcgacgacggcgggcagcggcggcgtcgcgcgcgcgaagtggtcagtgaaatgccggcgcgtgggctctcggatacggcgtcacgcttctcatgctcaccgcgcgcggccttcgtcggctagcagcggcggtctgcttcgcacgccgctccgcgtcggctgtggcggcgctccccggtgccggcgccgcgcggttccacgactacgacgccgccatcacggagtgtgtcgggaggcgggcgctccgcgaggggcggcaggtgcacgcgcgcatggtgaccgcggggtaccgcccggcgctgtacctggcgacgcggctggtgatcatgtacgctaggtgcggtgcgctggaggacgcacacaacgtgctcgatggaatgcccgagcggaacgtggtctcgtggacggcaatgatatccggatattctcagaatgaacggcctgccgaggcctgggatctgttcatcatgatgctcagagctggatgcgagcctaacgaattcactttggcatccgtccttacctcctgtactggctctcaaggcatacaccaacaccagattaagcaagtccatgcttttgccatcaagaaaaattttgagttacacatgtttgtagggagttcccttcttgacatgtatgccaggtcagagaatatccaagaagctcggagggtgtttgatatgcttcctgcaagagatgttgtttcctataccaccattttatctggctacacccgactgggccttgatgaggaagccctgaacttgttcaggcagctgtacaatgaagggatgcaatgcaatcaagttacgttctcagtccttctcaatgcattgtctgggctttcttctatggattatggaaagcaggtccatgggctaattcttcgtagagagttgccatttttcatggctttgcagaattctttgattgacatgtactctaaatgtggcaagctgttatactcacgaagggtgtttgacaatatgcctgagagatcagtggttagctggaatgctatgcttatgggatatggaaggcatggcatggcatatgaagttgttcagctcttcagatttatgtgtgataaagtgaagcctgacagtgttactctattggctgttttgttgggctatagtcatggtggtctggttgacgagggccttgatatgttcgatcatatagttaaagagcagagcacactcctcaatactcaacattatggatgtgttattgatcttcttggacgttctggacaacttgagaaggcactacttttgatacaaaagatgccatttcaaccaactcgagcaatttggggttcattgcttggtgcttgtagagttcatgctaatgttcatgtcggtgagtttgttgcgcagaagctttttgacattgaaccggaaaatgctggcaattatgtgatcctttctaacatttatgctgctgctcggatgtggaaagatgttttcagactgagaaagttaatgttaaagaagactgtgataaaagaacctgggcggagctggatgattcttgacaaggttattcataccttccactctagtgagcgtttccaccccaggaaggaagatataaatgttaagattaatgagatatatgctgctattaaagcggctggttttgttcctgatctgagctgtgtacttcatgatgttgatgatgagcagaaagaacgcatgcttcttgggcacagtgagaagctggccataacttttggactgatgagtactccttcagacttgaccatccaggttatgaagaatcttcgcatctgtgttgactgccacaattttgcaaagtttgtctcaaaagtttatggaagggagatatccctcagagacaaaaatcgctttcatctaattacagaaggagcttgcacctgtggagattactggtgaaagatacaatgctatactattcagattgctttgctgatagggggaatctgtccttatgttgtgatt

SEQ ID NO: 153026 - DNA, 2880 bp, Zea Mays
cctaccctatgtcgcgagctcggccggcattagccatggcggcggaggcggaggcggcgctcctgctgctgctgctcctgtgcgcggcggcgttcgtggagcgcggcgcggcgctgcacctctgcacggaccggctgttcaacgacacgaaggggcggcacgacgacggcctgccgcacctgaccccgacggaggaggccacgtggatgtccctcctcccgcgcaggctccgcggcggcggccgggccgagttcgactggctggcgctgtaccgcagcctgacgcgcggcgacgggccggacggtggcgccggcaaggccgcgggccccgaggggctgctgtcgccggcgtccctgcacgacgtccgcctccacggcgacggcagcctctcctccatgtactggcgggcgcagcagaccaacctcgagtacctgctctacctcgaccccgaccgcctcacctggaccttccgccagcaggctggcctgcctaccgtcggggacccctacggcggctgggaggcgccggacgggcagctccgcggccatttcgtagggcactacctgagcgcgagcgcgcacgcgtgggcggccacgcacaacggcaccctgagggagaggatggcgagggtggtggacattctccacgcctgccagaagaagatgggcacggggtacctctcggcgtaccccgagaccatgttcgacctgtacgagcagctggacgaggcgtggtcgccatactacaccacccacaagatcatgcagggactcctcgaccagtacacgctggccagcaacgagaaaggccttgacgtggtgctgcggatggccgactacttcagcaaccgcgtgaagaacctggtgcagatccacactatccagaggcactgggaggcgatgaacgaggagaccggcggcttcaacgacgtcatgtatcagctgtacactataacgagagatcagaaacacctgacgatggctcatcttttcgacaagccatgcttcctcggaccacttggtctccataaagacgacatctcgggcttgcatgtgaacacgcatctccccgtcctcgttggtgcgcagaagagatacgaggtcgttggcgatcgtctctacaaggacatctcgacttacttgtttgatgtggtgaattcttctcacactttcgcaaccggaggcacatctaccatggaacactggcatgacccaaagaggctggtggacgagatcaagatcagctcgaacgaggagacctgcgccacctacaacttcctcaaggtgtcgcggaacctgttccggtggacgaaggaggccaagtacgcggaccactacgagaggctgctcatcaacgggatcatgggcaaccagagggggacgcagcccggggtcatgctctacttccttcccatggggcctgggcggtccaagagcgtcagtggccagtcaccgtctggcctcccgcccaagaacccaggggggtggggaggtcccaacgacacgttctggtgctgctatggcacggggatagagtcgttctcaaagctaggggactccatatacttcctggaggaaggtgacacccctgggctctacatcatccagtacataccgagcaccttcgactggaaagccacgggcctcactgtcaaccagcgggcgaaacctctgctgtcaacggaccccttcttcaaagtttcgctcaccatttctgcaaagagaggtgcccgacaagcgaaggtgagtgtccggatcccatcgtggacgacaaccgatggcgcaacggcgatcctgaacggccagaagctcaacctgacacccactggcaactcgactaatggtggtttcctgacgattaccaagctctgggccaatgacaccttgaccctccatttccccattacccttagaactgaggcaatcaaggatgaccggccggagtacgcgtccatccaagcggtgctgttcggaccgcacctcctcgccggcctgacacacggcaagctgccagtgacagacagcagccactccaacgacggcctgaccgcaggcatctgggaagtggacgccacaggcgccgcctccgtcgccggctgggtcaccccgctccactccgagacgctcaactcacagctcgtcaccctgaaacagagcattggcgggcgcaccctcgtcttgtcggtgtccatcgctgacgcgaagctggagatgcaggagcagcccgcccccgggaccgacgcgtgcgtgcacgccacgttccgcgcctacggccaggcgggcggcagcagccagctgctgcgagggcccaacgtgacgatcgagccgttcgacagaccgggcatggcggtcaccaacggcctcgccgtcggctgccgtggaggccgcgacacgctcttcaacgccgtgccggggctggacggcgcgccgggctccgtgtccctggagcttgccaccaggccggggtggttcgtggcgacggcccccacagcgatgcacgcgaacgccaccacgcaggtcgtctgccgagccaacaagggcggcgcggcgttccggcgagcggcgagcttcgcgcgcgcgccgccgctgaggcgttaccacccgctgagcttcgcggcgcgcgggacggcgcggaacttcctgctggagccgctgcggagcctgcaggatgagttctacaccgtctattttagcctcgtctccgacggcgagagctgattgatcggtgtgctcctgaacgaacgctccgctagtttcgctgtgcaatgagccattgacgctctgtatcccccatgaactatgtgcaatttggagtggagtaaaaatgtatggcgctagttccatgaatccatcaaaattcccttaccgttaatagcttaaa

SEQ ID NO: 153027 - DNA, 1008 bp, Zea Mays
ggccacttctcgtcgcagaaactatgtattgtagttgtaggtatagtttatataaattaatataatagaaatagaaaccatgtgtgtgtgtggttttcagcaccgtggctcttagcttctcgtgtcctggccgtaagcattccgtgcgatgcctccgctgtccggccgtcgtggtctcgtcacgcacgcacacgtacacacacctcgcttgatatgatgcccgtgtgctctcaggtctcaaacaacgctgtccgtctctccggcgcggaggggataaaagtctcggcgtgaactcctggccagtcttttgctgctgccatatccgcgcgcactgccggccggccagccagccagccagcgcgcgcgtgtcgcggcggagctagagggctaggtagcagagtggtggccagtgccgcgggttgcgttgggatggcggcgcttgtggcgctgacgctggcgctggcgctgacggcggcagtgacagcgacggcgaaggagtgcaccaacatcccgacggagctgtcgtcgcacacggtgcgggcgcggctgcaggcggcgccgggcggagcggcggagtggcggtggcgcgagctgttccacgagcacctcaaccccaccgacgaggccgcgtggatggacctcatgccgccgcctggcgccgcggctgcggcgcaacaccagcagcaccaccgccaggaggagctcgactgggtgatgctctaccggtcgctcaagggccagcagcagcagcagccggtggggggcggcaccgccgcagccgggagtacgccgttcctggaggaggtgtccctgcacgacgtgcgcctggaccccgacggcgacgtggcgtacgggcgcgcgcagcagacgaacctcgagtacctgctgctgctggacgtggaccgcctcgtctggagcttccgctcccaggcggggctgccggcgcccggaaccccctacggcggctgggagaagcctgacagcgagctcaggggccacttcgtcggt

SEQ ID NO: 153028 - DNA, 1703 bp, Zea Mays
cgcgtgccctctttgtctttgatctcacgcaacttgtatgtcaagctgaccatggcttaactcttgagccaggaaattgcgacgttcttcatggacacagtgaactcctctcacgcatacgcgactggtggtacatctgtcagtgaattctggtccaatccaaagcgattagctgaagctctgaccactgagactgaggagtcctgcacaacttacaatatgctcaaggtttcgcgccatctgttcagatggacgaaggagatcgcgtacgcggactactacgagcgagcgctgatcaacggcgtgctgagcatccagaggggcagggaccccggagtgatgatctacatgctgccccagggccccgggagatccaaggcgaagagctaccatggctggggaactcagtacgaatcgttctggtgctgctatggcactgggatagaatcgttctccaagctgggagattccatttacttcgaggagagaggtgagaggccggcactgtatgttgttcagttcataccgagcacgttcagctggagaactgcaggccttactgtcgcacagcagctgatgcccctcagctcgtcggatcagtaccttcaggtctcgttctccgtatctgccaagacgacaaacggtcagtttgcgacgttgaacgtgagaataccatcgtggacatctttgaatggcgcaaaggcaacactgaatggcaagcatctggaattagcatctccagggacatttctcactatcagcaagcagtggggcagcggtgatcagttgtcactccagttacctatccacctaaggactgaagcaataaaagatgaccggccggagtacgcgtctatacaagcagtcctgttcgggccgttcctcctcgccggcctcaccaccggagactgggacgccaagaccggcgccgccgacgccgcagcctccgactggatcacccccgtccctgtggagtccaactcccagctggtgacgctggcgcaggagtccggcggcgaggccttcgtcctctccgccctgaacgggtccttgacgatgctgcagcggcccaaagacggcggcggcaccgaggccgccgtgcacgcgacgttcaggctcgtcccgcagggaggcgccggcgcgggcgccgccgcgatgctcgagccgctggacatgccggggatggtggtcacggacaggctcacggtggccgcggagaagagctcgggcgccgcgttcaacgtcgtgccggggctcgccggtgcgcccggctcggtgtcgctcgagctcgcgtccaggccggggtgcttcttggtcggcggcggcgagaaggtgcaggtgggctgtgccggtggtgcccagcagaagcgcggcgacggcgcctggttccggcggtcggccagcttcgcgcggggcgagccgctgcggcggtaccaccccatgagcttcgctgccaggggcgtgaggaggagcttcctcctggagccattgttcaccttgagggacgagttctacaccgtctacttcaaccttgtagcgtgacagacgggagatgacgacgagacctgcaggtcgaggactcgaggttgatgttgcttcggcctctggtaaccaaggggggaaaatgttgagttggaggtggagtgtcggacagttatgtttagagaaaagagaatgattttcccatattcaccgaatgatcc

SEQ ID NO: 153029 - DNA, 1043 bp, Zea Mays
tgggaacaatttgttctcacacagactttggttaatgccagggacatttctcactatcagcaagcagtggggcagcggtgatcagttgtcactccagttacctatccacctaaggactgaagcaataaaaggtctggaatttacaagtattttttccccagataaatattttggtgtagattgaattttgaatcgatgcactcattctaggatagttacttaaatttttcactcttaaccattgaaatccctgataattgtatggcaattgacaacattgagtgggactgagcagtgtaactgaaaccaccttcagatgaccggccggagtacgcgtctatacaagcagtcctgttcgggccgttcctcctcgccggcctcaccaccggagactgggacgccaagaccggcgccgccgacgccgcagcctccgactggatcacccccgtccctgtggagtccaactcccagctggtgacgctggcgcaggagtccggcggcgaggccttcgtcctctccgccctgaacgggtccttgacgatgctgcagcggcccaaagacggcggcggcaccgaggccgccgtgcacgcgacgttcaggctcgtcccgcagggaggcgccggcgcgggcgccgccgcgatgctcgagccgctggacatgccggggatggtggtcacggacaggctcacggtggccgcggagaagagctcgggcgccgcgttcaacgtcgtgccggggctcgccggtgcgcccggctcggtgtcgctcgagctcgcgtccaggccggggtgcttcttggtcggcggcggcgagaaggtgcaggtgggctgtgccggtggtgcccagcagaagcgcggcgacggcgcctggttccggcggtcggccagcttcgcgcggggcgagccgctgcggcggtaccaccccatgagcttcgctgccaggggcgtgaggaggagcttcctcctggagccattgttcaccttgagggacgagttctacaccgtctacttcaaccttgtagcgtgacagacgggagatgacga

SEQ ID NO: 153030 - DNA, 1861 bp, Zea Mays
cttcccaactttatactagtttatgtgcaaacaagagagatactttgtataggaaaacgacggaccatttaacgcacagttgcagattactattactggctgcagtgtaccatataatacccagggacaagacaacagtacatcacatagctagataactgcgaagccaaatacccgtctcagcgagaccaccataaatagagcttacacaacatagccaacatgcaaatcattttagaactgaccagatgcagaggcaggaattctcgaggcgggctacacaagtgtgcaccgtgcactgcaatgcccaacaacaagattgtagcagcaaacatggaagagaaaggcgcggggggcaaggcagcagttccgcatgacgagttaccgcggtttacaatcttcctgatacccaaccgtagggaaccccccctagatcttgtcgagcttgtctgccttcaccaccggattagccttggcaatggcgtccctggcagcagtccggtagtcgaacttgcagtcgtgcttgtcggagtagcggtggagtgcgcagtacaagttcccacaccggcagttgaatcccgtaagtccaaccctcttcctgcaggcgctgcaccggttcggccctaccttcccccctttggagatcgccgccaccccctcgctgggtccggcaacatcagcgggctgctgcacgttcattgtttgcaactcaacttgggcaacagctactaccgtgttgctgccagcaacaaccggctccatgacggcgtcgctgccgttcacgatgctgtcgatagaggaggcagccagcttggcctgatcctgcttcgttatcatctccttgtggcacttggagcacatgttcatggtcgccgcgctgccgaagaagccacagttattgatgcagaggatgggtccctcgggggcctggcacccagcctccttgtgctccatggcttccttaactagaataatacgaaacaactgatcaataccagaatagtagtcgacatagtgtgtcaccagcttcccaaaagttgctactagtagtaaaaaaacaatcataaaatctaagtgaaagttggtactgccttgattcagtaagacatgctgcaacctaatgccagactgaaggtgctatcaaaagggtaattgtagcttggtcaagcgcccaactgaaggtgctatcatatagagcctgcactatcatttggctaacagccgaatcacctaacggcaacacaccacgggtgaaatcaattctaaaaagatggcccaacttttagccgctttacgcaacaaatctacaaagtagcaaccatatctgctcattaactttcggcaaagcaggcaacaacacacccaaccaataagtggaaaggactcgcctttacaacagataaacgctcttaccccacccccacccccccaaaaaaaattatctggctgttgttcgctgttaggtacagcgtaaatcggaacggctcaattggttccgcatcgacccactcaacaagcacgcaaaatatatatataattcacagtttttgacccggacaactaaaaaaacggggaaattaattggatgcagagtggccagatacacgaacctcggatgagacggccctctttgcgattcctctccgacgatccctgcgtgaacgacgcaaagaaaccgatcaaatataagaggggaaaaaaggaggacggcccggatcgggcgcgcgaggcggagccaaagccccaaatctacagatcaaagggagaagagaccatattatgattgaatcggaggcagcgaggtgctaaccctagggggagacgaggaggcgaggggagaggaatcgcagggaattcggtg

SEQ ID NO: 153031 - DNA, 601 bp, Zea Mays
acagattgggatggcatcataaatcttgtaagtgccttgccacagacaatcaagagactggttcttgtgtcatctattggtgttacaaaatacaatgagataccatggagcatcatgaatctgtttggtgtgttcaagtacaagaagatgggagaagactttgttcgcaattcaggaataccattcacgattatcaggtattcaggtttgtacatagaaaagttttttggtgggatcatagatatattattctgacatgattcatgctgtttgcaagccgggaagattgacagatggaccctacacttcatatgatcttaatacacttcttaaagctatagctggggagcgacgagcagtagtcataggcaaaggcgacaagcttgtgggggaagttagcagacttgtggtggcagaagcttgtatccaatctttagatattgaatctactgaaggatagatacatgagattaattcagtgaaggtactcattatttttagaacaggtacacttagttattggtaattagctaattatcatcaggtctcaatcgagatataatgtgatttagtcccttaaaattttcaatctctttatttt

SEQ ID NO: 153032 - DNA, 2521 bp, Zea Mays
cagaaccatcaacacacagtcacacacatctagctagtgcctaggtcatccaactatggcgccgtccccgtcccatctcctcctcgccctcgcggcgctgctgctgtgcagcatcagccccatccccgtggcctgctcgcgaaccctgccctccaccgccgccaccaccaccgtgaacgtgaccagcttcggcaaggcgtacaccaaggtgtgcgacgcggagcggttcgcggagatgggcctcaacatgtcggcgttcccgtactgcgacgcgtcgctgccgtacgccgaccgtgtgcgcgacctcatcggctggatgacggtggaggagaaggtcggcaacctcggcgacatatcccacggcgcgccccgcgtcggcctgccgccctacaagtggtggtccgaggcgctgcacggcgtctccagcaccggccccacgatgctgttcgacgacctccacagcaagcccgggaaccactccggccgcgccaccgtcaacaacgccaccgtcttcgccaacgtcatcaacagcgccgcctccttcaacgagacgctctggaactccattggccaggctgtttcgacggaggcacgtgccatgtacaaccttggcaagggcgggctgacgtactggagccccaacatcaacgtggtgcgcgacccgcggtggggccgcgctctcgagacccccggcgaggacccgtacgtggccggccgttacgccgtgaacttcgtccgcggcatgcaggacatccccggccactactccggcgacccgtccgcccgccccatcaagacctccgcctgctgcaagcaccacgccgcgtacgacgtggacaactggcacaaccagacgcggttcacgtacgacgcgcgcgtctcggagcgcgacatggccgagaccttcctccggcccttcgagatgtgcgtccgcgagggcgacgtcagcagcgtcatgtgctcctacaaccgcgtgaacggcgtccccgcctgcgccgacgcgcggctcctgtccgggaccgtccgcggcgagtggcacctcaacggctacatcgtgtccgactgcgacgcggtccgcgtcatgacggacaacgccacctggctcaacttcaccgccgccgagtccagcgccgtctcgctcagggccgggatggacctcgactgcgccgagagctggatcgaggaggagggcaggccgctcagagactacctcagcgagtacggcatggccgccgtcgcgcagggcaagatgcgcgagtccgacatcgacaacgcgctaaccaacctgtacatgacgctcatgaggctcggctacttcgacaacatcccaaggtacgcctccctcaacgagacagacgtatgcaccgacgagcacaagagcctcgccctcgacggcgcgaggcagggcatcgtgctcctcaagaacgaccacggcctgcttcctctggacccgaagaagacccttgccgtcgccgtgcacggaccacacgcccgggcacctgaaaagatcatggacggcgactatacaggaccgccatgccggtacgtgacgccgcgccaaggtataagcagggacgtgaagatctcgcacaaggcgaagatgaccatctacttgggtggcataaacctttacattgagagggagggaaacgacagggaggaccttctcctacccaagaaccaaaccgaggagatcctgcactttgcccaggcctcaccgaccccgatcatccttgtcatcctgtctggaggaggcatcgacatctccttcgcgcagaagcaccccaagatcggcgccatcctttgggccggctaccctggcggcgaaggtggcaacgccattgccgatgtcatctttggaagatataatccaggtggaaggctgccactgacatggttcaagaacaagtacatcgagcagatccccatgacgtccatggagttccgaccagtgccggagaaggggtaccctggcaggacctacaagttctacgatggcccggaggtgctgtaccccttcggctacggcctcagctacaccaagttccagtacgagaccagcaccgacggcgtctccgtcagcctcccggccccgggaggccactgcaagggtctcagctacaagcctagcgtggccaccgtcccagcctgccaggccgtcaacgtcgccgaccacgcctgcaccgagaccgtcagcttcaacgtcagcgtgactaacgccggcggccgcggcggcgcccacgtcgtgctggtgtacacagcgccgcctcccgaggtggccgaggcgccgatcaagcaggtggcggcgttccgcagggtgttcgtggcggccaggagcaccgccaccgtgcccttcgcgctcaacgtgtgcaaggcgttcggcatcgtggagaggaccgcgtacaccgtcgtgccctccggcgtcagcaaggtgctggtcgagaacggcgactcgtcgtcgtcggtgtcgttccccgtcaagatcgatttgtccgtttagctcatgcttagtttctcgtcc

SEQ ID NO: 153033 - DNA, 703 bp, Zea Mays
agcagaaagcaatcgagaggagaaccagcagcctccaataagagccagccagagaaactaataaaactctcaccgccgccatccgagagaacaagccaaccgaccccgtccccaaggcaatccgtcgccgacgtaccaccgccaccgcaggagcgagatggagatgaagaggatcctcttcgccgtcctcgtcgtcatcgccgcctcggccaccgcagtgctggcctccaccgaggccgccgccgcgggcgccccaactgcctccgagtcgtccgccgaggctcccgctggcgctggcgctggcgctgccgctggcgccgccgccgcggggccctccgccagcagcggcgcgcccgccctcgccgccgcgcccgccgcgctcctcttctccctcctcgcctactacctccactaagcgtgtgcgtgcttacgtacgcgcgcatggacgacgatggatccgtccaccgttgccattgcagttgcctcgctcgttcttggtgactgttgctgcggtggtcgacttggaagacgtcacctgcaccgctgtttccatatattattattgatgtgatctgatatgaatatatatgcatggtgacgggttgtgttaattacatagacgtgatttaatttatctatttgtgtcaagtcgttctgtaatcatgcgatgaaatatatgatttggttttccatttgtttgaaa

SEQ ID NO: 153034 - DNA, 747 bp, Zea Mays
atcttcgtcgctctgaagcaggtctctcaacatcagcacgacgggatagatccagataaatcttcatcactctcatgatcccatccctccccacatttcactgtccaccgcaaatagccgaacggaatcccagatcactcagaaattgccaccgaaaagggaacaaagcgagccagccctcgccaaattgccaaccaagcctgctcccccgcctaggccagtatgataatagagaaaaagcaagcagaagggatatgatgggcgagtgagatgcttcgttcacgttccagcgatggttgaagctggtggagctggtgccattggcgatgcctagacgcgagcgtgtgcaacccggttgacgtcagacgagccaagcacgctggatgggcctaaggcgttcggcgaaatgcctcccgaagagcgcactgtgtgccagaccggcatagcttcttcgtttcgttgcacattaatctgatctttgatgcaattaggagagattttattatccaagattctgaaggtcagacatttgcttgtacctttccagtatgaatggatattctcgaagatggaaagtatgagttaatattcatcgacacatatacatacatacgtttacatgaatctgattttattagattctctaagcaagaggattatgattctattttgttcttagccctagaaagtttgtgatttttattaatattgtggaccttacagcctttgcacatggtcagtctcttg

SEQ ID NO: 153035 - DNA, 1892 bp, Zea Mays
gccttggattttagccgtttcgcccgtcccgtggggcggttggcctgttgctaccttgctataaggggaagccagccagggcggtgtgcaggacggggtgcacgggcgcggccctcatccagcagggtggtactggactgtacactgtactgtggagtgagtgcatcagcggtctcgagccacactgtgagccactgattatataccaggccactgattgttacgctgacacgcatgcatcccgcatccctgctccaagagagatgggtctcgccggcggcattgtccggagggtcttctccaagagcccttgctcgtccgccggcagccgtggccacagtgagaaggggtctgctgaacacaggaggagatggggctcgctacggctgtacctctgcggcgaggagatgaacgcggccgcagaggaggaggaggacggggacggcgacacggtgtccgtcaagagcttcgagacctgctgcgtgatgccggaggaggcgcacgtcgtcgtcccggtgcatcatcgtctgatgagcgccgcacacgatggcaacgaccagagcagggtccctggtggtgccgatgaagagggagcggcgacgctcatccagtccgcgttcagagggttcatgtcgaggaggcagctgcaggaggcgagggcgaggacgaggacgaggacgcgcggccgagagccagaaccggacggcgccaaggaccaagagcccagcagccccacctgggggccgtccgtcgcgacgtcggtgctggtccaggtaggcgacgagtcgtcgtcgctgggcaacctccggctccggctaagcgaggagagcgcgtcggtgcagcagcagcggtccagcagccagaggtcgtcgtcgcgcccgccgccagcgttccgagtcaaggaggagtgggacgacagcacggtgagctccaacgtgtccaggatgaggatccagaacaggatcgaggccaccacgcggcgcgagcgagcgctcgcctacgcgttctcgcagcagcttcggagctgcggcggcggcaccagcaagaagcggtcgtcggcgcgcgcggaggggcagggggagttcaacgtggggtggagctggctggagcggtggatggcgacgcggcaggcggagcccgcggacgactgcgcgagccgcaacgcggacacgggctccgccacggggcggcgggtggtggtcgtcaggaggcggagcgacctcgccgtcgaggagaaggagagctgcgcctccaacgacgtctcggtcgtcagcttcgacgcctcctccggcctcgcctgccataggcccacgggcaacaagagccggctcaagggcggccggagcttgccgcgccggaagcaggtggcggcgtcggcgtcggcgtcggaccaccgcttccaggaaagatcacacaaggtgagcaagaagggacaccagcgagtggagcaggagccgcacaaggaccgattcgacgccgtcgccgccctggacgacgacgcttgccagcctcccacggattactgagacgacctgctctgtacatagatttggaaggatttgcagcgctagctgacgatttgtttcggcttgcactagtctgaaagactgcacggttactgtctgctgagtgactgtacgtgtcgtgtcggtcatgtaaaagttcctcgctacacgtacgtcgtatcaaacgtcactcactgtaaaacgtcacggccacatacacgatgacgagttccggttccctagacacggcaaggagaagcaatcagtgacagtatttgtgatatcatatccatccaggcatccagctccgtttgttttgcgttagcacctaaagtacgactgcactgtaccgccacaacagtttacttatggtgtgtttcgttttaa

SEQ ID NO: 153036 - DNA, 2039 bp, Zea Mays
gccttggattttagccgtttcgcccgtcccgtggggcggttggcctgttgctaccttgctataaggggaagccagccagggcggtgtgcaggacggggtgcacgggcgcggccctcatccagcagggtggtactggactgtacactgtactgtggagtgagtgcatcagcggtctcgagccacactgtgagccactgattatataccaggccactgattgttacgctgacacgcatgcatcccgcatccctgctccaagagagatgggtctcgccggcggcattgtccggagggtcttctccaagagcccttgctcgtccgccggcagccgtggccacagtgagaaggggtctgctgaacacaggaggagatggggctcgctacggctgtacctctgcggcgaggagatgaacgcggccgcagaggaggaggaggacggggacggcgacacggtgtccgtcaagagcttcgagacctgctgcgtgatgccggaggaggcgcacgtcgtcgtcccggtgcatcatcgtctgatgagcgccgcacacgatggcaacgaccagagcagggtccctggtggtgccgatgaagagggagcggcgacgctcatccagtccgcgttcagagggttcatgtcgaggaggcagctgcaggaggcgagggcgaggacgaggacgaggacgcgcggccgagagccagaaccggacggcgccaaggaccaagagcccagcagccccacctgggggccgtccgtcgcgacgtcggtgctggtccaggtaggcgacgagtcgtcgtcgctgggcaacctccggctccggctaagcgaggagagcgcgtcggtgcagcagcagcggtccagcagccagaggtcgtcgtcgcgcccgccgccagcgttccgagtcaaggaggagtgggacgacagcacggtgagctccaacgtgtccaggatgaggatccagaacaggatcgaggccaccacgcggcgcgagcgagcgctcgcctacgcgttctcgcagcaggtacgtacgtgtcgtgtcgtgtcgtgactcgtgaggctgatggatcggatgacagtgcgtgaggacgcgcgtgcgctgaccgatggcggagagccttgagagcgcgctgatggtggatgcgttctttcttgttgtcgccaaattaagcttcggagctgcggcggcggcaccagcaagaagcggtcgtcggcgcgcgcggaggggcagggggagttcaacgtggggtggagctggctggagcggtggatggcgacgcggcaggcggagcccgcggacgactgcgcgagccgcaacgcggacacgggctccgccacggggcggcgggtggtggtcgtcaggaggcggagcgacctcgccgtcgaggagaaggagagctgcgcctccaacgacgtctcggtcgtcagcttcgacgcctcctccggcctcgcctgccataggcccacgggcaacaagagccggctcaagggcggccggagcttgccgcgccggaagcaggtggcggcgtcggcgtcggcgtcggaccaccgcttccaggaaagatcacacaaggtgagcaagaagggacaccagcgagtggagcaggagccgcacaaggaccgattcgacgccgtcgccgccctggacgacgacgcttgccagcctcccacggattactgagacgacctgctctgtacatagatttggaaggatttgcagcgctagctgacgatttgtttcggcttgcactagtctgaaagactgcacggttactgtctgctgagtgactgtacgtgtcgtgtcggtcatgtaaaagttcctcgctacacgtacgtcgtatcaaacgtcactcactgtaaaacgtcacggccacatacacgatgacgagttccggttccctagacacggcaaggagaagcaatcagtgacagtatttgtgatatcatatccatccaggcatccagctccgtttgttttgcgttagcacctaaagtacgactgcactgtaccgccacaacagtttacttatggtgtgtttcgttttaa

SEQ ID NO: 153037 - DNA, 893 bp, Zea Mays
atttagtctatcgagaacttcaattgcttgatttattgtgtatccctcattcccatccaaaataaatgagcaatctggatggacaagtcgtatagctttcagaacttctatatctgaattcaagttcttcccaaccttgagcttcagagtttgaaacccttgtccgcggtattcagtagccaattgagcagcttcattggggtcacgattgtaaatcgtgatgtaagttgtcacactatctgacgctcctccaaataatctccacagaggtatgcgaatgctattagcaaccgcgtcaatcagcgccatctccactcctgctctggctaaggcgaagtcgtgtccggggagcacaccggcaacatcctacagcagggcgccgagggggcagcggcacacgcccggcccgcaataccgagcgccgccggctggtccccggcggtgatggagggaagcacgggcgcctcgccccagccgacggcgccgctgcggagctcgacgcgcacgatgatgttggagagcatggcgaggcgcgaggacgcgatggtgaagggcgcgacgagcgggacgtggagcgggcgtgcgccggccgccgacacgtccacggagaaggtctccttgagcgcgttgaagccgaacgagcccacgggggagggtaaggacggggacggcgagacggcgcggaggcgggtggtggcggtggggggctgttggcggtggatcggcctcgtgggcgatgccgccgaagggtgagcggggcggtgcctgcacggcgatgggtgggggcggggtggttgccaaaggcagggatggctgggacgggggagggggaggggcgggggcggagcacggtcggatcgccctagatgaagcgaacggtccagattcacgta

SEQ ID NO: 153038 - DNA, 2150 bp, Zea Mays
gcgaattccgaactgcaagcccactctgtccgcccgacgcgcagaccacgcctgggccgtcaagcctccagatgagatgaccgccctccaacctcgcgtgggcttgggcatgccgacgaggccacctccagacctcctgaatcctgaattcatgatgcctcacgcggcgccagcactgggaggtagccgttgccatgacatcggtcgccatcaggcatcaggggaggaggccggtggccgaagcaaagcaactccgatgtggccggggaggtagcctactgccccctacccccgtagaggcgtagacccgtacccactccgcgagcgagggatggaatctgacgggtggccgcacgcgggaggcaaccgagaggcgcgcagggcacgccgattccttccttgccgccgcggtcgctcggcaatcgcgtgcgcccgctgctttaacctctcggctttgtcttcgctagccgaccaattgttgggccgccgctagcaggagccaggtcgcgccgacagcagcagttggaagaggatccatggggaaggaggcgacgcttgcgttcacgcccacctgggtggtggccatcgtatgcctcgtcatcgtctctatctccctcgccgctgagcgctcactccattacctcggcaagtatctggagtgtaagaagcagaaagcgcttttttcagctctacagagactaaaagaagagctaatgcttctcggattcatttcattcgtcctgagtctctcccaaggttttattgttagcatttgcattccagaaacttctactgacttcatgcttccatgcaatagaggcaactccagagttgcagaagaaggtgctaaaatttgcaacaaaaagggtgatgttcccttgctatcactggaggcattacatcagctgcacattttcatatttgtacttggtttagtccatgttgtgttctgcgctacaacaatatcatttagtggggccaagatgagaaagtggaagcattgggaaacagaaattcacagagaagtacatgagaagttacagcaagaaaagaatgaaggacaagggtcatcattgagtattgttgtgctacatcgggagcaccaggatgaatttgtccacaagcggacaaagggattttggatgaagctcgctgttgcaagctggataactgcattcttgaagcaatttcaagattcagtgagtaaatcagattatgaagcacttagatcagcttttgtcgtggaacactatcccgagaaaccagatattgatttccacaaatacatgactcgcgctgttgaatatgagtttaaaagagttgttggtatcagctggtatctgtggctttttgtaatcttattcctgctgctgaatataaatggatggcacacatacttctggttggctttcttgcctctatttctgttacttattgttggtgccaaactagagcacattatcactcggttggctcaagaggcagcgatatcattatcaaataatacagaggaagttccgaaaataaagccatgcaaggaccatttctggtttcacaagcctgagctagtccttcatttgatccatttcatcctgttccagaattcgttcgagattagttttttcttctggattctggtatcagaaggtttcggttcgtgtatgatggaacggaagccttatgtcatttccagacttgttatcggggtgatcatcgaagtcatctgcagctatatcacgctgccactatacgccatcgtgacccatatgaccggacagatcaagctgcatggttttggctcccgcgtgcacgagagtgtccatggctggatcggcttgaggaagaaacccttctcgttctggaagattcccggcggtgaccctaacgctgattccggcagggaggccgacgtaacccgcagggtggccaaggagcggtcggggagctcgcgcagcatgccgatggcgccggctgacgagatcgtcaccgtcgacgacgtcgcggtggctgcagctgccgttggccaaggaccataaaattcctagctagcaaacaccagcagggaaggcaggcaggctgccgaggtaccgtgcgcagcgggttgatgggtcggacgctgcggaaaattcctcgtgtcgggagcaggctgg

SEQ ID NO: 153039 - DNA, 593 bp, Zea Mays
gtctgccacccgagaaagcacgcgccgcgcgcctcctgcacgaggtagccctccgacgggtagtgcagccgcagcagcagccgcgcctgcgacacggcgaaagcgctgagaggccgcgccgcaaatccggcgccgcgcgccgcggctccccaccgctcgagtccgcgccaccacctcccaccggagggacccagcgcggcgcaggagagcaggagcggcgtgaagtggaaggggagctggatggagcgggcgaaggcgcggaggcggctgccggtgcggaggagggtgtcgcggtcggcgccggcgccggtgatgcgcacctccggcggtcccgcggccgggtcggcgcgctcggcgatcgcctgcagcagtggcggccactgcaccccgtgcgcggcgtccaggtcgaggatgtggatccggcgcgcgccctcgacggcgtcgaggatggcctggttcgccgtcaggtgcgcgaagcgcaggaagggcgcgatctggttgaacgcgaggtaggcggcggacgacgccggccgcgcggcggcggcggccaccaagcccgtggcggcggccctggcgtccgcccggagagcgag

SEQ ID NO: 153040 - DNA, 751 bp, Zea Mays
aatttttcactcccacccctccattcttcccagccgccaccctctcccttcctgcctcttcttcacggcagcaacatccatcagggagccgtgcttctcccatggcgcctcctctccttcccttcctcgagcaagctctagtgagcgcgcagtgcagcaacaccttcttccccatggaagccggcgctccctgtccatggcgccatctcccagcagccactcccatggcgtgctgctcgagtcggtctccttcctccctctgtcccttgccgcaggagcagcagctcctcctcccatggtcggcctcccttctccccctcggctccttcctccaggccgagctcctatgccaggaacggctgctccacttgaccgttgctccatttttttcccctcgctctgctctctcggctgctggcggccatggcgcgacgcctccgctccttctctctaccccacaaaacagccagcgcgcaggagcttcttctccatggacgccgaccaggctggtccctcgcctctgctcttccccgtggtcgcagttctgcgcagagctgcgagtaggagcatgccatggccggatctgccccctccatggacgccccttgctgttccctgcgcccagctctctctatccagtgcgccccattttcttccatggaaaaccaacagcgagcccccttcctcgctgttcgtcgtggtgcccgccggctgttcggcaaaatgcgcagcaagccgcgcgctgcagcaa

SEQ ID NO: 153041 - DNA, 621 bp, Zea Mays
acagtagatgtctttgcctacctccttgatctttgggatgaacttcaaaatatccagcttcatccagacatggaggataagcatattttctggtttgctattgatggaatttattcagctaaagcagcttatgatggcctcttcatcgggtcgaccatggctcagtattggaaattaatttggaaaacttggtcccctcctaaatgtaaattctttctatggcttgctgatcttggaagatgctggacagcagaccgtctacagaagagaagcttaagccatcctgacaaatgtgttctgtgtgaccaagatcaagaaaccatagaccacattttggtgggttgtgtctttgctaggagcttttggtttcagatgctgggacaggtcaacctgtctggctttgctcctaaggtgggagaagctaaaacgatgaaatggtggagcagaattagtgagcagctgcaggggattgctaaaaaagggcttaattccttgattacccttgggctttggactctctgaaaccatagaaatgggtgcgtttttgacagagttaaacccagtctggagggtgctactagaagagctgaagaagaaattattatatggaagttcgcgaga

SEQ ID NO: 153042 - DNA, 2083 bp, Zea Mays
acgccgaatgcaccctaagaaaacaccggagggcatgtgccttgtgtgcgcaccagatcagccgaatcgtttctgttgaagaagccatggaatcgcgccgcctcttcctcactcgccgcctctccatctcctccggcgcccagtccagcgccgctttcatcgccgacgaaatctatgccctcctcaccacacgatctttccgggcttccgttaaccgcacggaactgttcatacgctccaaatccgtcacagcctccggcgtcgccgagatgtaccgctcggtggccgttgcaggcccacctgggcagcccctttacctcggccgcgcggcctccgtgctggtcgaggcatccgcgcgcgcggccctccccgacggcgcgctgcggctgctggacctcctcatactcacgcccaaggcgccgctgccgtcgggcgcctcctgcggccacctcatggcgaagctcttctcactcgggcgccacgcggatgcgcgccgcgtgttcgagaccctcggcgatcgccagcgccgcgatgcggtcaccacggtttggagagtcgggagagcggctgacgccgtcaaggtgttcggcgaaacggcggccacgaccacggcgccaaaatattccagtgaccggtatgttaccatgaatatgatgactgactgcctgatgaagggagatctggaggctgcttggaagttgcggacccagatggtggaggcgggcatgaaactacagaagcaccaccagaaaatgctgcaaatgctggaaaaagtcctggtgtgcccagacaacaacaagcggaacgtgcttatcgaagtctgcgtcaaggcaggcggcatggacgaggccgtccattggctccggcagatgggctacgatggcatggaacctcccagtgctcactcctacaacttggtgatcgccgggctctggaaggccggcaggggtgacgacgctgtcaaggtgttcggcgagatggcagacatgctcgtggcgccgaatcatttcacatatactgtcatgatcaatggccacttgaagagactgagcagtgttctgtcctcgaggaagaacgagaatggagatctggaggctgcgctcgccctgctggatcagatggtgcgggatggcttcaagccacacgaatacacctgccatttgctgatggcagaacactgcttagctgaatggctgggagacgttacagctttacataagatcgctcatggcagcctgcttgagttcctatctagaaccaacgaagataagttactggccatcattgaggaatctgcgaagaacggtgctgctgcagcgggtaatgtttgtactacctttgtcgaggagctttgcaggattcagaaagtttcactcgcagagaaggtgctgcggacatttgcggaggcagggttggtcccgacgacagagatgtacaacattgtcattgacgggtattgcaagaccagggacctccaaggggcgttcttgttgtgtcgccagatggaatcacatgatcagcttgtacctgatgaagccacctacaagtctctgctgctggccgtgcgcaacgacacaacaagcatcatctactgggaggacgtggttgagttgtttgagaagaatggaattagtactgatgcgctgaactccggcagtcctgctgcatacggattcaagtataggtacagtctagtaactagaaagtttaaggaattggcgagcaagctattttagaatctgcagaatggatattttcattgctgatctacactcttagcttaaactattaaacatatgctcgatgatgcagcatgtattctttcttaagaacttgtggaaccttgtttgctcgatggctacattcagattgaggggcttgttctaacttctaaagcgcacattgattgacctatatatggttcccagctgcctcagtgccttgtcagtttggcacgtcatgtggttactagatttgttggatgcattattgggcttaacgaatttggggcatacaaggccttatcaaatccgaggaaaacgaataaccacgaaggtggttggtgctttaaccaagatgaaaa

SEQ ID NO: 153043 - DNA, 2397 bp, Zea Mays
gatccctctcactccctcgatcactctctcgttgcgggaatggagagtagcacggctgtcgcgtctgccgccctcctcctcgccctgctcggttcgctgctgcagcagaccccagcggcgctcgcctccgtctccgggaagccgcggtcttcgtacgtcgtgtacctcggcggccacccgccgcgcgccgacggcgtgtcgctggaggtcgcgtcccggcgggccaccgactcgcactacgacctcctcggcgccgtcctaggggaccgggagaaggctcgccaggccatcttctactcgtacaccaaacacatcaatggcttcgccgctaacctcgatcccggcgcggccgccgagatcgctaggtaccccggcgtggtgtcggtgttcccgaacaggggccgcaagctacacacgacgaggtcgtggcagttcatggggctcgagagggacggcgatgtcccgcagtggtcggcctgggagaaggccaggtacggcgaggacaccatcatcggcaacctcgactcaggcgtgtggccggagtccgagagcttcgacgacggcgaaatggggcctatcccagactactggaaagggatctgccagaacgaccacgacagggcgttccaatgcaaccggaagctcatcggcgcgcgctacttcaacaagggcttcggggatgaggtgcgcgtccctctcgacgccgcgttcaagacgccgcgcgacgagaacgggcacggcacgcacacgctgtcgacggcgggcggggcggccgtgcgcggcgcgagcgcgttcgggtacgccgcaggcacggcgcggggcgggtccccgcgcgcgcgcgttgccgcctaccgcgtctgcttccgccccgtcaacggcagcgagtgcttcgacagcgacatcctcgcggcgttcgacaccgccatcgacgacggcgtgcacgtcatctcggcctccgtcggcggcgacgccactgactacctcaacgacgccgtcgccgtcggctcgctgcacgccgtcaaggcgggggtcaccgtcgtctgctccgccagcaacgagggcccggacctgggcaccgtcaccaacgtcgcgccgtggatcctcaccgtcgccgccagctccgtcgacagggagttctcggccttcgccgtgttcaaccacaccagggtcgagggcgtgagcctctcggcgaggtggctgcacgggaaaggcttctacccgctcatcaccggcgaccaagccatacatcctggcagcaagcaggaagacgcccagttgtgcttggtggggtcgctggaccccgagaagaccaggggaaagatcgtggtgtgcctgagagggaacatcccaagggtggacaagggcgctgccgtccgccacgccggtggcgccgccatgatcctcgtcaacgacgaggccaacgggaacgtcctccaggccgacccgcacgtgatcccggccgtgcacatctcctacgccgacgggctcaggctctcggcgtacatcaagaacaccaaggttccgtccgggttcgtcgtcaaggggaggacgatcttgggcacgaggccggcgccggtcatggcggctttctcatctcaggggccgaacacgatcaaccctgaaatcctcaagccagacatcacggcgccgggggtgaacgtcatcgcggcgtggagtggcgcgacgtcgcccacggacaagtcgttcgacaagcggcgagtggcgttcaacatcctctccggcacgtccatgtcgtgcccgcacgtctccggcgtcgctggcctgatcaagaccctccacccggactggagccccgccgcgatcaagtcggcgatcatgacaagcgcgacggtgctggacgcggagatgaagccgatcctgaactcgtcctacgccccggcgacgccgttcagctacggcgccggccacgtgttcccgagccgcgcgctggacccagggctcgtgtacgacatgaccgtcgtggactacctcgacttcctctgcgcgctcgggtacaacgcgacggccatgaggacgatgaacaggggatcgttcgtgtgcccgaccacccccatgagcctccacgacctcaattacccatcaatcactgcgcacggtcttcccgccggcacgaccacgatggtccggcgcaggctcaagaacgtcgggctgccggggacgtacacggccgccgtcgtcgagcccgaggggatgcacgtgtcggtgataccggcgatgctggtgttcagggaaaccggtgaggagaaggagttcgacgtgattttcacggtcagcgaccgcgccccggccgcgagctacgtatttggcaccattgtctggtctgatgggagccatcaggtgaggagtccgctggtagtgaagacgacgcaggggtga

SEQ ID NO: 153044 - DNA, 936 bp, Zea Mays
atgcggatcccgccgcttctagcatccagccaagcccgcgagtcgcacgccgctcctgctcccgctccgagcgcctcaggccatgtcaggcggtgtcggtccgacggcgggggaggcatcacgctgccatccatgggcgtgccgccgctgcacccgacacccacctctcccacggcgcgcccgcaccaccactactacctcttatccatcaagcagctcaacacgctgggcgcggcggccgtgctcgccttctccaccacagtcccgctcttggagatcgccttcgcggtgctcctcccccctacctcctcgtcctcgcctggctcgccttcccgcagcgcccgggccgctcgagacccggatcccaccgctcccccgtcaagctccctctacgcgccgtcgatccgccacctcctcctcggccccccgccagcgcctgatatggaaggtcctagatctcctctccccattaccgcggaccatggatttctcgagtcagtgggaggtccgccatccatggaaggtgctgtccgaagtggggtgcacaaaagcttttggattgatattacagctgcttgtagtgggtttttagtcggcttaatcacagctactcgctttatcaaagacagaggtacatgcattctttttggtgatgctgctggtgctgtgttggtacaggctaatcagcgtattattgatgttgctgccagtagattagatatcccatcggacaaggttatttcaaatcttgctaattacggcaataccagtgcggcatccatcccattagcattggatgaggctgttcacagtggcaaggtgaagactggtgatattattgccgcatcaggttttggcgctagacttacctgtaccatgattttaattttgatgtcaaaactctgtagtttgtgtttgagtctgaacaaactgtag

SEQ ID NO: 153045 - DNA, 1321 bp, Zea Mays
gcttcgtctcccgagtcccgaccccggaactagccgtcgccgtcgctctcttctcagagccactcagcagtccagctccagcggccttcccaccaaaacctgcagcaccgcacgcacatgacatgcctagcctagctcctctgcctgcctatatattcgccttcctgcagcgatgcccccctcgtccaagcgcaagcgcaactcgctccccagcgctcctccttaattaatcccttgcatgccttccagccgcgctcgcgcctcatcagggacggcggcggcggccatggacccgtggatcgcgcagccttccctcagcctcgacctcaaggtcggcctccccacgccggccaaggtcgtcttggtcgaggagaccaacaatttcttggccgtcagcaggacgaaagaccgggaggtggaggcgctcgaggctgagctccggcgagtcggcgacgagaacaagcgcctcagcgagatgctgcgggccctgctggccaactacaccgagctgcagggccaggtcaacgacatggttgtggtggccgccgccgccaaccgccagtcctccacgtcggagggcggctccgcggcctcgccgtccaggaagcggatccggagcgacagcctcgacaccgccccgcaccaccaacaaaacacccgcaagccgtcgccgtcgccgccgttcgcggcccacgaccagatggagtgcacgtcggccgcagccaccgccgccgccgccttccaccacgagccgggcagccgcgtccgggaggagtgcaagtccaaggtgtcccggcgatacgtccacgccgacccctctgacctcagcctcgcggtgaaggacgggtaccaatggcggaagtacgggcagaaggtgaccaaggacaacccctgcccgcgcgcctacttccggtgctccttcgcgccgtcgtgcccggtgaagaagaaggtgcagcgcagcgccgacgacaggaccatcctggtggccacgtacgagggcgaccacaaccacgcccagcctccgcggcacaacggcggcggcagcaaggccgcgacgaggtcgacgccagcggcgaccgaggccgcgcgaccggcgccgccgccactgccgctgcagcaccagcaccagcaccagcagaaacaagaggccgcgacggggccgtcgtcggaggtcgcgaggaagaacctcgccgagcatatggcggtcaccctgacgcgggatcccgggttcaaggcggcgctagtcagcgcgctctccggccggatcctcgatctctccccgcccagggattaactaattaatacgtagacgagcatgatg

SEQ ID NO: 153046 - DNA, 2219 bp, Zea Mays
agagcgcacggcccagttgggcccaatactcgacacgactcattgaccggcccattacggctgaagggagtcgctcgccgccgcgttcgaggcgttccctcgtcgcgctcgcgccgtcgaccttcaccgctcgctgtcaggtctgcccgccacgacctcgccggccacactcgcagctcgccctcgctcctacgcctcgccggcgaggccttctgccttttcgcgccctctatctgctgcgatctttggagcatcgttctcttctctcacttgagatccagacccctaaaccctagagctcgccgcttccgctcgctcgctccgcgctggcggcgacaatggaggacgaggagatggagaagaaggtgcagcagtacttgcagcgcaagggtttccgcctcactgagcttgcgctccaggaggagcgcaaccgcctctccacctccgccatctccgacgttgcgcttgcacggtctgacaatgatccagcgagatactacgatggatatagcagattaagaacatgggcatacagttctcttgatcaatataagcacgaattacttcgcgtcctttatccagttttcatccatagcttcatggatctagtggcagaaggacatatgcaggaagctcggtcatttttccatacatttcgggaagatcatgaggtgatgcattcaagggatcttcagaagctggaaggcgtcctgtctccttcacacttggaggaaatggaattggcccggtcttttaggaaaaataaatttaaaattaaattatgtgagtattcgtatgaattgcttctccagtatctccagaaaacacaagcccttgtggtgcttggagtaatcaatgagcacataacttttgaagtatctcctggtcagccctcattaatctctgatgacgctgatgttgttgctctgattgggacaagtaaggacttggcaaaacagataaatcagaaggaagtacattgggggttgcttgaagattctgttgaagagcgaatggagaaggcactagcagaatctgataaaatagaagctgaaagcaaggatgctgatgcagaagataacaagaaaagaaatgcagaaggtggaaagcaaggtgcttctcttaagaaagccaaaaaggacaagcttgttggtgcgactggaaaaagcgtcagaactgaaacaagcatggtttctgtggcacctcgagtgaaaccggagctaactcttccagcaacgcctgttgaagttgaacaatcaattcttgaggacctacgaaaccgtgcacaactgaatagtgtggcattgccatctgttagcttctacacattccttaatacacataatggattaaactgttcctcaatatcacatgatggatcactggttgttggtgggttttctgattcgtcagtgaaggtctgggatatgtcaaagatgggccagccagcaaaaatatcaagatcacagggtgagaatgggccttcccagggtgagcgcatatcaacattagatgaggggaaacgaacctatacactatttcaaggccattctggaccagtttattctgcggcctttagcccgtttggggatttcctcttgtcatcatcttcagactcgacaattagactatggagcaccaagctgaatgctaatcttgtctgttacaaaggacacaactacccggtttgggatgtccaattcagtccagttggccattactttgctagtgcttcgcacgacaggactgctagaatttggtcaatggataaaatccagcctttgcgaataatggctgggcatctttctgatgttgattgtgtccagtggcatgtaaactgtaactacattgccactggctctagcgacaaaactgtaaggctatgggatgttcagacgggtgaatgcatacggatgtttattggtcataggagtatggttttatcactggcaatgtcacctgatggacgatacatggcctccggagatgaagatggaacaatcatgatatgggatctctcgactggccgttgtgtttcaccactactaggacacagctcttgtgtgtggacacttgctttcagatttgaagatcatgtaatttgatctcatgaaatgatgtcttaaaactggtggtatcacagattctgatgtgtactagaatacatgagtctgagcattaggtaaaagggcaacgttgctatgtccttgcgtgcttta

SEQ ID NO: 153047 - DNA, 516 bp, Zea Mays
atggacttccaatttccaaacgtcgacgcagccacaggagtgttgtgttacacggggcatggagaagctgggttttggctgggaaacccgcgggtttcgagagtcccaaacgagttcgtaatctgtgaaggagcattgcttgcatcgggatcggctgactgtactgtaaagctctgggatgtcgcttctagcacaaaaaccctgaagacagaggataccaaaggcagctcagctaaccgactgagactgcttaaagctctccctacaaaatcaactcctgtttatagcctgcggaaaactagaactggtcctgttttgacattgagtagtgaagctggcatttcagagactgcctattgtacagctaatattttcattagcaattccaacgaactcagcatgtactgccgaattgagcaccgcagattcgttgtagcgggttgtgatattgtaacaatattattaggttgtgaccttatgaacgcaactaaatgtacaagtgctgacaggcgatag

SEQ ID NO: 153048 - DNA, 1109 bp, Zea Mays
cggaagcaaagcacaccagctcatttgcttcgcccgttcgccgtgcgtgcgtcgtcaaccaaagactcgtttccttctttgtgctcctgttcgttccttccttccctggaacccttcccccgtaagctcgccgctgcgctgcgttcggatggcagttggaggcggcgtgtgtgtggcgtcgccctcgccgtcgtcggtcgaggcgtggtcgtggaggacgagcggggcgcggcgccgcgcggccgttaggtgcagcgtcgttggcgaggccgggccgggcgccgccggcgggcgggtggaggacccctaccggacgctgcgtctgcgccggggggccacccgcggcgaggtcaagaaggccttccgccgcctcgcgctcatggtgcgtccgcgagcgcaacccctccctcacccagctaattctaacgggtgtcgtcgattcctctgacgggttgctttgcgtcgtgctcgtgcagtaccatccggacgttcgcaaggagagggagagggagatggaatgcgacggcgacagcggcgtccagttccagaggattaacgtggcgtatcaggtgggcttacgtatccatcatctttcctccgctgctaaatgctaattcgagccgccttccttccattccatttcttcttttcgtttaccgtgttacttccactggatgcagaggctgatgagcagcatgagggaggccgacgagcggctggagtactggcgcctcaagtacggcctcgccgacgaggatctggacaggtacaggcgccgcctcaacgaggaagacgccgacgactggttcgacatgtgaagaggaagcgaaggaactgaaagcagccggtcgatggataagggtctattattacatggccctgtttatccgcatggacccgattaattccggttgccatggcagcggcacccactctagtttttggctgcatgtgtatatactctgaatacttctcccctgttttatagtgggtgaagggataccgttaggctaaatggtacgtttggttcagtcgtgagttgtcaattgtgagttatctctgtaaaaataactgttgtgataaaaaaactaaaaattgtttgattcgaa

SEQ ID NO: 153049 - DNA, 1047 bp, Zea Mays
agcacaccagctcatttgcttcgcccgttcgccgtgcgtgcgtcgtcaaccaaagactcgtttccttctttgtgctcctgttcgttccttccttccctggaacccttcccccgtaagctcgccgctgcgctgcgttcggatggcagttggaggcggcgtgtgtgtggcgtcgccctcgccgtcgtcggtcgaggcgtggtcgtggaggacgagcggggcgcggcgccgcgcggccgttaggtgcagcgtcgttggcgaggccgggccgggcgccgccggcgggcgggtggaggacccctaccggacgctgcgtctgcgccggggggccacccgcggcgaggtcaagaaggccttccgccgcctcgcgctcatggtgcgtccgcgagcgcaacccctccctcacccagctaattctaacgggtgtcgtcgattcctctgacgggttgctttgcgtcgtgctcgtgcagtaccatccggacgttcgcaaggagagggagagggagatggaatgcgacggcgacagcggcgtccagttccagaggattaacgtggcgtatcagaggctgatgagcagcatgagggaggccgacgagcggctggagtactggcgcctcaagtacggcctcgccgacgaggatctggacaggtacaggcgccgcctcaacgaggaagacgccgacgactggttcgacatgtgaagaggaagcgaaggaactgaaagcagccggtcgatggataagggtctattattacatggccctgtttatccgcatggacccgattaattccggttgccatggcagcggcacccactctagtttttggctgcatgtgtatatactctgaatacttctcccctgttttatagtgggtgaagggataccgttaggctaaatggtacgtttggttcagtcgtgagttgtcaattgtgagttatctctgtaaaaataactgttgtgataaaaaaactaaaaattgtttgattcgaacggatgtcagttgtacaccataaataaattgtatattatttataagtactttgtttaa

SEQ ID NO: 153050 - DNA, 814 bp, Zea Mays
atggcagttggaggcggcgtgtgtgtggcgtcgccctcgccgtcgtcggtcgaggcgtggtcgtggaggacgagcggggcgcggcgccgcgcggccgttaggtgcagcgtcgttggcgaggccgggccgggcgccgccggcgggcgggtggaggacccctaccggacgctgcgtctgcgccggggggccacccgcggcgaggtcaagaaggccttccgccgcctcgcgctcatgtaccatccggacgttcgcaaggagagggagagggagatggaatgcgacggcgacagcggcgtccagttccagaggattaacgtggcgtatcagaggctgatgagcagcatgagggaggccgacgagcggctggagtactggcgcctcaagtacggcctcgccgacgaggatctggacaggtacaggcgccgcctcaacgaggaagacgccgacgactggttcgacatgtgaagaggaagcgaaggaactgaaagcagccggtcgatggataagggtctattattacatggccctgtttatccgcatggacccgattaattccggttgccatggcagcggcacccactctagtttttggctgcatgtgtatatactctgaatacttctcccctgttttatagtgggtgaagggataccgttaggctaaatggtacgtttggttcagtcgtgagttgtcaattgtgagttatctctgtaaaaataactgttgtgataaaaaaactaaaaattgtttgattcgaacggatgtcagttgtacaccataaataaattgtatattatttataagtactttgtttaa

SEQ ID NO: 153051 - DNA, 1672 bp, Zea Mays
acacgtttcaccatcaataggacaaaagcagcaccagccaccaggcagactccctcgactccgactctacgcgacacacgagcgcaggggctcaaacgcgaaaaaaaagaggccccaacgcccactccaccggccaatcacccgccggcgcgccatggcggccgccgccggggactccgtcaagcagccgctcctccaccgcgcgtacccgtcccacgccgcgtcggcctcctcgccggccctcccgtccgttcccccggggggcgggggccgccgcttcccagggggcctcgacgtgcccaacctgaagaagcgcggcggcggcacgcgcagctggatccgcgtcgaggccgccacggcctccgtgcagacgctggagatcgacaaggccaccatgatgcggcgctgcgagctccccgcgcgcgacctccgcctgctcgacccgctcttcgtgtacccgtccacggtcctgggccgcgagcgcgcaatcgtcgtcaacctcgagcagatcaggtgcgtcatcaccgccgacgaggtgctcctgctcaactccctcgacagctacgtcctccagtatgccgccgagctccagcgccgcctgctccagcgcgcggagggcgacgagctacccttcgaattccgagcgctcgagctcgccctcgaggccgcatgctccttcctcgatgcacaggctgcggaattggagattgaagcatatccattactggatgaactgacatccaaaatcagtactctcaatttggaacgtgcccggcgattaaaaagtagactagttgcattgaccagaagagttcaaaaagtcagagatgaaatagaacaactaatggatgatgatggtgatatggctgagatgtatctcaccgaaaaaaagatgaggatggaatcatctgtctttggtgaccagtctttgttgggctacaattcagcaggcgctgttggggcttcagtttcagctcctgtatctccagtctcatcgcctacagaatcacgaaaactggagaaatctttcagtttgtgtagaagtaggcatgacagtacgaagggctcagataacacaatgacagagcatatccaggagctggagatgttactggaagcttattttgttgttatcgacagcactctgaacaagctgacatcgcttaaagagtacatcgatgacactgaagacttcatcaacattcagctggacaatgtgcggaaccagctgatccagtttgaattgctgctaacgaccgcaacatttgttgtggccattttcggagtggttgctgggatattcgggatgaactttgagacatcagttttcgaaatagagaatgcattccagtgggtccttgtaattacttcagtgaccggcgttttcatcttctgctcctttctttggttcttcaagtacaagagattgatgcctttgtagagaatgtatatgccctcctcccataggaccgatgaatcaatttcaaccctgttaagaggcacttgatcagaagcctgaacctctgccgatgtaaattaccattcttttagaggtttacggcatgagtaccgagaatccgggtgaaaattgtaaccttcttgacatgatccctgtgctgtataagagaaaatcatattacagtttatacaaataataccgaccaattctaca

SEQ ID NO: 153052 - DNA, 477 bp, Zea Mays
atgcagcctatgacgtatttcgacaagcttattaccatattgtggttggacttaaagatggtgaatatctatatgttggttgcaattctacaacatatgtatattcttatcaaggagaatggactgcaagctggcattgatttttcgactggatgctccttgaattggtatgcattcttttataatgtttctgttgatatgggttgcagctcactggactccaaatgcggcgacaaacatgtgctacaatatgatgatgtgatgaagcttgattttggaacacatatagatggttacattgttgattgtgcatttactgttgcattcaatcctaagtttgatccattgcttcaagcaacgagagatgccacaaataccggaatcaagggcaaacggaaccattgttacaagtgcaagccattccgcaacattccgagcatatcagttttagtggaccattcaacatcagggaactaa

SEQ ID NO: 153053 - DNA, 1852 bp, Zea Mays
tctctctctctctctctctctctctctctctctctctctctgcgtcactgggagtgggaggttactattttgccccgtccccacaatacccctctcctcactcccgctctcgtctctccccgccagcctactagctacctgtataaatttgccgcacgccctcctcgtcgtagaggagcagcagcacagcaagctaagctctccttgagctaagctaagctagttgcgacagcgacgaacaagctaataggctagacactgtcgtctgaggtcggcgtcatggatggagagaggaaggtgtcgtttagggtgagggagttcaacatggagagcgacctggcggcggtcgatgagctcgagcgccggtgccaggtcggcctgtccggcgacgacaccacagccgccgacgacgacagtagcggcagcaagctgcggaagacgatgaagaaaaagaagaagaagaagaagggcatgtcgctctccgtcgagcaggtcggcgacccgctggcgagggtccgccacgcgccggagcacgtcatgctggttgccgagtacggcgaggaggcggagatggtcgggctcatcaaggcctgcgttagggtggtgggcagaggcggcggcaagaaacagaaacgttcttcctccccgaacccgaagcaggagcaggagcagcagccgtcgccgccggcgtacgtaaaggtggcctgcctcctcggcctcagggtctctccgtctcacaggcggctggggatcgcgacggcgctggtggagcgcgcggaggagtggtgccgtgagcgcggcgcggcgcacgcgacgatggcgacgacgacgtccaacgcggcgtcgctggcgctgttcacgggccggttcgggtacgcgccgttccggcggccggagttcctgggccggccggtgcacgcgcattgcctgcccataccgagcgcgcaccgcgtgttccagctgccgccgccgctggcggccgccgcgtacgcgcgcctgtccccgccgcaggctacggagttcctccccgcggacatgccggcgctgctcgcccacaagctcacgctgggcacgttcgcggccatcgagagcgggccggacccgtccgccccgccgtccttcgccgtgctcagcgtctgggactccacccgctccatgcgcctccgcgtgcgcggcgcgcccgcgctgctccgcgcgtcgctcgccgcgctccgggcgctcgaccgcggcgcgccgtggatgcgcgtcccctccatcccggacatcttccgccccttcggcgcctacctcctctacggcctccgcatgtccggccccgcgggccccgccctgctccgctccctctgccaccacgcccacaacgtggcccgcaagaacccggcctgcgccgtcgtcgccgccgacgtcgcgcccgacgacccagccgccgccgccgtcccgaggtggcgccgcttctcctgcgacgaggacgtctggtgcatcaagaacctcaccaagacgaatgccgacgacggggacggctgggcggcgccggcgccgtccgggacggtcctgttcgtcgatccccgcgagttttgacgtagccatggccaccgatcgagccatgcatggcaggtgtaggcagagggctaaccacctcgcctctgccaagttttgacaactacacacgtgtacataccacttggtaccgcaatggcaatgacctgccttgccatttgcggtatcaaaccacccaagctgaagtgatggtgtctgtaacggtagcatttgcttctgggttttagaatagcgacgaggtctggctagtttctttctaatcaatgttcaaggaagaagaaccgcttaacgcgtt

SEQ ID NO: 153054 - DNA, 860 bp, Zea Mays
gtaaccacgacggcaggccgttcaccttttattatcagcttcatcctctagaggccgccaaggcacagccgcgttcaggtgtcccgcccgcgtcggaagaaagagagcttgctcccgtcgggcagtcgcggctcgcgagtcggaggagatggaggatgacggcggcgggaggaagcaggacacgacggcggcggcggcgtccaaagcgcagcgagaggccgcggcggccggcgtctccgtgcacgagtggctgcagcacgtgaaggcctccttcctcggcctggtgggcaagttgacggcgaggagcgagcaggaggcggcggaggcggacatgcgcgcggccaaggcgcaggtggaggcgaccgacgaggcggaggccaagaagaagcggctcgcagatggatgatgacccatccatggccgatactgtagattcagctggaaactactgcgtgttgtacatacaacctacctgggggtagctcaaccctagagctaggcctagagctaggcctgggcaatcggtttttttggttcggttttttcagtgttgtatacggtttttcggttcggagttcggtttaaactgaacatccgaaatctatctcagtcaagtagtcaacagagctacatgtatggctgttcggtttattgccacagcccacagcttatagtcgaagccataatgtctaactgaacaaatatattattcagaaagtgtgctaagcaaagtactcgagcattacaatcgaaagaaacatttgagatgtacaaacaaatcaaattattagtctgttgattagtgcttgtcaacaatagaaacaacaaaccggatacagctggaacaactagatcagttg

SEQ ID NO: 153055 - DNA, 96 bp, Zea Mays
agtgtaacatcatttccacccaaatgtataattagatgttgtcagatcaccaaaaatcacaaccggaagaaaacagcacgtttggttaaagacaac

SEQ ID NO: 153056 - DNA, 217 bp, Zea Mays
acatgtatgtgttcttattgtttatgtatttacttgttcttattatttacaattgttgcttcaggaatttgcaacgtgcttccccttctgcccacgtgctcgctccactgaatacgctgcgtatcaggtatgtcgcaggttctgtgtgctccattttatttcatgtactttggttaattgttatggtttacttgttacgtttgcacttgcttcatac

SEQ ID NO: 153057 - DNA, 1067 bp, Zea Mays
gtaaacgcacccatcggcatcttcccatggcagccagcgtcggattccgcatcattccctcgcccagttgtcccccccgtacaaattaacacctaagctaaccttccgggctagcttgtgtgtgtggcctcggaggtccgggatgagctccggcggctgctcgacgtgcctcgaggtcatcttcgccgccatcctcccgccgctcggcgtcttcttccgctacggctgctgcagctccgagttcttcgtctccctcctcctgacgctgctgtgctacgtccccggcgtcgcgtactccctctacgtcatcctccggacgccgcccgagccgccgggcatcgacggggagcggccctacgacatgctcgcctgacggctttgcttgtacttgtacagctccacccaacaacaacaacgcgtaggcctgtgcaatgcaacacacactcgctgtatgtagtagctgtaggtagcaggtagcggctcaggacattcctgactgtgttctccagcgtcacgtacgtccctgttcctcgtcgcgtgtgatgactgtgcaattgttggtcattggtttgctgattctttcgatcagtttatcacgaacagtagggtgctgccgtgctggactgctgctcgtctgtttgccgatcacgcagcagttggtggtaattggcaactgatataaaatttatgcgtgtactcatgtataaatcccaaccagtaatgcggttggaattaaaagaaaggtattgtttggatatggtttacggctacgctattcccactaaggtcttgttcggttaatcccattacccatggattgtacgggattggaaaaatttaagaagaagtttgacttgcttgggattcaaacccatccaatcccactcaatccacatggattgggagctaaccgaacaagccctaataatgatatttgtagacaccgttaggtcttcccattcgcattcgcatgtggatcggataggacctggggtgtgggggtggggcataattagggacacccgaattactccttaacaaacgcatttagagaaataagaattaaa

SEQ ID NO: 153058 - DNA, 3794 bp, Zea Mays
acggatacctagctagtgatattgatgaaccctgtggcctgacccagtgccagctcgttgacatgaaggcttaccgtccgatacgagcactccaaggcgatccaacggccgcgatctggaggaacggtctcctaacctccgatatttcctttctcccttatcgccttcgcctccgcggctccgcctcgctctccaaggttctgccgaggtttctcgcctccccgctcccccctctccgagtctccgtccttgccactcctctctcccctcttccacctcaatccaatccgaccctcaccattgtagccggaactcgcagcgggacactaggcgcgcatgccgctcctcctctaccccttctccgcgtgcgtgccgccgccgcgggcgctgctccgccgcctgtcgccgccgccgcccatggcggtcgtcgctccgctgccttccgccgtccgtataatcccctcggtgggaacgctcgaccttccggcgctcccgcccccgcccacggacgacttccactggctcgacctattcgcgttcctcaactcccctgccgacacctaccaccagatccccgcgcagggcgaagaggagctggaggcggggctggaactggaactggagctggagctggagaagcacgccgaggtggagaggcagcgggggcgggcgcgaagagcgcaactccggcggctgcggcagcggcaggtcaaggcggagacggaggcctgggcgcgggccgccgaggagtaccgcgagatcgagcgggagatgctcgaccgcaggctcgcgcccgcgctgccctacgtaaaggcgctcttcgtcggctggttcgagccgctgcgggacgccatcgccagggaccaggacgtgcagcgaaggaagcgggtcaagcacgtctacgctaagtacctgcttctgctcccagccgacaaggtggccgtaatcgtcatgcacaagatgatgggcctgctcatgtccagcaaggacggcactggcagtgtccgcgttgtccaggccgcgcactgcattggtgaggctgttgagcgcgagttcaaagtccagtcattctttcagaaaagtaggaagaagaaaatccaaggtgaaaatgatccagcattggagaaggagcaagctaaatgccgtaagcgtgttaagagtttagttaagaggcggaagatgagtgaagcacagaggctagttcaacaggagttggaattggaggaatggggcacagaagcccaagtgaagttgggaagtcgcctgattgaattattactagattcagcatttgtgcagccaccagctgatcaaacaccagatagttctccagatattcgacctgcatttaagcatgtgctacgtcagcctataatagaaaatgggaggctaaagaagaagcattgggtgatagagtgtgaccatcttgtgcatgaggggtttgaaagcactgctcggcatgttgatataccctacctccctatgctggtacctccgaagaaatggaaaggttatgataaaggtggtcacctttttctgccctcatacattatgaggacacatggtgtgaaggaccaaaaggatgcaattaatagtgttcctagaaaacagctgcgaaaagtatttgaggcattagatatccttgggagtactaaatggagggtgaatagaagagttcatgatgttgttgagactatctggagtcaaggtggaggcattgcagggctggtggacaaggcaaatattcctttgcctgaacgaccagaatcagaggatcctgatgaaatgcagaaatggaagtggagtttaaagaaggcaaagaaaactaaccgtgaactgcatgctgagagatgtgacactgagctcaaactctcggttgctcgtaaaatgagagaggaggatggattttattaccctcacaatttagatttccgtgggcgtgcataccctatgcatcctcatttgagtcacctaggttcagatctttgtcggggtgttctagagtatgctgaagggcggccactaggaaagtcagggttgtgctggttgaagatacacttggctaacaaatatggtggtggcattgaaaagctttctcacgagggcaagctagcttttgtggagaaccaactgtttgatatatttgattcagcagcaaatcctgttgatgggaactgctggtggacgaatgctgaggatccctttcagtgtttagctgcatgcatggacctttctgatgccttaagaagtccatcaccttaccatgctgtctctcacctgcctattcatcaggatggttcatgcaatggtttacaacattatgccgctcttggaagggactatatgggcgcggttgctgtcaaccttgttcccggagagaaacctgcagatatctactcagaaatagcttctagggtactgaatgttgtatgtgaagactcgatgaaggatcctgctactaacccaactgcttcattagcaagagttttagttgatcaggtggataggaagcttgtcaagcagacagtcatgacatcagtctatggtgttacatacattggtgctcgtcagcagattacaaagagactgcaagagaaagggcttatcacagatgataaattgctgtatgatgtatcctgttacgctactcgggtaactttggatgcactgggacaaatgttccaatctgcccgtggtataatggcctggcttggtgactgtgcgaagatgattgcttcaaaaaatcaaccagtcaagtggacaagtcctgttggtctcccagttgttcagccctacaagaaatataagaattatatgatacgaacttctttgcaatgtctggctttacggcgggagggtgatgcaattgcaatccaaaggcaaaaggcagcttttccaccaaattttgtgcactcactggatagttcacatatgatgatgacagcgattgcttgcaaggagtctggccttcattttgcaggagttcatgactcattttgggtgcatgcgtgtgatgttgatcaaatgaaccagatattgagacaacaatttgtggagctttacagcatgccgattcttgaaaatctgctggaggagttccaaacgtcattccccacactagaatttccaccctgcccaccgcaaggtaactttgacgtgagggaagttctgacttcaacatacttcttcaactaagcttaacaggggaagttctgcacatgaaacatggtgagaagttgtgtccttggatgtttggagtaaccagatcgtgaaatcattctatgcttgagccatatataggagttgatactgaactaattctcgcatggcttttagcataagcaagaaacaggagtcaatcaattatctgcactccagaccaagccaagtggttccaaggaatttgaaatgaacaaacctaaagtagttcctgctgagtttttaggttgatgcagaatctgcttggatgttcaggtcactcattggttgccatgacaactcatggtatactccaccctggagtgcaaaggtaaattatgagatgccagagcagaatactgactgacagttgatcgtgctgacctcattgatcatagacgacagcggaacacaaagttcgctgaatatacgtgtacgttgtaccatcaatttttttgctgtcttaggacttgtagatcgcataatgccgtggcatcaccctgtaataaatgtgtaagatatgatagccaaatagatgtatacgagactagttgctgttgacagcaagttttgaaaagagagacatgaatcaggca

SEQ ID NO: 153059 - DNA, 1578 bp, Zea Mays
caaaccccagcgcggcctccgccaccgcgttccgggacgagtcaccgctccgtcggcacggcagcttgctccagcccacgccacgcgctacgtcgtcgcggtcgatcctcccgtgaggcagccgtgtcgctaggcaccgcctatttctcgaacaaagtcgctcgctaccatggcggcagcatccgccgccgaagctaacagcgtgagcaatgacgaattcctcgtacgcgacgacgtgccggggctgctcgccgctctcaaggagatgaaggacggactggacctcgtcaggggcaaggtcgaggccatcacccggaaggtcaaggcgaaccagttgccggcgggcaacgggatcgggtacctagaagcgaagaaccacatgcttcttggctactgccaggacatcgtctactacctgctccgcaagaccaaggggctctcggtggatggccaccccgttgtacggagccttgtcgagattaggctgtttctggagaagattcgtccgattgacaagaaggcagagtaccaaatccagaagctcaccaatgccgctgacaatgcaactgctcgagagaaggcaggaaatgcagaggtgaaggggaaggacgggcattcggatgaggaagacctcctgatgtataggccaaacccagagatgatggacacaaagcctggtcctgatgggcaggacactgatggtgtttaccgtcctccaaaatttatgcctactagcatggatgatgaagagaaacgtcataaaaaagattcaaggagagataaagcgatagcccgagtggcaacagaaaatccttatattaaagagataattgatgatgctgcagatagacctgaagagtggaaggaaacagtgggcgatgaaagcagggaatttgggaggtacatgagacagagagaggagcaagagaagcaggaagaggagttgttcactcgggctcctgttactaaacgtgataagcagatggagaagcgcataaggagacaacttcatgggctaggaggcttaactgacggtttcgacccttgggatgaacatgctgttgggaggagacaaggaagatgatggcggttcaagcaaaccgcacggcaagagcggaaaccgaaagaagcatctgaagagcagcaagaagaggaagaggcattagcctggacccacagtcccacactgctgtaagcctgtaacacttcaacatactgataaagcctagaagacggttcaagcaagccacacagaagctgaagaaaataccaagaaaccaagtagagaagaggctttggttcctcaaaagtgtaggaaaatatgatctgagcgactgatcctgagccattggaacagtataaattagggcttgttcgttttgctctcaatccatatggattgaccgtgattgagtggatttcaaacccgaataagtcaaaatccttcataatttttccaataccatccaatccacatgtatttgaaataatcgaacaagaccttatatggcttgaacgtggtagggtagcaaattttgttcattgtagagtatcccagatgtgataattgtttccccg

SEQ ID NO: 153060 - DNA, 1409 bp, Zea Mays
atggcggcagcatccgccgccgaagctaacagcgtgagcaatgacgaattcctcgtacgcgacgacgtgccggggctgctcgccgctctcaaggagatgaaggacggactggacctcgtcaggggcaaggtcgaggccatcacccggaaggtcaaggcgaaccagttgccggcgggcaacgggatcgggtacctagaagcgaagaaccacatgcttcttggctactgccaggacatcgtctactacctgctccgcaagaccaaggggctctcggtggatggccaccccgttgtacggagccttgtcgagattaggctgtttctggagaagattcgtccgattgacaagaaggcagagtaccaaatccagaagctcaccaatgccgctgacaatgcaactgctcgagagaaggcaggaaatgcagaggtgaaggggaaggacgggcattcggatgaggaagacctcctgatgtataggccaaacccagagatgatggacacaaagcctggtcctgatgggcaggacactgatggtgtttaccgtcctccaaaatttatgcctactagcatggatgatgaagagaaacgtcataaaaaagattcaaggagagataaagcgatagcccgagtggcaacagaaaatccttatattaaagagataattgatgatgctgcagatagacctgaagagtggaaggaaacagtgggcgatgaaagcagggaatttgggaggtacatgagacagagagaggagcaagagaagcaggaagaggagttgttcactcgggctcctgttactaaacgtgataagcagatggagaagcgcataaggagacaacttcatgggctaggaggcttaactgacggtttcgacccttgggatgaacatgctgttgggaggagacaaggaagatgatggcggttcaagcaaaccgcacggcaagagcggaaaccgaaagaagcatctgaagagcagcaagaagaggaagaggcattagcctggacccacagtcccacactgctgtaagcctgtaacacttcaacatactgataaagcctagaagacggttcaagcaagccacacagaagctgaagaaaataccaagaaaccaagtagagaagaggctttggttcctcaaaagtgtaggaaaatatgatctgagcgactgatcctgagccattggaacagtataaattagggcttgttcgttttgctctcaatccatatggattgaccgtgattgagtggatttcaaacccgaataagtcaaaatccttcataatttttccaataccatccaatccacatgtatttgaaataatcgaacaagaccttatatggcttgaacgtggtagggtagcaaattttgttcattgtagagtatcccagatgtgataattgtttccccg

SEQ ID NO: 153061 - DNA, 3203 bp, Zea Mays
cccacgaaccgcgccaccttttctgacgccgcatcatcggcgacttcatcgccgtcgacaagacgcatcaaggcagtgcctgctactcccgcctccgcattcttgccccacggagcgtgctcctgctctcggccgccgtcctggtgctgaacagctgacacagccggagagatccgcccggcctcggatccgtttcttctcctgctggtgccttggtgatgctgatgcggactcgggactcctacggagagctgaggtgaccttgttgagtgtgcccttacccagcgccgcctgcctccgagccgagatctcctccgcgcaccccggcattctctctctctgtctctggtgccgacgaccgcgcggccgaccccgccctacgccaggtgctcaggtctccatcttcgggaccttcgccggcgacgagcacccgcccaggtcaacatcatgatggctactttggggaggaagaagcggcaagccgcaacaaccttcatcgtgctttgcatcttgtcatccttctacatctgcaaagcgcagttcacgcctgcggacagctaccttgttgactgtgggtcctccaagagcacaatggttggccagaggaccttcacagcggatggcgcatctccggtgaaggtgtccacctcccaggatatacttgcgggcacctcagcaaacggggtggcctcttttgataactcggcgctgtaccagactgcccggatcttcaccgggccatcatcctacactttccctatccagaagcagggccggcatttcgtccggttttacttcttccccttcacctaccagagctatgatctttcacttgccaaatttactgtgtccacccaagatgttctcctgcttagtgacttccagcaaccagacaagaccgcacccttgttcaaggaatactcactgaatatcacccgcgacacgctcgtgatttccttcaagccgtcaaatggaattgcatttgtcaacgcaattgaggtggtctctgtcccagatgatctcatcaccgatgatgcacaaatggtcaaccctgtccagcagtacagtggtttgtctacacagccactggagacagtatatcgggttaacatgggtggtccgaaggtcactcctgacaatgataccctctcgaggacctgggtgactgatctaaagtacttgttgaacccatctgtgaccaaacaggttaattatggcaagcgtgtcaactataagaagggtggaggtggagctactcagctgtcagcccctgatattgtctatggcacagctacagagttggcagcgacaaatacatccaatgctcttttcaacatgacatggcagtttgatgtggatgctggcttcagctatttggtaaggtttcacttctgtgatattgtcagcaaggcacttaaccagctctacttcaatgcatatgttggaggcttttatgcacagaataatcttgatctgtcagcaatgtctgatagtcagttagctacacctatatatatagatgtggttctttcatctaatgatgcatccagcaaacttagcatcagcattggcccatcggtcttgaacaatgtattgcccgacgggattctgaatgggcttgaggttatgaagataagtaccggaggttctgctttcactgtcgggtctggcagtggaaacaaaaaatggggtgtgattcttggcgcagccctcggaggtgttggactgtttataattgttgttgttcttgtacttctttgccggaggaaaaagaccctggaaaagcagcattcaaagacctggatgcctttctctatcaatgggctcacctctctcagcacaggaagcagaacgtcttatggtactactctcacatcagggctgaatggaagctatggataccgttttgccttcagtgtgctccaagaagcaacaaacaatttcgacgagaactgggtcattggagttggaggctttggaaaggtctacaagggggtgatgagggatgagagcaaggttgcagtgaagcgtggaaacccaaagtctcagcaaggtctcaacgagttccgtacagagattgagctcctctcacgtctgcgccaccgccatttggtgtctctgattgggtactgtgatgaaaggaacgaaatgatcctggtctacgagtacatggagaaaggcactctcaagagccatctctatggctccgataacccctcgctcaattggaagcagaggctggaggtttgcatcggagcagcaagggggttgcactaccttcacactggatctgcgaaggccatcatccatcgtgatgtcaagtccgcaaacatcttgctcgacgagaacctcctcgccaaggtcgctgactttgggctatccaagactgggcctgagctcgaccaaactcatgtcagcactgcagtgaagggcagcttcgggtacctcgatcctgaatatttccggaggcagcagctgaccgagaagtcggatgtctactctttcggtgttgttttgcttgaggttctttgtgcaaggccagtgatcgaccccacgctgccgagggagatggtgaacctggccgagtgggggatgaagtggcagaagagaggagagctgcaccagatcatcgatcagaggatctcgggcacaatcaggccggactctctgaggaagtttggcgagaccgtggagaagtgcctggcagactacggcgtggagcggccgtcgatgggagacgtcctctggaacctggagtacgttctgcagcttcaggacgccgattcgacggtctcggatgtgaacagcatgaaccgtatcgtggaactcccgtcacaggtccagaacgtcggggccctcgagagcatcagcgtgacgatggcagaagccggagcgtcaaacgagcctgaccacgacctctccgatgtgtccatgagccgcgtcttctctcagctgatcaaggccgaggggaggtaaatgtgcgtgacgcagcctgtagggtgtgggtggtggggaggaagccttcaaagtcatctcttgctgaagtttacgtgagagagatcatgtgtgattttttttcttcttttcgtctacaaatgtactactgaagtgaactatggtttcgagttacagttttagccattgtgagcctgtgcggctacaaatttcgtagatagcacatttcgagtttgaatttgttactg

SEQ ID NO: 153062 - DNA, 412 bp, Zea Mays
tgccgtggccgtggtccgtgagcaatcaaatccaaatctgtctccctttcgatttgtttgctgcggagtgcggagtgcggagggtgacgcgctgctagctcttaatctctctgcttgtttctccttcagatgctgatgcggactcgggactcctacggagagctgaggtgaccttgttgagtgtgcccttacccagcgccgcctgcctccgagccgagatctcctccgcgcaccccggcattctctctctctgtctctggtgccgacgaccgcgcggccgaccccgccctacgccaggtgctcaggtctccatcttcgggaccttcgccggcgacgagcacccgcccaggtagcccaccccttctcttccgttcctgtcttgcgaaaccgagctcccgaacccaaactcttt

SEQ ID NO: 153063 - DNA, 423 bp, Zea Mays
atggagagaggaatgtcgcgcttgacaggaaacatgtttctctcccaaggacaacaaccgttcactccactccaattcctgcaaaggaaggtccagcagcaacctcccaggttgctcaaaggattccagcagctagaccaggagagtggtaggccggggactagatggtacagggctcctgagctgtgtggatctttctttagtaagtattcaccggctatcgatatgtggagcatcagttgcactttcgcggagattttgactgggaagcctttattccctggtaaaaatgtggttcaccagttggatttgatgactgatctcctgggtacaccatcagcagatactatttcacagatgcaacactacaggacaaaattggatggctctttgcacctttggtgctacttcagtttattctaa

SEQ ID NO: 153064 - DNA, 840 bp, Zea Mays
atgccacgaacaaatatttcgattgaggtaaataaatcgacatcgcgtacaaagaatgaacgaatcgatagcacccccttcacctacatacactgcactgctttgcacagtcacggatcacgagagcaccgatgccccgccggcggcgacggccatcgcctctcgccagtcgatgaggatggcggtggcggcgtagtgcgtgagcgcgccgacgagcacgagcaagtggaagatctggtggctgtggccgacgcagtcgaacctgccggggctccagcgctccggcacgcgggtgacgtagaacccggcgccggcggcgtacacgaggcccatgaggagctcgagcgccagcgcgaggtggcactcgcggtgtgcccagttgagccacagcgcgtgcagcgccggcagcaccccggagaaggccatggacacgaagaggccggcgcggaggtggcgcaggcgcggcgacgagcgcgcgggcgccaggagcagcgccaccaccagcaggcccagcagggtgacggcggacaggtagacgagctgcgtgcgggcgcggccgaggaaggcgtagtagacgggagggaagaaggaggcgacgatcatcaccgcgatccccgcgtagtcgagctgccagaagaggcgcgtgaagcggcgcgagtggcacgccagcaggtgcgccgccgcgctcaccgccaggcacgccatggcgcccgccaggaacaccgtccgcggccacctcggcaccgcgtgggcgtcgccgtcgctgctcccgaacacggccatcaaacccttgctggccgtcaagctcgagttactgctggcctcccacgaagaccatga

SEQ ID NO: 153065 - DNA, 98 bp, Zea Mays
tcaatcaaatacctcggtgtgcctcttcactttactaaattgaagagagctgatttacaacctgtgatagataagagaatagctggatggagagggag

SEQ ID NO: 153066 - DNA, 2007 bp, Zea Mays
ggtcaacggctttgaggtgtggactctcgactctcgagcagttcgatgtacgtaacccggcccacgaacccatctttaataacggccctccaaaatcccaattccccgtccagcgaggcagcggcgactgcaattctcatccgaacccgatcatctccggccgccgctccctccggaccctccgtcgacatgggcaccgtcactgccgcagatccgcacccgtccttcctcgccgacaaggacgccaaggtcttcgtcgccggccaccggggcctcgtcggctccgccatcgtgcgccgcctcctctcgctaggcttcacctccgtcgtcgtccgcacccacgccgagctcgacctgactcgccaggcggacgtcgaggccttcttcgccgcagaacgcccgcgctacgtggtcctcgccgccgccaaggtcggcggaatccacgccaactccaccttccccgccgacttcatcgccgccaacctccagatccagaccaacgtcgtcgacgccgcgctgcgctgcggctccgtccgcaagctcctcttcctcggctcctcctgcatctaccccaagttcgcgccgcagcccatcacggagggcgcgctcctctccggcccgctcgagcccaccaacgagtggtacgccgtcgccaagatcgccggcatcaagatgtgccaggcctaccgcatccagcacggcctcgacgccgtctctgccatgcccaccaacctgtatggcccgcacgacaacttccacccggagaactcgcacgtcctgcccgcgctcatccgtcgcttccacgaggccaaggctactaacgcccccgaggtcgtcgtctggggatcaggctcgcctctgcgcgagttcctgcacgtcgatgatctcgccgacgccgtcatcttcctgatggatcactactccggcatggagcatgtcaatgtggggagtgggagtgaggtcaccatcaaggagctcgccgaactagtcaaggaggtggtcggcttccaggggaacctggtgtgggactccagcaagccggacggcacacccaggaagctcatggatagctccaagatacaggggatggggtggaagcccaagatcgccctcaaggaaggcctcgtggaaacctacaaatggtacgtcgagaatgtcatctcgaacaagaagtagggccgtgacatgccagtggtgctgtcttgctctccgttgctgcttccacaaggtggttggatatctgatcatacggttatcagttttaagttaacccacatagaagaggcttgttatgttatgtgttgcctcacctgaataatctgtgggtcaagttagtatactgctacaagcataattgatctggaacactttttgttgaatagaggaagtttaatgaccaagatgatgatggattgatgttcttggtctagaaacaactgcttgctgaccaagctctgtttgatttctgagataccacaatgtgttcagaaacatccattgcttcatttcctttagtttgtactctactgatcacattgagaggaacatctgatcaaagaagatgttgctttcaactgattgtaatgctatgatttggatccaagagttcaaaaggccaattagtatgcgactgtttttgtatttgggtaaccactgtttgagtaggcacttctatcaactcagaagtaactgtcttcagatgaacttactagagaagttcagaggggggaaataacattttctggaatgtattgggtagtcagtaactcatgtgtgcctggcaatactatatcctacgtgaaagcttattcccgtgttcttcattaggacatgttcggttagaaagagactaaatcattgtagtcaagattgaatagaaaagaatttaatatccctcaattcactcaaattcgtgtaaccgaacaacgtcttattgaagatgagattaactctagatatcttgttaaatacatacatcagatagaagttattcctgagaaaaaaaga

SEQ ID NO: 153067 - DNA, 429 bp, Zea Mays
gatggtttccaattgtttcctgcagtctccagaatgtcatcgacaagtagcacaagcaataatatacataatatatccaggcagagaggtgacaacagccaaacaaagtcctggcaagagcagttctcgtttcaggaaatttgccaggctacttcaaactttagtgaacaaaacaaaattggtttaggtaattttggcacggtgtataaggcgaaactcagggatggatccatcatagttgtaaagagggctactaagcagatgcatggtgggcatctatctgaagagttcagaagtgaagtccagatgctgtcaaaggtcgagcatttgaacttggtaaagtttcttgggtatgtggaatacgaggatgaacgcctaattctggttgagtacgtcaataatggaacactccgtcaacacttggatggt

SEQ ID NO: 153068 - DNA, 860 bp, Zea Mays
atggcgatgggacacagcatcggtggcggtatgggaaggcggtggcatgggaaggaaggcggtggaagcgcggaaatggcctgctgggtagtggtttgtatgcgttgggatgggttcgagagggagtgcggagctgtgccttgcgcccgttacggagtgcgggatcacactgatcagctcaaaaagcggagccacccacgctccctggtccacatctcgcggcttcctccgcaagcgcactcaggcatgggcaacgttgctgcgtccggaggagtgcaagtccgtcggcggccgcctgcggtggacgagcgcctcacgcggccgcgccgcctcgtccgcgagctgcccgaccttgacgccggccgcctgcgtcgtctaatccgcactggcgacctcgcgccttgctttgaccccgccgaggacgccagcgccggcctcaccgaggagtgcccgatttgcttctttttctacccgagtctgaatagatccaggtgctgcggcaaagggatctgcactgaatgcttcttacagctgatgccatccgaggcttctaaacttgtccactgccctttctgcaaaactaaggcctatgcaattgaataccaaggcgctcaaatgacaagcggcaaggaaatcaaacaagagggagaaccgaacgtcaatgagactaaaccgagtgtgttcatttgaaatctcagattaccggcggaattgttcggccttagaattagctagtccaattttacgcttccgcaagttttctgacctgacgacaagttttttttttcttttctggactgccatgatgactcatcctgactgaattgttttggaataccaattcgttcagaaaaaaaaaa

SEQ ID NO: 153069 - DNA, 706 bp, Zea Mays
cctcctccctctcctccgcgccgcgctcgctgagaactctatctgtccgggttgctttccggctaacgtgtgtagtgtagcacaacccatcggtcgctgtctgctttctgaagaacgttcgttccggttgacgccgctacgctgccttgtcttctttccttcccttataccctgccgtacacaccttttctgtttgcagtggtgcaggtcttttcggtcctcaggcttcatccctgtgcaagtgcagggataattgcttctaatctcccgaggctgcataacctaattcagaggcagagcaagggggcgtgagggagatgagggagatcatcagcatccatatcgcgtaggcaggcatccaggtagggaattcttgctgggagctctactgcctcgagcatggtatccagcctgatggcctcatgcccaatgacacctctgtcgggatcgcgagggatgcgttcaacacgttcttcagtgaaacgggcgcagggaagcacgttccaagggccctgtttgtcgacttggagcccactgtgattgatgaggtgaagaccggggcgtaccgccggcttttccatcctgagcagctcatctcacacaaggaagatgatgcgaacaacttcgcccgtggacattacacaggtgtgacatcttgtcactgttatgcaggctcaaaatgttcttggaaacaaggggactgaaa

SEQ ID NO: 153070 - DNA, 927 bp, Zea Mays
attggcttggtttctaatgtccactttcccatccctgttttcccctccttcaggacttcttcagtgatcttttggtacatcgctgctgatacaaacagcctacccagactgcttttgtgaagcacattgctttctgagaagccatttgcagtgcaaggatgaaacttggtcagagtgtttaccatatggattggcagtgaaaccaaaaaagaaggcgtgctactgttcttccgtattcatgtcaatgcaacaacaggtcgcttaaattgaaattgatgtctacaaagtgcttcccatttcattattagattactgatatagctatgcctggtgagtggagataagtggaggtggcactaccaattccttaatgtaccaggaatgtttggattgttgtattctgacattgtttggttcaacatattcaagttggagtgtcaggtctccaacaattaaacaagatacggaatctgtgtaagcaagagcattcataccttgttagcttccttctctctctctcaagatcgatctagagaccaacaagatcatggacttcttcaagtttgacgtcgataacgtggtcatggtgaccggcgggaggaacaccgggcgtgtaggagtgatcaagaactaggagaagcacaagggcagcttcgaggtcatcgacgtgctgcttggagctttttgcatgctatgtctagttttctcctatttgttgtacaggaaaacatagaatggaattcaaatttggtggtcgcaaaagtgtggagacttgaattcatataaagttaggcttaacattagtgcaaacagttgtattttagtttagatttagagtacacttatgtatgccttgtttgacaatgcttatttatgatatattgaatggtacttatttatattatattaattataatgttgttcaat

SEQ ID NO: 153071 - DNA, 1404 bp, Zea Mays
attcgaggcgataggcatcgtcgtcccacccagcagtgcagagactctctctctctctccccggccacctctcgctcacgagcaccccatcttcccggccagggcctgggtatgggtgctccgctcgcctcctggccatgggcaagcctcggatcatacaagtacctgctgtacgggcctctggtggcgaaggtggcgcacgcgtggagggagacggggagcctgccgctggggtcgtggtgcctccacctcctgctcctcctggcgctccgctcgctcaccttccagctctggttctcctacggcaacatgctcttcttcacccgccgccgccgcgtcgtcaaggacggcgtcgacttccgccagatcgacgccgagtgggactgggataacatggtgatcctgcaaaccctggtcgcggcggtggcgatgggcagcgcggcgttcccggccgtgtcggagctgcgggcgtgggacccgcgcgggtgggccctggccttgctcctgcacgtggccgtctcggagcccgtcttctactggacccacagggcgctgcaccggggcccgctcttcagccagtaccacgccaggcaccactcgtcccccgtcacgcagccgttcacggccgggttcggcacgccgctggaggcgctgctcctgacgctggcgatgggggccccgctggcgggagccttcctggcgggcgccgggtccgtgagcctggtctacggccacgtcctcctcttcgactgcctccggtgcatggggtacagcaacgtggaggtcatctcgcacagggccttcgccgccttcccgccgctcagatacctcgtctacaccgccacgtatttgagcctgcaccacagggagaaggactgcaacttctgcctgttcatgcctttgtacgacgccctcggagggaccctcagctccagatcgtgggggctgcagagagaggtcgaccaaggcatgaacgaccgggtgccggacttcgtgttcctggcgcacgtggtggacgtggtgtcgtcgatgcacgtgccgttcgccttccgctcctgcagctcgctgccgtgggccatgcgcccggtgctgctcccgctctggcccgtcgccttcgccttcatgctcctccagtggttcttctccaagaccttcaccgtcagcttctacttcctccgcggccggctccaccagacgtggagcgtcccgagatatggcttccagtacttcatcccgtcggcgaagaagggcatcaaccgccagatcgagctcgccatcctcagggcagacaagatgggcgtcaaggtcatcagccttgctgcgctgaacaaggtggatctccagcatcattatcctctatatatatgtcctgttgatttcagaactgtgatcactggtcatgaa

SEQ ID NO: 153072 - DNA, 2413 bp, Zea Mays
attcgaggcgataggcatcgtcgtcccacccagcagtgcagagactctctctctctctccccggccacctctcgctcacgagcaccccatcttcccggccagggcctgggtatgggtgctccgctcgcctcctggccatgggcaagcctcggatcatacaagtacctgctgtacgggcctctggtggcgaaggtggcgcacgcgtggagggagacggggagcctgccgctggggtcgtggtgcctccacctcctgctcctcctggcgctccgctcgctcaccttccagctctggttctcctacggcaacatgctcttcttcacccgccgccgccgcgtcgtcaaggacggcgtcgacttccgccagatcgacgccgagtgggactgggataacatggtgatcctgcaaaccctggtcgcggcggtggcgatgggcagcgcggcgttcccggccgtgtcggagctgcgggcgtgggacccgcgcgggtgggccctggccttgctcctgcacgtggccgtctcggagcccgtcttctactggacccacagggcgctgcaccggggcccgctcttcagccagtaccacgccaggcaccactcgtcccccgtcacgcagccgttcacggccgggttcggcacgccgctggaggcgctgctcctgacgctggcgatgggggccccgctggcgggagccttcctggcgggcgccgggtccgtgagcctggtctacggccacgtcctcctcttcgactgcctccggtgcatggggtacagcaacgtggaggtcatctcgcacagggccttcgccgccttcccgccgctcagatacctcgtctacaccgccacgtatttgagcctgcaccacagggagaaggactgcaacttctgcctgttcatgcctttgtacgacgccctcggagggaccctcagctccagatcgtgggggctgcagagagaggtcgaccaaggcatgaacgaccgggtgccggacttcgtgttcctggcgcacgtggtggacgtggtgtcgtcgatgcacgtgccgttcgccttccgctcctgcagctcgctgccgtgggccatgcgcccggtgctgctcccgctctggcccgtcgccttcgccttcatgctcctccagtggttcttctccaagaccttcaccgtcagcttctacttcctccgcggccggctccaccagacgtggagcgtcccgagatatggcttccagtacttcatcccgtcggcgaagaagggcatcaaccgccagatcgagctcgccatcctcagggcagacaagatgggcgtcaaggtcatcagccttgctgcgctgaacaagaacgaggctctcaacggcggcggcacacttttcgtgaacaagcacccgaacctgagggtgagggtggtgcacggcaacaccctgacggctgccgtgatcctcaacgagatccccagcagcgtgagggaggtgttcctcaccggcgccacgtccaagctcggcagggccatcgcgctgtacctctgcaggaagaggatcagggtcctgatgctgacgctttcgacggagaggtttctgaagattcagagggaggcgccgccagagttccagcagtacatcgtgcaggtcaccaagtaccaggcggcgcagggctgtaagacatggatcgtgggcaagtggctgtcgccgcgggagcagcggtgggcgccgccgggcacgcacttccaccagttcgtagtgccgcccatcatcggcttccgccgggactgcacctacggcaagctcgccgccatgaggctccccaaggacgtcgagggtctcggctcctgcgagtacacgatggagcgcggggtggtgcacgcgtgccacgccggcggcgtggtgcactgcctggaagggtgggagcaccacgaggtgggcgccctcgaggtggaccggatcgacgtcgtgtgggaggcggcgctcaagcacgggctcacgccggcgtgagcgggagggcgcccggagcgggagaccgagacggccggcgcgcgcggccccgcccggaaataacgcgtcgtctattcgttgtcgcatggctgttgcgacgggtgggtcggtgtgctaccgtgtactactactaccagctactagctaccatagtccaagactgctgcaagcgcaatgcaacagagttgataggctggttcgcatataccaatactcttatgtacgtaccgaatactgcaatattgcacgaggcatgggcttccgttacttatggccaggcctgcgacctagtataaatcgtcatgtcggtctgtactgttcattgggctctaaactggattgaaagtctgggccggaccaactgggcccacccaagcatggtacaaaaacaagagcccgaaaaacgatccgactcgaaatcaattgaacagtt

SEQ ID NO: 153073 - DNA, 2250 bp, Zea Mays
attcgaggcgataggcatcgtcgtcccacccagcagtgcagagactctctctctctctccccggccacctctcgctcacgagcaccccatcttcccggccagggcctgggtatgggtgctccgctcgcctcctggccatgggcaagcctcggatcatacaagtacctgctgtacgggcctctggtggcgaaggtggcgcacgcgtggagggagacggggagcctgccgctggggtcgtggtgcctccacctcctgctcctcctggcgctccgctcgctcaccttccagctctggttctcctacggcaacatgctcttcttcacccgccgccgccgcgtcgtcaaggacggcgtcgacttccgccagatcgacgccgagtgggactgggataacatggtgatcctgcaaaccctggtcgcggcggtggcgatgggcagcgcggcgttcccggccgtgtcgcagccgggttcggcacgccgctggaggcgctgctcctgacgctggcgatgggggccccgctggcgggagccttcctggcgggcgccgggtccgtgagcctggtctacggccacgtcctcctcttcgactgcctccggtgcatggggtacagcaacgtggaggtcatctcgcacagggccttcgccgccttcccgccgctcagatacctcgtctacaccgccacgtatttgagcctgcaccacagggagaaggactgcaacttctgcctgttcatgcctttgtacgacgccctcggagggaccctcagctccagatcgtgggggctgcagagagaggtcgaccaaggcatgaacgaccgggtgccggacttcgtgttcctggcgcacgtggtggacgtggtgtcgtcgatgcacgtgccgttcgccttccgctcctgcagctcgctgccgtgggccatgcgcccggtgctgctcccgctctggcccgtcgccttcgccttcatgctcctccagtggttcttctccaagaccttcaccgtcagcttctacttcctccgcggccggctccaccagacgtggagcgtcccgagatatggcttccagtacttcatcccgtcggcgaagaagggcatcaaccgccagatcgagctcgccatcctcagggcagacaagatgggcgtcaaggtcatcagccttgctgcgctgaacaagaacgaggctctcaacggcggcggcacacttttcgtgaacaagcacccgaacctgagggtgagggtggtgcacggcaacaccctgacggctgccgtgatcctcaacgagatccccagcagcgtgagggaggtgttcctcaccggcgccacgtccaagctcggcagggccatcgcgctgtacctctgcaggaagaggatcagggtcctgatgctgacgctttcgacggagaggtttctgaagattcagagggaggcgccgccagagttccagcagtacatcgtgcaggtcaccaagtaccaggcggcgcagggctgtaagacatggatcgtgggcaagtggctgtcgccgcgggagcagcggtgggcgccgccgggcacgcacttccaccagttcgtagtgccgcccatcatcggcttccgccgggactgcacctacggcaagctcgccgccatgaggctccccaaggacgtcgagggtctcggctcctgcgagtacacgatggagcgcggggtggtgcacgcgtgccacgccggcggcgtggtgcactgcctggaagggtgggagcaccacgaggtgggcgccctcgaggtggaccggatcgacgtcgtgtgggaggcggcgctcaagcacgggctcacgccggcgtgagcgggagggcgcccggagcgggagaccgagacggccggcgcgcgcggccccgcccggaaataacgcgtcgtctattcgttgtcgcatggctgttgcgacgggtgggtcggtgtgctaccgtgtactactactaccagctactagctaccatagtccaagactgctgcaagcgcaatgcaacagagttgataggctggttcgcatataccaatactcttatgtacgtaccgaatactgcaatattgcacgaggcatgggcttccgttacttatggccaggcctgcgacctagtataaatcgtcatgtcggtctgtactgttcattgggctctaaactggattgaaagtctgggccggaccaactgggcccacccaagcatggtacaaaaacaagagcccgaaaaacgatccgactcgaaatcaattgaacagtt

SEQ ID NO: 153074 - DNA, 1612 bp, Zea Mays
ataggcgctgggcctacgtacgcatactgacatagtactagtacgtatttgagcctgcaccacagggagaaggactgcaacttctgcctgttcatgcctttgtacgacgccctcggagggaccctcagctccagatcgtgggggctgcagagagaggtcgaccaaggcatgaacgaccgggtgccggacttcgtgttcctggcgcacgtggtggacgtggtgtcgtcgatgcacgtgccgttcgccttccgctcctgcagctcgctgccgtgggccatgcgcccggtgctgctcccgctctggcccgtcgccttcgccttcatgctcctccagtggttcttctccaagaccttcaccgtcagcttctacttcctccgcggccggctccaccagacgtggagcgtcccgagatatggcttccagtacttcatcccgtcggcgaagaagggcatcaaccgccagatcgagctcgccatcctcagggcagacaagatgggcgtcaaggtcatcagccttgctgcgctgaacaagaacgaggctctcaacggcggcggcacacttttcgtgaacaagcacccgaacctgagggtgagggtggtgcacggcaacaccctgacggctgccgtgatcctcaacgagatccccagcagcgtgagggaggtgttcctcaccggcgccacgtccaagctcggcagggccatcgcgctgtacctctgcaggaagaggatcagggtcctgatgctgacgctttcgacggagaggtttctgaagattcagagggaggcgccgccagagttccagcagtacatcgtgcaggtcaccaagtaccaggcggcgcagggctgtaagacatggatcgtgggcaagtggctgtcgccgcgggagcagcggtgggcgccgccgggcacgcacttccaccagttcgtagtgccgcccatcatcggcttccgccgggactgcacctacggcaagctcgccgccatgaggctccccaaggacgtcgagggtctcggctcctgcgagtacacgatggagcgcggggtggtgcacgcgtgccacgccggcggcgtggtgcactgcctggaagggtgggagcaccacgaggtgggcgccctcgaggtggaccggatcgacgtcgtgtgggaggcggcgctcaagcacgggctcacgccggcgtgagcgggagggcgcccggagcgggagaccgagacggccggcgcgcgcggccccgcccggaaataacgcgtcgtctattcgttgtcgcatggctgttgcgacgggtgggtcggtgtgctaccgtgtactactactaccagctactagctaccatagtccaagactgctgcaagcgcaatgcaacagagttgataggctggttcgcatataccaatactcttatgtacgtaccgaatactgcaatattgcacgaggcatgggcttccgttacttatggccaggcctgcgacctagtataaatcgtcatgtcggtctgtactgttcattgggctctaaactggattgaaagtctgggccggaccaactgggcccacccaagcatggtacaaaaacaagagcccgaaaaacgatccgactcgaaatcaattgaacagtt

SEQ ID NO: 153075 - DNA, 1603 bp, Zea Mays
cggctggctacaagccgacactgttgcagctgtttggactgctgcagctgcaatccatagagagaaaaatactgtagaagccgcagccgcagccggattgcagccgcagcaagccgcagcgaacaagctgtaagcgaacagtcttggtagactgctgctgcagctgtctattctcagcagaacactgtcttttccaattttctgaaaactataaaattgttggtgtagtggaagaaatcttgcgttcaagagagcccccaaccatacacaagctttgcatccaatagcccacccaccagctgcgaaatctcctccaaacaacaactgaaccggacaaagaaagaaggccaaaaagggagtctcctttccaagttcaaaattcgaaacgtcccaagagaaaccgaaaccaccataaaaaccagcaaccaaccgtcatcgccgcacaagcgcacgcactcctcgccgtggaccaactccgaagccccatcccgtcccaactcccaagagccgaacgcgagcggcggccgccatggcgcggtgcagcaacggcctcctgggtctcctcaacgcgggcgtgctggtcctcgccatcgtcgcgctggggggcggcgcctggctcagccaccgcgcgtccaccaccgactgcgagcggttcctcgagcggcccgtcatcgcgctgggcgtgctcctcctcgcgctctccctcgcgggcctggccggcgcgctctgccgtgcctcctgcctcctctggctctacctcctcgcgctcttcctcctcatcctgctcctcttcgcattcaccgtcttcgcgttcgtcgtcaccaaccgcggcgccgggtgggtcgtctccggcagggggtacaaggagtaccgcctcggggactactccacctggctgcaaaggagggtggagaactcgcagaactgggccaagatccgcagctgcctccaggacggcaaggtctgccagaagcttgcgtccagaaaggagacggccgcccagttcgtcaacagcaacctctccccgatccagctaatgaacctatctcatgtccagtctggatgctgcaagccaccaacgggttgcaacttcacctaccagagcgaaactgtctggaccaagcccgctggtttcaacaccacaactgacgaccctgactgcaccacatggtcgaacgaccagaccgtgctctgctacgactgcatggcctgcaaggcaggcgtgctggccaacctgaagaacgactggaagaagatcgccaccgtcaacatcgtcttcctgatcttcctcgtcgtcgtctactccgtcgggtgctgcgcgttcaggaacaaccggcaggacaactcgtacccggcctggaaatgaggtgcgcgtggcaatgtataggttgtttatgctatcatgctatgtgagtgactgcgtttcggtgaggaggggttcgctccttggtgtctagcaacctaccgtatgtattaactattaatgtgtccggttcatgtcactggtcgatgctgttttgccctcgaacgcatgatgatagtgtcccaaggctattatccagatatatgccgaaaaaaaatatgcgttttctgtgggcgtgta

SEQ ID NO: 153076 - DNA, 1579 bp, Zea Mays
cggctggctacaagccgacactgttgcagctgtttggactgctgcagctgcaatccatagagagaaaaatactgtagaagccgcagccgcagccggattgcagccgcagcaagccgcagcgaacaagctgtaagcgaacagtcttggtagactgctgctgcagctgtctattctcagcagaacactgtcttttccaattttctgaaaactataaaattgttggtgtagtggaagaaatcttgcgttcaagagagcccccaaccatacacaagctttgcatccaatagcccacccaccagctgcgaaatctcctccaaacaacaactgaaccggacaaagaaagaaggccaaaaagggagtctcctttccaagttcaaaattcgaaacgtcccaagagaaaccgaaaccaccataaaaaccagcaaccaaccgtcatcgccgcacaagcgcacgcactcctcgccgtggaccaactccgaagccccatcccgtcccaactcccaagagccgaacgcgagcggcggccgccatggcgcggtgcagcaacggcctcctgggtctcctcaacgcgggcgtgctggtcctcgccatcgtcgcgctggggggcggcgcctggctcagccaccgcgcgtccaccaccgactgcgagcggttcctcgagcggcccgtcatcgcgctgggcgtgctcctcctcgcgctctccctcgcgggcctggccggcgcgctctgccgtgcctcctgcctcctctggctctacctcctcgcgctcttcctcctcatcctgctcctcttcgcattcaccgtcttcgcgttcgtcgtcaccaaccgcggcgccgggtgggtcgtctccggcagggggtacaaggagtaccgcctcggggactactccacctggctgcaaaggagggtggagaactcgcagaactgggccaagatccgcagctgcctccaggacggcaaggtctgccagaagcttgcgtccagaaaggagacggccgcccagttcgtcaacagcaacctctccccgatccagtctggatgctgcaagccaccaacgggttgcaacttcacctaccagagcgaaactgtctggaccaagcccgctggtttcaacaccacaactgacgaccctgactgcaccacatggtcgaacgaccagaccgtgctctgctacgactgcatggcctgcaaggcaggcgtgctggccaacctgaagaacgactggaagaagatcgccaccgtcaacatcgtcttcctgatcttcctcgtcgtcgtctactccgtcgggtgctgcgcgttcaggaacaaccggcaggacaactcgtacccggcctggaaatgaggtgcgcgtggcaatgtataggttgtttatgctatcatgctatgtgagtgactgcgtttcggtgaggaggggttcgctccttggtgtctagcaacctaccgtatgtattaactattaatgtgtccggttcatgtcactggtcgatgctgttttgccctcgaacgcatgatgatagtgtcccaaggctattatccagatatatgccgaaaaaaaatatgcgttttctgtgggcgtgta

SEQ ID NO: 153077 - DNA, 1068 bp, Zea Mays
acaagcgcacgcactcctcgccgtggaccaactccgaagccccatcccgtcccaactcccaagagccgaacgcgagcggcggccgccatggcgcggtgcagcaacggcctcctgggtctcctcaacgcgggcgtgctggtcctcgccatcgtcgcgctggggggcggcgcctggctcagccaccgcgcgtccaccaccgactgcgagcggttcctcgagcggcccgtcatcgcgctgggcgtgctcctcctcgcgctcttcctcctcatcctgctcctcttcgcattcaccgtcttcgcgttcgtcgtcaccaaccgcggcgccgggtgggtcgtctccggcagggggtacaaggagtaccgcctcggggactactccacctggctgcaaaggagggtggagaactcgcagaactgggccaagatccgcagctgcctccaggacggcaaggtctgccagaagcttgcgtccagaaaggagacggccgcccagttcgtcaacagcaacctctccccgatccagtctggatgctgcaagccaccaacgggttgcaacttcacctaccagagcgaaactgtctggaccaagcccgctggtttcaacaccacaactgacgaccctgactgcaccacatggtcgaacgaccagaccgtgctctgctacgactgcatggcctgcaaggcaggcgtgctggccaacctgaagaacgactggaagaagatcgccaccgtcaacatcgtcttcctgatcttcctcgtcgtcgtctactccgtcgggtgctgcgcgttcaggaacaaccggcaggacaactcgtacccggcctggaaatgaggtgcgcgtggcaatgtataggttgtttatgctatcatgctatgtgagtgactgcgtttcggtgaggaggggttcgctccttggtgtctagcaacctaccgtatgtattaactattaatgtgtccggttcatgtcactggtcgatgctgttttgccctcgaacgcatgatgatagtgtcccaaggctattatccagatatatgccgaaaaaaaatatgcgttttctgtgggcgtgta

SEQ ID NO: 153078 - DNA, 1142 bp, Zea Mays
gcaacaaggctgctgaaacgatgacgatgctgggatgcagatgttgatgtctcagatgtggacacgaccaaaacccgcacgaggacaagggaagccagaacgacaatggcgcggcgacctcgacactaagcacccgagcacgacgatgtcgcggcgcaacaggaaatagtgacgccatgatggccagggaggcgtggctggcggtgcaaggcgcggtcgagaacggacagagggagccgggagaaagaactgcggcgctgcgagcagagcgcagggcgcacgcagcaaggagagaaggggaggaagagaagcaggggggcgcggcgagaggagcatgcgcgcgccaacaggctgggcgacggcacgagcagagaggagctggggagggagatccgcgagagatagatgggcgcgcagcggctagcacgcagagagccatgggagagggatccgagctggagctggaagaaggctccgggccatggggaatacaaggggctggggcgagctcggggaggaagaccgtggcgcacaggaaaacccggacgccgagcaagaacacggcagggaggagctcggccgggcgccatggggcgagctcggggaagctccacggcggggttcgcggcgcaggacgcaggcgcgcgcgcgcagagggagatgcgcacggctggcgagcgcagggagcatggccagggcgcggccgagcagtgagttccatggcagcggcatggtggagggagctgggaggaaacgccggggaagatgaggttggcgagcgctggggctggcagccaggcaccggatgcgagaggtagagggatcgagaatggatgcgatggtgaccgaaggaaaaggataagcccccagaaacgtgagcaattttggtgcagtttcttcgggaacgagccacggcgacggctttggataagaccagagaatacgtgaggaaaatggtgccctgtgtactccataaaaatctgagaggcaacagctgatttgtttagagataagggagatggaatagcggtggaatatttccaccccagataaacacacgtacttcaaataagaaatgttgcaaattaacatgtggatgataaaacttgtaattccttttctttatccttgtaacaaaagaa

SEQ ID NO: 153079 - DNA, 135 bp, Zea Mays
atattttcagtggataaccaaagtcacgaccgacctgaaaacgggcacacaccacacctttctttctttctttgctcactgcagtgggttgtttgtttcagaagcaggtaacagtaaccacccacaaaacaaaac

SEQ ID NO: 153080 - DNA, 2706 bp, Zea Mays
ctcgctttcccccattctctccctcctttccgtcctcccccttttcccacgccaagaaaccacgctgcgaccatccgtcctcctcgtcgtcgatctcaatctctcttcgtcacgatcgcaaacagatattgacccgtccgatcggctccgcatcgccagtttgcatctgcttccttcggtgagggtgtgtctggttcgtgctcccgcagcgaaggctggagccgagatgacaatgccgggctctccggcgaggccgagtttctcggccctccgcggtgcccggtggcgggcctatcttggcgtcatccccggcttcgccgccgtctccaccgacgagctccgccgcgccgccgctgactcccgccggagatatgctaatctccggcgaaggctgctaatagatccccatctctccaaggatgaagaaggtgcccctgacttgattgtggagaatccactatcgcagagcccagggagcacatggggccaatatttcaggaatgcggagcttgagaaaatgcttaaccaagatctgtcccgcctataccctgaattgggggacttcttccaaacaagcacatgtcagtctatgcttggacgtgtattgttagtatggagcctcagatacccagagtttggttacagacaaggaatgcatgaactcttagctcctcttctctatgtacttcacgctgatgtgcagcacttcagacaagtcagggaccttcatgaagagcttttgggtgatgattttgatggtcaaacttttccagatcgttcaaagctgaacagaagtgacaggaaaaacagtgttgagggtagaacaggtaaaattagaagtttggctgaccttgatcctgatactagagatcttttcttgatcaatgatgcatacggagcagagggtgaactgggtattattttatcagaaaagttcatggagcatgatgcttactctatgtttgagaatttgatgaatggtgcacaaggagtggttgctatcactgacttctattctctgagttctgccccagaatcaagtatgggtttaacaccagtaagagaggcatcgtctgcaatatatcatttgcttgctagtgttgattcctctcttcatagtcaccttgtggagttaggagtcgaacctcagtacttcgcattacgatggctccgtgtcctatttggtcgtgaattttcacttgacagccttctgtttatttgggatgagatcttctcttctcctaaccattcttattgtactgacatcaggagtagggcagattatcaatttaaagtgttatgttctcctcgtggtgcactgattttgtcgatggcagtatcaatgatgctccatctcagatcctccttattagggagtgaacatgcgacttcttgcctagtgaggttgttaaattttccagaagatattgacttaaagagcttaattgagaaagccaagttactgcaatcttttgcccttgaagcaaatcttccttcatcctcatcgagaggaaattctctcttgtctacacccaactattgggaagagacatggaagattctccagccatcaatggaccaaaagggtggtggtgtcctcaagatgaagggaaggggcttcttgagaagaagcttgtctagcactgagtcgaatgtttccagaagcaaggctgctaattttgaaaacaacgatatgacttcaactaggcagtccactaccgatgaatttcacaatgctgatgtagttcctgcggagctgataactagtgtgccacacatgcttatagaaaaacaaaagcatcatgttggtaaaggtactgcagagactattgggagtaattcaaagaatggatgtgagacaggacagcatgatggttactgctcaacttcaggtgaaattagagatcctcttggagcagctagcgggtatttatcgaggagtagcagtatcactttgtcatgtggtactgaatatgatcatgatacccatcatctggaagaaccatgtgatccctgtgatgacagagtggttaatgaacctgatccactctctgtgcacaatactggaactgatgaagcagcaacaacagatcgaacatctggaatagtggatacttatcctgttcgacagcgtagactgtgttctgttgatgggaagctgaaaataaaaacccgaaatgccactagtgctaaaggtgacgaaaaagaaacattggcaatatgttcaatttcaaatgtggctgataaagagttgagcagaacattaagatctcttggtgaatctatggttgagaacatacaggatatcgaattgctgttaaaaccaaattcactctcgacttcagtggagaaacttgaggaagcaattcctggaagcacagagcaagctaaggcagtagcagctctaaaagaactcaggaagatcagtgaccttttacgccaaatctaaccggtacaactacggattcttctatacatatggtgttgtagtttttatacgtatctccattggacaatggatgtgatgtaacatgctaacagtatataaccatctgattgatcggtaaatagtaatttgtatgctccctgcaagctgatacattgtaaatgtacatctgaacggctgcctgctggttgtgaagtgaaggcggcaaacatttttttttggcttgtgacccaacaataaatattcaaggtttctgcgtt

SEQ ID NO: 153081 - DNA, 567 bp, Zea Mays
atggaggaggacaggggggtgaccgtgctttcaagccgcatagaacggtggcagctgaggcgcggcgatcacatctatgcctggcggacaggctactcccatcatggaatctacgaaagcgacgagaaggtgatccacttcactagcgcttcagcgcagtcctccggcttcttcagcagctcttcatctgcagccttctcttctcacagcaagtgccgtgaagctatgcgtggaggcggtgtcgtggtctgctgcctcgactgcttcctggaaggggacaatctctgcctcttcgcctactcagtgtccatggcattcgctgcactgagcaatatcggtgctcaagacacctgctccgtggtagacgaagacccacccgacacggtcttgcgccgcgccaacgacttcctcgactacggcggcttccgcagctacaacgttgcaggcaataactgcttccactttgcctactactgcaagacaggacgcgaatatctctcaccagtgcggatgattgctgacccctcgcaggaacaccaacgttccccggcatgtacaatcctttag

SEQ ID NO: 153082 - DNA, 1550 bp, Zea Mays
gagaaagcaagagcgcgagagcaacgcgagccgcagctcccccagctggcagctgcgccagagcacgtcagcgccgcacagaatcaatccgatctccgcgccctgcttgggtgcttcgcttcgcagtacagtacagtaccaccgacaagaccggagcaacccacctgcgccggcaaaacaaaactccaaaccaaaccagcgcgcgatcgagcggtggcgaagcggtccacggaaccagctcgctgcgagcagagcagcgcagacgagacggggaggggaagcacgagcgtaccgtcggtagcgtcggtgaccgcgcgcacgagtctgggcgcggccgccaatgcgacgagcagcgccagcagcaggagcggcccggcgccgcggcggcgctccggagcccgctgcatgacctcgatcccaattcccgacggggtcgatcacaccattcggcgccgcgcacccccggtcggatcgcgaccggcgccgcgctcggagcaatggggccgtgaggcagcggcgaggaagagtgggcggaagcgacgaggcggagacagaggagatggttggggtacgggactggggctgggagtctgggatgagcagcgacgcaactggcaaggcaagtagtggctgcgtgtgcgtagagcagtaggcagggaaggaggggagcacgcaagacgcaacgcaaacagagcgggcgtaaaaatggtgggctggctctcgctcgccttgggagttgggacgttgcccgagacacggcacggggtgtgttttgttttgtttactgcgtgggggtggggatggatgagatgattgggcgtagagatggcaatgggtacccgaaacccaaaacccgatgggtttttaccccattagggtacgggtttagtccaattttcatacccatgggtttgttaatgggcataaatctgtacccagcgggtttatgggtacgggtttgttcctacagtatccaaacccgtgaacccgtgggttttttaaacccgaccaaacctagtgcatattgtcattttattttataaacgaacaacaaacttattattccttatttacttcataatttttaccaattggtgaatgtatcagtagtcggtgagagtgttgcttgcttgctattatatttttttactagcgttatatatgtggtggatggataacttagtgcaaggtcacttaattatacaacttattatttgtatttcattctctctactaataatttttataccaaatcatgaactcgttgttcattacatagattttggatcatgatatcattaatcattacgatacttattgattatgagaagataagtatattggagatgaaacccgcgggtaacccatgggtacctgttaacccgatgggtacgggtttgggcaaaatctcaaacccgtcatgggtacgggttttttaatgggcatagatatttttcacgggtacgggtttgggacggcaaaacccagcgggtttgtaccccgttgccatctctaattgggcgcgtcggcccgcgctggcggctggcggg

SEQ ID NO: 153083 - DNA, 720 bp, Zea Mays
ctatactcgtattgtacgtccctcacagtcacatagaaagagagaggccgggatcgatatcgcgataggtacgatggcggggatggccgcggccgcagtagggtcggcgtcgtcgtcgtccggcccggcggttatgctgctgtgcggcaaggcggagaaggtgctgggcgtgcagaaggcgcccgggagctgcccctactgcggcggcgtggtggcggccacggacgtggaggccgagtgggcgctctgctgcctgccgctctgccgcaggaccaagcggaggttcgcctgcaccgcctgcgccaggcgcctcgtcacctacccggctatcctgcatgactagaatagaagaagaaggtcgacgacgtacaccatcgacggccggccggttttaatttccttctactatcttcattcgcgtcttcacctccggcactactccgatctccagatcgaccaagtcatcgagaagagaggtgcatttggtggtcgcccgttttggtaagaagttgaattcgaacctgaacctctgttgccaaagtgccaactttagcctactccaccgatttccagcgcggacatgctcttggcgtatttgctagtatatgctagtatatgagatcgaaggcccgtggttaagctatccgaggatgttcttttattttcactcattcgctgccgacagatggattacttgttcagggaaaaaacacacaaaaa

SEQ ID NO: 153084 - DNA, 1847 bp, Zea Mays
acattttttccctaacatctacagtacatacaaaaactcagagtgtacgtcggcacatgtggatactataggtcccatcctactacattcagcgtagaagaagccatcactgagtagcacgccggcacaccgctttgaagggaaatgattgccacgaccacgaccggcagctcggcgaaggcggcggcggtgggtggcaaggaggcgcgcgcctgtgacgcgtgcctgcgccggcgggccaggtggtactgcgcagcggacgacgcgttcctgtgccaagtctgcgacacgtcggtgcactccgcgaactcgctcgcgcggcgtcacgagaggctgcgtctgcgccccacgtctccgctgcagacgccgccgcctcccacgccggcgtcagcgaatcgcgagagccacgacgaggtggtgccggcgtggttcaagcgcaaggcgcgcaccccgcgcggtgggcgcgccaaaagcgatgtgcggacgttgtcgcggcgcctcgttgtgccccatgcggcgggcggggactcgccagatggtcggaacgacgagggggagttcgaggccgaggagccggaggaggaggtgctttaccgcgtgcctgtctttgaccctgccctggcagagttctgctcgccccagcctcttgaggacgcggccgctctcgcgtcgtcctgcaacgaagacggcgccgtcgaggacccggcgaagacagatcgagagacacctgcagcggcgccgctggtgcagtttttccccgacggaggtcatgccaacttcgggccgaccgacgccgagctcagggagttcgccgcggacatggaggccttgctcgggtacggcctggacgacggcaacgaggagagctcgtcgttctgcatggagacgctgggcctcctggaaccggtggaagtgggtgaagacgcgtcgcgagtcaaggtggagactgacgccggcagtgcctgcgaagccagtggcacgctggcgtgcgccctcgagctgctggacccagatgcatctgacgagatgctggacatcgacttcaactacggctcgcctcaggacacgacgacgaccgagaatgccgcgagcagcagccacacgggaaccgacggccagttcttgcagacgagcctctcgctcaccctcaactacgaggccatcatccagagctgggggagctcgccgtggaccggcggcgccgaacgaccacatgtcaagctcgacgacagctggccccacgactgcacgaacatgtgggttgtgggacgaggaatggtcggccacggcggtgaggacttgctgggcacgccgaggctggggcagggcatggacgacgttggccgggaggcccgagtgtcgcggtaccgggagaagcgcaggacgcggctcttctccaagaagatccggtacgaggtgcgcaagctcaacgccgagaagcggccacggatgaagggccgcttcgtcaagcgcgccaccgccggtggcagtctcaccatcgctggcctcgcttagtgccgccggcattctgcatgcttggttgtgcctgcgtggctgcatatatatatatactggaggtgcgacagcgcgccgtcggctccggcgcctctcgagtctcgtccgtcgtcatgaaaccatgacaagaacaaacaactcgtcgaagttgctctttagctaattcaattcaactcaaataaaataaaaatgactattctttcatcggatccgttcgacaatttaaacattttataagctgctgccttagagtggcacttgctttatttgcttgtgacgatggtcgagtaattttctttataatagagcgcggagggaatattggttccgaa

SEQ ID NO: 153085 - DNA, 165 bp, Zea Mays
atggggaaaaacagagaggcgaccaagaaggggctcacgacggggatgaccggctccaagagcagcgacgggaaacgacgaccggctgcaggaaggggccagagatctgccatggaaagtagggacggcggccaaaggatgagggcgagggctgctggggattga

SEQ ID NO: 153086 - DNA, 2025 bp, Zea Mays
cttttttttcccaaccgggcacacttccgtttacatctatcccctcagccagcggccagcgcacagcgcaaccgcctcaaaacacccgcgtgtgcgtgacagtgcagctagatccacccacaacctcgccaccactctccacgccttccgatccaatcacccgcccctttcactgacgccaggatcaatcaggcacggtcccacgggacagcgagaatatctaggtcgaccctgagagccagccgccaggcgctgatttctcttttgtagcctccggattttttttcgcctataattactcttccccgtgcgccctcgcgaggtcgaacccccaaggcgaggcgacgaaaccctcgccagtccccaactcgaacctcagtcaggcagcgtgaggagggagagttcaaggaccgaggcggcgtcgggcgagatgaagcttaacgtcaagaccctcaagggcaccaacttcgagatcgaggcgagccccgatgcatcggttgctgatgtgaagaggatcattgagaccactcaaggtcagagtacctaccgggcggaccagcaaatgctcatataccaagggaaaattctcaaggatgaaaccactttggaaagcaacggagttgctgagaacagcttccttgttataatgttgtccaaggctaaggcatcatcgagtggagcttctaccgctactactgcaaaagctcctgcaactctggcccaacctgctgcccctgtggcccctgctgcatcagttgcaagaacaccaacacaggctcctgttgccacagctgaaacggcacctccaagtgtccaacctcaggctgctccagctgctacggttgctgctactgatgatgctgatgtgtacagtcaggcagcttcaaaccttgtatctggcaacaatctagaacagactatccaacaaattcttgacatgggtggtggtacatgggaacgtgatactgttgttcgtgctctacgtgctgcatacaataaccccgagagagctatagactacctgtattctggaattcctgagaatgtggaggctcagcctgttgcccgagcacctgctgctggccaacaaacaaatcagcaggccgcatcacccgctcagccagcagttgcattgccagtgcagccatcacctgcctctgcagggcctaatgcaaatcctttgaacctttttcctcagggtgttccaagtggtgggtccaacccaggtgttgttccaggtgcaggatctggtgctcttgatgccttgcgacagcttccacagtttcaagcactccttcagttagtccaggctaatcctcaaatcttgcagccaatgcttcaagagctaggtaaacaaaacccacaaattctgcggttgattcaggaaaatcaagctgagtttctccgcttggtgaatgaatctcctgagggtggtcctggagggaacatactaggtcaactggcagctgctgtgccacaaacgctgacagttaccccagaggaacgggaggctatccagcggctcgagggaatggggttcaaccgtgagcttgtgctagaagttttctttgcatgcaacaaggacgaagagcttacagccaactacctcctggatcatggccatgagtttgacgagcagcagcaatagacgtggggtggatggaggaaaccgaggcagttgcagaacagcgagtgtcgttcttatgccctctgcctgacgagagatactcggtcgtctatgctatgctgctgactatcttttatttccatatatatttgttcggaatgctttctaagtacatattaattcaatatcaagcgttacaccgtgtatgaaagcctgtcaaatcgtggcctttggtttggagggaaggattcgattgctcacttgttttctttgctctttttcctggcgtattgttgcattgtatcaatattatgagttttagggcgttttggattttctataatatataatatacataaagtatagtgcattgtaaaactaagaatctataaaagcta

SEQ ID NO: 153087 - DNA, 1917 bp, Zea Mays
atgaagcttaacgtcaagaccctcaagggcaccaacttcgagatcgaggcgagccccgatgcatcggttgctgatgtgaagaggatcattgagaccactcaaggtcagagtacctaccgggcggaccagcaaatgctcatataccaagggaaaattctcaaggatgaaaccactttggaaagcaacggagttgctgagaacagcttccttgttataatgttgtccaaggctaaggcatcatcgagtggagcttctaccgctactactgcaaaagctcctgcaactctggcccaacctgctgcccctgtggcccctgctgcatcagttgcaagaacaccaacacaggctcctgttgccacagctgaaacggcacctccaagtgtccaacctcaggctgctccagctgctacggttgctgctactgatgatgctgatgtgtacagtcaggcagcttcaaaccttgtatctggcaacaatctagaacagactatccaacaaattcttgacatgggtggtggtacatgggaacgtgatactgttgttcgtgctctacgtgctgcatacaataaccccgagagagctatagactacctgtattctggaattcctgagaatgtggaggctcagcctgttgcccgagcacctgctgctggccaacaaacaaatcagcaggccgcatcacccgctcagccagcagttgcattgccagtgcagccatcacctgcctctgcagggcctaatgcaaatcctttgaacctttttcctcagggtgttccaagtggtgggtccaacccaggtgttgttccaggtgcaggatctggtgctcttgatgccttgcgacagcttccacagtttcaagcactccttcagttagtccaggctaatcctcaaatcttgcagccaatgcttcaagagctaggtaaacaaaacccacaaattctgcggttgattcaggaaaatcaagctgagtttctccgcttggtgaatgaatctcctgagggtggtcctggagggaacatactaggtcaactggcagctgctgtgccacaaacgctgacagttaccccagaggaacgggaggctatccagcggtgtaaatctacacaactgctgccgacagccgtaagagctggtatggatcgcatgaaacattttgccaatctgcccctgaacaaggggcacttgttatgccgtacttagcggtggtaatggcctctagattttacactataaaatttaaatttaatgatcgaatcaaattaggatcggtctatgttctttttcatttttaaactaaaattatttaagtgtcctaactaacttattgtgaagaaacaaacatttaaaccgtgacccattaccacccctagcccatattccaaactctgagctcctggttactgtattttttctacttacattattatattcctgaacagctcgagggaatggggttcaaccgtgagcttgtgctagaagttttctttgcatgcaacaaggacgaagagcttacagccaactacctcctggatcatggccatgagtttgacgagcagcagcaatagacgtggggtggatggaggaaaccgaggcagttgcagaacagcgagtgtcgttcttatgccctctgcctgacgagagatactcggtcgtctatgctatgctgctgactatcttttatttccatatatatttgttcggaatgctttctaagtacatattaattcaatatcaagcgttacaccgtgtatgaaagcctgtcaaatcgtggcctttggtttggagggaaggattcgattgctcacttgttttctttgctctttttcctggcgtattgttgcattgtatcaatattatgagttttagggcgttttggattttctataatatataatatacataaagtatagtgcattg

SEQ ID NO: 153088 - DNA, 732 bp, Zea Mays
ttatattttaatagtcatttcactgggtttggtcaatgattgtatgatttgttgattggtagccaatgcttcaagagctaggtaaacaaaacccacaaattctgcggttgattcaggaaaatcaagctgagtttctccgcttggtgaatgaatctcctgagggtggtcctggagggaacatactaggtcaactggcagctgctgtgccacaaacgctgacagttaccccagaggaacgggaggctatccagcggctcgagggaatggggttcaaccgtgagcttgtgctagaagttttctttgcatgcaacaaggacgaagagcttacagccaactacctcctggatcatggccatgagtttgacgagcagcagcaatagacgtggggtggatggaggaaaccgaggcagttgcagaacagcgagtgtcgttcttatgccctctgcctgacgagagatactcggtcgtctatgctatgctgctgactatcttttatttccatatatatttgttcggaatgctttctaagtacatattaattcaatatcaagcgttacaccgtgtatgaaagcctgtcaaatcgtggcctttggtttggagggaaggattcgattgctcacttgttttctttgctctttttcctggcgtattgttgcattgtatcaatattatgagttttagggcgttttggattttctataatatataatatacataaagtatagtgcattg

SEQ ID NO: 153089 - DNA, 98 bp, Zea Mays
cgaggcagttgcagaacagcgagtgtcgttcttatgctatgctgctgactatcttttatttccatatatatttgttcggaatgctttctaagtacata

SEQ ID NO: 153090 - DNA, 394 bp, Zea Mays
tagattatccttggactactttaacacttaaaatagatagtccagtcttggacggatcgagtatatcattatgatgtacaagtcaatgatgatagtcatagtgagtccgcgatgagtcgcccactgctgtgcatctagccctcagcacgatcgtaatgcatcatataagatgataaaattttggtaaacaacaaggaaagaggtgaatgcaccgagatttgcctaggataaaacactatgttaatgttgttagatgatactcgcttgacgaccatctcccgtcctagcactcgatcgaatcatccatcgttaggttcatcgaccagcatcactttgagatcaattcggttcttgtcctccacatcacgtgatcaactagtgtacctaatgaaat

SEQ ID NO: 153091 - DNA, 354 bp, Zea Mays
atggcacaggcgagtcgagcacacaggagaggcacgactgacaaggacaaccaccagggcgccatgacgaggatggtgatagggaggggctcgaccaacgaggaaattgctggcaccgaggcttgcaaccttacagtcagaaaggagggagcaggggcaagcaccgtgtgggggagggagataagggagcagggaaatgtcagcttcaagcagagggagggcggtgcgaggataaggagagagttgggcggtggatataatgagaattcagatttttccttctccaatcttttaataaaagagattgcaaaactcttaggtcctagggttagagttggagataggtcagaatag

SEQ ID NO: 153092 - DNA, 2872 bp, Zea Mays
cgctaggcaccgttgtggctgtgcggaactgcacaagagcgtttcgcctcggccaccacgaacggagaaggcggcagccatggccatggaggaagcggggaagatgacatgcaggaagaagggtggtctgagaacaatgcccttcatcttcgcaaacgaggtggcggagaagctcgccgtggtgggtttctcgaccaacatgctgacgtacctgaccactcagctgcacatgccgctggcgaaggccgccaccacgctcaccaacttcggcggcacctccgccgcgacgcccctcatcggtgccttcctcgccgacgcctgcatcggccggttctggaccatcgccgccgcgtccgtcgtctaccaagccgtacgtgcactgtggaaccctcttgccaagaaatgcatacagcatacgtcgtgggcgtggtgaactgcgcgcggctgcgagtgaatgaatgatcactgacgtccgtcgcgcacagggcatggcgctcctgacggtgtcagcggcgctgccgcggttccggccggcgccgtgcaagcccggcggcgcggtggcatgccaggaggccgcgccgtggcagctggcggtgctgtacgtgtccctgctcctgaacgcggtgggcgcgggcgggtaccgcccctgcatcgtggcgttcggggcggaccagttcgacgagtcgcgggcggcggagcgcgcgcggagctggggcttcttcaactggtactacttctgcaacggcgcgtccatgctgctggccgtcacggcggtggtgtacgtgcaggacaacgtgggctggggctggggcctcggcgtgccggccttctgcatgggcgtctccgtcgccgccttcgtggccgggtacccgatgtaccggaggctggagcccgcggggagcccgttcacgcggctcgcgcaggttgtcgtcgccgctgtcaagaagcggcggctgccggcggcggacgtcgaccccgcgttgctgtacgaggacgacgagctcgacgcgcccatctccatgtacggcaagcttgtgcacacggatcagctcaggtaccttggtcccgctgcctaactctgctaccggctctgttctttcactgccgactgcagtgcactgcactggtaaggatcggggcccattttttgtggtggtttgactggatggactgccgacaaccgacaacccataagaaattgccaagaaaggatcacggacagggtagatccaatcacaaggccatgtgaagtggcgccgaaaatggacaagtccgcaacggtacaatttctcgtgttgtccggtcttgacttggacactgagagaagaagatcataacgcacgggtccacgtttgtttgctcaagcaagcgtgattgcagtctcggttaattgtcacttgtcaatggtggatacaccctatcctgaaattcgtcgtggacactcaacagggagtcatattctaagctgtatttttctgtgaaattaaacttgtcactatggatcaaacataaattagtctgaatcatggatcagattcgaattttcgatagtataaactgccactccaaatttaagttcaactgacaccgtttgcagcttctttgaccgcgcggcgatcgtcaccgacggcgacctggtcacgctgacggacgcggactccggcaagccgtcgacggcccccgtcccggacctgtggcgcctgagcaccgtgcaccgcgtggaggagctcaagtcggtgatccgcatgggtcctatctgggcggcgggcatcctggtgatcacggggtcgtcgacgcagaacaccttctccctgcagcaggcgagcaccatggaccgccgcctcgcgccgggcctctccacgttcgagatccccgcggggtccatgaccgtcttcgggctgctggccatgctcttcaccctcttcgtctacgaccgcgcgctcatccgcgtggcgcgccgcttcacggggctggaccgcggcatctccttcctgcaccgcatgggcgtcggcttcgccatcagcgtgctcgccaccctggtcgccggcttcgtggagcggcaccgcagggacgcggcggcggcggccggcgccacggacgccggcacgtccccgctgtcggcctactggctggtgccgcagtacgcgctgcacggcgtggccgaggcgttcacctccgtggggcacctcgagttcatgtacgaccaggcgcccgagagcatgcgcagcacggcgacggcgctcttctggctgtccatctcgctgggaagctacgcgagcacgctgctggtggacgctgtgcaccgctggagcgcggggcccggcggcgccaactggctgccggacaacatcaatcacggcaagctggattacttttactgggtcgtcacggtactgcaggtcatgaacctggtgtactacgccatttgcgccaagcggttcacgttcaagccagtgcagctccacaagaaagaggaagaagaaggcggcaaggcacttgtggagttgcaagagaaggtttaatttgagcagcatgcactttcagctatgtgcaggtacatgtctaatagaaaggaagtactcatcagtgctaggaagatcctcagaaaaactcccaaggtattactatataaatctatgtgagcatcttcccctgtattagtcaagtagatcaagaatgcaggaaggttgttcaggcaagcaacctcagaaattgtcaaggatcacatgacagctttgtggatggcagaagctatctggtctggtcctgagacttggcacaggtgcaaaacacaactgactatatttgtaattagaaagcaggcacgaggcacatgtctgaactctgaaacttgacgttaatgcacagtact

SEQ ID NO: 153093 - DNA, 3233 bp, Zea Mays
cgctaggcaccgttgtggctgtgcggaactgcacaagagcgtttcgcctcggccaccacgaacggagaaggcggcagccatggccatggaggaagcggggaagatgacatgcaggaagaagggtggtctgagaacaatgcccttcatcttcgcaaacgaggtggcggagaagctcgccgtggtgggtttctcgaccaacatgctgacgtacctgaccactcagctgcacatgccgctggcgaaggccgccaccacgctcaccaacttcggcggcacctccgccgcgacgcccctcatcggtgccttcctcgccgacgcctgcatcggccggttctggaccatcgccgccgcgtccgtcgtctaccaagccggcatggcgctcctgacggtgtcagcggcgctgccgcggttccggccggcgccgtgcaagcccggcggcgcggtggcatgccaggaggccgcgccgtggcagctggcggtgctgtacgtgtccctgctcctgaacgcggtgggcgcgggcgggtaccgcccctgcatcgtggcgttcggggcggaccagttcgacgagtcgcgggcggcggagcgcgcgcggagctggggcttcttcaactggtactacttctgcaacggcgcgtccatgctgctggccgtcacggcggtggtgtacgtgcaggacaacgtgggctggggctggggcctcggcgtgccggccttctgcatgggcgtctccgtcgccgccttcgtggccgggtacccgatgtaccggaggctggagcccgcggggagcccgttcacgcggctcgcgcaggttgtcgtcgccgctgtcaagaagcggcggctgccggcggcggacgtcgaccccgcgttgctgtacgaggacgacgagctcgacgcgcccatctccatgtacggcaagcttgtgcacacggatcagctcagcttctttgaccgcgcggcgatcgtcaccgacggcgacctggtcacgctgacggacgcggactccggcaagccgtcgacggcccccgtcccggacctgtggcgcctgagcaccgtgcaccgcgtggaggagctcaagtcggtgatccgcatgggtcctatctgggcggcgggcatcctggtgatcacggggtcgtcgacgcagaacaccttctccctgcagcaggcgagcaccatggaccgccgcctcgcgccgggcctctccacgttcgagatccccgcggggtccatgaccgtcttcgggctgctggccatgctcttcaccctcttcgtctacgaccgcgcgctcatccgcgtggcgcgccgcttcacggggctggaccgcggcatctccttcctgcaccgcatgggcgtcggcttcgccatcagcgtgctcgccaccctggtcgccggcttcgtggagcggcaccgcagggacgcggcggcggcggccggcgccacggacgccggcacgtccccgctgtcggcctactggctggtgccgcagtacgcgctgcacggcgtggccgaggcgttcacctccgtggggcacctcgagttcatgtacgaccaggcgcccgagagcatgcgcagcacggcgacggcgctcttctggctgtccatctcgctgggaagctacgcgagcacgctgctggtggacgctgtgcaccgctggagcgcggggcccggcggcgccaactggctgccggacaacatcaatcacggcaagctggattacttttactgggtcgtcacggtactgcaggtcatgaacctggtgtactacgccatttgcgccaagcggttcacgttcaagccagtgcagctccacaagaaagaggaagaagaaggcggcaaggcacttgtggagttgcaagagaaggtttaatttgagcagcatgcactttcagctatgtgcaggtacatgtctaatagaaaggaagtactcatcagtgctaggaagatcctcagaaaaactcccaaggtattactatataaatctatgtgagcatcttcccctgtattagtcaagtagatcaagaatgcaggaaggttgttcaggcaagcaacctcagaaattgtcaaggatcacatgacagctttgtggatggcagaagctatctggtctggtcctgagacttggcacaggtgcaaaacacaactgactatatttgtaattagaaagcaggcacgaggcacatgtctgaactctgaaacttgacgttaatgcacagtactctgtttgtacattaggatctagggataaacacagagaggcaacagtcttcgaaagttgtcacgcaacacatttctcagtgacagaaatatttcgatctgaatcctggcatagcttattaatattccgacttggacactaggtagtaaggaaacaggtttatacccacaatctggcatgaattccaacccaagcagatagcaaagcttttcaggaattcaggtaaacagactacggtacattagatgtcgcctctgatctttaatcgcagattcgcagtagtagtgcacgaatagaccgttcaagaccgcgcggcgagacgcgaacctgtcgcgggacggggggtcagacggtgaacttgatctcgaagccggtggacggatccacgggctcggccgtggacgggacgacggcggtgacggtggcggctggggggccgacggggaggcggcgggttatcatgtcttcgatcttcgcggggtctccggagaggagggcctccacactgccgtcacggcggttgcggacccagccggcgaggccgagcgactcggccgtggacgcagtccagtcgcggaaccccacccccgtgacgcgccccttcaccaccacgcggactgccttccgtgcgggctccggctgcggcgcggatggtggcgtggcggcatcgggatcggcggaggacgccatggcgcggtggtgctggtacggttgtggacttgtggaagcagcgagactggagaccggagacggagagggacgagacgagacgagacggctgaagcaaggaactgctggaacattttggaaagtcaaggcctgccctagtaggacaacccaagcccggcccaaaaaaaatcgtgaccctgcgcggctgggtcgcactcgcggctcgtggcagaggctgtgatgggctacagttgtgggctttttaaccttcttttaaaaatgtgttattatttttctatattcgtagtgtcccttttccatggttacttctctccagcattgctacatatat

SEQ ID NO: 153094 - DNA, 778 bp, Zea Mays
tcagtgttcttcagtagattgattaccacaggcgagtggcgccgctcgccaatgaccacgccccacggatggccgatgaaccagccataaatcaggcggtgggcttgcggtggaagccatcgtcgggggagaccggttcagcgggggagggtacaacagcggtgacgacggcggcgggcgggccgacggggatccgccgggacaccatctcgtccaccttgtccgggtccccggagagtagcgcctccacggtgccgtcgcggcggttgcggacccacccggcgagccccagggagcgcgccatctccacggtccagtcccggaagaagacgccctgcacgcgtcccttcaccaccacgcgcaccgccttggtgggagaagactgctgcatcggcgggtcgcttggggcgcccgtgcatgccgccatggcacggcggggtgcggtggcggtgaaggggcgaaggaagcgggggccggtggcggagctggaggggaacattctggagcaggcgagcagcaggaagaatgcgatgctggttggaaccacggactcactcggaggctcggagccagtccgagtctgagtgtctgacggtctggtgggcgcctgggcggtggctgtggaccgaaggccgagccaacattcgagttgggctaaaacccagacgtgaatactcgtggaccgcgtagagatctgagaggatcgttgtattttctcgcccgttaggatttggcaatttttatttatactaataattactcttttcgacaaaaaata

SEQ ID NO: 153095 - DNA, 2026 bp, Zea Mays
cacgggcccaatctgagaaccctagcaaagccagcccgtcaatttccatccccttcgcccgcccgcccaaccaccatgtctcgacgcggggcaatgccatccaccgccccgcgcgcgcggctctcgccgccggcacccgcctcccacccgccgcggaaacgtggccgctctccatcggctcctggaagcacggcgtcgtggcgcgcgtccgccgagaacaccgtgcccctctaccaccgccgccgctggcacaacccggagcgtgcccctggtcgcgtctggcagcggttccgcgcgccccagcctgccttactctcctccaggctttggatttgctcggaggacgcctcgacctcctcctccggagatgcctgcactatcatgtcatacaacatcttggctgattacaatgctcggaatcatcccgacctttatttggatgccccctgggatgcaatgaggtgggattcaaggaggcgacttattattcgtgaaattaggcactgggatcctgacgtagtgtgtcttcaagaggtggataggtttcaggacattgctgcaggaatgaagagcagagggtacgaaggtatatttcagaggcgtactggagatactagagatggatgtgccatattttggaagtcaaaacagttacatctggttgaggaagatagtattgactttagtgaattcaatcttcgaaataatgttgctcaaatatgtgtttttgagcttaatggaacacacaaatttgtactcgggaatattcatgttttgtttaatccaaagcgcggtgatgtaaaactgggccagattcgcatgctacttgagaatgcaaatgctcttgctgaaaaatgggataaaattcccatcgtgcttgccggtgatttcaacagcacacctgatagtgctatctacaagttcttgtcgacaatgaagctgaacatttctttgcacgatagaaggcatttatctggacttgatagcactgaatttgggtatgagctttgtagcctgctcaagtatcaatggactgatgaagaagtgagaaatgccacagggtattcaaatgtcatggtggctgaacatccactgaagctcagtagttcatatgccatgttaaagggaaattcaaacaataggggtcttcatggtgaacccttggcaacttcctaccacaggaagtttcttggaactgttgattacctgtggcacactcatggaattgaatgctccagagttttggacacgttacctattagtgttttgaagagaacgaggggtcttccaaccagggaaattggcagtgatcatttgcccattgttgctgaatttgctttcacggaatcagttgaagatgattccgatgaagatgatgaatctgagcaagatgacgaatctgagtaagaaatgagcgaagcgcaatacttatttttctcctcagacagtgagtcccgttgaagtgactggagtgattcagtatttcagttggttaaaaaggttcgaggtaagttattcaagaacagggagtatggtgcaccagagactacattgcatctttcatggtccataaacagaatatctccggcttcattgcacaatgaatttctcggtatctttgcccgtgtactgtatgggatcctgctgttcacagaatcaagtatcacattgagcagaatcaagtaccacattgagcagaatcaagtacgtgctgctgtgtgaaaggcaagattgcaacgaagtgctctctgcaagtttgtacgaactaattagtacttacgaagaaccgtcaatttagtggacatatttattccgtatcagatggttaactacaatttttaaagaactggcaaacggccctgtcccattttccattaaaaaatatagaaaacaccacgacaaactcataaagggttacaacctaagatctatgactatattatgttaactggtcttattttattcattccatcggtacatgtaattatgatatgtctgctagaaccaaacgctctttttgtgtaga

SEQ ID NO: 153096 - DNA, 895 bp, Zea Mays
ccattgtctcagatagataaccttctgcagtcagcttatgatcaaggggacaaatgagatcatgccaactctactccatgtactgctggtgtcacaagattaatatacaatgaagatgttgattcttcttggagttgcacgaatgaaccctatgattgtgattagttacttcaaagcaattttttggtcttaatgcgtggtaagtttattcaccttttattttatcagacattatgacattccattttgagacaaggatctacaacaattgtgtagaagtggtcctttaacagcatatgttacagttaatatattatgttttttctacatgtactcatttgaaacaagtaccagttcattcctcagctgatcttcttgaacaacttatttggttacctatcctcgctaattattattaaggggtcaaatgccgatctataccatgttatgatgtacatgttctttagcccaacagatgactttcttgagaactagtttgtttagtccagaagacagtgcaggatgggagagtgtcgaatgcttcttcagatactatttcttggtccgtcaaatctgcttgacccaaatgcaagttttgctcaaatgtagcaaaaaatgattgtctcaccaattgtcagcatgtctgcttccagcaaagtttcagagaaggaaaagatggaatgtaactcaaattttggtggccgcacaagtgtggagacttgaattcatatatacttagttagactcaatgttagtgcaaacagttgataaccaagtttttcaattagtatttagttttgtctttagagtacacttatgtatgagttatttgacaatgtttatttatgagatattgaatggtacttatctatattatattaattacaatgttatt

SEQ ID NO: 153097 - DNA, 1976 bp, Zea Mays
atttggatgcctgaaactctagttatgatttttttgaagtgagtagccgaattctgtccaaatctggacagaattaaagtttagcactgtttgacctttcaaactgtcgaatcatgttgtgatgataatataagagttatagaggactttctaatctttccagaaagtcctagtttactatttttggatgcatattttgtgagctatgaataaaacaattaaccgctgtgctgctgtctaaaaattctgcaagtattaaattgttggcttgaagttactattgtttggctaagtaagtttaactgattcttaattggtgaagtgatgctttgttttagtaattatcatgttttatggttgttgattgagtaaatatcataaatggagattggtcgcttaagttaatcatcttgaataaatgttcctcattatccttattagttggaagcaaatagcatcaataggtttattccagttgtaatccgagagctatatagtgggaagtgcatttaggcgcttaaagtcttttgcttctaggttatagtcaaatgagattatgtaatatttgatgatgctctacttgctaggacaaatagtgtgatgtgttagctatgctagttaatccgatgaaatggtttaaaaagttagttaaagtatttctattcaaattcgaagctgtagatgtccaaggctaacaagtttaaattatggtaatcgtttggtgtatgttctagttaaagaagatccatacatggttcacgattgtttgatgtttaagttaggtttgattgattagaagatcatgcttgttgtgttagagttaatgtatctagtgattacttatgcttgcttataatgctttgctagagaatgtttaatcctataccactagttcttatgttcatacatgtgcattgtacatccaaataggtacgctagctgaaaaatcgtgcgaagcgaagggtgtggatcaaaacaacccacaagacaatgtgaggtgttcatatgtgtctaactaaaaatttgtaatcttcctctccaccaactgattgttaattttctgtcctgccattactccttaccatatacacaacaaaatttaatctgttcattttttggctaatgttacatgttgcccaaagtttaatctattcatttttggctaatattacaggttggccaaacgcttggaacaatgaaactattacaaattcctttttacagactacaacttctatcggactaggtggtcaaggctcaggattcagagcagaagatgcacataaatactggtgaatgatgccatcgacgatgatgaactaatgaaacgatggatgatgccatcgatgaaagatggaatagaactcaaattttggtggtcgcacaagtgtggagacttgaattcatatatacttagttaggctcaatgttagcacaaacagttgatgagcaagttttcccattagcattttagtttgaatttagagtacaattatgtatgagttatttgacaatgcttatttatgagatattgaatgttatttatctgtattgtattaattatagtgttattaaatatatgtgtttgtatttttttctcttctaaattattataatgtggtaattgaagaatgtaatgacatgtaagtcatttcgtttaaatcttaataagacaattatcaaaccgtctaatatcagcctcctaaataagacggtttctaaaacgtccaatatcacccttctaaataagatggtttttctgttgtgagtgtctattattatagaatattttagtcattttgataaatattttgtgacttataatgttcgtattttcgacagttctttagaagaagtgtctcaaacaaaaacctaatttaaggcggtttattggacaaaatgacttaaacaaatgccttttttagacggttataaattaaaaattgtcttatttaatatcttttaagacggtttat

SEQ ID NO: 153098 - DNA, 299 bp, Zea Mays
atgctcccaaggaggttcccaataatctggtcgcccctccttttagctcagagccgcgcatccccaatccgctactccggcaagcccgctcctcgactgttcatctactccgtcgtcacctcgcgtccgccatcgtcacattggttttcgccgaggtgtctggacaagcagcagcatttcgtgtgacggctgacaggtgtgccttttacggctgcagattcctcgtctggcaggtactttcctttcttttaccctattgactgtatgagttcattgttttttgttatttctctttttat

SEQ ID NO: 153099 - DNA, 135 bp, Zea Mays
atggattacagtcttttggtcggtattcacttcaaggacagatgcaaagcagcaatggtgacaatggttgttacagactgcatttggagcatcaaatttctattgtggggttcaggatacttacctgtttcataa

SEQ ID NO: 153100 - DNA, 794 bp, Zea Mays
ctgttagatatccaaccgtacgtaaactagtcacaactcaggaccagtgcctcttcggtcaaaaatatccttgtacctgcatctcgacctcaccggcgtccggcggtggtatcacgatggtggcgttgctgggccggcggatcggggtggctgcggcagctgccgcgttcatcgccctcgtggcgttcggatccgcctcatcctcgcccaagtccttcgtgaagtccaccgtctccgcccacgacgtcgtcatcttctccaagtcatactgcccgtacggtccacctcgtccttaacccttacatgcgcatcttgtcttgttccctgcggagatctagattctaagcgggattctgggcacgattgctgtgatgtcgcgccaatctaactagtagctacagaaaatctggtttatagctgttagttgtcattgatttcatcctttcgcttgctgaaaattgtcttttctcgtggattttcaacgcatagggtctattattctgtaaggctgattgttcagggaaaaagtcctgcaagtttgacctgaattactggaggagctgatggtttgcttcgttttttttttttttgtccagctgtagaattccgttttctgtattacagaaatccacaacttggattggatcctataccaaattaagaaaagcccagcacagttctatcctagcaaccatgtgacagttattgtcctttatgtggtaaccagattgttgtctgctttgcatttcttggcacattctttgaaagaagccgtggttacttttactcttatt

SEQ ID NO: 153101 - DNA, 785 bp, Zea Mays
ctgttagatatccaaccgtacgtaaactagtcacaactcaggaccagtgcctcttcggtcaaaaatatccttgtacctgcatctcgacctcaccggcgtccggcggtggtatcacgatggtggcgttgctgggccggcggatcggggtggctgcggcagctgccgcgttcatcgccctcgtggcgttcggatccgcctcatcctcgcccaagtccttcgtgaagtccaccgtctccgcccacgacgtcgtcatcttctccaagtcatactgcccctacaggtactgcaaaagagcaaaggccgtgtttaaggagcttgagttgaagaaagagccatatgttgtggagcttgatcagcgagaggatggctcagagattcaggatgccttacttgagatagttggcaggcgtactgtccctcaagtttttgtccatggaaagcacctgggtggttctgacgatactgttgactcctacgaaagtggaaaactggctagacttctaaacatcggagtcaaggacgacctttgagtgacatgctacatcggtcagcctgttcgtttggtttcaatccgtaccggcttctactacttctatattgtttttgtctctatggattacagctacaacagtctaaatagctgattttaatccgaagcgaacagtccaaacagtctcttgttttgagttaccaagggattttttgtgtgactctgataaaagatatgtaactgaatgttttattatagtttataccatttgaaccgtacttttattgctcgccca

SEQ ID NO: 153102 - DNA, 787 bp, Zea Mays
ctgttagatatccaaccgtacgtaaactagtcacaactcaggaccagtgcctcttcggtcaaaaatatccttgtacctgcatctcgacctcaccggcgtccggcggtggtatcacgatggtggcgttgctgggccggcggatcggggtggctgcggcagctgccgcgttcatcgccctcgtggcgttcggatccgcctcatcctcgcccaagtccttcgtgaagtccaccgtctccgcccacgacgtcgtcatcttctccaagtcatactgcccagctacaggtactgcaaaagagcaaaggccgtgtttaaggagcttgagttgaagaaagagccatatgttgtggagcttgatcagcgagaggatggctcagagattcaggatgccttacttgagatagttggcaggcgtactgtccctcaagtttttgtccatggaaagcacctgggtggttctgacgatactgttgactcctacgaaagtggaaaactggctagacttctaaacatcggagtcaaggacgacctttgagtgacatgctacatcggtcagcctgttcgtttggtttcaatccgtaccggcttctactacttctatattgtttttgtctctatggattacagctacaacagtctaaatagctgattttaatccgaagcgaacagtccaaacagtctcttgttttgagttaccaagggattttttgtgtgactctgataaaagatatgtaactgaatgttttattatagtttataccatttgaaccgtacttttattgctcgccca

SEQ ID NO: 153103 - DNA, 783 bp, Zea Mays
ctgttagatatccaaccgtacgtaaactagtcacaactcaggaccagtgcctcttcggtcaaaaatatccttgtacctgcatctcgacctcaccggcgtccggcggtggtatcacgatggtggcgttgctgggccggcggatcggggtggctgcggcagctgccgcgttcatcgccctcgtggcgttcggatccgcctcatcctcgcccaagtccttcgtgaagtccaccgtctccgcccacgacgtcgtcatcttctccaagtcatactgcccgtactgcaaaagagcaaaggccgtgtttaaggagcttgagttgaagaaagagccatatgttgtggagcttgatcagcgagaggatggctcagagattcaggatgccttacttgagatagttggcaggcgtactgtccctcaagtttttgtccatggaaagcacctgggtggttctgacgatactgttgactcctacgaaagtggaaaactggctagacttctaaacatcggagtcaaggacgacctttgagtgacatgctacatcggtcagcctgttcgtttggtttcaatccgtaccggcttctactacttctatattgtttttgtctctatggattacagctacaacagtctaaatagctgattttaatccgaagcgaacagtccaaacagtctcttgttttgagttaccaagggattttttgtgtgactctgataaaagatatgtaactgaatgttttattatagtttataccatttgaaccgtacttttattgctcgcccatcaa

SEQ ID NO: 153104 - DNA, 664 bp, Zea Mays
aatgtaaaacaaaagtgcagaccagtgccggaggctccacatgagtgaggtcttggcctcttgggaagggataagctgaggcaggccttcctcccgggataaactgaggcaagccttgcttccgcaaatgcggagagactgcttcaaacccaagacctggtactgcaaaagagcaaaggccgtgtttaaggagcttgagttgaagaaagagccatatgttgtggagcttgatcagcgagaggatggctcagagattcaggatgccttacttgagatagttggcaggcgtactgtccctcaagtttttgtccatggaaagcacctgggtggttctgacgatactgttgactcctacgaaagtggaaaactggctagacttctaaacatcggagtcaaggacgacctttgagtgacatgctacatcggtcagcctgttcgtttggtttcaatccgtaccggcttctactacttctatattgtttttgtctctatggattacagctacaacagtctaaatagctgattttaatccgaagcgaacagtccaaacagtctcttgttttgagttaccaagggattttttgtgtgactctgataaaagatatgtaactgaatgttttattatagtttataccatttgaaccgtacttttattgctcgccca

SEQ ID NO: 153105 - DNA, 713 bp, Zea Mays
agtttaacacagacttttgtggggagtacataactataagaaaatgcactgataagtgatatggtcagatactcatttgacttgagagcagcgaatgtacattgataacatctgaaccatgagtgtatggagatgacgccttatggttgtagttcctgtaccaaagcacatactcttatcagcactttatttgtctggagagctacaggtactgcaaaagagcaaaggccgtgtttaaggagcttgagttgaagaaagagccatatgttgtggagcttgatcagcgagaggatggctcagagattcaggatgccttacttgagatagttggcaggcgtactgtccctcaagtttttgtccatggaaagcacctgggtggttctgacgatactgttgactcctacgaaagtggaaaactggctagacttctaaacatcggagtcaaggacgacctttgagtgacatgctacatcggtcagcctgttcgtttggtttcaatccgtaccggcttctactacttctatattgtttttgtctctatggattacagctacaacagtctaaatagctgattttaatccgaagcgaacagtccaaacagtctcttgttttgagttaccaagggattttttgtgtgactctgataaaagatatgtaactgaatgttttattatagtttataccatttgaaccgtacttttattgctcgccca

SEQ ID NO: 153106 - DNA, 571 bp, Zea Mays
tgtgatgatgccacaattgaacaatgtgctccctttatcatcatgcagaggatggctcagagattcaggatgccttacttgagatagttggcaggcgtactgtccctcaagtttttgtccatggaaagcacctgggtggttctgacggtaccctttttctgtacacaaatcagataaaacttaagctttgtaacatccttcgaatgctcacacctactatcttttcacatttacttgaaaaaaaactgcagatactgttgactcctacgaaagtggaaaactggctagacttctaaacatcggagtcaaggacgacctttgagtgacatgctacatcggtcagcctgttcgtttggtttcaatccgtaccggcttctactacttctatattgtttttgtctctatggattacagctacaacagtctaaatagctgattttaatccgaagcgaacagtccaaacagtctcttgttttgagttaccaagggattttttgtgtgactctgataaaagatatgtaactgaatgttttattatagtttataccatttgaaccgtacttttattgct

SEQ ID NO: 153107 - DNA, 1543 bp, Zea Mays
tcgaatgaaccctagccgccgctgcacagctaatctgtgagcctcgtctactgatagtcctgtcctgtttcactctcgccagccaaagacgaccacgccctccgtgctccagccattccccatgatttcgccgacgaatctcctcccggcgcggaagatcacccctgtctcaaatggcggcgcagcgacggcgagcccctcttctccctcggtggccgcacggccacggcgactcccttcaggcctccaatctgtgactggtagagggaaggtttccttggcagccatcactctagatgattaccttccaatgcgaagcactgaagtgaagaaccggacatcaacagatgacatcacaaggctgagactaatcacagcagttaaaaccccctatttgccagatgggaggttcgatctggaagcatatgattctctcataaacatgcagatagagggtggtgccgaaggcgtaatagttggaggaacaacaggagagggtcacctcatgagctgggacgaacatatcatgctcattgggcacacagtgaactgctttggctctagaatcaaagtgataggcaacacaggaagcaactcaaccagagaagccgtccacgcaacagaacagggatttgctgttggcatgcatgcggctctccacatcaatccttactacgggaagacctcagctgaaggaatgatctctcatttcgaggctgtcctcccgatgggtccgaccatcatctacaacgtgccatccaggagcgcccaggacatcccccctgaagttattctagcgatttctggctacacaaacatggcgggtgtcaaggaatgtgttgggcacgagagggttaagcactacgctgacaaaggcataacaatttggagcggtaacgacgacgagtgccacgattctaagtggaaacatggcgctactggggtcatttccgttaccagcaaccttgttcccgggctcatgcacagcctcatgtacaaaggcgagaacgccacgctgaacgagaagctgtcgcccctgatgaaatggctgttctgccagccaaatcctattgccctcaacactgctctggctcagctcggcgtggcaaggcctgtcttcagactgccgtacgttccgctccctcttgaaaagagggccgagttcgtccggattgttgagtcaattggacgggaaaatttcgtggggcagaaggaggcccaggttctagatgatgacgatttcgtgttgatcagtaggtactaggaaaatgagtttgccagtctatgtatcttggcgaataaactagtagtttgtaccttgcgttcagacttcgttctgttgttcatcagtcgttgggttcgtctatctatttattaattgccctactttggccgcattgtataatgtatatgtatcgcgtttatagttttttacgtgaattgacctaggtacaaggaaaaaatgatcactttttttggctatccctgatgcatgacagaacatggtgacaattatatataaaaaagagtgtagaagtttagc

SEQ ID NO: 153108 - DNA, 1541 bp, Zea Mays
tcgaatgaaccctagccgccgctgcacagctaatctgtgagcctcgtctactgatagtcctgtcctgtttcactctcgccagccaaagacgaccacgccctccgtgctccagccattccccatgatttcgccgacgaatctcctcccggcgcggaagatcacccctgtctcaaatggcggcgcagcgacggcgagcccctcttctccctcggtggccgcacggccacggcgactcccttcaggcctccaatctgactggtagagggaaggtttccttggcagccatcactctagatgattaccttccaatgcgaagcactgaagtgaagaaccggacatcaacagatgacatcacaaggctgagactaatcacagcagttaaaaccccctatttgccagatgggaggttcgatctggaagcatatgattctctcataaacatgcagatagagggtggtgccgaaggcgtaatagttggaggaacaacaggagagggtcacctcatgagctgggacgaacatatcatgctcattgggcacacagtgaactgctttggctctagaatcaaagtgataggcaacacaggaagcaactcaaccagagaagccgtccacgcaacagaacagggatttgctgttggcatgcatgcggctctccacatcaatccttactacgggaagacctcagctgaaggaatgatctctcatttcgaggctgtcctcccgatgggtccgaccatcatctacaacgtgccatccaggagcgcccaggacatcccccctgaagttattctagcgatttctggctacacaaacatggcgggtgtcaaggaatgtgttgggcacgagagggttaagcactacgctgacaaaggcataacaatttggagcggtaacgacgacgagtgccacgattctaagtggaaacatggcgctactggggtcatttccgttaccagcaaccttgttcccgggctcatgcacagcctcatgtacaaaggcgagaacgccacgctgaacgagaagctgtcgcccctgatgaaatggctgttctgccagccaaatcctattgccctcaacactgctctggctcagctcggcgtggcaaggcctgtcttcagactgccgtacgttccgctccctcttgaaaagagggccgagttcgtccggattgttgagtcaattggacgggaaaatttcgtggggcagaaggaggcccaggttctagatgatgacgatttcgtgttgatcagtaggtactaggaaaatgagtttgccagtctatgtatcttggcgaataaactagtagtttgtaccttgcgttcagacttcgttctgttgttcatcagtcgttgggttcgtctatctatttattaattgccctactttggccgcattgtataatgtatatgtatcgcgtttatagttttttacgtgaattgacctaggtacaaggaaaaaatgatcactttttttggctatccctgatgcatgacagaacatggtgacaattatatataaaaaagagtgtagaagtttagc

SEQ ID NO: 153109 - DNA, 333 bp, Zea Mays
atggcgattggcgcgcgcgcctcggccctgaccacgcgcggagtgaatgccttgaaactgttcgccaaaatcggggagagactgcctcccttggatttccacgcccgcccgaccccttgctgcggcgagccggcgacttctgggcttgctggcacaccgcgcgtccagtgtccagcgcaggcaggcatgccgtgccatcgtccggcgactgcgtgcgcgcagcgatccagcgtctgccgcagtgccgcctcgccttcgcatggattttgcggatccaccgatgacctatcaatggcggccggccacagttctcgcaattggttcgtgatctga

SEQ ID NO: 153110 - DNA, 1903 bp, Zea Mays
cattcaacttctctacatgagtctatatatatactatcgctcatagtattctctcattcttcccctaagcacgcacacagcagcacaggtctacatcaacatcggtagctcacattccctcccacggctgcactagcgccttcaattctatcgtatagcttcattcttcactggtgaacaaggcagtagctatagcagatcgatctccatggacatggacatgagctcagcttatccccaccattggctctccttctccctctccaacaactaccaccatggcctactcgaagccttctctaactcctccggtactcctcttggagacgagcagggcgcagtggaggagtccccgaggacggtggaggacttcctcggcggcgtcggtggcgccggcgccccgccgcagccggcggcggctgcagatcaggatcaccagcttgtgtgcggcgagctgggcagcatcacagccaggttcttgcgccactacccggcggcgccagctgggacgacggtggagaaccccggcgcggtgaccgtggcggccatgtcgtcgacggacgtggccggggcggagtccgaccaggcgaggcggcccgccgagacgttcggccagcgcacatccatctaccgtggcgtcaccaggcaccggtggacggggagatatgaggcgcacctgtgggacaacagctgccgccgggagggccaaagccgcaaaggacggcaagtctacctaggaggctatgacaaggaggagaaggcggctagagcttacgacctcgccgcgctcaagtactgggggcctacaaccacgaccaacttcccggtgtccaactacgagaaggagctggaggagatgaagtccatgacgcggcaggagttcatcgcgtcgttgcgcaggaagagcagcggcttctcacgaggcgcctccatctacagaggagtcacaaggcatcatcagcacggccggtggcaggcgaggatcggcagggtggccggaaacaaggacctgtacttgggcactttcagtactcaggaagaggcggcggaggcgtacgacatcgctgcgatcaagttccgcgggctcaacgccgtcaccaactttgacatgagccgctacgacgtggagagcatcctcagcagcgacctccccgtcgggggcggagctagcggtcgcgcccccgccaagttcccgttggactcgctgcagccggggagcgctgccgccatgatgctcgccggggctgctgccgcttcgcaggccaccatgccgccgtccgagaaggactactggtctctgctcgccctgcactaccagcagcagcaggagcaggagcggcagttcccggcttctgcttacgaggcttacggctccggcggcgtgaacgtggacttcacgatgggcaccagtagcggcaacaacaacaacaacaccggcagcggcgtcatgtggggcgccaccactggtgcagtagtagtgggacagcaagacagcagcggcaagcagggcaacggctatgccagcaacattccttatgctgctgctgctatggtttctggatctgctggctacgagggctccaccggcgacaatggaacctgggttactacgactaccagcagcaacaccggcacggctccccactactacaactatctcttcgggatggagtaggtgcatgcgctgacaagctagctagctgaaatcaggtggtaggcctaggaagaagctaggactgacatggaactgatcacaattttggctgctacatataccatgcatgccccatgtatggatgggggtgcgtgtgcgtccttctgcttgctattcacgacacttgctgacttactgtggcagagccgcagagggctggtgtaccatcagcatttctaaattctaatt

SEQ ID NO: 153111 - DNA, 1943 bp, Zea Mays
cattcaacttctctacatgagtctatatatatactatcgctcatagtattctctcattcttcccctaagcacgcacacagcagcacaggtctacatcaacatcggtagctcacattccctcccacggctgcactagcgccttcaattctatcgtatagcttcattcttcactggtgaacaaggcagtagctatagcagatcgatctccatggacatggacatgagctcagcttatccccaccattggctctccttctccctctccaacaactaccaccatggcctactcgaagccttctctaactcctccggtactcctcttggagacgagcagggcgcagtggaggagtccccgaggacggtggaggacttcctcggcggcgtcggtggcgccggcgccccgccgcagccggcggcggctgcagatcaggatcaccagcttgtgtgcggcgagctgggcagcatcacagccaggttcttgcgccactacccggcggcgccagctgggacgacggtggagaaccccggcgcggtgaccgtggcggccatgtcgtcgacggacgtggccggggcggagtccgaccaggcgaggcggcccgccgagacgttcggccagcgcacatccatctaccgtggcgtcaccaggcaccggtggacggggagatatgaggcgcacctgtgggacaacagctgccgccgggagggccaaagccgcaaaggacggcaagtctacctaggaggctatgacaaggaggagaaggcggctagagcttacgacctcgccgcgctcaagtactgggggcctacaaccacgaccaacttcccggtgtccaactacgagaaggagctggaggagatgaagtccatgacgcggcaggagttcatcgcgtcgttgcgcaggaagagcagcggcttctcacgaggcgcctccatctacagaggagtcacaaggcatcatcagcacggccggtggcaggcgaggatcggcagggtggccggaaacaaggacctgtacttgggcactttcagtactcaggaagaggcggcggaggcgtacgacatcgctgcgatcaagttccgcgggctcaacgccgtcaccaactttgacatgagccgctacgacgtggagagcatcctcagcagcgacctccccgtcgggggcggagctagcggtcgcgcccccgccaagttcccgttggactcgctgcagccggggagcgctgccgccatgatgctcgccggggctgctgccgcttcgcaggccaccatgccgccgtccgagaaggactactggtctctgctcgccctgcactaccagcagcagcaggagcaggagcggcagttcccggcttctgcttacgaggcttacggctccggcggcgtgaacgtggacttcacgatgggcaccagtagcggcaacaacaacaacaacaccggcagcggcgtcatgtggggcgccaccactggtgcagtagtagtgggacagcaagacagcagcggcaagcagggcaacggctatgccagcaacattccttatgctgctgctgctatggtttctggatctgctggctacgagggctccaccggcgacaatggaacctgggttactacgactaccagcagcaacaccggcacggctccccactactacaactatctcttcgggatggagtaggtgcatgcgctgacaagctagctagctgaaatcaggtggtaggcctaggaagaagctaggactgacatggaactgatcacaattttggctgctacatataccatgcatgccccatgtatggatgggggtgcgtgtgcgtccttctgcttgctattcacgacacttgctgacttactgtggcagagccgcagagggctggtgtaccatcagcatttctaaattctaattatcaagctcgtttcaagctaattaagcaaaaaaaaaaaaa

SEQ ID NO: 153112 - DNA, 1281 bp, Zea Mays
ctcccagcacaaatcctgccagcggctgaagaagtggtcagccgagagtgagatgagatctccactctaatcgctcaggccttaaacccctcctgtcctctaatttctctcccgctagctgtctagttcatgacctgccgcccatgtctctatttatagcactctacgtgccacacgccgcgcgctatcggtgtgcttatgcgtaagttcgtgcatcggcgcacgtatggctcctaacacctccttgctcgtgctcctcttcctcctgcccgccgccgccaccgccgccgcaccggctaccggcaacaccgccttcaacgtgacggagatcctcggccggtacccggagttcaagctcttcaacctcctgctctccaagacccgcgtcgcgcgcgaggtcaacagccggagccccgtgaccgtgctcgtcccgggcaactccgcggtggactggctcctccgccgcagcgccaggctgccgcgcgccgcgctcgtggagctcgtctccgtgcacgtcgcgctggactacatcgacgcggccaagctggcgtcgctgccccggggccagcccaccgtggtcaccacgctgttccagaccacggggagcgcgctcggccgcacggggttcctgaacgtcaccgccgcggggcgtggcggcgcgagcgccgtcttcgtctcggccgcgccggggtcgctggtcagcgccacgttgaagagggccgtgaccgcgaagccgtacaacatatcggtgctccagatcagcaacctcgtcgtgccgccgggcatcatcaccaggccgcggctgccgctgccgccgtcgccgtcgccgcccgcgccaaggatgacgcagatggcggtcgcgccgagccctccgccgacgttaacttcgccgcggcaatctccgtcgacgttgttaccggcctcagtgggcgataccgcggaggctccggacactgctgaagcgccggtgccgtcgcatggccatgtggcgcaagtggcgagttggtggactgctgcggccgtggggatggcaatggcatgcatactgatcgggtacttgtaggtcactgcatttgcaaattgcaactggttcggtcgggtgggaattggatcgtcccttgcattttataagagtagttcattttgcgcgccatatatatagttaactcttatggctcattttcttttgtcgatctttccaaaaaaaaatcgtttccttgtattattacgcttcttggaattataaagagtagaagaaatacaaaggccagaaaaaaacaa

SEQ ID NO: 153113 - DNA, 2240 bp, Zea Mays
atgcccgccgtggacaccctcgaactcgttaccggctcccccaccgacattgcggccccatcagtgatctgtcccccaccaacccttccaccacgccgcggcggtataataacccggcttcctccccaattccgccactcctcagctcaggcgagcagcggagccgagcagagcctcgagatcccgcccaccatttgccctccggccgacgcggagccgatcgcttcaccggcagcgaggacgatgggttccgtcgcggaggactccaccgcggcagcggcagcagcggcgtcggtagtgttccgctccaagctacccgacatcgagatcccgcggaacctctcgctgcaggcctactgcttcgagcggctccccgaggtgtcctcccgcccctgcctcatcgacgggcagacgggcgccgtgcacacctacgccgaggtggaccgcctgtcgcgctccgcggcggcggcgctgcgcgggctcggggtgggcaggggcgacgtggtgatggcgctgctccgcaactgccccgagttcgccttggtcttcctcggcgcggcgcggctgggcgccgccaccaccacggccaacccgttctacaccccgcacgagatccaccgccaggcggccgcggcgggggccagggtggtcgtcaccgaggcctgcgccgtcgacaaggtgcgcgggttcgccgccgagcgcggcgtgccggtggtcgccgtcgacggcgccttcgacgggtgcctggagctgcgggccctggtggacgccgccgagccgctcgccgccgacgaggaggtcggccccgacgacgtcgtcgcgctgccctactcctccggcaccaccgggatgcccaagggcgtcatgctcacgcatcgcagcctcgtcaccagcgtcgcgcagcaggtggacggcgagaacccgaacctgtacttcagcaaggatgacgtggtgctgtgcgtgctgccgctgttccacatctactcgctgaactcggtgctcctggcggggctgcgcgccggctgcgccatcgtgatcatgcgcaagttcgagatcggcgcgctggtggagctggtgcgcgcgcacggcgtgaccgtggcgcccttcgtgccgcccatcgtggtggagatcgccaagagcccccgcgtgggcgccgccgacctcgcctccatccgcatggtcatgtccggcgccgcgcccatggggaaggacctccaggacgcgttcatggccaagatccccaacgccgtgctcggccaggggtacgggatgaccgaggcggggcccgtgctggccatgtgcctggccttcgccaaggagccgttcgaggtcaagtccggctcctgtggcaccgtcgtcaggaacgcggagctgaagatcgtcgacccagacaccagcgcgtcgctgggacggaaccagccaggcgagatatgcatccgcggcgaacaaatcatgaaaggttatctgaatgatccagaggcgacaaagaacaccattgataaggacggatggctgcacaccggggacattggttatgtggacgatgacgacgagatcttcatcgttgacaggctgaaggagataatcaaatacaagggcttccaagtacctcctgcggagcttgaagcccttctcatcacacatcctgaaatcaaggatgccgctgttgtctcgatgaaagatgaagtcgccggcgaagtcccggtggcattcattatacgcagtgaaggctctgagatcagtgagaacgagatcaagcagtttgttgcaaaggaggtcgtgttctacaagaggatcaacagagttttcttcacggattctatcccgaagaatccctccggcaagattcttaggaaggacctgagagcgcggcttgccgcgggcatcccaagcagtgacaacacacagtccaaaagttgatacgtactttcgtactattcttttctagctgtgccaaaaatcatgctgtgctctattcatgagatggcaatggtatacacaaaacgccaagcggtcgttatcgattcttctagatgggcaagggtaaggtatacttcgtttgtgtccgacatattatgtatttgtatcatgtatagatacgttttgttgacaacaagtgctaattataatgtataccatgtttgggaacctattgttcttgttaataaagagtcgacccctgtcctgaattgcgtttgctctctgttacataaatccatatccgctttggtaaaataaag

SEQ ID NO: 153114 - DNA, 1362 bp, Zea Mays
cacgatccggcccgagatccgtgccgatgtggacggcgagaacccgaacctgtacttcagcaaggatgacgtggtgctgtgcgtgctgccgctgttccacatctactcgctgaactcggtgctcctggcggggctgcgcgccggctgcgccatcgtgatcatgcgcaagttcgagatcggcgcgctggtggagctggtgcgcgcgcacggcgtgaccgtggcgcccttcgtgccgcccatcgtggtggagatcgccaagagcccccgcgtgggcgccgccgacctcgcctccatccgcatggtcatgtccggcgccgcgcccatggggaaggacctccaggacgcgttcatggccaagatccccaacgccgtgctcggccaggggtacgggatgaccgaggcggggcccgtgctggccatgtgcctggccttcgccaaggagccgttcgaggtcaagtccggctcctgtggcaccgtcgtcaggaacgcggagctgaagatcgtcgacccagacaccagcgcgtcgctgggacggaaccagccaggcgagatatgcatccgcggcgaacaaatcatgaaaggttatctgaatgatccagaggcgacaaagaacaccattgataaggacggatggctgcacaccggggacattggttatgtggacgatgacgacgagatcttcatcgttgacaggctgaaggagataatcaaatacaagggcttccaagtacctcctgcggagcttgaagcccttctcatcacacatcctgaaatcaaggatgccgctgttgtctcgatgaaagatgaagtcgccggcgaagtcccggtggcattcattatacgcagtgaaggctctgagatcagtgagaacgagatcaagcagtttgttgcaaaggaggtcgtgttctacaagaggatcaacagagttttcttcacggattctatcccgaagaatccctccggcaagattcttaggaaggacctgagagcgcggcttgccgcgggcatcccaagcagtgacaacacacagtccaaaagttgatacgtactttcgtactattcttttctagctgtgccaaaaatcatgctgtgctctattcatgagatggcaatggtatacacaaaacgccaagcggtcgttatcgattcttctagatgggcaagggtaaggtatacttcgtttgtgtccgacatattatgtatttgtatcatgtatagatacgttttgttgacaacaagtgctaattataatgtataccatgtttgggaacctattgttcttgttaataaagagtcgacccctgtcctgaattgcgtttgctctctgttacataaatccatatccgctttggtaaaataaag

SEQ ID NO: 153115 - DNA, 1033 bp, Zea Mays
ctgttgaaacgggaatgtgatgtttacgaataacctctgttcgtttccaccaggggtacgggatgaccgaggcggggcccgtgctggccatgtgcctggccttcgccaaggagccgttcgaggtcaagtccggctcctgtggcaccgtcgtcaggaacgcggagctgaagatcgtcgacccagacaccagcgcgtcgctgggacggaaccagccaggcgagatatgcatccgcggcgaacaaatcatgaaaggttatctgaatgatccagaggcgacaaagaacaccattgataaggacggatggctgcacaccggggacattggttatgtggacgatgacgacgagatcttcatcgttgacaggctgaaggagataatcaaatacaagggcttccaagtacctcctgcggagcttgaagcccttctcatcacacatcctgaaatcaaggatgccgctgttgtctcgatgaaagatgaagtcgccggcgaagtcccggtggcattcattatacgcagtgaaggctctgagatcagtgagaacgagatcaagcagtttgttgcaaaggaggtcgtgttctacaagaggatcaacagagttttcttcacggattctatcccgaagaatccctccggcaagattcttaggaaggacctgagagcgcggcttgccgcgggcatcccaagcagtgacaacacacagtccaaaagttgatacgtactttcgtactattcttttctagctgtgccaaaaatcatgctgtgctctattcatgagatggcaatggtatacacaaaacgccaagcggtcgttatcgattcttctagatgggcaagggtaaggtatacttcgtttgtgtccgacatattatgtatttgtatcatgtatagatacgttttgttgacaacaagtgctaattataatgtataccatgtttgggaacctattgttcttgttaataaagagtcgacccctgtcctgaattgcgtttgctctctgttacataaatccatatccgctttggtaaaataaag

SEQ ID NO: 153116 - DNA, 3743 bp, Zea Mays
gttcgtggttcatcgaactaggaatgcaagtgggcaagtgccaaggaactgagcccatccaggttcatgatcaactggtactttccttgctctctctcagggaaaaaaaaccacagtccgccagtccatccatagaccatagtccaaaaggcaaggtgaggttgcaccttgaggtcgttctatcaataatcaatccatccatagaggcaaggtgaggttgccaagggggcaagtgcgtggtcacaaaagtgagacaccggatgagcttgctgtgtccattgcactcttcacctgaagtgcgagctgtgaaccttggtgacctcccaagaggcacctcaccccctcaaggcagggatcacatgtattaaatttcaaaaaaaaactctattattggtgccaactgtgctgaattttcttcatcacgtaaacaaagcacattctgaaagcaaaatgttcatgtgagggctaggactcggcaagtttagaaattttcaagcaaaagacgcgagagaaggccaaattcttttggcctatatgaagttgaggtgtctgaaacgagagatctcattctcatcactcatcaggctgcctctgtcaatgggtcaccactcatccaagcccccccatccttgcaagttgtcggtccagccagccacatagagacatataatcacatagataaggcgaattccacggtcccatccaattgcttgcttcagacttcagaggctagaggcaatagttctctctcccggtcccggggaaagccatggaggaagagcagagcccaaggctgggccgggatccggcgaccgagcccagtcctgcgccggaatggccggattcggacagcaagaacgacgacagtgcgaacgacccggaggaccctgccggcggcagcggcagcggcagcggcaacggcatcagctccttggagcagccgctgctcaagcggagcaccaccctgacggccagccacctggccatcgtcggcgccaaggtctcccacatcgagagcctcgactacgagatcatcgagaacgacctgttcaagcacgactggcggagccgctccaacgtcgaggtgcttcagtacatcttcctcaagtgggccatggcgttcctcgtcggcctcctcaccggcgtcatcgcgtccctcatcaacctcgccatcgagaacatctccggcctcaagatgctccagatggtcaacctcgtccgcgggaagcgctactgggcgggcttcctctacttcgccggcgtcaacttcgcgctcaccttcgtcgccgcggtgctctgcgtcgtcttcgcccccaccgccgctggccctggcatccccgagatcaaggcttatctcaacggcgtcgacacgcccaacatgttcggcgcgccgcagctcatcgtcaagatcatcggcagcatcggcgccgtgtcgtcggggatggatctcggcaaggagggcccgctggtgcacatcggcgcgtgcctggccaacctgctcagccagggcggcgagggccggtggcgcctgcgctggcggtggctgcgctacttcaacaacgaccgcgaccgccgggacctgatcacgtgcggcgcgtcgtccggggtgtgcgcggcgttccgcgcgcccgtcggcggcgtgctgttcgcgctggaggaggtggcgacgtggtggcgcagcgcgctgctttggcgcaccttcttcagcacggccaccgtcgtggtggtgctgcgcggcttcatcgaggtgtgcagggacgggcgctgcggcatgttcggcgagggcgggctcatcctcttcgacgtcagtgacgtcaccgtccgctaccacgtcggcgacctcctccccgtcacgctcgtcggcgtcctcggcggggtcctgggggcactctacaaccacgtcctccaccaggtgctccggctgtacaacctgatcaacgccaagggccggctggcgaagctggcgctcgccctcgcggtgtccgtgttcacgtcggcggggctgtacctcctgccgttcgctgtgccgtgcacgccgtgcgacccggcgttcggcgacgcgtgcccgacggtgggcaagtccggcaacttcaagcagttcaactgccccaccggctactacaacgacctggcgtcgctgctccacgccaccaacgtggacgccacgcgcaacatcttctccacgggcaccgccggcgaattcaggctcgactcgctgctcatcttcttcggcatctactgcgtgctggggctcttcaccttcggcatcgctgtgccgtcggggctcttcctgcccatcatcctcatgggctccgcctacggccgcatcctggcgctcgtgctcgcgcgcttcgtgaggatcgaccacggcctctacgccgtgctcggcgccgccgcgctcatgtcgggctccatgaggatgaccgtctcgctgtgcgtcatcttcctcgagctcaccaacaacctcctcctgctccccatcaccatgttcgtgctgctcatcgccaagacggtgggcgacgctttcaaccccagcatctacgagatcatcctcgacctcaagggcctgccgttccttgagcccaagccggaaacgtggatgaaggacctcgcagtcggcgagctcgcggccgccaagccgcgggtcgtcacgctgcaggtgatcgagaaggtgtccaccgtcgtggaggtgctgaggtccacgccgcacaacgggttccccgtgctggactggccgcggccaggcgtatcggagctccacgggctggtgctccggtcccacctgatggccgtgctcaagaagcggtggttcctgacggacaagaggaggacggaggaatgggaggcccgtgagaggttctcgtcgacggagctcgcggagaagtccgggagtatcgacgaggtggcggtgcagctgacgccggaggagctggacatgtacattgacctccacccgttcaccaacaccacgccgtacaccgtcgtggagaccatgtcggtggccaaggccgtggtgctcttccgcacctgcgcgctccggcacatgcttatcatcccaaagttccaagggcctgagatagctccaatcgtggggatcctaacgaggcaggacctgagggcacacaacatccttggtgcattccctcatttggcaaacaaaaggaaagtacactaagctctgtcgcgccatttttggtaaatttaatgttctctgcatccaaagaaaaaggtccagctgttttgtttccccatgttctatttttctctgtaagtagattgaggatttaatttcttgtctcatgagattgtgtgaataatagcttcccatgtaaaatcacatcttcaccttcacttttctgctcgcacttcgatccttgtaatcaaaaggggcaaacaaaacaactacgaaatatacattttttgggagatgtttcgaattgctattacttgattattttgcttcgttctacattataagagataacagtgtttagtcgcaatttgctaaaggttcaggcacagactcacagtcaatttggtgggtcaaccagaaagacaactcttgagttaacgacacagcgcatagaccagcaaattccaaaagattttcgaattcatccaactgtaaatactgaactttactggtttaaagcggacccctgcctttgttttggccttttgcgtaagccagcatggattgtggaccgggaccgctaggcgctagggatgcaataatgcttgtt

SEQ ID NO: 153117 - DNA, 1732 bp, Zea Mays
caagccgaaccgagaccgagagagcttccccacacccacagcggggtgcagcggatcgcgccaaattcgaccgaacaatcgcgcgccactcggccccgccactatgagcttctcgtccatgagcaaacagcaggtgctggacgccggtgacggggagggggaagaggtcgtggagcttatcccgggcctgccggaagaggtggccgagaagtgcctcctccacctgcccttcctctaccaccgtctcttccgcaccgtctcctccacctggaaccgcttcctcaccgactcccctgccaagccgctgctgttcactcccgcggagggggcgggggctggcgcggggagcgcagccatgggctcgttgtccttatcgctgcccttcctcttcgccttcgcgtttgaccctgtgtcgcgacgcctccagtgccaggcgctcgaccctttctcgaggaggtggctcctgctcccgccggtgcccggcggcgccgcggccgggtcgtttgcggtggtggggctcccccgccgcggcgagatctacgtgattgggggcgtcgaggagggcagcgacaaggcggtgacgagcgtggccgtgtacagcgccgcgcggaacggatgggaggaggcggcggcgatgcggacgccccgcgggtacatggcggctggggaggtgggagggcgggtggtggtggccggggaggacggcgaggccgaggtgttcgacccggatgccgggcggtggtcgccggctgcgccgcgccggggcgcggcggtggcgtggtacgacgcggcggcggcgggtgggaagctgtacgtgacggaggggtgggcgtggccgttcgagcgcgcgccgcgcggcgccgtgtacgactccgccacggactcgtggtgcgagatggcgcgcgggatgcgggaggggtggacgggctcttgcgccgtcgccggcggccggatgtacatcgtggcggagtacggggagtggcggctgaagcagtacgacgaggcccgggacgagtggcggatggtggccggcagcggggtgccccccgaggtgcgccggccacacgtcgtcgccggggagatcggggaggtcgccggtgggaggcgaaggatatacgttgttggcgccgggctggacgtcgccgtgggcactgtttcggcctcagacaccgccgcggcacccggcgtccacggcgtcgaggaggaagtggtggagtgggaggtggtcaagggccccaccgagttcgtcgggctcgcgccctgcaacgcacaggtcctctacgcatgacccagccttcgggtagaacaaacatctgcatcgccgaaccaagacgtttcggcccactccgcgcacccacacgggtccacaagccccgagccacatcacgtcgcccctggctggtccacatgtcagtgaaacttgactgctccagcgtctcgccggcaggagcgagtgccctgctgccagactgcccagatggattttccggatgcgcaagcacatgtattcacagtcacaggcagcacagtctcgccacgtgggaccagtctgtgagcgagcagtgatgggacttggaagaggctgagaagtcttttccacctcggggaaaggacaaaggaggaagcgagcaggcaggacggattatttttctttccgttttgatttgaggtttttcttgtacctgtgtatatattatatattggtattgtattttgagaaacaatggagaag

SEQ ID NO: 153118 - DNA, 1330 bp, Zea Mays
atgggctatataacacatgaggcacgtctacacttcattcatcacttccacctcttcataccacaaacagtaatggatccctttattaagtccaatgttctcttgcacatggctcaagacatggaagctgatgacgacgaacttgagttagcgaccatccgctatgtaaggagccgccgtgaacgcaaccagcatcgacatggtggttccgttccgggccgagttcggatcccccgaaaccattttggcggtaacttgaggatcttagccgactatttcttagatcatccagtttacacagatgcccagttccaaaggaggtttcgcatgcattgccatgtgttcgagcgcctcatggggacagtccaacaggttgacccgtactttgtatagcgtccaaactgcgctggaaagatgggactctccgctttgcagaaggttgttgcagccacctacatcctcgcctatggtgttcctgcagatgttgtggatgagtaagtgtgcattggagagtccaccacacatgaggctcttcaacacttatataaggccatcgtagttgcgtttgatccgtactacctgcgcccgcctactcccgatgatatcacgcaactactccaagtcggtgagtcaagtggctttctagggatgcttggaagcatcgattgcatgcattgggagtggcgaaactgccctaccgcgtggaagggtatgttcgcatggtgagggaagcaccccaccatgatcctaaaagcggttgcatcttatgacctttggatatggcacgtgtacttttagcatgcccggtagtagtaatgacatcaacgtttttgcattgttcacacatattctaaaggcatctcaatgcggaggatcctccgattgctttcatgataaacgatcacaactacgacatggggtattaccttacggacgatatttaccctgattggatggcttttgtgaaaacagtctgccacccttttgagcctcgcacaaagcactttgcaatgaagcaagagttcgctagaaaggatatagaaagggcgtttggtgtgcttcagtctaggtgggcagtgatatgtggtcttgcttacgattggtcgccagccaacattcatgacatcatgatagcatggatcatacttcataatatggtagttgaggacgaagggcatatggcctgaatgctaccttcgacaacacgggtgaatctattgatccaactcacggatctctcgaggaacacaacgctttcatcctcaaacaacacgagaagcttaaagatccaaagaagtatcaggaactgcaaaagcacctgatcgagcat

SEQ ID NO: 153119 - DNA, 124 bp, Zea Mays
taccgtttaggctattcggttctgggccttttagttcttatcttccactcttccagcaatccagaattccagattccagcccaaggcccaagttgaacacacaaaacgtgaaaaccctaaatcc

SEQ ID NO: 153120 - DNA, 2010 bp, Zea Mays
gcgagaacgtcgcggcgctcatcgacaacacacgcccccgacgccgataactatcacgattcacgacactcgcagcgataccactccacaatcacacattcgacaccgccaatccatggccttggcgacgccgctgcggctccgccgccacctcctcctccccgccgggccgtccccggcgacccaccgcgccctgtcgctgcggcggggccgcctcctccccgcaagcctgtccgccgcagcgggcgggcggccgacggtgctggtgacggagacgctgggttccgcggggctggacctgctgcgcgccttcgccaacgtggactgctcctacgagctgacggcggaggagctccgcgccaaggtgtcgctcgtggacgcgctggtggtgcgcagcgggacgcaggtgacgcgggaggtgttcgaggccgcgcgcggcaggctccgtgtcgtcgggcgcgccggggtcggcatcgacaatgtggacctccaggcggccaccgaggccggatgcctagtcgtcaacgcgcccaccgccaacaccgtcgccgccgccgagcacgccgtcgcgctcctcgccgccgtggcgcgcaatatcgcgccggccgacgcgtcgctcaaggccggcaaatggcagcggggcaagtatgttggcgttaccttggtgggcaagacgctagctgtcatgggtttcggcaaggtcggtccagaggtggctcgacgcgcgagaggactcgggatggacgtcgtcgcccacgacccatacgctgccgccgatcgagcccgggcggtcggcgtcgacctggtgtcgtttgacgaggccatctccacggcggacttcatatcgctgcacatgcctctgaccccgtcgacggcgaagcttttcaacgacgagactttcgcgaggatgaggaagggcgtcaggatcatcaacgtttcgcggggcggagtcgtcgacgaggaagcgttgctgagggcacttgacaacggaacagtttcccaggctgcgctcgatgtatttactgaggagccaccgccaagagacagcaagctagtgcagcatgagaatgtcactgtcacaccacaccttggggctagcacaatagaagcgcaggaaggtgtagccctcgaaattgcagaggctgttatcggtgcactgcgaggagacctggctgccacggctgtcaacgccccgatggtccctgccgaggttctatccgagttatctccatacgttgtccttgcggagaagctgggccggctggtggtgcagctggtggccgttggcagcgggatcaaaggcgtcagggtggtctactcgtccgccagagaccctgacgacctggacacgagactcctccgcgccatggtcaccaagggcatcgtggagccgatctcgagcgccttcgtcaacatcgtcaacgcggactacgtcgcgaagcagcgaggcctcaggatcgtggaggagagggtcttcctcgacggcccgcccgaggtcccgctcgactccatccaggtccatctcgccaacgtggagtccaagttcgccggagccctgtccgacgcgggccacatctgcgtggagggcaaggtcagggacggcggcgcgtcgcacctcacgctcgtcgggtccttgagcgtcgacgttagccttgagggcaacctgatactgtgcggccagctcgaccacccgggcatcattgggagagtggggtcgatcctgggaaagatgaacgtgaacgtgagctttatgagcgtcagtaggactgctcccgggaagcaggcgataatggccattggagtcgacgaggagcctgggaaggaagctctcaaattgatcggtgacacgccgtctgttgaggagtttgtctttcttaagctatagaggctgaggaagtaggttaggggacccaaaattacatttgtacgtgctatagtagcgtgagattgatgttgttgttgccatgattttagtagctagcacggggtactttatgctttgtgttcatg

SEQ ID NO: 153121 - DNA, 2006 bp, Zea Mays
gcgagaacgtcgcggcgctcatcgacaacacacgcccccgacgccgataactatcacgattcacgacactcgcagcgataccactccacaatcacacattcgacaccgccaatccatggccttggcgacgccgctgcggctccgccgccacctcctcctccccgccgggccgtccccggcgacccaccgcgccctgtcgctgcggcggggccgcctcctccccgcaagcctgtccgccgcagcgggcgggcggccgacggtgctggtgacggagacgctgggttccgcggggctggacctgctgcgcgccttcgccaacgtggactgctcctacgagctgacggcggaggagctccgcgccaaggtgtcgctcgtggacgcgctggtggtgcgcagcgggacgcaggtgacgcgggaggtgttcgaggccgcgcgcggcaggctccgtgtcgtcgggcgcgccggggtcggcatcgacaatgtggacctccaggcggccaccgaggccggatgcctagtcgtcaacgcgcccaccgccaacaccgtcgccgccgccgagcacgccgtcgcgctcctcgccgccgtggcgcgcaatatcgcgccggccgacgcgtcgctcaaggcaaatggcagcggggcaagtatgttggcgttaccttggtgggcaagacgctagctgtcatgggtttcggcaaggtcggtccagaggtggctcgacgcgcgagaggactcgggatggacgtcgtcgcccacgacccatacgctgccgccgatcgagcccgggcggtcggcgtcgacctggtgtcgtttgacgaggccatctccacggcggacttcatatcgctgcacatgcctctgaccccgtcgacggcgaagcttttcaacgacgagactttcgcgaggatgaggaagggcgtcaggatcatcaacgtttcgcggggcggagtcgtcgacgaggaagcgttgctgagggcacttgacaacggaacagtttcccaggctgcgctcgatgtatttactgaggagccaccgccaagagacagcaagctagtgcagcatgagaatgtcactgtcacaccacaccttggggctagcacaatagaagcgcaggaaggtgtagccctcgaaattgcagaggctgttatcggtgcactgcgaggagacctggctgccacggctgtcaacgccccgatggtccctgccgaggttctatccgagttatctccatacgttgtccttgcggagaagctgggccggctggtggtgcagctggtggccgttggcagcgggatcaaaggcgtcagggtggtctactcgtccgccagagaccctgacgacctggacacgagactcctccgcgccatggtcaccaagggcatcgtggagccgatctcgagcgccttcgtcaacatcgtcaacgcggactacgtcgcgaagcagcgaggcctcaggatcgtggaggagagggtcttcctcgacggcccgcccgaggtcccgctcgactccatccaggtccatctcgccaacgtggagtccaagttcgccggagccctgtccgacgcgggccacatctgcgtggagggcaaggtcagggacggcggcgcgtcgcacctcacgctcgtcgggtccttgagcgtcgacgttagccttgagggcaacctgatactgtgcggccagctcgaccacccgggcatcattgggagagtggggtcgatcctgggaaagatgaacgtgaacgtgagctttatgagcgtcagtaggactgctcccgggaagcaggcgataatggccattggagtcgacgaggagcctgggaaggaagctctcaaattgatcggtgacacgccgtctgttgaggagtttgtctttcttaagctatagaggctgaggaagtaggttaggggacccaaaattacatttgtacgtgctatagtagcgtgagattgatgttgttgttgccatgattttagtagctagcacggggtactttatgctttgtgttcatg

SEQ ID NO: 153122 - DNA, 1605 bp, Zea Mays
gctgcgctgcctccctccactactacgccagccactctgccttccctcccccaccaccacaagaaccgcttcaccattgccgcgtccagctgagcctcctcttagccgcgtccagccaggagaaggcgggcgcgcacacctgctgcttggtgaccacgttcgatggagctgcacaagtactggggcgtggggggccggcggtgcggcagctgcgagggggccccggcggcggtgcactgccgcacgtgcgttggtggatccttcctctgcacgacgtgcgacgcccggcccgcgcacgcgcgcctgggccacgagcgcgtgtggatgtgcgaggtctgcgagctggcccccgccgccgtcacgtgcaaggccgacgccgccgtgctctgcgccgcctgcgactccgacatccacgacgccaacccgctggcccggcgccacgcgcgggtccccgtcgcccccatcggctccgaggccgccgccgcggccgtggaggccatgctgttcgggaccggcgaggcggccgcttccgaggccgacgagcagcacgcggcggccgagcacgcgcacgcgcacgcgcacgcgctgaacctcaacgtggaggccaaggacatgaagctggactacctcttctctgaactggatccctacctcagcgtcgagatcccgcgcttccagcacgctgacagcgtcgtccccaacggcgccggcgctgccgtcgagctggacttcacgtgcggcatcggcgttaagcactcctcctacagctcctacacggccacctccctcgctcatagcggctcctcgtcggaggttggcgtggtgccagaggccttcggcggcagcggcagcggcggcgggagctttgagctcgacttcacaaggcccaagcctcaggcctacatgccatacaccgggactccccagagccacagcgtaggaccccaaccaagctcccaactttcgggacgcacatccgttagacactccatgtgctcgtcctgacgtatcgttgcggactcgatcggttccgtatgcaggtgccatccgcggacgtggaggtggtgccggagcggggagacttggctgcggtgaggccggtgccgctgatgggggagagcagggaggcgcgcctgatgcggtaccgtgagaaaaggaagaacaggcgcttcgagaagaccatccggtacgcgtcccggaaggcctacgccgagacgcggccgcgaatcaagggccggtttgccaagcgtgctgaccacgacggggacgccgacgccgacgacgctgaggccgaggccgaggccgccgtgccgatgtcatatgtgctcgacttcggctacggcgtcgtaccgagcttttgatgtgcccgggcccaacacgcgcgcacatggccggccgcgcgcttgaaccggcatggcacgccgctgcgcgcgcgccttgtacttgtatcgatcgatgtatagggaggagtagtaatcccatgtactctctttttgagcaagctcttgcgtaaactagtgatgtataatttgtactactagtaagaaactgcagtagccgctgctaatggatcaccaatctataccgcgcacaagttgtcttaaa

SEQ ID NO: 153123 - DNA, 1610 bp, Zea Mays
gctgcgctgcctccctccactactacgccagccactctgccttccctcccccaccaccacaagaaccgcttcaccattgccgcgtccagctgagcctcctcttagccgcgtccagccaggagaaggcgggcgcgcacacctgctgcttggtgaccacgttcgatggagctgcacaagtactggggcgtggggggccggcggtgcggcagctgcgagggggccccggcggcggtgcactgccgcacgtgcgttggtggatccttcctctgcacgacgtgcgacgcccggcccgcgcacgcgcgcctgggccacgagcgcgtgtggatgtgcgaggtctgcgagctggcccccgccgccgtcacgtgcaaggccgacgccgccgtgctctgcgccgcctgcgactccgacatccacgacgccaacccgctggcccggcgccacgcgcgggtccccgtcgcccccatcggctccgaggccgccgccgcggccgtggaggccatgctgttcgggaccggcgaggcggccgcttccgaggccgacgagcagcacgcggcggccgagcacgcgcacgcgcacgcgcacgcgctgaacctcaacgtggaggccaaggacatgaagctggactacctcttctctgaactggatccctacctcagcgtcgagatcccgcgcttccagcacgctgacagcgtcgtccccaacggcgccggcgctgccgtcgagctggacttcacgtgcggcatcggcgttaagcactcctcctacagctcctacacggccacctccctcgctcatagcggctcctcgtcggaggttggcgtggtgccagaggccttcggcggcagcggcagcggcggcgggagctttgagctcgacttcacaaggcccaagcctcaggcctacatgccatacaccgggactccccagagccacagcgtgccatccgcggacgtggaggtggtgccggagcggggagacttggctgcggtgaggccggtgccgctgatgggggagagcagggaggcgcgcctgatgcggtaccgtgagaaaaggaagaacaggcgcttcgagaagaccatccggtacgcgtcccggaaggcctacgccgagacgcggccgcgaatcaagggccggtttgccaagcgtgctgaccacgacggggacgccgacgccgacgacgctgaggccgaggccgaggccgccgtgccgatgtcatatgtgctcgacttcggctacggcgtcgtaccgagcttttgatgtgcccgggcccaacacgcgcgcacatggccggccgcgcgcttgaaccggcatggcacgccgctgcgcgcgcgccttgtacttgtatcgatcgatgtatagggaggagtagtaatcccatgtactctctttttgagcaagctcttgcgtaaactagtgatgtataatttgtactactagtaagaaactgcagtagccgctgctaatggatcaccaatctataccgcgcacaagttgtcttaaacttgctattctgagtgcgggattttattgcactgttttcaaaaatacacatcagtttttttaaaaaaatttaaaatcgtgtatctgaagttatatgcagaaaaaaaaaa

SEQ ID NO: 153124 - DNA, 3171 bp, Zea Mays
ttatcgagaaagatgggggacgactacctagctgaacctgaggatgaggttgcacaatcaatgtggcccgagaatataggagacaaacaccagaggcagttcagaatggaaaagtttaggaaggaccaagatgctttcaaggatgtgaagtttgatgaaaagcctgttcatgtggactttcagcggcttatggaaatggcaaattctgagaaaggtgtttctcagatgcaatactttatgaagcactgggaatataagagagccaatgctgctcgacttctggaggaagagcttggccttctctgccaacaaaggaaagagattgaacaaaataagcaacaaatcttggaggagcaacgttttcaggatgagagttattacgctgtaaaacggcatgtaccaatactggatgaagtttatgaagatgagtggaagcgacctagcaaaaagaatgacgatctttctcgtagtagagagactaatatagatgcagatcatgacagtgtttcctactggaaagagcgggcaactaagttagaggaaaaacttgaggaaagcatccaaagggagcgttcgttagttgagaaattggaggaaaatataaagaatctgcagtcgcacacaccagctgaggaattctctggaatgctaaaacgcgctgattacttcttgcacttggttctacaaagcgctcctattgttattgctcatcaggatgcagatttacgataccgtttcatatttaaccactatccaacacttgctgatgaggatgttattggtaagacagactatgagatattgtcaggtgagggtatagaagagatgaatagtgtcaagcgagaagttatggcctcggggatagcaactaaaagagaatttgcgtttaatacaccaatgtttggggcaaagacatttgtgacatacattgagccagttttcagcaaaggtggggaagcgattggtgtgaattatgttgcaatggacataacagatcaggtcaaaagaagagagaaaatggcagacataagggtgagggaagctgtccaaaatgccaaggaaactgaacttagcagatctcttcacataacagaggaaacaatgcgagcaaaacaaatgctagctaccatgtcccatgagatcagatctcctctttcgggtgttcttagcatggctgaaattcttgcaactaccaaactggataaagaacagcatcagttgctagaagttatgttatcctctggagaccttgtattgcagctgatcaatgacatccttgatctttccaaagtggagtcaggggctatgaaactagaatctactacatttagaccaagggaagtagttaaacatgtactgcaaactgctgcggcttctctgaagaaggaattgacccttgtagggtgcataggtgatgatgttccagtggaggttattggtgatgtgctaaggattcggcaaattctgaccaacttgatcagcaatgcagtcaagtttacacatgaagggaaagttggaataaatcttcaggtcgtacatgagaagcaactaggatgcaaaatagagattgggaaaattcataagcgagcgtattctgggacagcaattactgctgcagaaactgctgctgtctctacaagaaactgtgataaagatactttgcattgctcgaaacatgaagatgcttttcagaatggtgttccaacatgcgaaaatttcaaggaggatattgagggagaggaagtcgtttggcttcgctgtgatgtatatgacactggaataggaataccagagaagtccttaccgttgctgttcaagaggtatatgcaagctagtgctgatcatgcgaggaagtatggtgggacagggcttggccttgcaatctgcaagcagttggtggagttgatgggtggtactctgacagtggtcagcaaagagaatgaaggatcaacatttacatttgtgctgccttgtaaaatccctgtaaaagatgagcatagtgatgatcccgacgaaatgcacagttctcagaatgattctgcaaatagtgatatagaaggttctttctttttcaagccacaaatgagagcttctcttctgtctcctggagtttcaataatgaacaacacgaagttaatcggcgccaagcttatgtgctatgatccgcctgacatatcacatgaccgcaaattgttctcaaatggtttctcatcaacagagcataactttacaaatacctgtactgctcaccaaccgaatggtgctagtgttaggagcacagctgaagaacctgataatgcaatggtccttgagctgaatagtcaagctgaacgggtttccagttcccgaggagacttggtatctgtttcaggtgctgctgcgtgcaaagttcttgaagaacaatcactccacaagaaaccaaagtgttctccaatcggcaataaagcaaagatcctgctagttgaagataacaaggtcaacataatagtagcaaaatcaatgctggagcagctgggccatggaatagatatcgtaaataatgggatgcaagcaatccgtgcagtacaacagcatcaatatgatcttattctgatggatgttcacatgccagaaatggatggcctacaagccactaaacatatccgttattttgagaataccggctgttgggacgtttctgtaaagcctgaagacaatcggatgataactggctcagttatttcatcagattgtgcacatgcaaaaaagcaagggcaaagagttccaataattgcgatgacagcaaattcattcgcagagagttccgaggaatgccttgctgcaggcatggattcctacatatctaagcctgtgaactttcagaatataaaggaatgcctgcagcggtatttgatgtctcagtgactatccaattattgtaaagtagaagggtaatctgtaggttaggaaagttttgtgaaatcacctgagtccgtttcttgtaaatcaatgcgtaataaatataatgtatcctgtcttgtcgaccattttacctttactactgggagacagagacagctctattttgaagagcgtcctgaatctgacctaaccccaccagtaaggtcaagagctgactcaaaactttaggatcctcatttgtttatgagacatattcctgtacatagttgt

SEQ ID NO: 153125 - DNA, 721 bp, Zea Mays
taagcgaggctactcatcacccgtaactttggaagtgtcagtatgtgtagtgttgttgtgtgtaccttaaatttctttctacatcttcctgtggtggcatagaatgtgcgcggtaagctacattccactaatggtcagattgatgcataaatcatcatgtgcgtggtgattcaggataaactaattgcctaattgggttttgggtgctgccaatttatctgcataagtttttgtattgttgtcatacatctccataagtttttctaatctacacaagcttttctaactggttttaatagagaataagattaacatcttgtgaaggattgttgggatatataatagtgcaatggatctctctgtaattactgattaactagacgtataactcagatttacaagcaggcagaaaatgatgcaaaatctaagtgtccttttggatctcaccaattgtcagcatgtctgcttatagcgaagttctagagaaggaaaagttggaatgaaactcaaattttggtggatgcataagtgtggagacttgaattcatatatacttagttaggctcaacgttagcgcaaacagttgatgaccaagtttttccattagtattttagtttggatttaaagtacacttatgtatgagttatttgacaatgcttatttatgatatattgaatgatacttatctatattatattaattataatgttattaaatata

SEQ ID NO: 153126 - DNA, 109 bp, Zea Mays
gccctactggaaatccgtcaggctctaagtagagatggcaatgggtacccacgacctaatacccgatgggtatttacttcattagagtatgtatgtgggctaaatattc

SEQ ID NO: 153127 - DNA, 528 bp, Zea Mays
aagcaaatttcccaaacgcaaaaccgcatcctctcatcagcttccttccacattcgtctcgagatctcgccccgtcgccatggacgcgatcgacagcgtggtggatcccctccgcgacttcgccaaggacagcgtccgcctcgtcaagcgctgccacaagcccgaccgcaaggagttcaccaaggtggcggcgcggacggcgatcgggttcgtcgtcatgggcttcgtcggcttcttcgttaagctcatcttcatccccatcaacaacatcatcgtcggttccggctaggcttacaggagtacagggcgactagcatgggagtagtgcaatacttttgggagcaatagataacgaggatcctggtctttcgaatagtattgttaatgaaatttttcgttcggttgtgtttctgatgtaatcgttgtactgagtagaccttctggataccggattctgagtagacctttgaatccttgatggatcagccaatctcggaaaggaagtttcgtattttgttgttccgttaa

SEQ ID NO: 153128 - DNA, 676 bp, Zea Mays
ccatagaaccggaaatcaagactcttacaagtcaccagcataactttgagaagaacctactgaagtgtagctggtcgccagataaccgcaaggtcactgctgggagcgcagaccgcatggtctacatctgggacacaacatcaaggcgcatcctgtacaagcttcccgggcacaatggttctgtcaatgagactgctttccatcccacagagccgatcattggatcttgcggcagcgacaagcagatctatcttggggaactttaagtgactatcagttccttttcagctagatgttcttgtgacactttgatgaggagaggaggcactgacaccctgttcctttgcctgagaattggaacactcagtttggctgatctggatttgacatttgttgattgtcttgttaagcccagttggtcttgccgttcacaaactgccccatactttgcaccttgtggctttccgatattaagctagatggcatgcttgaaggtcactggttgcatgtactgtgtctagaaccttactaaaaacttgcatacggtagtactgtatgctatattgttatcttttttaatcgtatgaaactagttggagaagtgataccgccttcttcgcatggtttgaaatatccctctcaaaattctccttgtcgctatgttctgatcctgtgc

SEQ ID NO: 153129 - DNA, 1143 bp, Zea Mays
caactgcgcgtgacagggtcacggcggctgggcgcgagacgcggccctgcgcccacgccagccgccagccgccgcccatttccctttcgtccccgcaagtgcttcttatcctctcgcagtctcgctctcgagcctcgcgtcgcagccctcgtcgcataggcgtgcatccagcatcctctcccggataaatacctgggggcaaacagcccggctctcctcgctttcccttcacgcacgcacgcacgcacgctcgccaagagcaaaggcggccggacggggggcggcgggggcggggcagagcggagcggagcggtttgtctccacgcctgacgtctccctcttccccgctgtccgcagcttcggtgcttccttctcccgttcaggaccattgtgtttactgaagcagcttagttcatgttcctgtcatgggtatggaacatttcatcagttctgcaaacctttcagcagaaggtttcacatcgtatggaaatgaagcagcagaggaaatgaaaaaactacgaggtctaagattggaaacactgatggaaacctgccaaaacacagaaagcagagatgtagcgatcaggtgtccaataccatgcaaaagcagcaggcggtatagggaacatgacttgagagctgcacaagatctttctgaattcattgtgagtaaggcttcacctccatactttatgggatctccaccacttcgtgcaaccaatcctcttgctcatgatgcacaattctgtgcgtggaaggtgcacagcgtagatcagtcactaggaattcctataccagccaagagttacaatgctcgctactatgcaaggaaagaatcttttaggaaggcttgaagctactttttgtcaagttcatgatcgtcagtgatgtcatagtcgtatctccgcttctctcagcaaggctaacttgtttacttgtatatgagtggctgtcccttttgaaggtgtgagttgtcttatttgagtgtttagagtatctcatccctagtgttgtaaatatatttctttgctcattttttgttagtggagctagttttggtgaataagtactggtataaagtataaacagtgttgctgagtaatgaggtaatctgaatgaaaatgtttgccattcttcagtttc

SEQ ID NO: 153130 - DNA, 1117 bp, Zea Mays
gtcacggcggctgggcgcgagacgcggccctgcgcccacgccagccgccagccgccgcccatttccctttcgtccccgcaagtgcttcttatcctctcgcagtctcgctctcgagcctcgcgtcgcagccctcgtcgcataggcgtgcatccagcatcctctcccggataaatacctgggggcaaacagcccggctctcctcgctttcccttcacgcacgcacgcacgcacgctcgccaagagcaaaggcggccggacggggggcggcgggggcggggcagagcggagcggagcggtttgtctccacgcctgacgtctccctcttccccgctgtccgcagcttcggtgcttccttctcccgttcaggaccattgtgtttactgaagcagcttagttcatgttcctgtcatgggtatggaacatttcatcagttctgcaaacctttcagcagaaggtttcacatcgtatggaaatgaagcagcagaggaaatgaaaaaactacgaggtctaagattggaaacactgatggaaacctgccaaaacacagaaagcagagatgtagcgatcaggtgtccaataccatgcaaaagcagcaggcggtatagggaacatgacttgagagctgcacaagatctttctgaattcattgcttcacctccatactttatgggatctccaccacttcgtgcaaccaatcctcttgctcatgatgcacaattctgtgcgtggaaggtgcacagcgtagatcagtcactaggaattcctataccagccaagagttacaatgctcgctactatgcaaggaaagaatcttttaggaaggcttgaagctactttttgtcaagttcatgatcgtcagtgatgtcatagtcgtatctccgcttctctcagcaaggctaacttgtttacttgtatatgagtggctgtcccttttgaaggtgtgagttgtcttatttgagtgtttagagtatctcatccctagtgttgtaaatatatttctttgctcattttttgttagtggagctagttttggtgaataagtactggtataaagtataaacagtgttgctgagtaatgaggtaatctgaatgaaaatgtttgccattcttcagtttc

SEQ ID NO: 153131 - DNA, 1032 bp, Zea Mays
tcctctcgcagtctcgctctcgagcctcgcgtcgcagccctcgtcgcataggcgtgcatccagcatcctctcccggataaatacctgggggcaaacagcccggctctcctcgctttcccttcacgcacgcacgcacgcacgctcgccaagagcaaaggcggccggacggggggcggcgggggcggggcagagcggagcggagcggtttgtctccacgcctgacgtctccctcttccccgctgtccgcagcttcggtgcttccttctcccgttcaggaccattgtgtttactgaagcagcttagttcatgttcctgtcatgggtatggaacatttcatcagttctgcaaacctttcagcaggtttcacatcgtatggaaatgaagcagcagaggaaatgaaaaaactacgaggtctaagattggaaacactgatggaaacctgccaaaacacagaaagcagagatgtagcgatcaggtgtccaataccatgcaaaagcagcaggcggtatagggaacatgacttgagagctgcacaagatctttctgaattcattgtgagtaaggcttcacctccatactttatgggatctccaccacttcgtgcaaccaatcctcttgctcatgatgcacaattctgtgcgtggaaggtgcacagcgtagatcagtcactaggaattcctataccagccaagagttacaatgctcgctactatgcaaggaaagaatcttttaggaaggcttgaagctactttttgtcaagttcatgatcgtcagtgatgtcatagtcgtatctccgcttctctcagcaaggctaacttgtttacttgtatatgagtggctgtcccttttgaaggtgtgagttgtcttatttgagtgtttagagtatctcatccctagtgttgtaaatatatttctttgctcattttttgttagtggagctagttttggtgaataagtactggtataaagtataaacagtgttgctgagtaatgaggtaatctgaatgaaaatgtttgccattcttcagtttc

SEQ ID NO: 153132 - DNA, 742 bp, Zea Mays
agttgatggttgtggtgtcacataatatctgaccaacagttgatcacaattactttaccctttgtacagaggtcacagcatttgacgacacagttaaattccagtttgtatagattgcaggagcagggcagtatcatgtttggcgcttaccggatatggacgccgcctgcgacatgactgggttcggcgtgcggacgttcccgtaccaccaactgcctccatccatggtgtcctgctcgggcgcgagaagatccttcgttaatgaaatcacaattaagtgtagcgaactctacctatcttctttgtataagcacagatgcattttcagttgcgagagttgccgctgttgctgcaatcacattgctcgtggttggcagtgctcaccgagtcggcgaaaccgaagccgggtgagaagacgccgctccctccgggatcgcttgatccaccgcaccccggactgctacctccggcggcggcgcgggcgtcctcgccgctctcccggatgaacgcctccagctccagctccgacgcgcacttcttcattccggcctgccagtggaccaactctcgacgcagaccgcacctgtgcctcccgtcccggcgtggtggtgtcgtctcgtctcgccggccggcgtgcggacctgcttttgaagggcggggcgcggacagaaacccggtggtacgtggaaaggttggttggggtgctgggggataaaccgcctcgtcaaatggatggtgacgc

SEQ ID NO: 153133 - DNA, 2791 bp, Zea Mays
gactaccaccagacagacctcgagtgctccattgctcccgtcccccttctctcccgcctcccccccttctctcgtcgctagacctgccgcccggccggcctatatgttctctccttttgagagaagggaggaatagccgcaagcctgcagcgcaaaggaaagcacagcagcggcggtttgcaaaagagcccgccacctctgtctctctgccctgcgctgcgccgtccacaccactcatccggcaacctctctctgtctccactcgtacagtattaatttcctcgcgcctcctccgtcctccattttttttgttgggtgccgtgcgagctccaagtacccctgtctccctcccgtcttgcgggcttgcctttgcctgttccatttccggctcctccagttggtagtgtcgtttcaatgcgagacgccgtccttcacgagcttgattgcccttgaaagcgaagttggtgttggtgtcgttgccggtgaggaggaagaggggatatatggctcccacggaagaggcagcaggggaggacgagcggctgctgaaggatcttctcgcttcttcgtcagataaggaaggagaggatgaagagagtacaaagacacagtccgatgaatctactaggggggattgtgataacggcgggtccgtagccgccttatcgagtgaagatgtcaatgataggcatggtagtgacagcaacagccaatgtgctgaatctgatggtgcttgcagtcaagtgcctggaacaggctccaagagcagcaacgatgagtgcggtgctgaagtgcctcaaaccggatccaagagcagtaatgatgaagatgacgggtgtgctgatgaaatgccaggagccctctccaagagcagtagcaatgacagcagtgagtgcgctgaccggagctctccgcgagctgtcctagatatctcagtatctggcagcatggactcggatgacagtgtttcagtcgagcagtcagcagaatcaaaccaaaatgtgcagtggaggaacctgatcagcagtctaatactcagaagaaagaagtccatgggcagcgcagtgacgttccctcagagacccaagagcaaagggcttagagggtacttggagaggatgaggagtggtaagaaccaaatggactgcagcgccattgctcctgagatcctccctcagatcgggaaatggaggccatcatggcggagctttgactacaatgagctttgtgctgcaactgacagttttggttcagagaaaatgattgggaagggagggcatgcagaggtatacaaaggacagcttgctgatggacaatttgtggcagtgaagagattaacaaaaggcggtaacaaagaggacagagttagcgatttcttatctgagcttggaataatagcccatgttaaccacccaaacgcagcacagctcctggggtttagcgtggaagggggtctgcacttggttcttcagttctcacctcatggaagccttgcttctgttctacatgctgatcaggtacaaaggagcccctgaagtggaaagtcaggttcaaaattgcacttggaattgctgaagggctgctttatctacatgaaggctgccatcgccgcataattcacagagacatcaaggcatctaatatccttctaactgaagactaccaacctcagatatcagattttgggcttgcaaagtggctccctgacaaattgacccatcatgttgtgtatcccattgaaggcacattcgggtatatggccccagaatacttcatgcatgggatcataaatgagaagaccgatgtgttcgcatatggagttctacttcttgaactagttaccgggcggaaagcggtggactcatccagacagagcctagtgatatgggtacaatttagaaaactactacgcacactttactatatatatgaactcaaatcattccatttggtttgattgtgatattgttaagagaattttgatcatccagtagcaggagagaatgaaaataaaataaaaaagatgaacatcataattacatgcttctgaaaccctggaattcacaaattgttgatcatctatgaaggcaaaaccgctgcttgatgcgaacaacatccaagagctggtggatccttcccttggtaacgagtatgaccctgaagagatggtgtacacactagcagtggcatccttgtgcatccaccacagctcaacctcgaggcctagtatgaaatcggtaggtggatctttcctgctaatcaaagtgcaaatgaggaaattgacccttgagttttttttgttgttgctgcaggtagtctgtttcttgaagggtgaccgggagtcacttgagctggtgagaaggcctaaaatcgtgaagcccctgatgtttgactcgggcgattcagaagattacacgcgctcgagctacctcagcgatctcaaccggcacaagcagctcgcgctggagcagtgaacatcgaattgagtttgaacagattcactgtaattttgtacatcatttacgctgtacccatgcacactgtgatcctcccaccttccacataggttttaaaaattgtatggattgatgtgggggggtcagctatcattcactacatggttgctgatctatgctgtaactttgcccagagtttcagcgcatgttacggccctgcgatcatctgtatcatccggactgtccgattgtaatgtcaggtgatgcagccactagcgaccagtctgctatactgttcgtgaaatggtgattgttagcatggttgtgtcctgatc

SEQ ID NO: 153134 - DNA, 2562 bp, Zea Mays
gactaccaccagacagacctcgagtgctccattgctcccgtcccccttctctcccgcctcccccccttctctcgtcgctagacctgccgcccggccggcctatatgttctctccttttgagagaagggaggaatagccgcaagcctgcagcgcaaaggaaagcacagcagcggcggtttgcaaaagagcccgccacctctgtctctctgccctgcgctgcgccgtccacaccactcatccggcaacctctctctgtctccactcgtacagtattaatttcctcgcgcctcctccgtcctccattttttttgttgggtgccgtgcgagctccaagtacccctgtctccctcccgtcttgcgggcttgcctttgcctgttccatttccggctcctccagttggtagtgtcgtttcaatgcgagacgccgtccttcacgagcttgattgcccttgaaagcgaagttggtgttggtgtcgttgccggtgaggaggaagaggggatatatggctcccacggaagaggcagcaggggaggacgagcggctgctgaaggatcttctcgcttcttcgtcagataaggaaggagaggatgaagagagtacaaagacacagtccgatgaatctactaggggggattgtgataacggcgggtccgtagccgccttatcgagtgaagatgtcaatgataggcatggtagtgacagcaacagccaatgtgctgaatctgatggtgcttgcagtcaagtgcctggaacaggctccaagagcagcaacgatgagtgcggtgctgaagtgcctcaaaccggatccaagagcagtaatgatgaagatgacgggtgtgctgatgaaatgccaggagccctctccaagagcagtagcaatgacagcagtgagtgcgctgaccggagctctccgcgagctgtcctagatatctcagtatctggcagcatggactcggatgacagtgtttcagtcgagcagtcagcagaatcaaaccaaaatgtgcagtggaggaacctgatcagcagtctaatactcagaagaaagaagtccatgggcagcgcagtgacgttccctcagagacccaagagcaaagggcttagagggtacttggagaggatgaggagtggtaagaaccaaatggactgcagcgccattgctcctgagatcctccctcagatcgggaaatggaggccatcatggcggagctttgactacaatgagctttgtgctgcaactgacagttttggttcagagaaaatgattgggaagggagggcatgcagaggtatacaaaggacagcttgctgatggacaatttgtggcagtgaagagattaacaaaaggcggtaacaaagaggacagagttagcgatttcttatctgagcttggaataatagcccatgttaaccacccaaacgcagcacagctcctggggtttagcgtggaagggggtctgcacttggttcttcagttctcacctcatggaagccttgcttctgttctacatgctgatcaggtacaaaggagcccctgaagtggaaagtcaggttcaaaattgcacttggaattgctgaagggctgctttatctacatgaaggctgccatcgccgcataattcacagagacatcaaggcatctaatatccttctaactgaagactaccaacctcagatatcagattttgggcttgcaaagtggctccctgacaaattgacccatcatgttgtgtatcccattgaaggcacattcgggtatatggccccagaatacttcatgcatgggatcataaatgagaagaccgatgtgttcgcatatggagttctacttcttgaactagttaccgggcggaaagcggtggactcatccagacagagcctagtgatatgggcaaaaccgctgcttgatgcgaacaacatccaagagctggtggatccttcccttggtaacgagtatgaccctgaagagatggtgtacacactagcagtggcatccttgtgcatccaccacagctcaacctcgaggcctagtatgaaatcggtagtctgtttcttgaagggtgaccgggagtcacttgagctggtgagaaggcctaaaatcgtgaagcccctgatgtttgactcgggcgattcagaagattacacgcgctcgagctacctcagcgatctcaaccggcacaagcagctcgcgctggagcagtgaacatcgaattgagtttgaacagattcactgtaattttgtacatcatttacgctgtacccatgcacactgtgatcctcccaccttccacataggttttaaaaattgtatggattgatgtgggggggtcagctatcattcactacatggttgctgatctatgctgtaactttgcccagagtttcagcgcatgttacggccctgcgatcatctgtatcatccggactgtccgattgtaatgtcaggtgatgcagccactagcgaccagtctgctatactgttcgtgaaatggtgattgttagcatggttgtgtcctgatcatttccatggtttcatatatgtaatgtctcctagtattaaccctc

SEQ ID NO: 153135 - DNA, 2200 bp, Zea Mays
gttgggtgccgtgcgagctccaagtacccctgtctccctcccgtcttgcgggcttgcctttgcctgttccatttccggctcctccagttggtagtgtcgtttcaatgcgagacgccgtccttcacgagcttgattgcccttgaaagcgaagttggtgttggtgtcgttgccggtgaggaggaagaggggatatatggctcccacggaagaggcagcaggggaggacgagcggctgctgaaggatcttctcgcttcttcgtcagataaggaaggagaggatgaagagagtacaaagacacagtccgatgaatctactaggggggattgtgataacggcgggtccgtagccgccttatcgagtgaagatgtcaatgataggcatggtagtgacagcaacagccaatgtgctgaatctgatggtgcttgcagtcaagtgcctggaacaggctccaagagcagcaacgatgagtgcggtgctgaagtgcctcaaaccggatccaagagcagtaatgatgaagatgacgggtgtgctgatgaaatgccaggagccctctccaagagcagtagcaatgacagcagtgagtgcgctgaccggagctctccgcgagctgtcctagatatctcagtatctggcagcatggactcggatgacagtgtttcagtcgagcagtcagcagaatcaaaccaaaatgtgcagtggaggaacctgatcagcagtctaatactcagaagaaagaagtccatgggcagcgcagtgacgttccctcagagacccaagagcaaagggcttagagggtacttggagaggatgaggagtggtaagaaccaaatggactgcagcgccattgctcctgagatcctccctcagatcgggaaatggaggccatcatggcggagctttgactacaatgagctttgtgctgcaactgacagttttggttcagagaaaatgattgggaagggagggcatgcagaggtatacaaaggacagcttgctgatggacaatttgtggcagtgaagagattaacaaaaggcggtaacaaagaggacagagttagcgatttcttatctgagcttggaataatagcccatgttaaccacccaaacgcagcacagctcctggggtttagcgtggaagggggtctgcacttggttcttcagttctcacctcatggaagccttgcttctgttctacatggtacaaaggagcccctgaagtggaaagtcaggttcaaaattgcacttggaattgctgaagggctgctttatctacatgaaggctgccatcgccgcataattcacagagacatcaaggcatctaatatccttctaactgaagactaccaacctcagatatcagattttgggcttgcaaagtggctccctgacaaattgacccatcatgttgtgtatcccattgaaggcacattcgggtatatggccccagaatacttcatgcatgggatcataaatgagaagaccgatgtgttcgcatatggagttctacttcttgaactagttaccgggcggaaagcggtggactcatccagacagagcctagtgatatgggcaaaaccgctgcttgatgcgaacaacatccaagagctggtggatccttcccttggtaacgagtatgaccctgaagagatggtgtacacactagcagtggcatccttgtgcatccaccacagctcaacctcgaggcctagtatgaaatcggtagtctgtttcttgaagggtgaccgggagtcacttgagctggtgagaaggcctaaaatcgtgaagcccctgatgtttgactcgggcgattcagaagattacacgcgctcgagctacctcagcgatctcaaccggcacaagcagctcgcgctggagcagtgaacatcgaattgagtttgaacagattcactgtaattttgtacatcatttacgctgtacccatgcacactgtgatcctcccaccttccacataggttttaaaaattgtatggattgatgtgggggggtcagctatcattcactacatggttgctgatctatgctgtaactttgcccagagtttcagcgcatgttacggccctgcgatcatctgtatcatccggactgtccgattgtaatgtcaggtgatgcagccactagcgaccagtctgctatactgttcgtgaaatggtgattgttagcatggttgtgtcctgatca

SEQ ID NO: 153136 - DNA, 1673 bp, Zea Mays
gatcatagttcagctaattatttaaaaacaagcctgtcacagcccatgctatatttgcaggagaggatgaagagagtacaaagacacagtccgatgaatctactaggggggattgtgataacggcgggtccgtagccgccttatcgagtgaagatgtcaatgataggcatggtagtgacagcaacagccaatgtgctgaatctgatggtgcttgcagtcaagtgcctggaacaggctccaagagcagcaacgatgagtgcggtgctgaagtgcctcaaaccggatccaagagcagtaatgatgaagatgacgggtgtgctgatgaaatgccaggagccctctccaagagcagtagcaatgacagcagtgagtgcgctgaccggagctctccgcgagctgtcctagatatctcagtatctggcagcatggactcggatgacagtgtttcagtcgagcagtcagcagaatcaaaccaaaatgtgcagtggaggaacctgatcagcagtctaatactcagaagaaagaagtccatgggcagcgcagtgacgttccctcagagacccaagagcaaagggcttagagggtacttggagaggatgaggagtggtaagaaccaaatggactgcagcgccattgctcctgagatcctccctcagatcgggaaatggaggccatcatggcggagctttgactacaatgagctttgtgctgcaactgacagttttggttcagagaaaatgattgggaagggagggcatgcagaggtatacaaaggacagcttgctgatggacaatttgtggcagtgaagagattaacaaaaggcggtaacaaagaggacagagttagcgatttcttatctgagcttggaataatagcccatgttaaccacccaaacgcagcacagctcctggggtttagcgtggaagggggtctgcacttggttcttcagttctcacctcatggaagccttgcttctgttctacatggtacaaaggagcccctgaagtggaaagtcaggttcaaaattgcacttggaattgctgaagggctgctttatctacatgaaggctgccatcgccgcataattcacagagacatcaaggcatctaatatccttctaactgaagactaccaacctcagatatcagattttgggcttgcaaagtggctccctgacaaattgacccatcatgttgtgtatcccattgaaggcacattcgggtatatggccccagaatacttcatgcatgggatcataaatgagaagaccgatgtgttcgcatatggagttctacttcttgaactagttaccgggcggaaagcggtggactcatccagacagagcctagtgatatgggcaaaaccgctgcttgatgcgaacaacatccaagagctggtggatccttcccttggtaacgagtatgaccctgaagagatggtgtacacactagcagtggcatccttgtgcatccaccacagctcaacctcgaggcctagtatgaaatcggtagtctgtttcttgaagggtgaccgggagtcacttgagctggtgagaaggcctaaaatcgtgaagcccctgatgtttgactcgggcgattcagaagattacacgcgctcgagctacctcagcgatctcaaccggcacaagcagctcgcgctggagcagtgaaca

SEQ ID NO: 153137 - DNA, 2744 bp, Zea Mays
cttctcttgtacgtcacatgttgacaccaatgccccggaccaaacaccgttctgtaccattcaagcaacctcctcctcctctctctctcgtcatcccgccgtcccaacgtcaagtcttctcttcatccttctctctcacccatccacccctctcctctcgctctcgctctcccgcgcctgcaccgatcagttgccatatattcctccaccctccctatctcaagcacctaccccgggccttgcgtggcgatcgagttgccaccagacaactcggctcggctcgtcgtccaccgaccctcctcctcgctccaagcttccctctcccctcctcctccgtcagctggggagctagctagggagcggcgccggcggctgatcgagcggacagacagctgaacgagccggaaatggcggcggggcgcgcgccgtggctcgccgccggcctcgtggcggtgctgatggtggtggccgcgcgcgcgcggttcgtggtggagaagagcagcgtgcgggtgctggcgcccgagcacatccggggccaccacgacgccgccatcggcaacttcggcgtgcccgactacggcggcacgctcaccggcgtcgtcatctacccggacaccaagcccacggggtgcgacgacttcgacgccaagttcaaggccaagtcccgccgccccgtcatcctcctgctcgaccgcggagaatgctacttcgcgctcaaggcgtggaacgcgcagcgcgcgggcgcggcggcggtgctgatcgcggacagcgtggacgagcagctgctgacgatggacagcccggaggcgtcgccgggcacggagtacatcgacaagatcaacatcccgtcggcgctggtgaaccgcgcgttcggcgagtccctgaaaaagatggcgcagaaggtggccggcgcgggcagcgaggaggtggtggtgaagctggactggcgggagtcgatgcctcacccggacgagcgcgtggagtacgagctgtggaccaacagcaacgacgagtgcggcgcgcggtgcgacgagcagatggcgttcgtgcgcggcttccgcggccacgcgcagctcctggagcgcgccgggtacgcgcgcttcacgccgcactacatcacctggtactgccccgaggcgttccgggcgacgcagcagtgccggtcgcagtgcatcaaccgcggcaggtactgcgcgcccgacccggagggggacttcggcgccggctacgagggcaaggacgtggtggtggagaacctgcgccagctctgcgtgcaccgcgtcgccaacgaaacgggccgcccctgggcctggtgggactacgtcatggactacaagatccggtgctccatgaaggagaagaagtacaccaagacctgcgccgaggacgtcgtcaccgcgctcggtctggatctcaagaaggtgctggagtgcatgggcgaccccgaggccgacgccgacaacgccgtcctgtccaaggagcaggaagaccagatcggtagcggatcgcgaggcgacgtcaccatcctgccgaccctggtcatcaacaacgtccagtacagagggaaattggagcggacggcagtgctgaaggccgtgtgcgccggcttcaaggaagggaccgagccccgcgtctgcctcagccatgacatcgagacgaacgagtgcctgcacaggaacggcgggtgctggcgcgacgaggccaccaacgtgacggcctgccaggacacgtaccggggccgggtgtgcgagtgccccgtggtgaacggcgtccgctacgagggcgacggctacactgactgcaaagctattgggccgggcaggtgcgctctcaacaacggcgggtgctggtcggcgacgcgagggcaccagaccttctccgcctgcacggagaccgcgctgacagggtgccggtgcccgccggggttccatggcgacggccacaaatgtgaagacctggacgagtgcagggagaagctggcgtgcacgtgcccggactgccagtgcaagaacacgtggggcaactacgagtgcaagtgcaagggcaaccagctctacatccggggcgaggacgtctgcatagctaacagcatgtcgaagctcggctggttcatcaccatcgcggccgtggcgtgcgtcctcggcgtcggggtcgccggctacgtcttctacaagtacaggctcaggtcgtacatggactcggagatcatgtccatcatgtcccagtacatgccgctggacagccagaacaacgagaaccagcctctgcggcagcacgattcggaggctctgaggcactaaaggggccccaatgcaagatgcgcacatgatctcgacagatataatctgctccggtttcgacgacgatggtttgcttcgcttttgtatagcgcgtagaaaacaaaaaggaggacggtttgtactgtgccgaggacagagttgagctctagagagtttagacaggtaggcatttcgctcggctctcttgggagctagtagtcttgtgggtcaagagccgtttaaagcacacaaacagcatgtagaaaaaaaaggcgtatacgagctgctatacatgtacattgtacagtagacaaatcctactacggacaatttgttactgccatatttggtatgcgcgggagtttcaccttatgattggtaggagtaaggagtgtactatactgtactgcattaaaaattgtgtggaatgggactgcagccttgcaaagtaactgtagaaaataa

SEQ ID NO: 153138 - DNA, 1016 bp, Zea Mays
ctctctctctctctctctctctctctccgtccttccgcctcatcctgaaccgtaccattgacggcggcttagcagccgaccggacagcaagaatggccgaactaatcgagatgcccccgatccgtgtcgtcctcctccagacctggacgagtgcagggagaagctggcgtgcacgtgcccggactgccagtgcaagaacacgtggggcaactacgagtgcaagtgcaagggcaaccagctctacatccggggcgaggacgtctgcatagctaacagcatgtcgaagctcggctggttcatcaccatcgcggccgtggcgtgcgtcctcggcgtcggggtcgccggctacgtcttctacaagtacaggctcaggtcgtacatggactcggagatcatgtccatcatgtcccagtacatgccgctggacagccagaacaacgagaaccagcctctgcggcagcacgattcggaggctctgaggtaacttcaactctgctgctgcacccatgttgaggacgacgagcgaatggcaccggattctgatgcccagatgcgtgcatttcaggcactaaaggggccccaatgcaagatgcgcacatgatctcgacagatataatctgctccggtttcgacgacgatggtttgcttcgcttttgtatagcgcgtagaaaacaaaaaggaggacggtttgtactgtgccgaggacagagttgagctctagagagtttagacaggtaggcatttcgctcggctctcttgggagctagtagtcttgtgggtcaagagccgtttaaagcacacaaacagcatgtagaaaaaaaaggcgtatacgagctgctatacatgtacattgtacagtagacaaatcctactacggacaatttgttactgccatatttggtatgcgcgggagtttcaccttatgattggtaggagtaaggagtgtactatactgtactgcattaaaaattgtgtggaatgggactgcagccttgcaaagtaactgtagaaaataa

SEQ ID NO: 153139 - DNA, 916 bp, Zea Mays
ggcaaaagtctactacccgtacatgctttagaatttatattgattgatgcaaaataaaaaatggcttacaaacttatccttgcaaaatcagttatcctcttgtcaaaccattaggaaaatgcaagcaaacgttagtctaggaagcaatgtaacttacgccaggtaaacctgctgatatttttaggggcaatagttaaccatggcacagaactcatccccacaagcagaaagcatttcccaacatctcccaccatcaaccacggctctttcttccccatctctctctcacgctcaaccagccacgccaagccaagaactggtggcgccggccactagccggccctccatctccggcaaaaatcatggcgagcagcggcccaatcctaccttcttcactgatcggcagttgaaaagggagagggagcagtgtgcacatcacagggagattaccgcacgatgtctggagaccagggggcacgcggccgaggcgtagcttgagcctggaggagagcctgaaggatccgtgtccaagaggtccggagaaaatgacgtctactgagtagaaagggacggcagagtcgaagttgcagacgacgacattgcggttggcagggcgaccgctaggagaagtagggacggcagcgtggcgaccacaagacgaccgtcccccaaatccaacgaaccctcaacgaatcgagacagtgctgaggaggacgaacctttatatctgagggagaggggggagattcggatgggacgacgccgcccgcaacagccgggcgcggatgccgcgggcgcgaggtcggtggtggggacgaaaggggaaagggtcagggtcgggatggcgcagcggctgttgcgcgaggtcggtggcggagatggcgcgagggctggcatgtgcagcggctattgcgcg

SEQ ID NO: 153140 - DNA, 334 bp, Zea Mays
aaaagatggggaggctattccaaaaaactcgtgagcgaggctgttgagatgctcggcccggtggcggggacagtaggggcaagggtcggggtttggtttagactgtccgcaaccgttctcctaaatttttccccctaaatgttactatgcagacacgtcatcaagatttcatcacctatatttactcgtcccgcaaccgttcccctaaagtttcccctatatatccctctactcattaaatatacatttccatataactaacttaaccaacttcaattttgttttcattttatttatttgcacacgtccgacatgttgcgcttgtattcaaaaa

SEQ ID NO: 153141 - DNA, 1569 bp, Zea Mays
agagaccaagattagtaccacttgtactgtacactcctcgttccgcgtgcgaagcgaaccctgttccatgttcttgaatctctctgagcccagtccttgtagctagcagatcagatcgctcaggcggaaagatcgagagaaggtcgccccaggatcgagatctagagcgagaaaggtttaagagggaaaggcgcggcaaggagtcgagagaatagaatgttcccttcctccaagaagcaggccagcaccggtgccgcgaacccaaatgatcggcctatgtgcgggcaaggcggcgactccggcggtctcgtcctcaccaccgaccccaagccccgcctccggtggacacccgagctccatgaccgcttcgtcgatgccgtcgcccagctcggaggcccggacaaggcaacgcccaagaccatcatgagggttatgggagtcaagggcctcaccctctaccacctcaagagtcaccttcagaaattcaggctagggaagcagcacaaggagttgggtgaccatacagcaatggagatgcaacgtagcgtggcctcttcttcaggcatgatagcaagaagcatgaacgaccgcagcgtgaatgtgaacgaggccttaaggatccaaatggaagtccaaagaaggctccatggagaactagaggtgcagaagcacctccagatgagggttgaagcccaggggaagtacatgcagtccatcgtggagaaagcataccaagccctcgggtccagcgactgcgccacgtggcccgctgggtacagaactctaggcagccaaggggtccttgacatcggcaccagctccacgagcttctcgtccgtccaggacctgcagtgcttctatggaggaagcagccacatggaccagctcctgcatcagatggagaggccaatggatggcttcctgacgttgggcgagagctgcttcattggctcagcagacaacaaaaaggaccttaataaccattgcagctccagtggcaagagctcgatgatgtgggccagcgaagagcagcaggcaaagagcggcaacgatcagcttcagatggggtcgtcgacaaggatggagggtgcaggcattgatgtcatggatccagtcaccgggctgtacgagggcgccgtgtcgggagactccatggacagcaagggttttgagggttcgaactccaggctcgagatgaagccgcctgcacaacaagcacctgtaggaagtcagaggatacgcatatagtcgtccaatatataatggtttggaactcacgtaaagaactgtatactacaatatatatggataagcaaggtcaagctaaggtatttaaatgcaagtgtcagttttgttgtgaaccatcaaagttcagacgattagcatgtgatcggagttgtagtacatgcagtcattagttttaattgttggatacaagatattatggagatcaattctccatatatatgtttgtttattttgtccctaagattcgccatatatatgctgtattatattggatttgtgtgacaccgttgtaacattgatcagagatcttttgtgggtgca

SEQ ID NO: 153142 - DNA, 1738 bp, Zea Mays
acgaacccaacccagtcgaaccacctcgccagtgagcgcctccccccgtcctctttccctgctggccagaactccgaatgaaatcgctgctccaccagctttctttaccttcaggaagcgagccggtagcatcaagctagatcgcggagaagctcctcgtttcccccatcggcgctgctctggcggggagaagcgtcctctcacggcggccgggaagaccaatccgcgccgccagtccctgcggcggcttccgtgaggtggtcttggctcctggggcggcgtgttcgtggtggccggcgagatgagcagccacgcggttggaacaagcaacggcggatccggggatgcggccgccgggggcgcggccaggaggaacaccaggatgcccaaatattccaagttcacacagcaggagctgcccgcttgcaagccgattcttactccaaaatgggttgtctctgttttcttaatcgttggggtcatctttgttcctattggtgttgtttcactgctagctgcaagagatgttgttgagattattgatcggtatgatgaggcatgtgtgccagttaacatgactgagaacaagcttgcttacatccagaatgagaccatatccaaagagtgcataaggaatcttacggttacaaaatatatgaagcagcctatttttgtgtattatgaacttgataacttctatcagaaccataggagatatgtaaagagccgaaatgatgcgcaactaagagatgctagtaaagctaaccagacatccgcttgtgaacctgagaagaccacagctaatgggcaaccaattgttccttgcggccttattgcttggagcttgtttaatgatacatataatttcactcgtggtaatgagaacttgacagtggacaagaaagacatctcctggaagagtgatagggagcataaatttggtaaagatgtctatccgagcaacttccagaatggtgcacttaaaggtggagcaacacttaacccaaagatcccgttgagtgagcaagaggacctcattgtttggatgcggaccgcagcacttccgacgttcagaaagttatatggcagactatactttgacctcaaggagaatgacacaataacagtgagattgaataacaactacaatacatatagctttggtggcaagaaaaagctggtcctctccactgcaacctggcttggggggaagaacgattttcttggctttgcataccttatagttggtgggctctgcattttcctggcatttgcattcaccttgctgtacttcgtaaaaccaaggaaactgggagaccacaactacttatcctggaacagacgctaggatgtttcggaacaccaagtgtccgtactactcgaaatgtagcttgtatgaaatgaaatgctctgaaccagaaatgtcgatgggcataagcaagcatggttcaggaaagaacttcatgtatattttttacgaaggggtctaggtggctacgttatttttgtttcttgtgttctttagtgtagcactgaacaggagaataccaattgatctctattagcttgcttcgtggtacaagcactctaaatggttgactgtgtggtgttgacgctttggctgccgaagaataccaattaatgatgttggttgactgtaatatcctcaagtgggaacagtaccaacttctgtataaattgattaccgtgtgatgtttgtttctccactaccattata

SEQ ID NO: 153143 - DNA, 1190 bp, Zea Mays
gccgtgcgctgcgcactcgaacccgcgcccgccctcggccgccgcaaaatgcgcgtgcacgtcagctggcatccgcgccacttcggtccacgccccgctgccgctgcttccgccggcgactccgtgccctccgccgcgcagcgtccacatgcgcacgctccgtggcacgctgaggcggctcttctcgacggcggagaccagcgccaccctcgcctcgcgctccctcccgccgccgaactccacgagcgccggcgaccgcaggaacctcctcatcggcggctgcaccttgctccagacgttggccgccacgtcgaacacaagcaccgcgaacggcgacgagctcatgcagtagaacctgcaacagtaaataaaccagtagaacttacatgtaatcagtttgatctcatgccgtgtgctcatgtgtatgcatagtgttacacattctgcacacacgtgcacttgagagttgagacttgcgacttcaccttccggacgcgaaagccatgccggcgcgggggtcgagggaggagaggcggggcaggatggaacttggggcccagaaaccggagggcgggacggaggcggcatcggcgacgaatgtgtccgcggagatgttcttgaccgcgaagggggacacaaggtcatcgccggcaatgacggcgatgaaagaggtgggtcccgcggcgaggccgacagtgggagagaggcgcgctgtggggcagagcggcagcggcgcgaggaggcgcgtgatggggttggcgaggagcagcgtcttgtggccggacgcgtccgacaggaacgccagcaggcccgccgacgcggccgccggggagaacccttggccagcgccgggagcgggcagcggcagcgggaggcgggaccaggaaggcgcctgcctggtggggtcgagcaggaggaggtaccccgcagaagggaccgcgaaggcgaagaaggggaggtgcggggagaggaggaggtgggaatggaggaacggcgacgagtagatgaggctgcagaagcggcggcaggtggcccggaggcggaggaaggacggcgtcggtaggcacgccagcacgcgatccaccagcggctgcggcagccggccccacacgcggggatccatgtccaccgcctcagatgaggaggacaacggcgagtggaagcgcggaaggtggtgagggtggtgctgg

SEQ ID NO: 153144 - DNA, 124 bp, Zea Mays
gatttgaactccaagttactcgaaaaatggaaaacagtgaatgcaaaaatgatattcatgttatttagcacaaattacggcctatttcaggaacagaccagaattttcgagcaccatgctcacg

SEQ ID NO: 153145 - DNA, 1235 bp, Zea Mays
ggtcgcagttttgcacaaagatcctctgtcttttcgcgatttagctcgtgctcctccctcgacgtggtctccggaatccagatctgtatcacgggaagcacatctgctggcctacaccagattcttccatggttgtattatcacaatgtcattggtgtttcacatttctttctattagttgaaggagaggctgcaaagccagctgtcacctctgttcttgaatctattcagccgcatttggaatgagacttggctagcaggtttcttttacaagccgtgtaattacgaactatttgtcaagcaatcactaaacatggaaatggctattattatggcaagggatgctagaatggattggatcattcacctcgatactgatgagttgattcatccagctggtgcccgagagtactccctgaggcgattgcttttagatgttcctgacaacgttgacatggttatcttccccaattatgaaagcagcattgactgtatgacattaaggatccttttactgaggtatagaactactgttatctgtaacatatattcaaaagaaagggaaaaatgctctgtatcctattgatgatccactggcttgagaaacaaagtgccacctgtacgtaactggatatagtttcactgtctagaaaaaaactatagtttagcaaacactacacataactactctcattaatgcattgcaggaattgataggattggtcggattatcgttggctgtgtttgataggttgcatgttttataaattcttttgtgcctgcaggtttccatgtttaagaaatatctttacgatttcatttttcacaatatgcatatggcctttataattgcatcgacagcaactgaggaggagatggggaactggcgtgaaagctgtttttcttattgctgctacattttatgccccaaaactctgcaggctatcattcgtggcctcaaggaacccgacgtctttaccaatgcagtaacatcagcgaaagcacagtcgaaaacgaagccgtcaaacatgggtctcggaaacaaggaggctatggccatccaaccgaacgtaactgctggtcagtccacactggaaggtggtcacgagaggttacaggcaaccgtaagaaagatcttggaaatggtggacgcccaggaacaggaagaagcaatgccgccgaggccgtcccctggtttgctcgagctctcggaacgcgccactgctttgtcatga

SEQ ID NO: 153146 - DNA, 1019 bp, Zea Mays
atcagatacaatattttaccttcttcatgtgccttgtactcatcacagaaatgtttcctcatggtccattctccagcatacaatgtatagccagccatgccagagaaccatataggtgtcttttgaatggcccctttcttactgtgcattggtggctaactggataactgactcggagagctaatgagtaatgaatcctcccgtgtattgtgtcatggcaggcctttataattgcatcgacagcaactgaggaggagatggggaactggtaccgggaacataactatgccccatggctatcattcgtggcctcaaggaacccgacgtctttaccaatgcagtaacatcagcgaaagcacagtcgaaaacgaagccgtcaaacatgggtctcggaaacaaggaggctatggccatccaaccgaacgtaactgctggtcagtccacactggaaggtggtcacgagaggttacaggcaaccgtaagaaagatcttggaaatggtggacgcccaggaacaggaagaagcaatgccgccgaggccgtcccctggtttgctcgagctctcggaacgcgccactgctttgtcatgacgacttgacgacgctgtgaggttctggaggcgttattaagcatggactcgggttgtttaaccatgctaggtgatacagcgcccgatagggcgctattttttctagtttctttaatgtagcctgcagtctgcacgctgtgccattgtggatagatcgatcgagcctggtgcatatgccccaccatatatatgtttaattaaccttgcacgttaaagagtccctttccataatcaagggaaaaaacttaaaaaatgacggtcaaattttctactattgagcgtgggtttaactctgacggatctagaatgtcacatgccaacggtgttttttttttgaagtggtctaagagttgatagattttatatgtatccacgatggctttgccaatctaaaaaatctgacgattcagtctatcggggttaatatgcac

SEQ ID NO: 153147 - DNA, 1052 bp, Zea Mays
ctcttccgacacacacactcgtcgacgaacgacgacgacgagcacgagcacgagcagcgcctgacgctcggctccgacccgcgcgcgtcgatggcgatgagtgacacaggctcgagcttcgcgcagtgggccgcgctctaccaccaccaccaccacgacgccgggccggtcctgctgccccccgacgacgacgccggcaccaccgctgcggccgccgccgtagcgagcccgacgtcgggcgggtccagcggaggaagccccaccaaggccggggcccatctgctgcacggggtagaggggccgcggatcgggaagccggcggcgcggcggcggtcccgcgcgtcgcggcgcgcgcccgtgacgctgctgaacacggacacggccaacttccgtgccatggtgcagcagttcacgggcatccccgcgccccccgcgggggcgttcggggccccggtcatcaacttcgccgccgactacggcttcccgccgtcctcggccgccgtcatgtccttcgaccaccagctgcaccggagccagcaccccgcgccgctccaggagcagctccgcaggcagcagcagcagcagcagtacgccggcgcggcgtcgccattcggctatagcaacggcggcggcggcggcctgctgcaagacggcggcgacgtcttcgcccccgccgcctcccacgggttcgccgcgtcggcggaggagaggatgttcctgcagagcatccaggcggcccagatgccgcacatgcccgccgctaacactagcactaatggcttctttgcttgaccaaggctcgacgggcatccacgccacgtgcatggaatggaagcttgggaaggggaagcgaagattagcagcagccaaaaaaaaaagggtaatcagagtcagttaagtttctcctggttgtgtgtagttagtttgctcctccgcttgcttaattcgcgcagccttgtttctccgctggctgcagagacgatgtaaatatcttgtgtttctgatgatgtggtagtctgtgtcctagcagcagctcatctagtcactttcac

SEQ ID NO: 153148 - DNA, 1593 bp, Zea Mays
attttattcgcgcgaccacgtccggaccacatggcacgaacgcgaaaccgcgcgctgcccaccaacacaacagcgcgaaccaccacccgctccgctccactcgctccactgctcggctcgctataaaatcacacggtccctccgcctccaccaccgctcgcagtcgccaagattcattcacattcggcaggcagggggacaccagcactccagcagtaagcgtcgagcgaccgaagaccatggcggacgccggcagcagtgccgccgcgaggagggccccatcgtcgtcctcgcccggggggtgcgcgcccgcgctggggcggctggtgcggaagctgcggcggcagagcaggctgctgtgcgcggccacgggcggggcgcgccacgccgccgccgcgtcgtcgtccgcgcgctgccgccaccaccaccaccaccagtacgacccgctgagctacgcgcgcaacttcgacttcggcaccgcgctggagggcaacgaggcccactgctccttcgcctcccgcttcgtgctcgcagcccccgccgcgcggcaggcgcagtagtagatcagaggcggccgaggccagggtcgtaggtgccagtgccaccccgacgtcggatggaacgcacccgcttcgggagctggctttgcgtgcgtccaagcgctggtggcgcgtcagccattggctgtagtagctgatagctaggtagtcttgtagaagaagtatcatcaattagtaatcttgtagctgtgtgagtatgttcatatgctgaggcctgagaggtggcgatggcttgtaatcaaggatctgccgccgtacgtcccttgacgactcctcttcccgtggtcggaggatgagggatcggccaagaggaaatgtttccattccgaaagcttacacgcctaatgctgcttcatccacaacagccctctccattggccggctcttgagtttttttttaatttttgtgtggaataatctctgctacagcatatttttgctaagctgtggacgagagtcgagagggcaattggcatgctgcagatccttggcccttgtctggattagtgagtgctaaaccgctagtaattgtcggtggtactctggcaggctgctgctccagtggagtccagaccagtgactgacgcagtgatgcggggcggcatggtggcgaccggcatgacggggaggctgcgagatggggcgaggctggcaaggtttgattgcattgcatcgcatccagagttgttggtggcttggtgccactgcaattattgcttgctcgccgcccctgtgccgctacggcagtcacggtcaccaccgctctgccgcaccgccgtgattattcgcatccaacaaggctgcccccgcgtgtccctcgagatggtgcatgcaccgatcaacggcgagtcgcggcgcggcactgcagcaggcaagcgtagggtttggtggtcgtactacttactccctctgtctagaattacggtggaagtactagcctggcagtaggtggattttagtactagtactctgttacatcgatgactgtaatttttttaaaataaatcttataaaatgtcttacttcccgctct

SEQ ID NO: 153149 - DNA, 996 bp, Zea Mays
gcgcccaggtctaagtaaagcggaatccaagatgtcagctcggttagtggcagcaataacaataattccggtgttgccctcaaaaccatccatctcagttagtagttgatttagagtctgctccctttcatcatttccaccaccaatacctgtacctctttgccttccaacagcatcaatttcatcgacaaacactatgcaaggagcgttctccttggccttcttgaaaaggtcacgtactctggaagcaccaacaccaacaaacatctccacaaactcagaacctgaaattgagaaaaatggtacgccagcctctcctgcaattgccttggcaagcaaagttttaccagtcccaggaggaccgacaagcagaacacctttaggaatgcgagcaccaacagcagtgaacctttcaggtttcttcaagaactcaaccacctccatgaagtcttgcttcgcttcatccacaccagcaacatcatcaaatgtaacaccagtgttgggttccatctgaaacttggccctagattgaccaaaaccaaggggaaaaccagggccattgggtccaccaaggccaccttgtgcccttcttgacagtaaaaatagaccaccgataagaataagtgggaatgccaaatttccaataaggttgaacagaagagaaccagagtcctcctggttgctgtgagcagcaaaatcgatgttcttttccctcaacttctgaagaagctcctggcttagaccaggaagctgcacacggactctctgcacgcggttgccaagctcaggagaaatggcctccacgatagcaattgtcccattctcaaataaatcaaccttcttcactctacccttgtcaagatactcaaggaaccttgaataagacatcctcgaggacgagattccttgctcatcagcgagagctttcttaacacccaacaaggtgggcagtccaactccgatattcccaagcgcaagttttaggaacttccttct

SEQ ID NO: 153150 - DNA, 279 bp, Zea Mays
gaccagatgggtagtagggaggtcgagctggcttgcaccatcagatttgatcagatcacggacctggtccctcggggtggagacgcaggcgtggaaggtagacaggaatggagggattggcatcgagagcgcagagaggacattgtttaggtactcaatgtcagcagcgagctgctgtgaacctcggtcggtgatgtagtggattcctcggagctgctccatgaacaaagcagtggcaccttcggcgacctggtacatggaagcagagatgataatcaa

SEQ ID NO: 153151 - DNA, 184 bp, Zea Mays
cgatgtagccatggagattgaaggatttgttggaggtaactagatgaaacttgaggcggcaaatcccaaaacagcgagctattttaacactcctgcaaatgactctatggcaaataggtcattagatgaaactgcaaaaaaactttgttggaaacattacttgccaacagacttgtatatgaga

SEQ ID NO: 153152 - DNA, 642 bp, Zea Mays
atggccagacctcaacgcctggcgcctcccagcgacctccgcacgtggggcccaaacagtccttgcgcctctgatgttgatgagccagcggctgacgacgacgtggcctcatcgctactggagatggaggcgctcgtgctatccaccgccgaccctctcaccaaggcacgacgcacccacgccgccttatcccgatgggccgtcgggctccctgtcggccaggcgacggccccctaccaccccaagcgcaaggaccgcctcgtcgagcgcgcgccctacgcccgcccgtcgtcccccgcggaggagccggagaagaagacggtcaagccggcctcggccttggcctcctggctcgggctcggcagcacggaagccgaccgcctcaccatcgctacctggtctgccccgccgtcttcccccagatcgtgcgagacctgggtctacccagtcgccgctcgcccgctcgccccctcaacctccaagcccaggctgagccggatactcagggaaaagcaatttgggattgagatgagccggatacaaggtctaccaggtgggaagagaatcaagagctacagccatgatttgttcatgtttctgtacattcttctcatcatagccagtggcgaatctaggatttaa

SEQ ID NO: 153153 - DNA, 782 bp, Zea Mays
atgacaagagcatcctccaccatgatatctgtgctcaagaagattatgttagcaggcttacctggcataaatctgagggaggagctcctcgacgtgctctgcaaggaccacagcttcgacatctacagagacgacattgtcttcagagaccctctcaacacattcaagggcctgggaaactacaagaggctcttctgggcgctgcgcctcaccggccgggtcttcttcaaggcgtcgtgggttgaagtggtcagcatatggcagcccgccgagaacagcatcctgcttcgctggaccgcccacggcgtccctcgggtgccctggggctggtgggacggccacgcccgcttcgacggcgcgtccgtgtacaagctcgataggaacggcaagatctacgagcacaaggtgcacaacgtcgctacgaacccgccggccaagtccaaggtcctgccggtccacgagctggtcaggtcactcggttgcccctccactgccgaacccacctgttctgacttctgaagctatcgtcgtcgcagtgccatcttattattcgagaattaattatctgggagaaggataggcgtgggtttaacatggtacctccgaattttgtgttttttcattgtgatttgatagcacacaaagttactgagtactcttggagttgtatatatgtatgtacagtgatagtttataaaataaaggcatgttagttaaggtgtacgacatgtgttattgattgttaaagcatcagtcagcaaataactactctgacatgtttc

SEQ ID NO: 153154 - DNA, 1099 bp, Zea Mays
attgagcccgacagcaaaaagaaaggtgacgtttctctttcttggttccggcgccccaccgggagagtgagctgctgcctgcgcaactcgagcgccgcttgtcgcgagcaccgcggcctcgatccgtcaagctacaggaccacgctagtaaaagctctagctcaagcatcagcagcagtactcaagagagcgaggaggaagcacctgtccgaagcgtcaccattggtagcctccttgcccaagcaaatagcaccagtggacatagtcttgggaagcgcctgtcccatttggggtcaatcccgtatactccccgagttaatggaaaaatccccaatgttggtaatgcaacactggaccacgaacgattgctggaaaggttgggcacttatggtctagctgaatttcagatagagggggatgggaattgtcagttccgagctttggctgatcagatatatcacaatcctgactatcataagcatgtgagaaaagctgtcatgaaacagctgaaggaattcagaaaacaatatgaaagttacgtaccgatggaatataaggtgtacttgaagaaaatgaaaagatctggggaatggggagatcatctgaccttacaagcagctgcagatcggtttggtgccaaaatttgtttgctgacatcatttaaagacacctgtttaattgagatagtccctagggatctaactcccacaaaagagctttggctaagcttctggtgtgaagtacactacaattccttgtatggaatcgacgatctcctgacccgcaagacgaagaagaagcactggctgttctaggagggttctgaaggatccaaattctttcagcagctcctgctctgtccagccagcgcagcctctgtcttagtacttactagttggccaacactgtatcatatcctaagttgagtctaggctttacgcttttatgtacagtcgatctagatcttgtaaaattccctcaaggagcaacaggaactgtacaactcttagatccatgagattttggtgatctctcctccatgggaatgatagtgcttgggtgtatgtacattataaaagctaccaggggcattttgacg

SEQ ID NO: 153155 - DNA, 1096 bp, Zea Mays
attgagcccgacagcaaaaagaaaggtgacgtttctctttcttggttccggcgccccaccgggagagtgagctgctgcctgcgcaactcgagcgccgcttgtcgcgagcaccgcggcctcgatccgtcaagctagaccacgctagtaaaagctctagctcaagcatcagcagcagtactcaagagagcgaggaggaagcacctgtccgaagcgtcaccattggtagcctccttgcccaagcaaatagcaccagtggacatagtcttgggaagcgcctgtcccatttggggtcaatcccgtatactccccgagttaatggaaaaatccccaatgttggtaatgcaacactggaccacgaacgattgctggaaaggttgggcacttatggtctagctgaatttcagatagagggggatgggaattgtcagttccgagctttggctgatcagatatatcacaatcctgactatcataagcatgtgagaaaagctgtcatgaaacagctgaaggaattcagaaaacaatatgaaagttacgtaccgatggaatataaggtgtacttgaagaaaatgaaaagatctggggaatggggagatcatctgaccttacaagcagctgcagatcggtttggtgccaaaatttgtttgctgacatcatttaaagacacctgtttaattgagatagtccctagggatctaactcccacaaaagagctttggctaagcttctggtgtgaagtacactacaattccttgtatggaatcgacgatctcctgacccgcaagacgaagaagaagcactggctgttctaggagggttctgaaggatccaaattctttcagcagctcctgctctgtccagccagcgcagcctctgtcttagtacttactagttggccaacactgtatcatatcctaagttgagtctaggctttacgcttttatgtacagtcgatctagatcttgtaaaattccctcaaggagcaacaggaactgtacaactcttagatccatgagattttggtgatctctcctccatgggaatgatagtgcttgggtgtatgtacattataaaagctaccaggggcattttgacg

SEQ ID NO: 153156 - DNA, 1014 bp, Zea Mays
attgagcccgacagcaaaaagaaaggtgacgtttctctttcttggttccggcgccccaccgggagagtgagctgctgcctgcgcaactcgagcgccgcttgtcgcgagcaccgcggcctcgatccgtcaagctacaggaccacgctagtaaaagctctagctcaagcatcagcagcagtactcaagagagcgaggaggaagcacctgtccgaagcgtcaccattggtagcctccttgcccaagcaaatagcaccagtggacatagtcttgggaagcgcctgtcccatttggggtcaatcccgtatactccccgagttaatggaaaaatccccaatgttggtaatgcaacactggaccacgaacgattgctggaaaggttgggcacttatggtctagctgaatttcagatagagggggatgggaattgtcagttccgagctttggctgatcagatatatcacaatcctgactatcataagcatgtgagaaaagctgtcatgaaacagctgaaggaattcagaaaacaatatgaaagttacgtaccgatggaatataaggtgtacttgaagaaaatgaaaagatctggggaatggggagatcatctgaccttacaagcagctgcagatcggagctttggctaagcttctggtgtgaagtacactacaattccttgtatggaatcgacgatctcctgacccgcaagacgaagaagaagcactggctgttctaggagggttctgaaggatccaaattctttcagcagctcctgctctgtccagccagcgcagcctctgtcttagtacttactagttggccaacactgtatcatatcctaagttgagtctaggctttacgcttttatgtacagtcgatctagatcttgtaaaattccctcaaggagcaacaggaactgtacaactcttagatccatgagattttggtgatctctcctccatgggaatgatagtgcttgggtgtatgtacattataaaagctaccaggggcattttgacg

SEQ ID NO: 153157 - DNA, 1156 bp, Zea Mays
attgagcccgacagcaaaaagaaaggtgacgtttctctttcttggttccggcgccccaccgggagagtgagctgctgcctgcgcaactcgagcgccgcttgtcgcgagcaccgcggcctcgatccgtcaagctaaaagcatgtctggacagcaggaccacgctagtaaaagctctagctcaagcatcagcagcagtactcaagagagcgaggaggaagcacctgtccgaagcgtcaccattggtagcctccttgcccaagcaaatagcaccagtggacatagtcttgggaagcgcctgtcccatttggggtcaatcccgtatactccccgagttaatggaaaaatccccaatgttggtaatgcaacactggaccacgaacgattgctggaaaggttgggcacttatggtctagctgaatttcagatagagggggatgggaattgtcagttccgagctttggctgatcagatatatcacaatcctgactatcataagcatgtgagaaaagctgtcatgaaacagctgaaggaattcagaaaacaatatgaaagttacgtaccgatggaatataaggtgtacttgaagaaaatgaaaagatctggggaatggggagatcatctgaccttacaagcagctgcagatcggtttggtgccaaaatttgtttgctgacatcatttaaagacacctgtttaattgagatagtccctagggatctaactcccacaaaagagctttggctaagcttctggtgtgaagtacactacaattccttgtatggaatcgacgatctcctgacccgcaagacgaagaagaagcactggctgttctaggagggttctgaaggatccaaattctttcagcagctcctgctctgtccagccagcgcagcctctgtcttagtacttactagttggccaacactgtatcatatcctaagttgagtctaggctttacgcttttatgtacagtcgatctagatcttgtaaaattccctcaaggagcaacaggaactgtacaactcttagatccatgagattttggtgatctctcctccatgggaatgatagtgcttgggtgtatgtacattataaaagctaccaggggcattttgacgtgggcgtttggatgccattctccataatttttattctgaa

SEQ ID NO: 153158 - DNA, 1627 bp, Zea Mays
cgcgagctcttacgcatcttcttctcttcgagccttccacagttctacctcccgcccgctggtccctagccgtcaagagattccacgctactggctttcttgccccacgccgtatggttatcgtccagcacgagcggagaaactgaaacacgatcccaaccaattcagaacccgatttggtgatcacctccattctcggtagcacttaattccagggacagcaataagaattgctcctctccaagttcttttggagcgtaatcttatccgtttgggtcggattgatatttgataacttgattgccatttggggagttgcgggagagagagagagatgggccagagcaaggcggagttcttgaagcagttcggtggggactacggttacccggacgcgcctaggggcatcgacgagctgcgggccgccgagttcaagcgcctggaagggatggtttacctggaccatgctggtgcgacactgtactcagaggcacagatgacggatgttgctagagaccttatgtctaatgtctatgggaatcctcatagccagaacgattcaagcatggctacaatcgatgctgttacttctgtgcggcatcaggtcctaaaatacttcaatgcatctccaagggactacaaatgtatatttacatcaggggcaacagcagccctaaaacttgttggtgaatgttttccatggagtagagacagttgctatatgtacacaatggaaaatcataatagtgttcttgggataagagaatatgctctgagcaaaggagctactgtatcagcagttgatgttgaagaggttgttgatccatcaaagaatcatgagagtgatagtttatttaaggtttcaaaacgctcaaaccaaagaagaggtgacaatgtgcttttgcacaattatcagaatggaagcctgtcagctatttcaggaaacaatttaaatctatttgcattcccttcagagtgcaatttctcagggcataagttcaacctcagcttggtcaagctcatcaaggaaggaaaatttatggatttctcatcacaacagcagggccagtggatggttctgatagatgctgcaaaaggatgtgcaactgaaccaccaaacttgaccctgtatcccgctgattttgttgtctgttcattttacaagatatttggctatccaactggtcttggtgccttaattgtaaaaaatgaggctgctagtttactgaacaagacatacttcagtggaggaacggtagctgcttcaattgctgacatcgactttgttcagaaaagaaaaggcattgagcaaactcttgaggatggaacaatctcattcttgagcatatcttctcttcgatatggctttaagataattgatatcctaactatctcagctattgcacggcatactgcatctcttgctacttatgtgagaaacaaaatgctggaattgaagcatagcaatgagaaaaatgtttgcataatctatggacaagattttaaggtaatcaacggccttgaggaagaacaagtgttgacactggtgtcgctggacgtgtggctcatcgcagttataggaaagcccttgccgtggcgctcgaccatctcggtcggggtgggctaa

SEQ ID NO: 153159 - DNA, 1669 bp, Zea Mays
ccgcccctgctcccccacgctgcgcgcgtccgtgatgccggggatctgcaaccccccatcccctagccccctccccacccctgctccccccacgctgcgcgcctccgtgatgtcggggatccatctcctctcccccatctctcctctacgcactctctctctcctccccaagctgctgactggctcgcgaagtcgccaagggatcaatcgagatctaatctcgtttctgagatgggtgcatctaccgccatgggagcgctcgagcaggcccacctcgcggtcgtcgcttccgcatgcgatgatgatgagcaaaacgacgccgcagaccttgcacgacggcgacgaacccgtcgacaccgcgtcgccggcgacgagccccgacggggatgccacgaagcagcaggactgcgcgtcctccgccacgccgcattctcctccgccgacggcggcgacggcgggctgctagagcaccttgtcgagcgtggcgcggaggccagcggcgacggcctcgtggctcctggcgactcccagccacgcctggccctccccggccagctgccggagccgctcctccagatccgcgccgcggcggcgggcgcgctccagctctgcctccgcggcgcggagccgagcctccgccgcgcggcccacggctggctcacggtccagcatcatggcaacgtagagcggcagcacagccgtgagcactggtcgggcgtgaagatgcgctaccaccggatcctcccaagagtttgtttctctgcagagaacccatggtcatgcgacgagccacgactcatcgacgaaagccgcttcactgcaagtctgcaacatgctcaccatccagcattgtcgtcatcttgtacacaatcctagctcctctcctccttcagactgtttaggcgctggaacgcagtgagtctccaactgtgtgcctcgctggccttctttagtaatcgggccttcaagattgccatgcaacaaacgcaatggagcagacaagcaagccaaggacaattagcaacttgaaggtattggacatgccatcgtaggtgtgtgcatcatggcccagtcgctagcacgagcccagacaggttattgtaggagaagtctatggtcgtaaggctctgcattgcagcaatggttgccgatatttctccaccaaggtggttccgggacaggttcaggtagttgagtattcggctattaatggttatttcgactgaggtccaggtaggtgtagagatggcaatgggtacccgaaacccgaaacccgatgggtttttaccccattagggtacgggtttgggtcaattttcatacccatgggtttgttaacgggcataaatctgtacccagcgggtttatgggtacgggtttgttcctatagtacccaaacccgtgaacccgtgggttttttaaacccgaccaaacctagtgcatattgtcattttattttataaacgaacaacaaacttgtttttccttatttacttcatattttttatcaattggtgaatgtatcagtagtcggtgagagtgttacttgcttgatattatagtttttactagcgttatatatgtggtggatggataacttagtgcaaggtcacttaattatacaacttattatttgtatttcattctctctactaataatttttatacc

SEQ ID NO: 153160 - DNA, 958 bp, Zea Mays
acaactacaaacgcactgtggtctgtgggctgttgctgcctccagcctccccctcatcagctgctccaagcaccgcatcctcacctccggccgacaccgccgtcgcaaggtcccgcagcagggctctctctccgcccacggcccaccgctccgtctccagcatgaagcgcctgctccggcgcctctcccgcgtggccgcggccgacgcctgcgccgccgccgccgcgtacgagcctctccggccggacgccgcggcgcccgggaaggcggccgcgctcgcggccggcgcgcggcggctgggcggcggcgcgcgcgtgccggagggccacgtgcccgtgtgcgtcggcgaggagggcggccccgtggagcgctacgccgtgcgcgccgagctcctcggccgcccggccttcgccgcgctgctccggcgcgccgcgcaggagtacgggtacggacaccccggcgcgctccgcatcccctgccccgtcgccgacttccgcgacctcctcctccagctctcctccgcctgcgccgccgcggaccaccccgacgacgacgctgcggcgctctgctactactcctaggctccgggttcggctacggcatcccctgcccgcccgctcgctccgacgccgccgccaccgctcctccccccgtcccgccccctccagtgcggcggaaaggaaaaaaaaaagaaacattcgccgcatttgccgcggagggcgtaattgagatttgtccttgccccctcggtgaaaactaaaaaacggcagcgccaagcgccgctcgtcttcttactgaattacccccctgcgtgggacgtacgactgtgtgtgcctgtacatacgggagggttgactgtggtggctggtggatcctaggatgggtgggggtacaaaggggattttctcctgcagctcaaccgttttagtgcctgctgtctggtgggaattttttcttc

SEQ ID NO: 153161 - DNA, 118 bp, Zea Mays
ttttttcttttttttaacggaaatcgcagatctttcgaagtcggataaactcatatgctttcgtcccgaacatttaatgtgtgatacagcaattgactacgcacattattttctcgga

SEQ ID NO: 153162 - DNA, 303 bp, Zea Mays
atggaggacgctatgagggagcagcaagaaaggtttcgtgaagagctgcggcaacaacaaataacatttctccaacagcaattagagtacatggctgcttacaacgcacaggcgcaacaagcaatgaacggatccggggtcatgggccacaacacgccaccaccggtgataccagcaccaggaggagcttatgcaggggagggagctactacaggagagaatccaaacccgttacacgacttcgtcaacgagttttttgcttatggaggtagtggtcacaactccaacaaccccgatatgtga

SEQ ID NO: 153163 - DNA, 2127 bp, Zea Mays
taggtaaaaacaacgtgagcaggacacagttttctttttggtgcaactccaaccgacggtccggtgctctgcatgagctgtttttcttatacacgtttgtccctgaatttttcctcttgactcgagtaggcatatagtaagagctcctttatggtgttcttgagctttggggttgaaatcgggacagcagtcaaattttcaaagtattttttttcttcttcacactctctgatcgactattttgatctttgagaagcaactattaaaacatacagacttcaaagctgataccactttacacactacagctactttcactctgaaccacctaccaacagttactggttacatgttaggttatggtctaatcatcgggtcgtcttccagttcgcccgtggacacagacactgcatgccattccacaaaactagaacagacatgtcccatccaacctaaggtgccgtttgattcacgaaatgtaacgtaaatggtaacgattcacacttgaataccggtggtaacaaatttgaataaggaggtatccatttgtagtgtgatatcgattacggttggacttaaataaacatatgatctaacgttattggttacccattacgttgccaatatgtgaaccaaacggcacctaagagactgacaatacgggagggacgtgtttgtcgcgagttgcttggccaaactctcaggcaaagggagatgagtgggtgtgttgttcggtggagaaaaaacaaatgaaactcgaggacgagtctgagcctgagttggtcattaatttcattagatgactttgtatctttagttgacttgacttggcaacgggacttggtatatagaagtcagatctagaactccttgaggctctccacccaaacaaccacagcttgctggcaagcctctgaatccatgcatccttcatcaccttccattctgcacttacagcagcagcagcagccgccgccacagcttgctgcgcttgttgtgcgacctcagctcgctccatggaccccttctgcttcagcttgcagataagcggatgtatgtcagttgcgtcatcatttatcactgtccaatgtccatagacatcacaacaagcactcgaagatttgggactgttccaacaaggtatgttctggtctttccatggctttgtagcttctataggcgtataccatatattaccatctcagtaaaagacatttcagcttcctggcccaactcagatgccctgcaggttcccaaaactcatcaaactctgaccatggacattatattgttatttagctatttaggctggtcatcatcatcctgtcacttgttttgaaaagcatgggttcacgatactaaaatatttaatgccatttttttttagcaccgagctgttcaaaacgacaagcacttgagaagagttctccctgcatttatgaatacttgtgaaactctgaccatgaatgtaaccttagatattaaatatacatgatggaatgttcaaacttttgtcttctccaaaaatttgagtagacgtttcatttgtggaacctattggtaaaaattcgagttttgaaggccaagctttcgagagcagggttcccaatttcgggcagaaatctccgaaattttcttgagttttggtgggtccgaaatatatatatttccgaaattggcattttaatatgaattataccgctttttaaaaccctatttgcttttgaactagaattcccgacatttcggaaattccctggttttcgctgggggcgaattttttcttttctgaaattgtacactcaaaattttgatttcacaattcacccaagagttttgttccaaacatttttgaaaatgcccagttatcgccggtccaaactcagtatcagccctcaggcttaggaaattcagttggccgggctcttttgtcaaacacttctaccataacgtctgcgaccaagtcaactccttcacaaacagagctgaaaaataaagttatactagtagaatatatatgcgttgcgacggtatataaattatttgataaaatattaacgcacaacggttatatggaaacgaaagcgcaccactggttggaaaaatagggttacctgtctagttcct

SEQ ID NO: 153164 - DNA, 503 bp, Zea Mays
ccacccaaacaaccacagcttgctggcaagcctctgaatccatgcatccttcatcaccttccattctgcacttacagcagcagcagcagccgccgccacagcttgctgcgcttgttgtgcgacctcagctcgctccatggaccccttctgcttcagcttgcagataagcggatgtatgtcagttgcgtcatcatttatcactgtccaatgtccatagacatcacaacaagcactcgaagatttgggactgttccaacaaggtatgttctggtctttccatggctttgtagcttctataggcgtataccatatattaccatctcagtaaaagacatttcagcttcctggcccaactcagatgccctgcaggttcccaaaactcatcaaactctgaccatggacattatattgttatttagctatttaggctggtcatcatcatcctgtcacttgttttgaaaagcatgggttcacgatactaaaatatttaatgccattttttt

SEQ ID NO: 153165 - DNA, 1347 bp, Zea Mays
ttcgtttcaaaaggatttttttaatgttcgtttcaaaaggaaaaaatccttagacgtttcaaaagaatctaggtttttacaatggattcaaggttgcaaaatgcagtcgagtttgctgggttctgatgattcgggaatcagaaggctgggctgagaatgttgaggagggagactctggtgttgacgagggctctgaacaccttctcgccgctgctctccacgtccgcgatgcaccgtcctagattgtccagccgctcaaacgccgccttccgctctcgctcctccgggtccgcggcggcctccatctgggccccacggcagacgtggcggcgtgctgcctcttggccgatcgacgcttcgcacgcgacatccaccgcatgaggtcggcgacccaccagatccatggcatggaggtcgaggaggaggacccggtggtgacgaccacgtgtctgggcgtggcggacggcgcgcttaacctcgcgggggaggacatgcagcacggcgtggcgtcgacctcgacgcgcgccgtggcggcggcgacggagagcgaggagacaccggagaagaccgccgccgaggccgacgcgtcggaggtcggcgggcggggtgggcgggggcctggcggccacggcgcgcgccgaggaggcgacccgcgggaggtcccgcgcggaccagcgcagcgcgcgcggccgacgcgaggcgggccggctcctccttgcgcagcgcgacgcgggcctcaacctggagcgcggcgagcgcgaccagagcgtcgcggaagctgccgtgcgcgtcgacgaggcggaggaagtcgtccgctccgcgaacggggacgggccgaggcggcgcagcgggtcctgcgcctgtggttggtgcaacaggccggagagcgacacgagcacgcggcccagccgtgccacggccttcacggaggccggcgacgctaggcggcccaccagcgcccgcaggtcggcgacgtcgtcgtcgagctggagcaccagcgggtggaaccgtcacggtaggcgacggacttgttgtcggcggcgctgggccacaggtaggaacatcttccagtggaagttggagcttgcgagaccgcgggacggctgcgagatgtgggctggcggcggaaggcagggtgggagaggccgtgtggggttggtgggcaggatcgaacggctaagatcgtagaacggtagaacggacggttgaaattgcaaaacggtaggctatccttgcggtcttaataagtagtatataattgcctttgttttttatatttttatcttttcctaagcgcatggatgttccgcacacaggcgttttcaagttaatcggattttttttgta

SEQ ID NO: 153166 - DNA, 2401 bp, Zea Mays
cgcttcgccattccttctcggtcagaacgacgcgcatccccgcccgcacgttcccgtgctctcgcttctccggaggcgaccagggttgggacttgggaggctagcgagaaggtgctacccgggccaactcctccgatcgcccgcaggagaaggggatctctccgcctccccgccctcgtcgggcctttcccatcgccacccgcgaggccacgcgctccagctcttgtgaaccggaagggttctggatttctgagccaagcgaccagcacggtggctcggccgggctgacactcccctcccctgtcgcccggtctcttccttcccgagcagaactcccctgcgtcttgccgcttctagcatcggggagaaaaattatagaggaaggatatgcgggatccatttgatgcaccggttgatctcattaacccggaccataatggtgggaacaaactttctaggactggtgcagtgtctgctggggactatggtttacaaaatggacccaaatcctttgccccaaactccgacaccctagtcaggcatcaagtccaggttgcatccttgcacaaagacttagttttggaagatcccaatactcgtatcatggatcctgagaccaaggaactttactttagatcacaatcacaaggggacgagatcttgttgcttcgcaagaaaattgctgaggcatctctcaaggagctgagattactgggtgaaaaacatattctggagaggaggctcacagacttgaggatggctgttgacgagaagcaggaagaagctatatctggtgctttgcaacaattgaaccagaagaaaacccatcttgaggacaatatgagactggcaaatgaactaaaagttgaggaagaagagctatacttttttacttcttcattgcttagcatgctagcagaatacaatattcgcccacctcaaataaatgcttccatcattacaactgttacaaagcgtttgtaccaacagatgcatttgaagctcagatctttaaatgtgatatgactcaacctggaaatatatataatcccaatcttcagcaagtaaccctatcaagaaatgaaccttccccatcttataatttggattcaaataggaacactcttcaacagtatgctcaaggtccaagtgaccgacatatggatcaaatgtaccatggatccaattttcagcagtaattcaagatttgccattatggcattatctaattattgtttgtagtcatccagtctaatctctgatctatacaaaaatatctttgacatatgtttcttgtctgctttattctttcagggatactggcggtactactccctctaattattttgagggagacagaagagtagatggtgactcacagttataccaacctgatggtgacgctttacctggtattgaggggtttcaaattgctggtgaacctagaccaggatttcaattaacagcatgcggttttcctactaatggtactaccctttgcaatttccaggtatattgttttctgaacttttgttgctattctttataattgctataggtgttaaatcttgtaaataaaacctttcatcccattgatgttgctgttctagtgggttcgccatcttgaaaatggtaccagacagtctatcgaaggtaaagtggggaatttatcctagatcctatggcatattattgttcacagataatttaattttgttgactagttctttgtattttgaaatttaggtgccacgatgtatgactatgtggtcactgcagatgatgttggtacttttcttgctgtagactgtacacctatggatgataatggccgccagggtgatttggtgacagaatttgctaacaatgggaataagataacctgtgatccagagatgcagagtcatattgatgcatatatttctaatgggagagctgaatttgaagtttttgtcctggcttattctcctgaggagtgggaattggctacattggtgctaacacgacctaactatcagattaagttcaaaaagaccggtgaagctataattgatgagaagtactcacaaagtctacagatgaaaattccaaatgggcgcacaactcaatttgttttagtaactgcgggtgcaactctcccatttaacacacagggaatatcagagccaaacaatgaggattacgatgttaggttacgcgatctaatcgtattagtcatgagaactttccagaaaaaggctttagatgccaaaaggaaagtcaacacttagaatccatgttgatctgttacaaaagattctatgtaaaaccgtagaaaattttcctatttttgattgttttgtgcagtattcgatgatttttgttcttgagatggaatgagctctcgatcaaagttttgcta

SEQ ID NO: 153167 - DNA, 2325 bp, Zea Mays
cgcttcgccattccttctcggtcagaacgacgcgcatccccgcccgcacgttcccgtgctctcgcttctccggaggcgaccagggttgggacttgggaggctagcgagaaggtgctacccgggccaactcctccgatcgcccgcaggagaaggggatctctccgcctccccgccctcgtcgggcctttcccatcgccacccgcgaggccacgcgctccagctcttgtgaaccggaagggttctggatttctgagccaagcgaccagcacggtggctcggccgggctgacactcccctcccctgtcgcccggtctcttccttcccgagcagaactcccctgcgtcttgccgcttctagcatcggggagaaaaattatagaggaaggatatgcgggatccatttgatgcaccggttgatctcattaacccggaccataatggtgggaacaaactttctaggactggtgcagtgtctgctggggactatggtttacaaaatggacccaaatcctttgccccaaactccgacaccctagtcaggcatcaagtccaggttgcatccttgcacaaagacttagttttggaagatcccaatactcgtatcatggatcctgagaccaaggaactttactttagatcacaatcacaaggggacgagatcttgttgcttcgcaagaaaattgctgaggcatctctcaaggagctgagattactgggtgaaaaacatattctggagaggaggctcacagacttgaggatggctgttgacgagaagcaggaagaagctatatctggtgctttgcaacaattgaaccagaagaaaacccatcttgaggacaatatgagactggcaaatgaactaaaagttgaggaagaagagctatacttttttacttcttcattgcttagcatgctagcagaatacaatattcgcccacctcaaataaatgcttccatcattacaactgttacaaagcgtttgtaccaacagatgcatttgaagctcagatctttaaatgtgatatgactcaacctggaaatatatataatcccaatcttcagcaagtaaccctatcaagaaatgaaccttccccatcttataatttggattcaaataggaacactcttcaacagtatgctcaaggtccaagtgaccgacatatggatcaaatgtaccatggatccaattttcagcagtaattcaagatttgccattatggcattatctaattattgtttgtagtcatccagtctaatctctgatctatacaaaaatatctttgacatatgtttcttgtctgctttattctttcagggatactggcggtactactccctctaattattttgagggagacagaagagtagatggtgactcacagttataccaacctgatggtgacgctttacctggtattgaggggtttcaaattgctggtgaacctagaccaggatttcaattaacagcatgcggttttcctactaatggtactaccctttgcaatttccagtgggttcgccatcttgaaaatggtaccagacagtctatcgaaggtgccacgatgtatgactatgtggtcactgcagatgatgttggtacttttcttgctgtagactgtacacctatggatgataatggccgccagggtgatttggtgacagaatttgctaacaatgggaataagataacctgtgatccagagatgcagagtcatattgatgcatatatttctaatgggagagctgaatttgaagtttttgtcctggcttattctcctgaggagtgggaattggctacattggtgctaacacgacctaactatcagattaagttcaaaaagaccggtgaagctataattgatgagaagtactcacaaagtctacagatgaaaattccaaatgggcgcacaactcaatttgttttagtaactgcgggtgcaactctcccatttaacacacagggaatatcagagccaaacaatgaggattacgatgttaggtatcaactgtgacagcttacttcattatcagccttctttgtggatattttttttgcatttttgcaaataaagtaaaaaaataaaatctagatatatctgattatctgactttttaggttacgcgatctaatcgtattagtcatgagaactttccagaaaaaggctttagatgccaaaaggaaagtcaacacttagaatccatgttgatctgttacaaaagattctatgtaaaaccgtagaaaattttcctatttttgattgttttgtgcagtattcgatgatttttgttcttgagatggaatgagctctcgatcaaagttttgcta

SEQ ID NO: 153168 - DNA, 2211 bp, Zea Mays
cgcttcgccattccttctcggtcagaacgacgcgcatccccgcccgcacgttcccgtgctctcgcttctccggaggcgaccagggttgggacttgggaggctagcgagaaggtgctacccgggccaactcctccgatcgcccgcaggagaaggggatctctccgcctccccgccctcgtcgggcctttcccatcgccacccgcgaggccacgcgctccagctcttgtgaaccggaagggttctggatttctgagccaagcgaccagcacggtggctcggccgggctgacactcccctcccctgtcgcccggtctcttccttcccgagcagaactcccctgcgtcttgccgcttctagcatcggggagaaaaattatagaggaaggatatgcgggatccatttgatgcaccggttgatctcattaacccggaccataatggtgggaacaaactttctaggactggtgcagtgtctgctggggactatggtttacaaaatggacccaaatcctttgccccaaactccgacaccctagtcaggcatcaagtccaggttgcatccttgcacaaagacttagttttggaagatcccaatactcgtatcatggatcctgagaccaaggaactttactttagatcacaatcacaaggggacgagatcttgttgcttcgcaagaaaattgctgaggcatctctcaaggagctgagattactgggtgaaaaacatattctggagaggaggctcacagacttgaggatggctgttgacgagaagcaggaagaagctatatctggtgctttgcaacaattgaaccagaagaaaacccatcttgaggacaatatgagactggcaaatgaactaaaagttgaggaagaagagctatacttttttacttcttcattgcttagcatgctagcagaatacaatattcgcccacctcaaataaatgcttccatcattacaactgttacaaagcgtttgtaccaacagatgcatttgaagctcagatctttaaatgtgatatgactcaacctggaaatatatataatcccaatcttcagcaagtaaccctatcaagaaatgaaccttccccatcttataatttggattcaaataggaacactcttcaacagtatgctcaaggtccaagtgaccgacatatggatcaaatgtaccatggatccaattttcagcagtaattcaagatttgccattatggcattatctaattattgtttgtagtcatccagtctaatctctgatctatacaaaaatatctttgacatatgtttcttgtctgctttattctttcagggatactggcggtactactccctctaattattttgagggagacagaagagtagatggtgactcacagttataccaacctgatggtgacgctttacctggtattgaggggtttcaaattgctggtgaacctagaccaggatttcaattaacagcatgcggttttcctactaatggtactaccctttgcaatttccagtgggttcgccatcttgaaaatggtaccagacagtctatcgaaggtgccacgatgtatgactatgtggtcactgcagatgatgttggtacttttcttgctgtagactgtacacctatggatgataatggccgccagggtgatttggtgacagaatttgctaacaatgggaataagataacctgtgatccagagatgcagagtcatattgatgcatatatttctaatgggagagctgaatttgaagtttttgtcctgcaggcttattctcctgaggagtgggaattggctacattggtgctaacacgacctaactatcagattaagttcaaaaagaccggtgaagctataattgatgagaagtactcacaaagtctacagatgaaaattccaaatgggcgcacaactcaatttgttttagtaactgcgggtgcaactctcccatttaacacacagggaatatcagagccaaacaatgaggattacgatgttaggttacgcgatctaatcgtattagtcatgagaactttccagaaaaaggctttagatgccaaaaggaaagtcaacacttagaatccatgttgatctgttacaaaagattctatgtaaaaccgtagaaaattttcctatttttgattgttttgtgcagtattcgatgatttttgttcttgagatggaatgagctctcgatcaaagttttgcta

SEQ ID NO: 153169 - DNA, 695 bp, Zea Mays
atcatatcgagagcacactgccactgcaagtaggaaagctagcgcatcacaatggcggccagaaccagcgtggttgtgctttgcttcgttgtcgcctccgcccttctcgtggcctcgtcatttgctgcccgtactccaacctttgaatcgagaagggagacgagggagacggttgcaggacgaaccgtgaggaatatgccagtgatcatccaccacccggagataccaagcaactcacgagccgcggtgccggtgaaagtgaccgtcggcgtcgacccagtgaccgcccacctgcatccgcagcatcctcagccttacgttccgtcgccgccataaagcctgcagctgctgcagttgtgcgcgcgaacgaacagagatgaatgatctagtatacatgcaagaaataaataaagcgtggacatggcaatgtgcatgcagtatagttcgcgtgtatacaagctcaattaactacattaacgctgtagaagtgctacgcatatatacgtccaaatcaaagctgctacactgctagctgcaacaatatatgcgtacacgtacgtgtagtagtaacgtattccctccgttcttttttatttgtcgtattttagtttaaaataaactagcatgcgataagtattcgagaatagagtcagtattatataactttttacaccactcttacagaaattacgttt

SEQ ID NO: 153170 - DNA, 731 bp, Zea Mays
atgagggagaagctgagcacgccagagaagaaagtttgttttggtgagacgaatggtgacgacttgatgaattggaatgtgagcagcagaagataccatgttggaggaggacgtggtggtggaggaatttgtgggagaagaaggcagtctagctatcgtaggaaagaaagcatgcacgagattacaggaatgtggtctagctatctaaggaaggagtgcatgcaggcattccatgtacagtttcggatcctcaccaaatggaaggcgatcagctacacgaatccctatccaaacaagtttgttcggatgccaccccaccaaagttcaagtcaatacctacgtttggttggtatgcatcactcgagccgaagtccatcacgtcttggaggtagatggaggagcatgtttcacgtattattctttgactctaaagagatgacgattttggacctcatcgctctccaacaacaacgaggtgaatcgacgaatcagtcggaggttccaatacatgtgaacaaatgttactcaccctgtgtccccgagaagaccttagtagagttggccttcggacaccttctttgccctacatgcgacatctatgccgtgatgggcttcaagtccattggtgaactgttagcatggtcattgtcttttgaatgacaacattacgaggcatgccaagaaaggtataaaaaagtggatatcttatgtgcaggtttaataggaaggtg

SEQ ID NO: 153171 - DNA, 555 bp, Zea Mays
atgtacaattgtcagggtataccaacgctcggcaagcttctttacaggttccaagagatcgtcctgttgaacgccaggaacatcctcgatgccgaggacaatggccccgcgaggaagtgggtgtcgctggtggctcttttctgcatgtgcatgggaggaatcatgtattttctggagtacgagccagacacaatggctccattcctcagagggctcatcaggctcttcctggcaagcaagatcagcaatccaagccccctgcctcccaatcgaaatgcctcctactcgtaccttcagacgctgaatgctctggagcaatcaagaacccaaccaggggtggataacggactgacgacatcggagaaatacaacctcgaatcaattcctggactttagagacctcatctgtggtagtagtaaattgggtcttgtagcttaggaagatcacgaaaactcgaacacccattacatgtgccatcctgtgatgggtttatactctgttatatgtgtttgtcttgagtgcaaaataaatggataagcagaggtggtttgtgc

SEQ ID NO: 153172 - DNA, 1620 bp, Zea Mays
atggtcgagagcttcctattgcggcgccttcccatcgcctcctacgcccagccgcaaccgcagccggcggcagcgcccggcttcgacttcctcagtgaggtctacggcgccgcctcgtttgccgggcccaatgctggtgactatggcggcgagatggggttccttgacatcgtcgagcccaaggcagcatcagcgacactggtggacggcgccacgggcctcggggcctgcaaggtggagcccggcctggcgaagagcggcggcacgttcggcgctggcgctggtgccgcgccgccggcggccctggcgtccaagaagaagagggtcgaggggatgctgtccaagaacctgatggtcgagcaccgccgccgcaagcgcctcaacgaccgcctccatgctacggtacgtcatgcccaagatcagcaaggaccgcgaaaggcgatgcctttcagcagcatgatccaggagatgaagggcaagatcggcgccatctcgttgcgcggcgtgctacggttccggccggggggccacgccggggccgggcgagcgccggcagccgagccggacgaggcgtcgcgggagggctgctgggcgcagttgcctttcgagcttctacgtatggtgctggtcagggtcgaggaccaggagccacggtggccggcccgcagcgccatcgtgcctggcccaagggatgcccctctcaaatgtttcatcaggagggaccgggctgctcagtcgtattctctgtgccttggagtcactgatgggttagctgatgatgggaaatttctacttgctgcacgcaaatgtcgtaggcccgcatgcactgaatacctaatctcgcttgatgcgaagaacacatcggctggttcctacattggcaagctaagatcaaacttcttgagaacaaagtttaccgtctatgatgctcatccaccttgtgccagagctgcggtttcaaaggggtacatgatcggctcagcccaagtttctcctggggtacctgctaggaattatatggtttctcacatttcttactaggcgactttgggttctagttatattccaggacctgccggagaggatcaagctgctgcaggaagagatcgggcagtagcaggaggaggcgccgggcatgctcagcgttttccgggacctcaaccccgacgagatggtggccaggaacaccccaagtccgacgtggtgcggaaggagggcggcgacacccgggtggagatctactatgccgcgtgcacttcaacggtgatggctcgtgggatgtgattagggatggatgcaaacatacttgatgtgtttgtccccagggtgcggcaaacatttgatacaagggaagaagcctacctcttttaccttgactatgcaaagttagctggttttagtgtcaggacaaagaggtgtaattgcaacttctggtgtggtgtgattgcaaccccgcattaggtgtgattgcaactgctgtataattctactcaaatatctgttaaaaaatgattgcaactgctggtgtgttgtaattgtaactactggtgtggtgtggatgcaactgctgagttgctctgatgttattgcaagtactgaataactctggaaaattttgtt

SEQ ID NO: 153173 - DNA, 1747 bp, Zea Mays
ctacaaaaagaggagacgcgcgcacgcaaacccggaggccgggaggcggagggcagaggcagcaccgtcccgtccacctgaccacctccaccattttttcctcttcctcctcgcctccaccccttcccttccatctcttctcacctggccactcctctccctctctcccgcgccgatcgattggcccacccatcgatcgagcacgggaagaagattccagtccggagaggtctcaattcgatcgggctcgttctggtgtgggtgggcaccatggcggccacagaggcctcggcagacaagaacgccgtcttccgcaagcttcgcaccaaatcagacaacaagatgtgcttcgattgtaacgccaagaacccgacgtgggcgtccgtcacctacggtgtcttcctctgcatcgactgctcggcggtgcaccgcagcctcggcgtccacgtctccttcgtcaggtcaacaaatttggattcatggactccagaacagctgaaaatgatggtctatggaggaaacaaccgtgcacaagctttctttaagcagcatggttggacagatggtggaaaaattgaagcaaagtatacttcaagagcagctgacttgtaccggcagttgcttgctaaagaggtcgctaaaagcgccactgaagatggcaacaatagttggccatcttcaccagttgcagcttcccaggcttcggatcaaactgctgcgtttccagatcttaagctgacagaggtatcaaaagaaaatgtaagtgaaaaggaagactctgagattgttcgttcgcctagagttccaacccgttctatcaagaagccgattggtgctaaaaagcctggaaataagaccggcggacttggtgcacggaagcttacatcaaagccaaatgaaagcctgtatgagcagaagcccgaagaaacagctcctgtcctgccatcatcggtgattgcaagtactacagctaggagcaaaccccatacttcccgatttgagtatgtagaaaatgcacctgctcctaagactgggagcagctcagaaggcaatctcatgagtggacatgttgcacccccaaaagtcatcgaacttctttgttgaatttgggatggacagtggatatcacaaaaaatctacatccagttcatccaaagtgcagattgaggaaagcagtgaagcaagacagaaattctcgaatgcaaaatcaatttcatcctctcagttttttggtgatcaggccagtttcgaaaaggacactcaagtctctctccaaaagttttctggttcctctgccatatcaagtgctgatctatttggccatccagcaaacaattctagcgtggatctcagtgcttcagatttgatcaacagaatatcattccaggccactcaagatctgtcttctctcaagaacatggcaggggaaactgggaaaaggttgacatcgatggcatccaacatcatcactgatcttcaggaccgcatcctctaagcttaagttacagcaaagtaaacttttacgttgcttcagtggctggtcccgtcaaccgggtgacaaactggcctgccccgcagatctgtctaggagttcgagttcgtaggcgtctgaaaacttcctggcatatctgtctaggagttcggaagcatctgaaaaaagtgtaagctatttccttaatatgaaagcaggaaggattgccgctctcacgttagtccacgtcggcaagaaatctttcgccgttcgatc

SEQ ID NO: 153174 - DNA, 546 bp, Zea Mays
atttgactggcggaagcaaaagaagataactgactttcgtcaacatcatctggcatttattgaagagtgggatttggctacggagaatgtgcatgacaacaatgagttgcacaacaacagtgactataggcggtaccaagcttggtaccagggtgcgactcgttgtaagcttcgccagcagtggacaacggatgactacgctgacattgattcttccgacgatgaagacacgaagtacgaccagtccactagactaggaacccaagtggaggtggcacccatcttggatcgagtgggtaacacattgagacgctcggtacaggacattgattgccagcttttgactgtgggcgacaacagcatgcgtagcttcttggaggatcttctaggggcaagggtgtgggaaatgagagacgaaaggatggagagaagttacctccaatgtgttttgatggtcctcttggtccagatttttttgaagagacggtttttaactttccagttcaaagtaaaagagatttcaacaaagaggattgcttggtgcag

SEQ ID NO: 153175 - DNA, 1740 bp, Zea Mays
ggttgctgcagcaactccaaggcattctagactggaggtctcaagttcgattcctcttaaatgcatctttttttgtgcaattactaggggcaacaacgtccaaatcctagactcacacgcgctatgacttctttttgtgcacgctcggtcacgcgcaggatgacttcttttactgcaccggagggagtacaggcattcagctagtaataatgatataaagcccgcccacgcactagcccatttcccctctgcttgcttcgcctcgtctgccctacccctgccctgtccacattttcttccattccggttgctcaacaaacaaaatatatatatcctcgctttccttcccgtcgccgcctgaaaccgctgcgctctcggcttggatagcaagggtctcagtctctcagagggagcaagaagaggatctgagggtgagatggcgatcgaccacgagtccccgttcaaggagctccgcctcaagaaccgaaggatcatgggcggcggcggccctgaccctgagccggaggaggaggaggaggagggcgtcacggcggcgtacgcggagcggtggccgcggtggctgcagccgctgctgtccgcgcgcttcttcgcgcagtgcaggacgcacagcgactccaaccgcagcggcgaatgcaacatgttctgcctggactgctcggccgccgggggcacgggcacgggcgcgggcgcgctctgctcgctgtgcctggcgcagcacgggcaccgcgaccaccacaccatccagatccggcgctcctcctaccacgacgtcatccgcgtctcggacatccagcgcttcatggacatcgccggcgtgcagacctacgtcatcaacagcgcccgcgtcgtcttcctcaacgagcggccgcagcagcagaagccgggtggcggcaaggccgcgtcgtcgtcgtcggcctccgccaacctctgcgaggtctgcgcccgcagcctcctcgacaacttccgcttctgctccctcggctgcaaggtcgtcggctgctcccccgacgccgccaaggccaggaactggctcctccgggccgccgacggcgacggttccaccacatcctcctcggccccgcgcaacgccgacaggaagctgagcttcacgccgcccacgccgcagccgaccctgccgacgaagcgccgcaagggcatcccgcaccgcgccccgttcggcagcctcatcgtcgagtactagaatctccttctcccccagccatcgctgtccacgtccgttgcttctgcattggcagttggcactacacgcgcgcggtagagtggaagtactcttcaaacgacggaatggaatcgcacagtgagccagtgaatccagattacaggcaagccaataggttggccaccacttgggtggcctggcccgcctttctttgccacggcacttcggttggtgggtgcttatcgaggtggatgccatttgctcgctggcttcgctttccagaaaggggagggaggagaaaggaaggtggatggattggatcggacatcggaggaagaatcaaaaccagcttttcatcactgttcacgagatatatgtttctttctgtctgagaaatacatgtaaattttatgtcttgctctgctccaaatcatcgtagcggagcagtatagctagcttttgtgatgcttttaccagattgtattgttataggttgtctgaagaaacgagataaccaacgcacagtgcttgtgtgttca

SEQ ID NO: 153176 - DNA, 312 bp, Zea Mays
ggagatttgaacgcaccttcaattcagttgatagttttgctgagatagtggacgaagaaaaatgccagtccacgaaccctatccatccgccgtcctcgacgagcaggtccaccagatgcttcacaactcgcgtgccgagctcgacgccccatcagcagcttcctctctccagggtgtaggcaagtccccgaacactatccctccgcccgtcacactgttccccatttctagcctaatttatgtatgtgcatgaataattagtttataggttatgcgccatagcttttatgtctaaaagaattgtgacaattg

SEQ ID NO: 153177 - DNA, 915 bp, Zea Mays
atggcgcggactacttcacgaccaagacagctgtcgcgacgcgcacgacgtcgccacgccacgacaccaccacggtcaggctcgcgccggccgtcgctgaaccacgagagcagggcgaggcgctggaatttgaggcggagtgagccgagacgacttgaacaagtgctgacgagctgggagaccacgacgcgagcagggaaccggccatggagcttggggagctgtgcgcagaggcgaacagagagatgggcgtgtggccatggaagtagggcgcgagttaggagacggacgccgagtagggagcttggtcgggacgcgacaccagggagctcacggcggggtcggactcggcagccttcacgagctaggcgatacgggaggacagacggccacctggggcagcgcccaggcgcgcgtgatgaggagagcaggagccagggcgtcacggccatgggagaagctcctgctgggctgggcgactggaggagcgccggctggcgagctccatggctgggaggagcagcgggccgcagcgcgcagggagcagtaggagcacggcacgcagcatgggagaaaggagcgcggcgctgggaccagagcacgcgcagtagagatggagggagaaatcacagcgctgaggctggggcaaaactcgaccagccatggcgagcaggaagaggaagaagccctagccaaggagaagcagggggcgcgcggaagagaggaagctgggcgtggctaccaggaagcagaggcgcgcgccgagggcgaggtgacggacgacgcatggggaatgggagctcgaagccgagctcaaccacatgggtacgacggacggaggtggaagacgagctgataaaaatcagaaaccagagcgtgcgtgggaaaaatgaagatggcaagctcaacgggtaa

SEQ ID NO: 153178 - DNA, 625 bp, Zea Mays
ttgggtttgggtcgggccaaggttgacttctcagggatggtggacgacgagttccttgagagattgagcatagagaaaggcacgagaaaggtcataaaccatgaggagaggggacgggtcttgcgtgccatggatgggtgcagctacaaggctgcagctggtggctccctgtccaactcgctcgtggcgctggcaaggcttggcacttggcagtagccagtctgctggctgcccagagcttaaaattgcgttggccggcagtgtgggcagtgatccactaggtagtttctacagggcgaagttgcgccgtgctaatgtgcatttcttgtctaagccggtcaaagatggagcaaccggaactgttattgttctaacaacaccggatgcacagcgaagtatgcttgcgtatcagggtacttcgtcaactctgagttacgattcagacttggccagctcagtgtctaaatcaaatgtagtaattgtagaaggctatctgtttgagctgcctcacacaattgaagctatcaagcaagcgtgtgaagatgctcaccagaatggtgcactcgttgctgttactgcatcagatgtgtcttgcatcgagcattgctacaatgactttcggtga

SEQ ID NO: 153179 - DNA, 79 bp, Zea Mays
aagcgtggtggggacgctgagaacgcggacgtcaccggcagcgacacgctcgcggacgaagtgcaggtcgatctccaca

SEQ ID NO: 153180 - DNA, 1100 bp, Zea Mays
gttgtggagtctgctgaagaacgagttggagtctgggagacgtttagacaaacacaagcaaattttttttcaatcccgcagagggcaaaaccgtccaacgagacaaccccgcgcagaggcaaaagccccacgcttgagagtgagaagaaacagacgcatcgcttccttgtccatcctacctccccttccccccgcccaaatcccgtgacggtcgccgcccccgccgtgctctcgcccgcgcgggagacgacgcagcacccccccgcgtaggatccgcggcggtcggcaggatggtggtggccacggaggaaatggtggtctactgctttgacaccctcgtcgcctatttcaccggcgagcggccgccgcctcccgccttcgaggatggaaaccatgcgctgagggaccgacgctttcccccaatacaatcaaaggaactcccaaccttggagtgcacggtatctatactcactgattatgaaattgcagaggactacctcgactgggaggttggaaagcatggtttaattattgaatttacagctccagactccaacacaaaacacagtgcgacctatttgcctgaagttgcgggccatgaaggttggacacatgtagaaactattgattcactcgtgaggaaggcaggttaccagagaatcatcactgagtccttgaggaagaaaatcaaagtcactcgctaccagagcaccctgtacacgatgcactatggtgaatatgttgcgtacctcaagaagaacagaggtgcagccccgtcaattagtggggctcctcctgtagttaatggcttcaagccaagccattgatttatcagtataaaaaaaagctcaaagaacatattactataatttatctgcgagcaatttggggggtgtagtgtaaccaccccccacagttcattgatctagcatcattcccttccaaggaaaaggccaaataggggcgtcatgacaagcgcccagaataataatgccttcctggatggatcatggatgatgcttatgtatcttgaaaacacatgtgcttcaagaagttcaaattgtgtggtgaagttaattgattcgagttggccattccta

SEQ ID NO: 153181 - DNA, 1472 bp, Zea Mays
gttgtggagtctgctgaagaacgagttggagtctgggagacgtttagacaaacacaagcaaattttttttcaatcccgcagagggcaaaaccgtccaacgagacaaccccgcgcagaggcaaaagccccacgcttgagagtgagaagaaacagacgcatcgcttccttgtccatcctacctccccttccccccgcccaaatcccgtgacggtcgccgcccccgccgtgctctcgcccgcgcgggagacgacgcagcacccccccgcgtaggatccgcggcggtcggcaggatggtggtggccacggaggaaatggtggtctactgctttgacaccctcgtcgcctatttcaccggcgagcggccgccgcctcccgccttcgaggatggaaaccacccattgtttgtgacctggaagaaggctgccaatggttcagaaccacgcctccggggatgcataggaactctggagtcccgtcagattgtcagcggctttagggactacgccctaactagtgcgctgagggaccgacgctttcccccaatacaatcaaaggaactcccaaccttggagtgcacggtatctatactcactgattatgaaattgcagaggactacctcgactgggaggttggaaagcatggtttaattattgaatttacagctccagactccaacacaaaacacagtgcgacctatttgcctgaagttgcgggccatgaaggtgaaaatttcctttttcatcgatgcgatgtacacttatcgtttctacagagttctttagtttctagaattattgcaggggataataagaagaaatgagttaagaaaatatgtaatttcatctttctaaatcatcatggaccaaatgcattataatgagcaataacggtaaaataaagagtcaactgatcagtacattccaaatctgtattgaatagtttgtaacttaggcttaatcttttggcaggttggacacatgtagaaactattgattcactcgtgaggaaggcaggttaccagagaatcatcactgagtccttgaggaagaaaatcaaagtcactcgctaccagagcaccctgtacacgatgcactatggtgaatatgttgcgtacctcaagaagaacagaggtgcagccccgtcaattagtggggctcctcctgtagttaatggcttcaagccaagccattgatttatcagtataaaaaaaagctcaaagaacatattactataatttatctgcgagcaatttggggggtgtagtgtaaccaccccccacagttcattgatctagcatcattcccttccaaggaaaaggccaaataggggcgtcatgacaagcgcccagaataataatgccttcctggatggatcatggatgatgcttatgtatcttgaaaacacatgtgcttcaagaagttcaaattgtgtggtgaagttaattgattcgagttggccattcctagttcca

SEQ ID NO: 153182 - DNA, 2253 bp, Zea Mays
gttgtggagtctgctgaagaacgagttggagtctgggagacgtttagacaaacacaagcaaattttttttcaatcccgcagagggcaaaaccgtccaacgagacaaccccgcgcagaggcaaaagccccacgcttgagagtgagaagaaacagacgcatcgcttccttgtccatcctacctccccttccccccgcccaaatcccgtgacggtcgccgcccccgccgtgctctcgcccgcgcgggagacgacgcagcacccccccgcgtaggatccgcggcggtcggcaggatggtggtggccacggaggaaatggtggtctactgctttgacaccctcgtcgcctatttcaccggcgagcggccgccgcctcccgccttcgaggatggaaaccagtaagcctccccgcagcgatcgaaaccgggccgtgttgcccccatatcgaggaggtggttttggatccatttcgatatagggttaggccaattcgtgttagatttgggcaaaaggcggcgccttggtagttttggtttcggctcggctcctgttgcgactgattcgcgatccgatctgattgactgtttgttggtcctggcgattgcggaatcgtgtggtcttagttttcgttgcaaggcagaggcgaagtgaagtattcacacttcaatggccacgtacctcgcctttcgacagttgccagcttcctacctctagcgattgtctgacggagaggacaaggaatctcactgctacacatctgagattatgatttaagtaggacagtcagtttaatcctaaggcattcagattctttgggaagttgggaggttaaacaggatgagctttcgtgttctgactgtgacgcactgatgtttcttattcatactccaggattcagacttttaattgagatcctttcaaccgtgtagtccacattaatttgtatggcttgtaaggcatcattgttctagcatacatgtttttaactcattgggtcaatttttttgtaactttagcccattgtttgtgacctggaagaaggctgccaatggttcagaaccacgcctccggggatgcataggaactctggagtcccgtcagattgtcagcggctttagggactacgccctaactaggtgactattgtttcagtattgaaattatgtctgatccaatgctgaaatatctggtcggtactcaaaatgttgatgggcttatgctgtaataagtagaaaagcaatcgtgcactttgtattggataatgtttagatatacggtaatcttgatatcctcttgcagtgcgctgagggaccgacgctttcccccaatacaatcaaaggaactcccaaccttggagtgcacggtatctatactcactgattatgaaattgcagaggactacctcgactgggaggttggaaagcatggtttaattattgaatttacagctccagactccaacacaaaacacagtgcgacctatttgcctgaagttgcgggccatgaaggtgaaaatttcctttttcatcgatgcgatgtacacttatcgtttctacagagttctttagtttctagaattattgcaggggataataagaagaaatgagttaagaaaatatgtaatttcatctttctaaatcatcatggaccaaatgcattataatgagcaataacggtaaaataaagagtcaactgatcagtacattccaaatctgtattgaatagtttgtaacttaggcttaatcttttggcaggttggacacatgtagaaactattgattcactcgtgaggaaggcaggttaccagagaatcatcactgagtccttgaggaagaaaatcaaagtcactcgctaccagagcaccctgtacacgatgcactatggtgaatatgttgcgtacctcaagaagaacagaggtgcagccccgtcaattagtggggctcctcctgtagttaatggcttcaagccaagccattgatttatcagtataaaaaaaagctcaaagaacatattactataatttatctgcgagcaatttggggggtgtagtgtaaccaccccccacagttcattgatctagcatcattcccttccaaggaaaaggccaaataggggcgtcatgacaagcgcccagaataataatgccttcctggatggatcatggatgatgcttatgtatcttgaaaacacatgtgcttcaagaagttcaaattgtgtggtgaagttaattgattcgagttggccattcctagttcca

SEQ ID NO: 153183 - DNA, 1250 bp, Zea Mays
gttgtggagtctgctgaagaacgagttggagtctgggagacgtttagacaaacacaagcaaattttttttcaatcccgcagagggcaaaaccgtccaacgagacaaccccgcgcagaggcaaaagccccacgcttgagagtgagaagaaacagacgcatcgcttccttgtccatcctacctccccttccccccgcccaaatcccgtgacggtcgccgcccccgccgtgctctcgcccgcgcgggagacgacgcagcacccccccgcgtaggatccgcggcggtcggcaggatggtggtggccacggaggaaatggtggtctactgctttgacaccctcgtcgcctatttcaccggcgagcggccgccgcctcccgccttcgaggatggaaaccacccattgtttgtgacctggaagaaggctgccaatggttcagaaccacgcctccggggatgcataggaactctggagtcccgtcagattgtcagcggctttagggactacgccctaactagtgcgctgagggaccgacgctttcccccaatacaatcaaaggaactcccaaccttggagtgcacggtatctatactcactgattatgaaattgcagaggactacctcgactgggaggttggaaagcatggtttaattattgaatttacagctccagactccaacacaaaacacagtgcgacctatttgcctgaagttgcgggccatgaaggttggacacatgtagaaactattgattcactcgtgaggaaggcaggttaccagagaatcatcactgagtccttgaggaagaaaatcaaagtcactcgctaccagagcaccctgtacacgatgcactatggtgaatatgttgcgtacctcaagaagaacagaggtgcagccccgtcaattagtggggctcctcctgtagttaatggcttcaagccaagccattgatttatcagtataaaaaaaagctcaaagaacatattactataatttatctgcgagcaatttggggggtgtagtgtaaccaccccccacagttcattgatctagcatcattcccttccaaggaaaaggccaaataggggcgtcatgacaagcgcccagaataataatgccttcctggatggatcatggatgatgcttatgtatcttgaaaacacatgtgcttcaagaagttcaaattgtgtggtgaagttaattgattcgagttggccattcctagttccagtgatttgtctctattcttaactt

SEQ ID NO: 153184 - DNA, 1312 bp, Zea Mays
ctcccaattccccatctcgcttgctgtgtactcgcgctccagctcaccatttctcctctcccttcccttccctaagcatctcagcgaatccaatcgatccgaaggcgatggaccagcagggtgcgggcggggacgtggaggtgccggcggggctggggctgacggcggcggagtacgagcagctgcgtccgacggtggacgcgcaccaccgctacgccgtgggggagggccaatgctcctcgctgctggcgcagcgcatccacgcgccgccggccgccgtctgggccatcgtccgccgcttcgactgcccgcaggtgtacaagcacttcatccgcagctgcgcggtccggccggacccggacgccggcgacgccctccgccccggccgcctccgcgaggtgtgcgtcatctcgggcctccccgccagcaccagcaccgagcgcctggaccacctcgacgacgccgccagggtgttcggcttctccatcaccgggggcgagcaccgcctccggaactaccgctccgtcaccaccgtctccgagctcgcgggccccgggatctgcaccgtcgtgctcgagtcctacgccgtcgacgtccccgacggcaacaccgaggacgacacccgcctcttcgccgacaccgtcatcaggctcaacctccagaagctcaagtccgtcgccgaggccagcacctccagttccgcacccccgccgccgtcggagtagcgggcggccggaatcggcaaggggagaaacgcagcagcaagttttgggcgtttttctgttatttcacttctctgggaaatggtctctctgaattaaatctgatcgtggatggatttggactggacgagaggaggagaggaggggtcgggtcagcttgaatcaggtgtcgcgttgccagggtggcgacctgtaataacctctccttcatctcctagattcattcctttcatctcctagattcattcctttcatctttgcttcttccagaatttggttaatttcagctttacgcgagtggaatgattccttagaattgctgcttctcatatatctttgcattgcatgttcgcgttgcatgtttgcaagtagtagtaatcttcttgcatgtgatcctgatccattgcgtagtttgtttgcagtacaaatgcaaggtaaagcctagtgttgctagcgctacaggatcactgactggtcaattgtccttcatctaattagttccactcatgtcttcttagcagctgttcactggtgatgagtatgcatggttaatttcgttgctgcacctgaatttgctgagtaacttgaga

SEQ ID NO: 153185 - DNA, 1290 bp, Zea Mays
atggagaccaaggacgtgtcgccgcttgccgccgccgccgcggcgcccgtgcttgcaccggcctctcagcagcagcagcagcagccgccccagccgcagcagcaccaccaccagccaccgcagccgcagcatcagcaccagcaccagccgccgccgccgccgttcccgcagcaggcggccccggcggcggcctcgtcgcccgccgcgtccatgcccggcggcatgcgcctctcgttcgaccatatgcccgggaaggcgcccggggagcagcaccaccaccaccaccacgcggcgccgcccatgctgtacgcggcgccaccgcagggcgcgggtgcgccggggggcagtgtgctcggcatgggcgaactgatgcgcaagaagcgcgggcggccgcgcaagtacgcgcccgacgggagcatggctctggcgctggcccccatctcttccgcctcggccggcggcggcggcggcgccgcagcccccgggcagcagcagcagcacggcgggttctccatcggtagccccccgtccgaccccagcgccaagcgccgcggccggccccccggctccggcaagaagaagcagttcgaggccctgggttcttggggcatcgctttcacccctcacatcctcgccgtcaaggcaggcgaggatgttgcttcaaaaataatgacattctcacagcaaggccctcgcacagtctgcatcctctcggcgaatggcgcgattagcaacgttacgcttcggcagccagccacatctggtggactagttacttatgaggggcgtttcgagataatctcgctgtccggttctttcctgctcgcggaggatggtgacactcgcagcaggactggtggcttgagcgtcgcgctcgcgggatctgacggccgagttcttggagggtgtgtcgctggaatgcttatggctgcaactcctgtccaggtcgtggtggctagttttatcgcagaggggaagaaatctaagccagccgaagcgcggaaggtcgaaccgatggctgctcccccgccgccgccgccacagatggctgccttcgtgccggctccggtggccaccagccctccgtcggaggggacgtccagcgcgtcgtctgatgactccggcagcccgatcaaccacggtgcgatgccgttcagccactccagtcagcaccagcaccctcaccagcaccagcagcacatgccgcctgcctacgcgtccgggggctggtccctctcggtgcaccagcagaacaggcatgattctgacatgaagatgatgtcgaactaa

SEQ ID NO: 153186 - DNA, 774 bp, Zea Mays
aaaaaaaaatcaaatgtatgcagtgctagcagctttgttgcctttgtgcacgattccgccgggaaagcaatccgccaggggctttttgagaccatatctagttttaacggaatctagggcaggtggatgacctaaggagattgatccgccccccacttgtaaacttgcagcaggttttcaaagtcttgactgaaccaagtgagaatatctgtaaacctatagctactaaactggtcaatctatatcggacaggaaggcttggccgatataccttagaacatgtcccagatgttaggcaggaagttgtcgcagaattacctaccgcctaaagcatgccctgttttttttaccttaaaacaaggattatgcattggtttggccaggatacagtacagcccctcctagctgtaggttgcccatggagcatgaagcgcctccggtgttccattagaggccaaaaactgaatcaaccacagtgtactatgtaagtcttgcggattgactactcgggtgcattagtttggcagataatcttaaagaaggctatcatgtgggtgcaagaaacattcacattcatatacatcagctgcggattaccgcgtaccgcgatgggttcaggactcagggagaatgctcattgtgaccaatctccagcaacgtcatatatatccgttctttacagttttctctaaaagtttttgtcctctatatctcttctctcttcaacaatgttctctatctcgttctctatacataaatacatatgttctatat

SEQ ID NO: 153187 - DNA, 876 bp, Zea Mays
atccatgatttcagcagccgacgacccagtagtagtcgttcgtgcatgcatccagcgtacagtctgtggtcgtcggccaggacgtacgctgcggccttttgagttttgtgatcgaagacgaagagtagacgacgcgttgcggtcgctgtcgaaggccttttgagatgtgaatgtaatggtaggtaacgcggtaacggcctcatgcttctacagaccatggcggccggcacggcacagcgcctgcggttggggtgcagatgaggacgccgccggtgacgtacgtcgcaggcgaggatgccggcttttatttggtctaccttgatgaccttgcaaaagtccatctgtatcagcaacgacgacgatatatataatagcgatcgacgtcgttgccgacgtgtgttcctcagcgattattcgatcgataacacttcgctttctcgtgctgcttacagagtagtgcatgccggctctttatcccttacacaaaaatcttatcaacacgtgtgttgcgtgcatttagcttatgtgtttattttctgcgtaacaaattaacaagacgagaaaaaaatcacaacacacagacatatatatatgtacacacacaggagcgagtggtttttctctcttccttttctttctgaatcgttcgcgtatcaataatggcttttgtatatatgtggtctgataaattgataatatgccaggtgtcaggttagagcgaggttgtgggtcggtctaacagatatttttggcgcaaagctctagagagaattgtacttatccgttatttatcgtcgaaaaaatgcaataatataagcacgtagtacatatgcaatgttgatttcacttggttttgacacatgcgatcgatgtcat

SEQ ID NO: 153188 - DNA, 496 bp, Zea Mays
aattagaggctctcccattcttggatccactgaagcattttagaggtgctctattctactatcaaagatctgaaagaccacatcgatgagtttgtccatgcctccatggacgagcacaagacctgctttaagaagacgatccagaagatgtttgggatgtcgaaggctgttgcagagaaatccgcggcagaagcgaaggaagctggggttgaaagtgctttgccacttcagaccagtgtctcgcagtagaatttcacgttggtagtttcttgctcgatgctggccttttttatacaagggttttgttgctctgtgttgtcttaaacgtttaagcgtgtcagtggcgtgttttcgtaactgtattgtagtgctttcattctccgaagtttgttgtgtgagtgtgccttaaatataccaatgtagtttgcttcattctccaatgccttgtatggtcgtagacccatgcatatggacatcctgaacccaactgtcaact

SEQ ID NO: 153189 - DNA, 371 bp, Zea Mays
taatgctgccgccgacgacgacccaacaggccaacactaataacggacctggaatataatgtcaactgccaggtaaatatttcaggcaggtgattaggagcagctggtgtgcgtagacgacagtactagagctagctagctagcggcgattgtttggattaatggcaatggagcaggaggagggggtgtctgttgaagacgtggaagatccagaaatagaagctcttcctactgtggaggaggagaagcgcttgcgcgggggcggtgttgaacttgaagaagaagctgccggagtccaagaacattatcaggttcaccgcctagctagctagattaagctaccagccagccagattaagggctgttgaggg

SEQ ID NO: 153190 - DNA, 576 bp, Zea Mays
atggcagcctgcaagtacgccctcgtcgccatctccgacccgaagactgaagccaagcttgccgccacctcgctcatccccgaatccgccgtgttgaccccgaccagcgtcgccattccatgtgctactgctttcgccaaggcattccggggccattttgtgccactgcgcccggacaagaacatcgtcaagagcttggtcatgcaacgagacgagttcgtggcgcaggcctgtgctgcgctcgagcggacacggaggtcgacgacgaggttgtcgtgtggggagcggaggacgagggagatgacgtggggcagccacgccttcaatgaaaaggagctttgcaaatatttcaagcctggtgaccatgtcaaggtgatcttaggagttcaagaaggcgctactggcatggttgttaaagtggaagggcatgtcttgatcattttgtctgacacaactaaagaacatatccgtgtgtttgttgatcatgtcgttgaaagctctgaaattaccacaggaatcaccagaataggtgattatgaactgcatgatcttgtcctactctgttctaaaatgtag

SEQ ID NO: 153191 - DNA, 2083 bp, Zea Mays
ttaagagtcatctgtagactgcccccgctctcccctgcctcccacggatcccgcacgcgcacggctaacttaccccgccgccgaggatcccgccgctcggcaaacaaccgcctccgaggatcccgccgcccgcccgcccccacccagccacgattccccgcccaacgcgcgcgggtcacgcgcacgtcgcgcccgaccggccgccagccgtgattccccgtcggcggtggcatcttcgacgcctccaccgccttcttcctcaccagctacaccagcaccctcggtggagcgcagctgcgcgtttttgagcgccgtcagaaggtgggcggccgcctgggcaccgtcactctcgcgggcgacagcttcgaggccggcggctccatcatccacccccgcaacctccacgcgcgccgcttcgccgacctcctgggactcgccgtgaagaccggcggcgacgactggctagggatctgggacggcaaaagcttcgtcttccaggggcgacgatgcgtgttcgtttggtgtctcagtcatagccacagccacggtacaccaggatccagcctggctcctactccacgggctccgccgttcctcacatataccaactcgtcccctcttatctccgtccaccacgcatcgtcgcccctcgctcgctccgcaattccgcatcgcctcctatccttcgcccgccaacctcggcgggtcagagcgtgtttcgcgcgggggctgtggcaggagcagcagcagcgccatggacccgtgcccgttcgtgcgggtgctggtgggcaacctcgcgctcagaatgccggtggcgccgcccgccgccggggccggcgcgggcgtccacccgtccatgtcggcgtgctactgcaagatccggctcgggaagatgccggtccagagcgtcccggcgccgctcgtggtctccgacggcggcgagcagacgccggcgtccggggccctcgccgccgcgttccacctgtccaaggctgacctggagtggttcgacgggaagccctcgctcttctcgtcgcggcgcggggcaggggaggctagcctgaaggtgtcggtctacgccggccggaaggggagtgcctgtggcgtcagctccggggggctgctcgggaaggctacggtcccgctcgacctcaagggcgccgaggccaagcccgccgtgctgcacagcggctggatctccatcgggaagcgggccgggaagggcagcccgtcggcggcggagctctgcctcaccgtgcgcgcggagccggacccgcggttcgtcttcgagttcgacggcgagccggagtgcagcccgcaggtgctgcaggtgcgcggcagcatgaggcagcccatgttcacatgcaagttcgggtgccgcagcaacagcgacctgcgcaggcccgggatgcggcgtgagcgcgacgccgcgtcggccaaggagcgcaaggggtggtcggtgacggtgcacgacctgaaggggtcccccgtggcgatggcgtccatggtgacgccattcgtgtcgtcgccgggcacggaccgcgtgagccggtccaacctgggcgcgtggctcatcctccgccccgcggccgacggcgcctgggaggcctgggcgcgcctcgagtgctggcgcgaccgccgcggctctggcgcgtccgacagcctgggctaccgcttcgacctcctcgtccccggcgtggaccacgccgccgtcgccctcgccgactcctccatcccctcgtccaagggcggcaagttcgccatcgacctgaccgccgcgcagccgctcagccggggcggcacgccggggtgcagcccgagaggcagcggcgacctgagcaagtggcccctggggaactaccgcggcttcgtcatgtccgccgcggtccagggcgagggccggtgcagcaagccgacggtggaggtcggggtggcgcacgtcgggtgcgccgaggacgcggctgccttcgtcgccctcgccgcggccgtcgacctgagcatggacgcctgcaggctcttctcccaccggctgaggaaggagctcaactctccccttctggtacaaattgtttgatcgactact

SEQ ID NO: 153192 - DNA, 797 bp, Zea Mays
cgccttgtgttggcggccgtaggccgtagggcgagctcccaggtcgacgtggcggggatggctgcgacggccggcggtggcggtggtggaggggctaaggcggcagtgaccgagcagatagcacaagcagtgcggtccacctccaacctcctccagctgatggagcagtcctcccccgctcaggttcatttggcaaaactaccgaagaacctgctggaaaaagcatcctttgcaaagaacacagagcatgtgctgcaccagctacctcaagtaatatcatccttggatgcttatatggacaggagtttgcaaagtgcctctcaaattaagactgttacacagctcttgtcaaacatggagaacactcagctgaggtacatgttgccttcctctcaaaagaagaaagatcaaaagagtactgaaccttaagaattcagagtcgactgatgtgttcaccgagacataatggaaggatatgttcttgccgttttgtgctaaagaaatttgagttttgtggctctcaagagatggcttggctttatctggtgtaaggatccatcgttgtctactgtctgtcccacatttgctgagttcggttgggggacgctgttaatggaaatattcttctttcttcaaaccatttacgggtgcctaggacctgtatcataaggcaagcatgcctgttagttgtcacacattctggtctatgaacacgttgctttcttgtaattgcattggttgttttagcagtaaattatggtagaaattatgaagtgatcaaagtgtttaacgtggca

SEQ ID NO: 153193 - DNA, 988 bp, Zea Mays
acatttcctcggtccagcaggagccagcgtatacctgagagacggaaggcgcctgtgtcgtgcgctgccggagacgggatcactccgcagcgacttcaccagctgcggcagagcccccagggccttctgcccccaagccgccgccatcgcctccctcccgcttcgcccgtcggtcggctcctcggcaggggcggtcgttctagaggggtcgggaaattttgcataacggaaattcgaacgggtcccacttgacgattggaaattcggccctgcggttggttgggcctttggttatttgtttacacacattttcaactctgtactgggcgtaggccgtaggccgtagggcgagctcccaggtcgacgtggcggggatggctgcgacggccggcggtggcggtggtggaggggctaaggcggcagtgaccgagcagatagcacaagcagtgcggtccacctccaacctcctccagctgatggagcagtcctcccccgctcaggtctcccgccttctgcccccatctcgtcttgtttgggtctagagtgttccgattgtaagcatgattttacagccgtttgctgatcacaagaatcaacgcttttccaaatttgtgcgaaattgacttaatttatgcggtagttcgtgatgtctccctttactctttagattagagacagtatggttaggattttggatggatttacttttgtcttgaaggtgaaatgattgtccaattcatgaatgttattatcttcatcctatactacataacctagaagttattcttttggagtttggcgggttcttcttgcccttgagcctgcgagcgagcagtaggtagttttttttggtcgaggtcattgttttgctgtatacaaagactcaaagagcgcccaaatgtaagggttattgccccctttttttcttaatataaaatttagcagctctcttgagtgctcgatagaagtaaccgctctcctgagtgct

SEQ ID NO: 153194 - DNA, 104 bp, Zea Mays
ccggaatccaaacgagatatatcatctaattgtagccagctctaagcaactccaagaaattagctatatggttttgcaaaggtaaatttagctaatattagaag

SEQ ID NO: 153195 - DNA, 1341 bp, Zea Mays
aactactactagcatgcatgtttattttttttttaattttaggtagacgtcggggaatgagaatgtgagtctcaccacgcgccgccggcccgccgccgccattgccactactatcccatcaccatcccggccggcgaggacctcggcatcctcagtgacgacgaggagggacgtcgtggtgaggatctaccagaacttgaaattggtttatccaattttattgtcgtggacaatctgctagttgttcctccagaaaagtttgacaagcttgagaatgtcatacgcaagatatgcagccaaattggtgagataaaagaaaatggtctatggatgcctttaaacccagagtcaaagaagacatatggttactgtttcattgagtataatacacctcagtttcagttgtgttaatttagagctgctacaggagcacgtcgtcacagcgctttcagtggagagctactacgattcaagaagcacttgatgtcagtgaggtagccagagaagtaaggcaacagaaagccattggaaacatagttatgcagatgaaattaagaggttttaggagtgctgcttgtacaactgttttgacttttgagatgagaaggtcttcgatacattttaaaataaaatgatcaaatatttatggtatttgtccagggctgacattaactgttcttacccttgtgtatcctgatcttaattatagcaaaggaaacttgagttgcagtatagataattgcacgagcaaaacaacttgggaaagatccttttagcttaagcaaaaggttctttgatgacttcttgtcagacatggccaaacttcaatgtttacaaccatctgtggagccctgtgtttcagatcatgtcgatgagattatagatatgattaaacaggtacatatacttgattctgtatgcagtacttagtgagatgcttatgcagtttctttttgctgtccacttgtgaaaattatttactgatttctataccagagacacaataggccaacgtaagtttaaaacatgcaaagtgaaagccaaaatgcaagatgatcagaaaatttcactaacatctcttcagtaagtatataaagcgcgataacacacacaaccttctgcaatgagagccgatgactcctctgagcctctgaggtgagtaaagtagtgcgcaataacagattgaagtcaagacaaatgtgctcttacctcaatggcaaccgtgttagcaaaggtcccaaggagaagaggggcagcaaatggcagcacaaacgtgccaaaaacgaaaattctgaacaaccaccctaacaacactgaccataggaaaaatattgtttgcat

SEQ ID NO: 153196 - DNA, 2285 bp, Zea Mays
aggcagcactaaaacatttctctgcctaactacttccctgtacgtggacgaggaccaaggagacagagagaaagcctggccgcgccgcccaccgtcgcctcgtcagtcgcctcctccatcctccctccccatcgacttcccaaatcccagccaggtaattcttggagctcgtctttccggttgtctcctctttcctgtgcatcctgctgctccgaaaatctctcagatctcctcgtcctctggcccattctcttcatctccatgcatggatgaacaagagacggagggagacagatgcaaacatcgagactggggttgttatctgtctttgtagcagaagaaacagtcctaaaaaagaatggagagctcctcagataggagcaacgtttctcaggggaaccacctgggttatgcgagaagcacatccatggattccactggtcctcagttagctggtaggtctagctcaatgttgagtaggagaagtagcagacagggctcaaggggatccatcagcctctcaagggagatgggggactccatactgagctcaatgaggcattctcttcagtcggcggatcaattgctaggagacatcgatagctcagttctggctcaactcatcgaaagtggtcgagttctatcacccgaaggcgatgttgatgaggatacagtaagaatctctgaacatcataaggttggccctgttccagatgatgcaataaagcaaaccagtgacaattttgcatcagcacctatatcttcagcggagacaaaagacactatttctaacgtcctagcagattcatctactaaggttgaaccatataagctttctctgaggctagactatgctgcttacatgatccatttagctgtctttggctttttcggggtattcacaaggtatgggctccaaaagctgtttggcccagactgtttggcactcacttcagatcaaagcccactttaccctgatcttccatctaatatgcttgggtctttcttgatgggctggtttggtatcattttcaaggctgatatacgatacatatctgaccatcttattgtcggaatcacaactggatacatgggaagccttacaaccttcagtgggtggaaccagaaaatggttggtttgtcttccaaaggccattgggtatatgctatagcgggcgtagtactagggatgttcattgtcaacgagtccattacggttggtgctgagacgggcgagcgcctacggagtttgatcctgaaatacatcagggagaagagtttgataggtcacaagtatgattgggagcactggagggtgaataccagggctaagcagtcagtgcttttgtcagtgatgataattttgatgtctttcttttggattttgagcattgtgctgactgtagtaaagatgcatagtcttgctgatggtgctgtcctatggatgggctgctcggtagcacctccaggtgtttggttacgctggtacctggcaaggctcaatggccagggaattggcaaacagagatccttgaaatggctgcccactgggactctggtagccaatgttcttgctgcaggcataatggcagttcttgctgtaacatccaaagcggtagatacaaagcgatcaacaactattcttagtggaatacagctcggcttccttggttgcctaagcacagtgtctacttttgctgctgaagtgtatacaatgagaagaagcgggcagattgccagggcctttgtttatgccgcatccaccttcctgctttcttttctgctaggaactctagtgtattctgtgccagtttgggaaaagcattataaatgacctattgcaacttccagattcaacattttaccagatggcttaaatgtgcaatgggaaagagagcatcaacttcctgaacaaagtacaagatacagagccaagacctcaaaggttcacagatgcaaaagagagcatcaacacaaacgtttgcagaatggacccacagaaccatctatatacctggctgggaaaaacagagtaaactttgcttagtagaatatgtagtggcgtggaataatttttgtcttggagaatggagtacatgtatgtatctgtgaactagatgtatcattaatgcatgagatatgcatagatgaatttaattagtgtgggattagctccactttattctcatgctgtctcatgtaaatgcaggacatctagaaatgtttttcttgttactaagacatattggcttaattagtttttgaataaaacatttccttttgac

SEQ ID NO: 153197 - DNA, 1191 bp, Zea Mays
ctaactacttccctgtacgtggacgaggaccaaggagacagagagaaagcctggccgcgccgcccaccgtcgcctcgtcagtcgcctcctccatcctccctccccatcgacttcccaaatcccagccagggttgttatctgtctttgtagcagaagaaacagtcctaaaaaagaatggagagctcctcagataggagcaacgtttctcaggggaaccacctgggttatgcgagaagcacatccatggattccactggtcctcagttagctggtaggtctagctcaatgttgagtaggagaagtagcagacagggctcaaggggatccatcagcctctcaagggagatgggggactccatactgagctcaatgaggcattctcttcagtcggcggatcaattgctaggagacatcgatagctcagttctggctcaactcatcgaaagtggtcgagttctatcacccgaaggcgatgttgatgaggatacagtaagaatctctgaacatcataaggttggccctgttccagatgatgcaataaagcaaaccagtgacaattttgcatcagcacctatatcttcagcggagacaaaagacactatttctaacgtcctagcagattcatctactaaggttgaaccatataagctttctctgaggctagactatgctgcttacatgatccatttagctgtctttggctttttcggggtattcacaaggtatgggctccaaaagctgtttggcccagactgtttggcactcacttcagatcaaagcccactttaccctgatcttccatctaatatggtatgcacaatcatttttatgctcaagtttgagtcaaggaatttagagaaaccacagggggttttatatgtactaactcatgttgattgccaaattgcttgggccagcttgggtctttcttgatgggctggtttggtatcattttcaaggctgatatacgatacatatctgaccatcttattgtcggaatcacaactggatacatgggaagccttacaaccttcagtgggtggaaccagaaaatggttggtttgtcttccaaaggccattgggtatatgctatagcgggcgtagtactaggtatctgatcatcatttttatgattaagtgcaatatctcctaaattagatattatcaaacaaaaaatatgaacaaaataat

SEQ ID NO: 153198 - DNA, 2148 bp, Zea Mays
ctaactacttccctgtacgtggacgaggaccaaggagacagagagaaagcctggccgcgccgcccaccgtcgcctcgtcagtcgcctcctccatcctccctccccatcgacttcccaaatcccagccagatctcctcgtcctctggcccattctcttcatctccatgcatggatgaacaagagacggagggagacagatgcaaacatcgagactggggttgttatctgtctttgtagcagaagaaacagtcctaaaaaagaatggagagctcctcagataggagcaacgtttctcaggggaaccacctgggttatgcgagaagcacatccatggattccactggtcctcagttagctggtaggtctagctcaatgttgagtaggagaagtagcagacagggctcaaggggatccatcagcctctcaagggagatgggggactccatactgagctcaatgaggcattctcttcagtcggcggatcaattgctaggagacatcgatagctcagttctggctcaactcatcgaaagtggtcgagttctatcacccgaaggcgatgttgatgaggatacagtaagaatctctgaacatcataaggttggccctgttccagatgatgcaataaagcaaaccagtgacaattttgcatcagcacctatatcttcagcggagacaaaagacactatttctaacgtcctagcagattcatctactaaggttgaaccatataagctttctctgaggctagactatgctgcttacatgatccatttagctgtctttggctttttcggggtattcacaaggtatgggctccaaaagctgtttggcccagactgtttggcactcacttcagatcaaagcccactttaccctgatcttccatctaatatgcttgggtctttcttgatgggctggtttggtatcattttcaaggctgatatacgatacatatctgaccatcttattgtcggaatcacaactggatacatgggaagccttacaaccttcagtgggtggaaccagaaaatggttggtttgtcttccaaaggccattgggtatatgctatagcgggcgtagtactagggatgttcattgtcaacgagtccattacggttggtgctgagacgggcgagcgcctacggagtttgatcctgaaatacatcagggagaagagtttgataggtcacaagtatgattgggagcactggagggtgaataccagggctaagcagtcagtgcttttgtcagtgatgataattttgatgtctttcttttggattttgagcattgtgctgactgtagtaaagatgcatagtcttgctgatggtgctgtcctatggatgggctgctcggtagcacctccaggtgtttggttacgctggtacctggcaaggctcaatggccagggaattggcaaacagagatccttgaaatggctgcccactgggactctggtagccaatgttcttgctgcaggcataatggcagttcttgctgtaacatccaaagcggtagatacaaagcgatcaacaactattcttagtggaatacagctcggcttccttggttgcctaagcacagtgtctacttttgctgctgaagtgtatacaatgagaagaagcgggcagattgccagggcctttgtttatgccgcatccaccttcctgctttcttttctgctaggaactctagtgtattctgtgccagtttgggaaaagcattataaatgacctattgcaacttccagattcaacattttaccagatggcttaaatgtgcaatgggaaagagagcatcaacttcctgaacaaagtacaagatacagagccaagacctcaaaggttcacagatgcaaaagagagcatcaacacaaacgtttgcagaatggacccacagaaccatctatatacctggctgggaaaaacagagtaaactttgcttagtagaatatgtagtggcgtggaataatttttgtcttggagaatggagtacatgtatgtatctgtgaactagatgtatcattaatgcatgagatatgcatagatgaatttaattagtgtgggattagctccactttattctcatgctgtctcatgtaaatgcaggacatctagaaatgtttttcttgttactaagacata

SEQ ID NO: 153199 - DNA, 2331 bp, Zea Mays
ctaactacttccctgtacgtggacgaggaccaaggagacagagagaaagcctggccgcgccgcccaccgtcgcctcgtcagtcgcctcctccatcctccctccccatcgacttcccaaatcccagccagcttggagaacagtgatgtacatgtactgtgagctatttgatttgactgaaggaaaaaaaatgttgctgcagtctcctcgatcttcagagctgtgatgtgatttgtccagatacctacaaaaacggttgttatctgtctttgtagcagaagaaacagtcctaaaaaagaatggagagctcctcagataggagcaacgtttctcaggggaaccacctgggttatgcgagaagcacatccatggattccactggtcctcagttagctggtaggtctagctcaatgttgagtaggagaagtagcagacagggctcaaggggatccatcagcctctcaagggagatgggggactccatactgagctcaatgaggcattctcttcagtcggcggatcaattgctaggagacatcgatagctcagttctggctcaactcatcgaaagtggtcgagttctatcacccgaaggcgatgttgatgaggatacagtaagaatctctgaacatcataaggttggccctgttccagatgatgcaataaagcaaaccagtgacaattttgcatcagcacctatatcttcagcggagacaaaagacactatttctaacgtcctagcagattcatctactaaggttgaaccatataagctttctctgaggctagactatgctgcttacatgatccatttagctgtctttggctttttcggggtattcacaaggtatgggctccaaaagctgtttggcccagactgtttggcactcacttcagatcaaagcccactttaccctgatcttccatctaatatggtatgcacaatcatttttatgctcaagtttgagtcaaggaatttagagaaaccacagggggttttatatgtactaactcatgttgattgccaaattgcttgggccagcttgggtctttcttgatgggctggtttggtatcattttcaaggctgatatacgatacatatctgaccatcttattgtcggaatcacaactggatacatgggaagccttacaaccttcagtgggtggaaccagaaaatggttggtttgtcttccaaaggccattgggtatatgctatagcgggcgtagtactagggatgttcattgtcaacgagtccattacggttggtgctgagacgggcgagcgcctacggagtttgatcctgaaatacatcagggagaagagtttgataggtcacaagtatgattgggagcactggagggtgaataccagggctaagcagtcagtgcttttgtcagtgatgataattttgatgtctttcttttggattttgagcattgtgctgactgtagtaaagatgcatagtcttgctgatggtgctgtcctatggatgggctgctcggtagcacctccaggtgtttggttacgctggtacctggcaaggctcaatggccagggaattggcaaacagagatccttgaaatggctgcccactgggactctggtagccaatgttcttgctgcaggcataatggcagttcttgctgtaacatccaaagcggtagatacaaagcgatcaacaactattcttagtggaatacagctcggcttccttggttgcctaagcacagtgtctacttttgctgctgaagtgtatacaatgagaagaagcgggcagattgccagggcctttgtttatgccgcatccaccttcctgctttcttttctgctaggaactctagtgtattctgtgccagtttgggaaaagcattataaatgacctattgcaacttccagattcaacattttaccagatggcttaaatgtgcaatgggaaagagagcatcaacttcctgaacaaagtacaagatacagagccaagacctcaaaggttcacagatgcaaaagagagcatcaacacaaacgtttgcagaatggacccacagaaccatctatatacctggctgggaaaaacagagtaaactttgcttagtagaatatgtagtggcgtggaataatttttgtcttggagaatggagtacatgtatgtatctgtgaactagatgtatcattaatgcatgagatatgcatagatgaatttaattagtgtgggattagctccactttattctcatgctgtctcatgtaaatgcaggacatctagaaatgtttttcttgttactaagacatattggcttaattagtttttgaataaaacatttccttttgac

SEQ ID NO: 153200 - DNA, 2102 bp, Zea Mays
ctaactacttccctgtacgtggacgaggaccaaggagacagagagaaagcctggccgcgccgcccaccgtcgcctcgtcagtcgcctcctccatcctccctccccatcgacttcccaaatcccagccagggttgttatctgtctttgtagcagaagaaacagtcctaaaaaagaatggagagctcctcagataggagcaacgtttctcaggggaaccacctgggttatgcgagaagcacatccatggattccactggtcctcagttagctggtaggtctagctcaatgttgagtaggagaagtagcagacagggctcaaggggatccatcagcctctcaagggagatgggggactccatactgagctcaatgaggcattctcttcagtcggcggatcaattgctaggagacatcgatagctcagttctggctcaactcatcgaaagtggtcgagttctatcacccgaaggcgatgttgatgaggatacagtaagaatctctgaacatcataaggttggccctgttccagatgatgcaataaagcaaaccagtgacaattttgcatcagcacctatatcttcagcggagacaaaagacactatttctaacgtcctagcagattcatctactaaggttgaaccatataagctttctctgaggctagactatgctgcttacatgatccatttagctgtctttggctttttcggggtattcacaaggtatgggctccaaaagctgtttggcccagactgtttggcactcacttcagatcaaagcccactttaccctgatcttccatctaatatgcttgggtctttcttgatgggctggtttggtatcattttcaaggctgatatacgatacatatctgaccatcttattgtcggaatcacaactggatacatgggaagccttacaaccttcagtgggtggaaccagaaaatggttggtttgtcttccaaaggccattgggtatatgctatagcgggcgtagtactagggatgttcattgtcaacgagtccattacggttggtgctgagacgggcgagcgcctacggagtttgatcctgaaatacatcagggagaagagtttgataggtcacaagtatgattgggagcactggagggtgaataccagggctaagcagtcagtgcttttgtcagtgatgataattttgatgtctttcttttggattttgagcattgtgctgactgtagtaaagatgcatagtcttgctgatggtgctgtcctatggatgggctgctcggtagcacctccaggtgtttggttacgctggtacctggcaaggctcaatggccagggaattggcaaacagagatccttgaaatggctgcccactgggactctggtagccaatgttcttgctgcaggcataatggcagttcttgctgtaacatccaaagcggtagatacaaagcgatcaacaactattcttagtggaatacagctcggcttccttggttgcctaagcacagtgtctacttttgctgctgaagtgtatacaatgagaagaagcgggcagattgccagggcctttgtttatgccgcatccaccttcctgctttcttttctgctaggaactctagtgtattctgtgccagtttgggaaaagcattataaatgacctattgcaacttccagattcaacattttaccagatggcttaaatgtgcaatgggaaagagagcatcaacttcctgaacaaagtacaagatacagagccaagacctcaaaggttcacagatgcaaaagagagcatcaacacaaacgtttgcagaatggacccacagaaccatctatatacctggctgggaaaaacagagtaaactttgcttagtagaatatgtagtggcgtggaataatttttgtcttggagaatggagtacatgtatgtatctgtgaactagatgtatcattaatgcatgagatatgcatagatgaatttaattagtgtgggattagctccactttattctcatgctgtctcatgtaaatgcaggacatctagaaatgtttttcttgttactaagacatattggcttaattagtttttgaataaaacatttccttttgaca

SEQ ID NO: 153201 - DNA, 610 bp, Zea Mays
ttagcctcaccaaccaagcgcattggagttcatcctaggaacatgacatttcataacgaaattgatacttctctgtgttggaggaaaaaaactgaaactttgctataatatccccttaaccagtggccagtgggtgcatcagttcgtccagcgcgcgaggaggaggaagagcagcggatgcgtccggcgagcgagatggaagagcagcggcatgaggaggactagagtgcgtctgtgcaggtgcagctgggtgcgtgtgcgtccatggcggctgaagtttcccttggagtgggtgcgtccgtgcgtccatggcggctgggtgcgtccggcagagggtgctcgcatcgatggccacaaagctagattagggattacagattacttactggattggggccttgggggcagtgcatccgttcgtggtctgcacgtgcaacctagcagagaggagaggaggaagatgagtcacgccgtcacagaatttgggggcacgccagctgagcagtggcgactggcggtggcggctatgcttgctgtgcggctgtgcctgggcgaggggcgagggcgatggaagactgcaagtggaagagcagtggtcgacgacagggtt

SEQ ID NO: 153202 - DNA, 345 bp, Zea Mays
agctctttgaggttcacatctagtagcgaacaaggacaagtgtcggtggagaagtatgttttcgaccaagatgtggcgagaaaggcccttgctgaaatggttgttttgcatgaatatccattgtccattgtggatcatgttggttttagaaggtactcaagtgctcttcaaccgatgtttaagatgatcactagaaacactttgaagaatgacatcattgggatttatgagattgagaagaaggccttgagctttatgcagaagaataatgcaagaattgcaataacgactgatatgtggacagcttagaatcaaaagaaaggctatatgactgttaccggacat

SEQ ID NO: 153203 - DNA, 1992 bp, Zea Mays
tctcaaatcaaagtatatatatatagatgtagcatgagaattggggtaaccataccaggcgataggataggaggctgacgaattatgtcctaccttcgctaatttatttgctactatatgcaaaatggacggtccacgctaccgcatacaaattgtacgtatatacgccaacgatgagcaccagcgtgctgcaaatttcgaccaagtcaaaagaaaaatgcagcgaaatccccctcccccccggaatttctaccattttctttgattgggcgagagacagatgtgcacccgcctacaagtctcacaaattcattcctcattcttcccgggccgacattctccaattcggaagtagaacgtactagttttgaaatccgcctctccgtcctcgaaatccacccagccggccccaaaaccgaaacaaaagcaagctcgcatgccgaaaagacgacgaggagggaactttcgggaacaccggccgccgccgccgcagtccaccgctttcatggatgctactatgctagcaccgtacggccgtatttactagtatgcccccgtgagccaccgcacgaacccgtagaacgacgcgctgccgtcgtccgcgtccctccgccgcgtcgggggggccacgccgccgtccatgtcccaccaccactccgccgtggccgcggccgtcacggtcccagcgtcgtaccggttgctccagcgcccgctgctccaccggctgctccaccggttgctccacctgctgctccaccgctccgccgtcgacctgaacgatgccgtaggggtcaggcccacggacgacgttggctgcccgcgctccaccgcggcgagctgttgctgctgctggcttgtcgggtcgctggacccggcggcggcgggcggggtcggtttgagcaccacctggagctcttcctcgacgaggtactccgacgacgccgagtcggggaggccaccggggagcgggtacgcgcggacggcggcggccgcagcgtccgggttggagcggcggctgctgacgctgccgagctccacacggaggaggtccgtgagcggcgggtggggcagcgcgatggaggcgcggcacagcgggcaggacgggttggcgcgaagccacgggtccacgcagcgggagtggaaggcgtggcggcaggcgggcaggaggcggagcccgtcgtcgtcgcggaacgcggtctggcacacggcgcagtcgcgcgacgacttgggcacggcggccagcgacgaggacagcgtgaactgcggcaggcgcgcgatgagccgctccgcctctgcctccgccgcggccgccgccttccctcctccgccctggccgtcggcgggcgccacggacgcccccgccgcggggcgcgccacgagcgggagcggcggagcctgccgggacaaagaggaggaggaggaggaggaccccgctgggcccacgtggcggcagaggtggcggataaagtagtggatgcacagcgacgcgagcagcatcaccaccacgatgactgcgatgacgaggatgctcggcgagatgcccgccacgctgccgctcccgctcccgccacctcccgcgctactccctcgcgcgtcaccccttccgtccccgccgccatcgtccgccagccgcggcaccagcggcactctccgctccggcactgccggaggcggcggggacgggatggcggtagatgccatcaacgtgtacttgtcccagccgcccgcgcgctctgcctcctgctggtgtggtggcgagcgcgggtggaggacggcttgtccgtgggccgtggcttataagtgtagttttgtccggtggcggcttgccatttatagttgtgccggctaatttgtccagggcgactgatagaagatgaggggatgggactcggactgcgactgggactggaccaggtgttacgttggattcttgcgtgattatacaacaaacaaatgatatttaagctgaggcagtgttagattcctcacaaa

SEQ ID NO: 153204 - DNA, 1115 bp, Zea Mays
gtggacatacattcagcgtaacactccgtgtaaacattcagtgtatgagtcactgtatatcagaaaaaaaatacaggaagtcttcgatttaaaaaggccaggattagtaatttaaactttaggaatttccattaggagttggagttgacagagaagagaaggggcaattcgttcatttctctctccagttcacatgtattgggatggaatgggtctgttcaaacaagcctaagcacggcgaagttaataccctaagcgtggtagttactctgccttgagagttgagagcaactcccgccactttcgttttgaaatgtctttgggaagtctgagtttattcaagaagtggtatgattgatttactgaagataacacacatgtatttcccccaacctacaattgcactaatttgttttactgcaccgcatagagatattgcagtgctcctattattaagtgtggttagtttgacatgttagcagggccctgtcatttataaaggttagaagcaactgttgcacccttccttttctggagttgaattaccatacaatcctatgaaactgtattacaggagtacacatacgcatatcactgatgaaggtttttagaagttgatacttgtatatagttcattgttctgacaactttttattcgtgcagaaatctgctggtggtgtattgctaccgaaatctgctgttaagtttgagaggtatctgatgggtgagattctatcggttggtgctgatgttagtgaagttgaggctgggaagaaggttctcttctcagacatcaatgcttacgaggtaaactgactgatttctgcttaactaaaaaagttttgtggccttgtcctgagcggatgagccccacattttatgagtcagcttatatggcttagctcattgtgttgtaggtggaccttgatacggatgagaagcactgcttctgccgggagtcagatttgttagctgtagttgaatgaattttaccatgaaaattacagacttacttgcccatgctccaactgcatggacttatcttgcacctactttgttgtacttgaactcggcttctagatgagtgttagttatcattgtattttggccgcaat

SEQ ID NO: 153205 - DNA, 1789 bp, Zea Mays
gtggacatacattcagcgtaacactccgtgtaaacattcagtgtatgagtcactgtatatcagaaaaaaaatacaggaagtcttcgatttaaaaaggccaggattagtaatttaaactttaggaatttccattaggagttggagttgacagagaagagaaggggcaattcgttcatttctctctccagttcacatgtattgggatggaatgggtctgttcaaacaagcctaagcacggcgaagttaataccctaagcgtggtagttactctgccttgagagttgagagcaactcccgccactttcgttttgaaatgtctttgggaagtctgagtttattcaagaagtggtatgattgatttactgaagataacacacatgtatttcccccaacctacaattgcactaatttgttttactgcaccgcatagagatattgcagtgctcctattattaagtgtggttagtttgacatgttagcagggccctgtcatttataaaggttagaagcaactgttgcacccttccttttctggagttgaattaccatacaatcctatgaaactgtattacaggagtacacatacgcatatcactgatgaaggtttttagaagttgatacttgtatatagttcattgttctgacaactttttattcgtgcagaaatctgctggtggtgtattgctaccgaaatctgctgttaagtttgagaggtatctgatgggtgaggtaagatcttaaagccactactaactgtttctgtaataattgttaatttcagcaggatattgtcccacaatattgtatcgttctcgttcatgctagattctatcggttggtgctgatgttagtgaagttgaggctgggaagaaggtaagcagtgattttgtgacataactcttattggtgcatgaccaaacactcacttgtgccaacgaaaagcattttgtgctttgcatgtgaaatgtatttatattttagacatcgatctattatatgattgcacgttgtgctttgtggtttcttgttttctgtaatcttaccattctattttattgcttatcttggatgaaggaactaagtgaaaattttggacatatgaactgtagtgtaattatgtaaatgaatgtgctatgcttacttgagtagaacgaagagtggttatgtttttgaaacaaatacattgtgctaacttgcaagctgcaaccattatggcactgtctgctactgaaatctgcctgctgcaaactctgaaaataaacatgctttattttggtactgcccttgtctattttgctctgcattgggtattgttattgtgtcaagtcttacagttttgcatagtttgtcatatatgtatttttactgaagtacaatgctcatcatgaagaatactctaacctggtttgcacttgcaggttctcttctcagacatcaatgcttacgaggtaaactgactgatttctgcttaactaaaaaagttttgtggccttgtcctgagcggatgagccccacattttatgagtcagcttatatggcttagctcattgtgttgtaggtggaccttgatacggatgagaagcactgcttctgccgggagtcagatttgttagctgtagttgaatgaattttaccatgaaaattacagacttacttgcccatgctccaactgcatggacttatcttgcacctactttgttgtacttgaactcggcttctagatgagtgttagttatcattgtattttggccgcaataaacaggaatcgtgtcaatgcccccatttcttt

SEQ ID NO: 153206 - DNA, 1734 bp, Zea Mays
gttcgcgttgcccgcgactctctccgtcctcctactctcacacgcttggcgcgcgcgtgcttccacacgtccgtcgcctcgcctggctgattggtttgggacctggctccagcaatggcggtgcaggcgcattatcaccaccaccaccaccaccaccaccgcgagtcccctttcctcgtcagcggcggcgcgccggagggcagccggttggcggcggcgatggagctgcatcaggcgcagaaggaggctactacggcgcagcagcacgctccgcccgacttctcgcatggaggttgcggcggcgggaagaagcggcagcgcgaggcggaccccgtgtcccggcagctcttgtcgttgcagcagcagcaaccacaggcgcaggggcccaagttcatcaacctggcgcaactgcacaagcggccggcgacgggcctccggctcgacttggacgagggctcggagcacgtgccgtgcacgtcctcggcctcggcgtcgtgtctcctcctctccgaagagctcgccgcgcagcgcgaccagcacaaggacgagatggaacggctgatccaggagcacgcggagaggctccggcgcgcgctggccgacacccggcggcggcactaccgttcgctcgtcggcgcggccgaggcggctgctgctcggcggataagggagaaggagtcggaggcctgggaggccgcgcggcgccgcgccgacctggaggatcgggtcgcgcggctgagggcggaggcggcggcgtggcaggcaaaggagctcgcggaccagtccacggccgcggcgctccacgcgcagctgcagcaggcgaggggcaaggccaccgacgccgaggaagggggcaacgcggcggacgacgccgggtcgtgcttcgtcgacccggacagggtggtggagatcgccccgccgccggccaggccgtgccgggcgtgcaggcggcggtcggcctccgtcgtgctgctcccttgccgccacctctgcgtctgcgccgagtgcgagcccgccgtccccgccgccccctttgccgccgcagctgtcgccgctgcctgccccgtgtgccgtggcgcggtcaccggcacggtgcaagtgttcgtctcgtagcgggagggaaaggttaaaaaaaatggtgctcctgccaaaaggaatggcaggtgaaaatggggaatgaacgatggcaaattgtgtagtggagtggagcgcattactttttatttctctgttttttttgctcatttgttcattacaatcattttttctcttcgtatagtgccggtaggaataggatcgtgctctctctctgcctcggttcctgtggacttttttaccgcctgagattaattaatggctttgccctgtccctgcggttgctggtagcctcctacgtgagcagcagcgccttggggttggggacgacggacgatgcgttaaaggcgaggcggggattcgcgtgatgcgtagtagtggcgggagacgcggccgatcacgtgacgtgacgatctcggcatcgcccatcgccatccgtcgtgggccgcgccgtgcgatccccatcgggggtacgggcgcgcgtcgcggctgcgctgtcggttgttcgccgcgcaggccttggaagaggaggaatgggggtgcgcggcgtgcggttgcaggctttggccaacgattgatgaattgtgttaattgtaaacggttgtgtgaacagagaatgagaactcgtagtccctttct

SEQ ID NO: 153207 - DNA, 1217 bp, Zea Mays
ccgacaggcggagcgcttctcagcccctccgcaccttcgggtctcgcgttggtggcgccggcgggcgctgccgatcgccggcggcggccgagatgttggaggaccaggtcgccttcctgctgcagaagtacctcggcaactacgtccggggcctcagcaaggaggcgctaaagatcagcgtctggagaggtgatgtagagctcacaaacatgcaactgaagccagaagctctcaattcattgaaattacctgttagagtcaaagctggctttcttggttctgtgaagctcaaggttccatggagcaggttgggacaagagccagttttggtttatcttgatcgaatttttatactagctgaaccagcaacacaagttgaaggttgcagcgaggatgctgtccaggaagcaaaaagaagtcgagttagggaaatggagatcaaattgttggagcgccaacagcaactgaaatctgaactaagttcatcatggctagggtctttcattggcactgtaattggaaatatcaagttatccattggcaatattcatatcagatacgaagacgtagagagcaatcctggccacccttttgcagcaggtctggtactttcaaagctttcagcagttacagtggatgaccttggcaaggagacttttgccacaggtggtgatttggaccgagtgaaaaagtctgttgaacttgagagtctggcggtgtattttgactctgatagcagttcttggattgtggataaaccctgggaggatttacttccatcagagtggagtcaggtttttgagtttcaggagcaggatggttccagatctgcttcgaaaaagcatgcctacattttacagcctgtatctggcaaagcaaaatatacaaagatacaacttactgaggcaaagaaaacaggacaagcattgcaaaatactgcagtggatttggatgatgttactctgtcgttgtcgaaggatggctacagggacatgttaaagttggctgataatttctctacattcaatcaacggctgagatatgctcatctccgaccatcttcaccattaaaatcggatccacgagcttggtggaagtatgcatacaaggtggtgactcaggaaatgaagaaagcaagctccttctggagcttcacaatcatggttctcaaggcggtaaggcgagacaagacgttggaccaccgcctagatgcctag

SEQ ID NO: 153208 - DNA, 2367 bp, Zea Mays
atgaatacaccaggttctcctagacaactccgtattacctcaactcaagaccttaatttgaacatatctgtttccaatacaaacatgttatcgcaagcttatgctagctggaataatattagctgtggtgatgaattgtataagaaggaaaccttttcttctactgagcgaccagttcttgatgttcatcaaagaagaagttattatgttgtcccacaaaataaacttggacaagatatttatgtaagaactactgaaaatagaggttcacttgttactctgttgccctctggggatgataggtccataaaagttccggctttaagggatctatcagattctcatttaaatggaagatctgttaaaccatatcggttgatgataactgccattcttgcggatgcagagcttaagcttttgggttctctcaacagcttaagcttttgggttgaactggctagtgtgtccactctaacatggttcccatcccaggtcaaggatgatgaaggattagaaactggtgaatatatgactgctgtgcggctcttttcagaaaaccattccatatctgttcaacaacagagtgcccgtacttgtgctgctattggagaacacttgtcacagaacaccagaaaggtgaactggaacgaaatgttctttttcaaagtcgaacgtgtggacagctatactctagagcttcttgtgcttgatgctggtaaaggtcaaccagttggtatatactctgctccattggagcaagttgtgcaaaagctccctcctacctctaatccggactctgtcaaatttgatttggctttaggagaccttatgtcaactaagacagtggaacaggaaactgttaaacctagtggaaaaataagatttgcggtacttgtttctggtagagctagtgtacaacaagggaacagagccagtcctgaaagcaagactggatatattcagattagcccttcaaaagaagggccatggacaagcatgaagttgaactatgctgtacctgcagcatgttggaggtttggtaattgtgtgattgctagtgaagcaacagtcaaggaaggcaacagatacgttagcatacgttcccttgtgtcagttactaatacaaccaatttcattgttgatttacgtctaaaaggaagaatttctcaaagtgcacgggcagatgaacagggagacagttttggtaaagaggatcaaatcctgattggaacgctggagcccaattctactattccagtcccactatcaggcctctcacatcctcttatgccctatatgttgcagttaaggccggcaaaacatcatgatcatgaaaattactcctggagtgatgtccaggagaggcgcagtcaaaccgagtttagaaaggaggagatcctagatttatgtatatcagatctgtatgaatcggaaaacttgctattctgctcacaggtagatggcacctcgaattcttgtcatggactgtggttttgcttgagcatagaaggcaaggaaataggcaaagatgtacagatggaaccaatatatgattggtgcatcattattaagtccccgttgtgtttgacatactatcttcccattgctgcacattatactgtcagttctagccacctcgataatgaagattcaagttgctcccttggcaccttaagtccgggtgaggctgtaaaggttcacaatgttgatccaagaaaccctttgtacttatccctggttccacatggaggatgggaactgatgcatgagcctgttgttatatcacatccaacccaagcaccttccaaatttatcaatctaagaagctctttatcaggaagattgcctacacttactctgcgtctcattgatatttctggaaggaaagagaagaggcgccttctttcacgttcacatctggaaaggggtgagaagcaactctatgatataaaacacgatgaattggttgagggatacactatagcgtctggattaaattttaagggattaggacttctatcatctgttggacatggtggacggtttggatctgtgaaagaattgtcgcctcttggcgatatggatggagcagttgatctttctgcctatgatgatgatggaaaatgcatgcatattcttctttgttcaaagccatcctcgtatcaagctgttccaacaaaggttatccatgtacgcccgtatataacattcacaaacagggccggacaagatttgtacttaaaacttagtattgaggatgagccaaaggtcttacatgcatatgactggagggtttcctttatgtactccaaggggactactgacaaactgcaggtactacaatattctcagcgaagcaccatttag

SEQ ID NO: 153209 - DNA, 1137 bp, Zea Mays
atgagaaagcagggtggtactcagaaatttgtaaaagctgagatacgtggttatgaggaaggttcaagattcttgattgtattccgtctgggcccagcatatggaccaatcaggattgagaaccggacgagtcataccacaatcagtacttgccagtctggtttaggggaggagagttggatccaagtgaagccacatgcaaccagaaaatattcttgggatgacccatatggacagaaagttattgatgttagcattgataaaggcgatgatacttgtgtcctatgtgttgacctggaaaatcctattggaagttccaccagttttagggaacatggcctcatgtttactgttgataccagtgacattaagatattgaagtttgctgattacataaggaaagaggaagtatatggattgcctggatctgaactgactgatcaccaaggatcgtcattgaaggaaaatgagacagagccaggtgctggacccttggagctcattgttgaacttggagttgttggaatatctttgattgatcataagccaagagagcttttatacttgcatctgcagaaggttttcgtttcatacttgactggttatgattttgggaccactagcaggtttaaattaatccttggcgagttgcaactagataatcagttgccactgtctacaatgcctgttgttttgtctaccgagagcaggcctgattcaaatcgttctgttttcaaagcaaacgttgctgttagcaatgtaacttctaatggcattcaagtttacccacatgtctatatccgggtaactgatcaaacatggagactaaacattcatgaacctattatttgggcactgtttgacttctacagcaatcttcgttttgtcaccaccatcaacagcacaactgtcacggaagtggatcctgagatacgaatagagctcattgatatttcagagataaggctaaaaatatctctggaaactgcgcctagtcaaagacctcgtggtgtcctaggcatatggagccccatcctatctgctgtgggtaatgcactcaagattcaggtaactttattccaaactcaggttatgtacggaacatcatgtttcatgaccggtaccaaactaacctag

SEQ ID NO: 153210 - DNA, 2802 bp, Zea Mays
atgagaaagcagggtggtactcagaaatttgtaaaagctgagatacgtggttatgaggaaggttcaagattcttgattgtattccgtctgggcccagcatatggaccaatcaggattgagaaccggacgagtcataccacaatcagtacttgccagtctggtttaggggaggagagttggatccaagtgaagccacatgcaaccagaaaatattcttgggatgacccatatggacagaaagttattgatgttagcattgataaaggcgatgatacttgtgtcctatgtgttgacctggaaaatcctattggaagttccaccagttttagggaacatggcctcatgtttactgttgataccagtgacattaagatattgaagtttgctgattacataaggaaagaggaagtatatggattgcctggatctgaactgactgatcaccaaggatcgtcattgaaggaaaatgagacagagccaggtgctggacccttggagctcattgttgaacttggagttgttggaatatctttgattgatcataagccaagagagcttttatacttgcatctgcagaaggttttcgtttcatacttgactggttatgattttgggaccactagcaggtttaaattaatccttggcgagttgcaactagataatcagttgccactgtctacaatgcctgttgttttgtctaccgagagcaggcctgattcaaatcgttctgttttcaaagcaaacgttgctgttagcaatgtaacttctaatggcattcaagtttacccacatgtctatatccgggtaactgatcaaacatggagactaaacattcatgaacctattatttgggcactgtttgacttctacagcaatcttcgttttgtcaccaccatcaacagcacaactgtcacggaagtggatcctgagatacgaatagagctcattgatatttcagagataaggctaaaaatatctctggaaactgcgcctagtcaaagacctcgtggtgtcctaggcatatggagccccatcctatctgctgtgggtaatgcactcaagattcaggtgcatctgaggaaggtcatgcacagaagccggtttatgcggaagagctccatcatccctgctatcacgaaccgaatcaagagagatctgattcacaatccgctacatctaatcttttctgtggattttcttggagtaacaaaatcaactttatcatcacttagtaaaggatttgcagagctctctactgatgggcaatttcttcagctgagatcaaagcaggtttggtcaaggagaatcactggtgttggtgatgggctagttcaagggactgaagcatttgctcagggtttggctttcggggtttctggtgttttaagaaagccagttgagagtgccagacagtatggtgttataggtattgcacctggcattggccgtgcttttgtgggtttcattgtccaacctttaagtggggctctggattttttttcactgacggttgatggaatcagtgctagttttatgagatgtgttaacattttaagtaacaaatctgttccgcagaggataagagatcctcgtgctatacatcgtgatggtatagtaagagactatgacaaatttgaagctgctggccagatggccctttatctggcagaagctagcagatattttgcatgcacggatttatttcgagaaccttctaagtacgcatggtctgattactatgaagaccattttattttaccaagccagaggattgctttagtaactaataagcgggtgatgctgcttcagtgcttggatctagataaaatggacaagaaaccttctaaaatactttgggatgttccttgggaagaagtactttcattggagctagcaaaagctgggtatcagaggccttcacatgtaatcatacatctgaagaattttaggaggtcagagaactttgtaaggcttattaagtgcaacattgacaacgaacgggaacctcaggctctttcactttgctgttcaattcggaaaatgtggagatctcaccaagcagcaatgaaagttataccattgaaggttccatcaggccagcgtcatgtgtattttgtgtcagatgatgataaaaaggaatcccacagtttatctaggcctttgctaagctcgggaggaacctctactgatgttgagcaacagttcataaacaatacagttcactttcagaaaatgtggagcagtgaaccagaaattcagagccgatgcaaactagttgccaagcagattgcggatgacggaagggtgttcagcatatggaggcctctctgccctaatgggtatgtctcaattggtgatattgcgcatgttggcatccatccaccgcattttgctgctgtatacaagaatatcaatgggaactttgcactgcctcttggctatgacctggtttggagaaattgtgctgaggattacaagagccctgtatcaatatggcttccaaggccaccggggggatacgtagctcttgggtgtgttgctgtcccttcattcaaggagcccactcttgactgtgctttctgtgtggatgagagactcgcggaggatgccgcgtatgaggagcaaatcatatgggcctcatcggatgcttacccatggggatgctatatctaccaagttcagagcgcctcaatgcagttcatggcacttcgtgtcccaaaagaacaatctgagctaaggcccaagaagatattggagtcatttctgcagcaagcatcagagactcaaacgtcccgtgcatga

SEQ ID NO: 153211 - DNA, 1740 bp, Zea Mays
atggaggtgcatctgaggaaggtcatgcacagaagccggtttatgcggaagagctccatcatccctgctatcacgaaccgaatcaagagagatctgattcacaatccgctacatctaatcttttctgtggattttcttggagtaacaaaatcaactttatcatcacttagtaaaggatttgcagagctctctactgatgggcaatttcttcagctgagatcaaagcaggtttggtcaaggagaatcactggtgttggtgatgggctagttcaagggactgaagcatttgctcagggtttggctttcggggtttctggtgttttaagaaagccagttgagagtgccagacagtatggtgttataggtattgcacctggcattggccgtgcttttgtgggtttcattgtccaacctttaagtggggctctggattttttttcactgacggttgatggaatcagtgctagttttatgagatgtgttaacattttaagtaacaaatctgttccgcagaggataagagatcctcgtgctatacatcgtgatggtatagtaagagactatgacaaatttgaagctgctggccagatggccctttatctggcagaagctagcagatattttgcatgcacggatttatttcgagaaccttctaagtacgcatggtctgattactatgaagaccattttattttaccaagccagaggattgctttagtaactaataagcgggtgatgctgcttcagtgcttggatctagataaaatggacaagaaaccttctaaaatactttgggatgttccttgggaagaagtactttcattggagctagcaaaagctgggtatcagaggccttcacatgtaatcatacatctgaagaattttaggaggtcagagaactttgtaaggcttattaagtgcaacattgacaacgaacgggaacctcaggctctttcactttgctgttcaattcggaaaatgtggagatctcaccaagcagcaatgaaagttataccattgaaggttccatcaggccagcgtcatgtgtattttgtgtcagatgatgataaaaaggaatcccacagtttatctaggcctttgctaagctcgggaggaacctctactgatgttgagcaacagttcataaacaatacagttcactttcagaaaatgtggagcagtgaaccagaaattcagagccgatgcaaactagttgccaagcagattgcggatgacggaagggtgttcagcatatggaggcctctctgccctaatgggtatgtctcaattggtgatattgcgcatgttggcatccatccaccgcattttgctgctgtatacaagaatatcaatgggaactttgcactgcctcttggctatgacctggtttggagaaattgtgctgaggattacaagagccctgtatcaatatggcttccaaggccaccggggggatacgtagctcttgggtgtgttgctgtcccttcattcaaggagcccactcttgactgtgctttctgtgtggatgagagactcgcggaggatgccgcgtatgaggagcaaatcatatgggcctcatcggatgcttacccatggggatgctatatctaccaagttcagagcgcctcaatgcagttcatggcacttcgtgtcccaaaagaacaatctgagctaaggcccaagaagatattggagtcatttctgcagcaagcatcagagactcaaacgtcccgtgcatga

SEQ ID NO: 153212 - DNA, 102 bp, Zea Mays
gctgttttaagggagggtggagcaggtttttttagatcccacctttcttcacaaaaacgactcccgatctttcggctccacatgagaatcagtttaaaaaaa

SEQ ID NO: 153213 - DNA, 2114 bp, Zea Mays
atggccttgctctcgcagccaagtgtaagaaaaactgcggacgtggcgcccttgtccgtccacgcggttgagcgctgtgcgcatctggctgacgacacgacgcgccgtcctgtaactcgtgctacactgaccacactccttaaggcctcgtttggcaactcagattgcattgtaccaaggataagaaaaatggataagcgaactaggaatagaagagaagaggaggacgaggagttaatgctctttcttttccctgctctttatctaattactaatggagggagagagaaaagagcaaggcatgcttctattctacctggcaaggagagacttaaagagattcttgaagggcatgagaagaactgtcttgtcgcattttgtatggagcctcgtatactcaaagatatagcaacatttcttagagaagaacacatcctacgtgacacaaggggtgttaccgtggaagaaaaactaggaatgttccttttcatattgtcccataatgctagttatgaggatttacaacatgaattcaaacatagcgcaagaatgtttggaagaggatctcctaggatgaacttgatccaagctgcaactatgaaaaaaatatcccccagatctactactaacaagcgcaagaagagaacatcaccaaaagttggtcgtcttagagcaaactggaatagtggactagaaaagggtttagttgaaattcttcaagaccacaacaatgactgttataagggccaaaatgggtggtcatcggaagcatggaatagaattgtcaagttattccatgagaaattctcttatgtcacatttacaaaatgccaaatccaagataaagagaaagagttaaagagagactacaaggctcttaaagaggcaagacaacaaagcggggtatcatgggatgagcggttgtgtagaatagaagcagaagaacccatttggaataacctcaccactagtaacgagagacttaagaagtttcggactaaatctttcccactgtttgaggctttaggagagctatatgatggaaatattgctaagggaaccatgaattttacttctattgagccttctcgacctcctgtcacacaaccttgtcaaggtgctgctacacagccttctcaagctgctttcacacttacacaaccttctcaaatcgctttcacacaaccttctctagctgctttcgcacagccttctcgaaccgcttttagacatccttctctagccgctttcccacagccttctcaagccgcttttgcacagccttctcaaaccattttcacacagccttctaaagccgctttcacacacccttctgaagccactttcacacagccttctcaagccgctttcacacaaccttctcaagctaatatctcacaagccatttgtgatgaagatgacgagctcagagtattggatccaccagcccctacatcagtgagcaaaagggcaaaaaatgttggtactggtaattcaagaacaagaattaacaagcgtacacaagataggaatgtggttgagatgatgggaaggtttctagaaatgaaagaaaaacaagctgaggcggatgaaagggccacaactaatgcaaatgaggatgatttccctattcaaacatgcattgctattgtggatggaatggaagagctttctgatgatgagaaggttgatgcttatgatgtgtttaaggatgcccaaaaccgggccattttcatgactgccaaagatgctacgcgcataaaatggttgaggaagaagattgcaagaacatgatatgatatatgaagctaaagtaatgaaggatgattttgtagtatcgtccagcataaggaaagaaagctgcaatttgtgctattgtttgatttaagacaaacagagatggatatttaactttagccatgacactacttgtttgcaacttttaagtaatctgttaaattaaagatgagatcttgcagatttttcttattacctaatggattctcttattagctgattcaaatctaatcatgcatattgtagtaaggactatgtatgttgaatcaatgactctggttcaattttaaatatcacatgtgttttaagtttcttaa

SEQ ID NO: 153214 - DNA, 2128 bp, Zea Mays
gttcagctatctccaaccaagttgaaaccatcttgttcaaatcgccccctcctctctctctctcgtcaagcacaagcttctgtgcgttcgtgttgcggccctgtctgctgattggctgtggatccagaggcgaaactatggctctgacgctgcgttcctcgacgtcgttcctgtcgcatgtggaccccgcctccaagctcctccacaaacccaccgacgaggcgccgccctgctgcgtctccgtgccgcctgcgcccagccgcaggccgcgcgcgctccgggcggccgcggccacggccacggcgccctcgccggcgacgcaccgcgcgccggcggaggcggccgagctgctgcacggaggcggcgcgggccagcagcacgggctgccgcgcggcggggtgccggtgtacgtgatgctgccgctggacacggtggggccaggcggccagctgtcgcggcagcgcgcggtggcggctagtctgatggcgctgcggggcgccggggtggagggcgtgatggtggacgtgtggtggggcgtggtggagcgggagggccccggccgctacgactgggaggcctacgccgagctcgtgcgcatggtggaacgcgccggcctccggctccaggccgtcatgtccttccaccagtgcggtggcaacgtcggcgacacctgcaacatcccgttgccgccatgggtgctggaggagatgagcagcaacccgaacatcgtatacacggacaggtccggacgccggaatcccgagtacatctccctcggctgcgacacacttccagtgctcaggggccggacccccatccaggtctacaccgactacatgcgcagcttccgccagaggttccgcgactacctcggcaatgtcatcgcggagatccaagtgggtatgggtccttgtggagagctgaggtatccttcgtaccctgaggccaacggaacatggcgtttcccgggcatcggggagttccagtgctatgacaaggtaggcgcacttgattggaaaggtattcggagttgccggtgaaagtttgctgagttgttgtgcgttggtacagtacatgcgggcatcgctggaagccgcggcggtggcgtcgggccacgaggagtgggggaggggcggaccgcacgacgccggcgagtacaagcagatgcccgacgacacgggcttcttccggcgcgagggcacgtggagcaccgagtatgggcatttcttcctggagtggtactcgggcatgctcctggagcacggtgaccgcgtcatggacgcggccgaggccgtgttcggcggcacgggcgcaacgctctccgccaaggtcgccggcatccactggcactaccggacccggtcccacgcggcggagctcacggccgggtactacaacacgcggggccgcgacgggtacgcgccgatcgcgcgcatgctggccaagcgcggcgctgtgctcaacttcacgtgcatggagatgaaggacgagcagcagccgcagcacgccagctgctcccccgagctgctggtgcagcaggtcaaggctgcgaccagcgccgccggcgtgcagctcgccggcgagaacgcgctggagcggtacgacgatgcggcgttctcgcaggtggtgtcgacggcgcgcggcgcaggcctggccgcgttcacgtatctgcgcatgaacaagacgctcttcgacggcgacaactgggggcggttcgtgtccttcgtcagggctatggccgacggtggcgcgaggccagcgctgccgcggtgtgacacggggcactcggacctgtacgtcgggtttgtcgacgccgccaaggagaggaaggcggcggaggccaagggcgccgccaccaccgcagcattgtaggtggtcatcggtagatgcccatgcatgtgcttgcataatgcatacagacacatgcgccgagctgttgtataacgtacacaggagaactgtataaattcagggccttcaggttgcaaagttttataggctgtaatcgagcaggtagataaggaggcaggcatgtcagaacttaggctatcttcagtttatttgttccatttcaaactgtattataaggagcagcttggtgactttcactgtcataaatttagctgaa

SEQ ID NO: 153215 - DNA, 2080 bp, Zea Mays
gttcagctatctccaaccaagttgaaaccatcttgttcaaatcgccccctcctctctctctctcgtcaagcacaagcttctgtgcgttcgtgttgcggccctgtctgctgattggctgtggatccagaggcgaaactatggctctgacgctgcgttcctcgacgtcgttcctgtcgcatgtggaccccgcctccaagctcctccacaaacccaccgacgaggcgccgccctgctgcgtctccgtgccgcctgcgcccagccgcaggccgcgcgcgctccgggcggccgcggccacggccacggcgccctcgccggcgacgcaccgcgcgccggcggaggcggccgagctgctgcacggaggcggcgcgggccagcagcacgggctgccgcgcggcggggtgccggtgtacgtgatgctgccgctggacacggtggggccaggcggccagctgtcgcggcagcgcgcggtggcggctagtctgatggcgctgcggggcgccggggtggagggcgtgatggtggacgtgtggtggggcgtggtggagcgggagggccccggccgctacgactgggaggcctacgccgagctcgtgcgcatggtggaacgcgccggcctccggctccaggccgtcatgtccttccaccagtgcggtggcaacgtcggcgacacctgcaacatcccgttgccgccatgggtgctggaggagatgagcagcaacccgaacatcgtatacacggacaggtccggacgccggaatcccgagtacatctccctcggctgcgacacacttccagtgctcaggggccggacccccatccaggtctacaccgactacatgcgcagcttccgccagaggttccgcgactacctcggcaatgtcatcgcggagatccaagtgggtatgggtccttgtggagagctgaggtatccttcgtaccctgaggccaacggaacatggcgtttcccgggcatcggggagttccagtgctatgacaagtacatgcgggcatcgctggaagccgcggcggtggcgtcgggccacgaggagtgggggaggggcggaccgcacgacgccggcgagtacaagcagatgcccgacgacacgggcttcttccggcgcgagggcacgtggagcaccgagtatgggcatttcttcctggagtggtactcgggcatgctcctggagcacggtgaccgcgtcatggacgcggccgaggccgtgttcggcggcacgggcgcaacgctctccgccaaggtcgccggcatccactggcactaccggacccggtcccacgcggcggagctcacggccgggtactacaacacgcggggccgcgacgggtacgcgccgatcgcgcgcatgctggccaagcgcggcgctgtgctcaacttcacgtgcatggagatgaaggacgagcagcagccgcagcacgccagctgctcccccgagctgctggtgcagcaggtcaaggctgcgaccagcgccgccggcgtgcagctcgccggcgagaacgcgctggagcggtacgacgatgcggcgttctcgcaggtggtgtcgacggcgcgcggcgcaggcctggccgcgttcacgtatctgcgcatgaacaagacgctcttcgacggcgacaactgggggcggttcgtgtccttcgtcagggctatggccgacggtggcgcgaggccagcgctgccgcggtgtgacacggggcactcggacctgtacgtcgggtttgtcgacgccgccaaggagaggaaggcggcggaggccaagggcgccgccaccaccgcagcattgtaggtggtcatcggtagatgcccatgcatgtgcttgcataatgcatacagacacatgcgccgagctgttgtataacgtacacaggagaactgtataaattcagggccttcaggttgcaaagttttataggctgtaatcgagcaggtagataaggaggcaggcatgtcagaacttaggctatcttcagtttatttgttccatttcaaactgtattataaggagcagcttggtgactttcactgtcataaatttagctgaaggaaaatagaaatgccaattactac

SEQ ID NO: 153216 - DNA, 379 bp, Zea Mays
gtatttctgcatcgcttcgtcatgctaaagtagccggtcactagttcccttccacgcactcggcctctggttttcctgctccctccttgctccagccttctcccaaggtcgccccatggcgtcttcccctgctggttcaccggtgcccagctcacttgggctgtgtgtgctcctgcatcacgctctgctcgcagaattccttcgcggcgtcctgcaggccgacgctcagctctcagctcctgcgcgtgtcgaactcttctattgcgcgcgcgaagttccctgctcgccacgacgtgtcgagcttccgcgtcgagtttctctcttccgtgccgattgtcttctccgagccgattcttggctatcgtagtatttttaatta

SEQ ID NO: 153217 - DNA, 379 bp, Zea Mays
gtatttctgcatcgcttcgtcatgctaaagtagccggtcactagttcccttccacgcactcggcctctggttttcctgctccctccttgctccagccttctcccaaggtcgccccatggcgtcttcccctgctggttcaccggtgcccagctcacttgggttgtgtgtgctcctgcatcatgctctgctcgcagaattccttcgcggcgtcctgcaggccgacgctcagctctcagctcctgcgcgtgtcgaactcttctattgcgcgcgcgaagttccctgctcgccacgacgtgtcgagcttccgcgtcgagtttctctcttccgtgccgattgtcttctccgagccgattcttggctatcgtagtatttttaatta

SEQ ID NO: 153218 - DNA, 99 bp, Zea Mays
ctgccgttgctggacatcctggcgagccgtgtgcgcgccgtgcgccggctccgcgtgttgctcaccaccaagttcccactggggactttcccgataaag

SEQ ID NO: 153219 - DNA, 888 bp, Zea Mays
attacaatccccgttgtgccaacagtgagggtggttatcactttcaccaagtttgtccccctcatcgagcctaaggagttcttcaccccaatgtcgagccccagcctcttggcgagctcagggccaggaagcatcatggcgaagcctgacacccaaaagagctcctacctgaagtgggtctcgaagaactcaagaccaaaggccgtgaacctgtcacaagtcatggacaacgctggccctttcttatgcatccaatatactctaagcattatgggatccgtaatggatgcgcttgttgtggtgcgcatggtgtcggtggagcttgggtgctgcacaagatggtcagttggactctttgaccctattactagctctgttgacgttactgaattcatagcctacgacctactcggtggcgacgcgtgcagcgcacagatgtactcagaggctaagcttgcctcagtggcagcagcagtgagcaggagggtggagaaggtggagagggactacctgtcgtacgacaagccaagaacatgttcacacaatgtacctatgtgtatcattctagcagatgaccaagcaagaccaacggtgtatgtaatgtatatatgcatgtctttagttggcttagctgccaaggttgtgagagacctcggtgggaagtttgtgttcatcctttatgataccctatctaagtccacctttgtcactgctgatattgatggtagcatccctttcttctggggtgttgactccgaaaaccatcttgtgttctctgacgatgctggaatcctcaaggcaggccgtgacaacttgtacgtgtcattcctgaaagtttccagaaaaaaccatgtaaacaaaaaggctcatgcatcattcaaggggtaa

SEQ ID NO: 153220 - DNA, 1794 bp, Zea Mays
accaaccaaattccggcacatccctcacgccacagctgccagaaactcctgctctcctcctcgaaaccaaacacatgtagttcactaattacaaccgagacttcctaatttctacttcaaacatcatccttccaaccttatctatatccctacagcaacatcctttgcccccaaacccctttgttcggttaaattcaccatccatacacaataagattaattctactagcatcgaagtccacaactaccagcatgaacaacagttaacaaagatcaagcaagcatatgaacacaagtttgacagagagcagccgggatacatcgatcgatcagtcctcttccattgcggcagaggaaggggagacatgggccttcttgtgctgcagttgcttaccgaggaaggcctcgaggaagagctgctgggcgtccagcatcgtctgggaacccctccccgacagcccggagtgcggcagccacctccgccattgcctctgactcggcgtcgtcctcgctgccgctcctctctgacttcacagctgccgccgcgacgggcttcgtgcgcgaggccttggggatggtgaagcgcagcccgctcccggcaccgccgttggagatgagcccgtgcaggctcctgctccgcacagcctccacctcggaggaaggcgaggacaccggggaaggcgaggacgccggcggggcggggcccttggtcttgatcttgacgatggcgttcggactcgggtccggcacgccgccaccagcgaggtcgtggagcagcgggaagaacggccatttgggccccttagaccgccccgcagagcgtgaccgctcagcgcggtatcgcttccgaagcttctcgaccttgtggcggcactgcacgccggacttgggcgtggcggtggggaaccgcccgcagcgcgcggtgacggcgttggccacgtcgtcccagtccgcggccctcaggttgcccttctgcagcgcctcccacctgtcgcggtacgcctcgatgagcgcgagagtctcctcgtgtgtccagcacggcggcggcagcctccggccggagcccacgcccccgagtcctatgccgccccccgaggaggccgctgccgcggccgcagcagccgccgcggcgacgggtgcagccagaggggggaggtcgggagatgagacggcatcgtccctggacgcgtcggaacacgaggaagacatggccggtcagctgcggcggcggcggtggcgaagggaggcgattagggtttggtgatggtggtggagatgcggaacggaggcggaggtggggaaccggtcataaaaggaggaggcggtgcggtggtgggccgcgggcgtgggccgcgcctccgcggtgaaatgaccggctgcggagggcatcgcccaccgcggcggccgcgtgggtggttttgcgggattggtcgcagtcgctccgtgaaggaaggaaggtagcgcgatgaaacggcacgagccaacgggagtacggcgccgcatcgttgcggagcccgtgccgtggttggtgcgggcgcccgtctccgctgctccgcagccgcgcggcgtggccgtgttggatcgggatgggtgagtgggtgggtgacgaactgacgatggcgagtggcggtcgccttgcctttttccgtgggctccgtgcggcctcgtcttgattttttcctttccaaaagcgagaaatttgtcaaaactaggaaatctctactattttcggcagcccggtttcagttccaggccaggaacagtaacagccaggttttagttgatccaggtctt

SEQ ID NO: 153221 - DNA, 3003 bp, Zea Mays
acagaaaaactacacagagtgaaatttcggaagcacgcagacccggtcggatccaccggcccgcggaacggatcgaggccaccggcatcctccgcttgcgtcgcattgcggcgccgagctcgaaacccctggatcggttgcagctttcccactgcccccgcccgataacgcggcggtagggtggtggcctgtcgatctcgcggcgggagccggctaactacctgccgttttgtggatttgtgtgcgtgcttgattttggtgcgtgtggtggcgtggagtcgccggcgggggggggggggagctagggttttggtttgggctttcgggatgacgcgccgggtgcggcggcggacgtgcagggaacgggagggtagggtggtgcggggcgcgtggtgtgttgtttcggcgaggccggaaggcgaggacgatgcggcagcggtggaggtggactggagggcgctgccggacgacacggtgctgcagcttttcgcgcggctgaactaccgcgaccgcgccagcatggcctcagcgtgccgggcttggcgagcgctgggctcgtcatcctgcctgtggagcacgctcgacctccgtgcacaccgctacgaccgggaggtggcgtcatcgcttgcctcgcggtgcgggagccttcgtcggttacgcctgcgcggccacgaggcagcagaggccgtcccggccctctgcgcgcatggtctccgcgaggtggtggccgatggctgccgcggcctcacggatgccacgctcgctgtcctcgccgcgcggcatgaggacctccagagcctccagatcgggcccgatcctctcgagcgcatatccagtgacgccctccgccacgtcgctctttgttgctcccaactccgccgcctgcgcctctcgggtctccgtgaagctgacgcggatgccgtcggagcgctcgcccgctgctgccccctcctcgaggacgtggctttcctcgattgcggcaccgtggatgagaccgctcttgctggtatccactctctccgcttcctctctgtagcaggatgccggaacctgaaatgggctactgcatccacctcctggactcagctttcctcccttattgcccttgacgtctcccgcacggatgtttcaccaagtgctgtttcacggctcatttcccatgccaaaaccctcaagcttatatgcacgctgaactgtatttctgttgaggaggaacagcttcataatcctgctgtttttagtaactctaagggcaaggtcgtgctaacgattaacagtgacatctttagatcttttgagaccatgtttccaattgtggatgctaaagagcacggggttttccatcagtgtaactggagtcacaaagacaagatagctggtgatataacaacatggctcgagtggatcctgtcacagtcacttctccgaattgcagagtccaacccacaaggcatggatggtttttggctgcagaagggcaccacactgctgcttagactattgaagagtttgcaggaggatgtgcaggagcgggcagccactgcacttgctacgtttgtagttatggatgacgagactgcaaatgtggatcctgcaaggtcggaggcggtgatgcagaatgggggcatccgaatgttgctggaccttgcaaggtgctcaagggagagcgcacagtctgaagcagcaaaagctattgccaacttgtcagtgaataccaaggttgccaaggcagttgcagatgaaggcggcattacaatactcactgatttagccaagtcgatgaataggcttgttgctgaagaggctgctggtggcctttggaatctctctgtaggcgaggaccacaaggcgtctattgcagtatctggtggtatcaaggccctggtagatctaatatttcgttggcctgctggaaccgatggagttcttgaacgtgctgctggtgcgcttgcaaacctggctgccgacgacaagtgtagcttggaagttgcaaaggctggtggtgtccatgctttggttacacttgctcgatcatgtaaacttgatggcgccctagaacaggctgcaagaggtctagctaacttagctgcacatggggacaacaatgacaacaatgctgctgtaggtcaggaagctggggctctggaggcactagtgcaactaacaggttctcaaaacgagggtgtaagacaagaagctgctggtgctttgtggaacctgtcatttgatgacagaaaccgtgaagccattgctgcagtgggtggcgttgaagctttggttgccctagtgcaacaatgtttgaatgcttcagaaggccttcaggagagagctgctggtgcattatggggattatctgtttcagaagctaatagcattgcaattgggcagggtggtggggttgcacctttgctcacattggcacgctcagaggttgaagatgttcatgagacagctgcaggggcactatggaatcttgctttttattctggtaatgctctccgcatagtcgaagaaggtggggtgcctgttcttgtaaaaatttgctcatcatcagggtccaagatggcacgcttcatgtctgcactagcactagcatatatgtttgatggaagaatggatgaagttgctttggttggagcatcctcagctagcagttccaagagtgttaatattgaaggagctagaagaatagcatttaagcatatagagacctttgtgctcactttctcagatccacaaatgttctctacggctgctgcctcctcagccccggcagcgctgtctcatgttgctgaagcagtgtttatacaggaagctggacacctgagatgcagtcgctctgagattggtagatttgttgtcatgcttcggaatccttcaccaattcttcgtgcttgtgctgcctttgcccttcttcaggtttgtttcctttatcccttctcaactgataatgctgtttatcttgtagctctatctagaggcattattgtttgagacatgggc

SEQ ID NO: 153222 - DNA, 670 bp, Zea Mays
ctctgaaataatgcagttcacaatcccaggaggtcggcatgcggtgcaccacgcaggtctcttgcaggaagcaggagcaggtcgagtgttacgcccagcggcggcagcgacaacagcttctattgaagccaaaatctttgccaggattgtcctcaggaacttggaacaccatcagtcagggacgtcaacatgaacacccagcagaggtgcatcctccaacaaacaaaggcttctgcaacgatgggctgcttggccgatgcagaatggactactttggctttcggagcctttttacatcacaacaacagtttttctgtgcagacagtgactgaagggacttcaccgaaggtataacccacaactctgaagtgactgaatgaaacataagtgacggcccttcccgtatcgggcgtttaaggtgaacctgcagttttctagagattattttgtgtataagtaaaaaacttttagcgtcgatgagaattataaactggcatagctaaacttatggatatttattccttgttcgttattgttgaggtgtgtagcggcgtcatgtagaaattgggctattcctcctagtatacatgtaactttataaatgtactgttatgtattttcccccatgattgattctgtgcatttatagatcgaggtgttgttaagcact

SEQ ID NO: 153223 - DNA, 1542 bp, Zea Mays
ggctccccctcctcccatggccacgtcccctccttctccctcccctttgctgttaattccatggagaaagatggatgaaggaagaaggaccttacatgttcgtgcgattggatatgagagaagaaaagtgacgtgcacatgagagagagaaaagaaaattgtgtttcagcctgacgtctgatcttctatggctatgttccctatgttcctaggtgtggccaccccagccaattataatgcaccacatcatccaattcgttaaatatcaatatcttttgtgttataaatatgttttggtctattcaagttgtgttaacttcgtactaacgttgtctacgcgttaataaagttgtttcaccctgtcacatgttttaatttatttattaattatttatttatccaatggttattaaaatgacaatttaattaagactactttatagttttaatttgcacttttacaaatacatgttagtgtgattaatgcctacttaaatgttttgatctaatacttgtttagtataaacgtgacatctgttaatgattctcgcgtgcgccgtttgcgcgccgttcgcgcgccgttcgcgcgtgttgcgctcgccgtcgtcgcgccgttcgcgcgcgttgtcgcgatgttcgcgcgcagtatcatttgcgtgtgtcatcgcgttgtccgcgtaccgttcgcgcgtgtcgcacgtgttgttccacgtgccgtccgcgcgctgtttcgtctattgccgcgcgtcgttcgtatgttgtcagcacactgattcgcgagtcgttcgcgcgtgtcgcgcgtgctcttcgagcgtcgtcacacgtcattcgtgtgtcgcgcgcgccgttcttgcgtgtcgcgcgccttgccgcgcgttgttcgcgcatatcgcacgctgtccgcgcgttatattaaactattcgcttataatcactcatgtcaattaattaactatttgtttaatcgttcactaataaaatagtaagttagtcaaaactaagtactagtgttaatttatatttgataaatgtcaattaatataattatgttgaattaaatgttctaactgatacttgtttaacataaacacgataacttctcgaccgtagccttggacgtcgcatttctcttttctcgcgtaatcgtagaatcgatctccatttcgtattgtacgttttgttccattatatgatgtaatgttcttatgcatgtatatgtttgtttgtttatgcctgttcgtatttgctacgtgtcgcgaatagatgtgatctgttcccgagcttcgagggattgacgatcaagttttggcggccaagtgatcaagcttttcaagatctacaaggttgaagaccctgagcactcgtttggtgaaggcaagtgtcctctgacctattatgtcccatttactttataattcatcaaccgcataccatgatcaacttaaggattgactagctttgtatttacctcacccttgattaccttttgggctactatggttagcttcatgctattgctttactctaatcaatgaacatgat

SEQ ID NO: 153224 - DNA, 2773 bp, Zea Mays
acaaaatgtgcgtaaataagagcaagagcagctcactcacacagtcacactcacactcctcgctctctcactggagtggggaacaactgaggccagcggaaaccagagaggggagggagatcatagcagtggggcagtttgagagctcgccgatctgctgcggggatggggtgcacggcgtccaaggtggagcaggaggacacggtccggcgctgcaaggagcgccgccgccacatgaaggacgcggtggcggcgcgccaactgctagcctccgcgcacgccgactaccttcgctccctccgcgtcaccgccgccgcgctctcgcgcttcgcgcagggccacccctcgctcgccgtttcgcaccacactgcccccgtcctcctctccgccgccgcgccgccgcccgcccccatcgccgtccatgcgttccccacaccggcgccctccaccgctgcgtcgtcatcgctcccgcctccgacgccgctcgtccagcgcccacacccgccgccccagccgcccacggcggcggcgatggcggcgccgcagccggcgctggcgagggcaccacgcccacggcggctcagggtgccccacatcctgtcggactccagcgtgaccagccccgcgcagccgtcattccgcaagcagccgccagtgggaacaccatcctcctcgtccgcatgggactgggagaacttctacccgccgtcgccgccagactccgagttcttcgaccgccggaaggccgaggtcgagcaggccagccgcctccgggagctcgaggaggaggagaaggcccgagcctacctccaccatcacacccactacaacctcaaggaagaagacgaggccgctgaagacgacgacggtgaggtggaccatgaaccagatgggatgcattccggcggatgggaggacgacgagcactacgcgtccacgaccacgtcggagaccagatcggacgaggagggcgagatgggggacagatcggaatgcgggttcgcggccagatcagagtgcgggttcgtggccagatcggagtacggcgggacggcaccgtcagagtacgccgccgtaccattgcccctgaggagggatgaaaggtcggaggctggcgacttctccactgtcatggcggcgacagagatgcggatggtggtgcgtcatcgcaccctcgcggaaatcgtggcggccattgaggagtactttgtcaaggcagccgactccggcaacgatgtgtccgagcttctggaggccagccgcgcacaactcgaccgcaacttccggcagcttaaaaagacgggttaccattccaacagcgtgctatcagcattctcatcgacgtggacgtcaaaaccgccattggctgtacgatacaagttggacactaatgcactggagatggagtcaacggaagggaagagtcatggatccactctagagcggcttttggcttgggagaagaagctctacgaggaggtcaaggcaagggagagtgtgaagattgagcatgagaaaaagctttctactctgcagagcctggaatacaaagggagggatagtgcaaagctggataagaccaaggcctccataaacaagctgcaatcactgattgttgttacctctcaggctgccacaactacatcatcagccatcgttagagtccgtgacaatgagcttgcaccacagcttgttcagctctgttttgcgctattgggcatgtggaggtcaatgaaccatttccatgagatacagaatgagattgttcagcaagtccgtggtctggtggacagctccatggctgagtcaacatctgacctccacaggcttgcaactcgtgaccttgaggctgctgttgcggcgtggcactccaacttcgaccgcctcatcaagtatcagcgcgactacatccgctctctgtatggctggctgaagctcacactctgccaggtggatagctgtgtgccacagggagcccatgcctcgatgatctcgcgcgaactcaccagcttctgtgacgagtggaagcaagcactagaccgtcttccagacgctgttgcttcggaggcgatcaagagctttgtgaacgttgtccatgtcatctacgccaagcaggcagaggagatgaaggtgaagaagcgggcagaggcatactcgaaggagctagaaaagaaaaccaactcgctcaggtccgtcgagaagaagtactaccagtcctactcgatggtcggccttggccttcctggcagcggcgggcacggtggcattgacagccacgcgtacgacgcccgtgatcctcttgcggagaagaaaaccgagatcgcccagtgccgtcggaaggtggaggacgagatggcgaggcacgctaaggccatcgaggtcacgcggtcaatgacgctgaacaacatccagacaggcctgccgggtatattccaagccatagctggtttctcagggacagtggttgaagctcttgacgtggtgtgccgccgagctgggtcagtgcggtaggacctcttgccccaccagaattaccaagagaccatcctttctctctctgggtgattcagtagtttacttatatagggaaactgcaaaatataatataatataatatatagctcaaagtagagtgatggaatataggagaaggctcctggatgtttttccctgtcaggatggtttcggttgtagataatgtgattttgcccatgatttgttgatctcatctggccctttctctgggaagtgggaagggagatacataatgtac

SEQ ID NO: 153225 - DNA, 2715 bp, Zea Mays
cactcacactcctcgctctctcactggagtggggaacaactgaggccagcggaaaccagagaggggagggagatcatagcagtggggcagtttgagagctcgccgatctgctgcggggatggggtgcacggcgtccaaggtggagcaggaggacacggtccggcgctgcaaggagcgccgccgcgctctcgcgcttcgcgcagggccacccctcgctcgccgtttcgcaccacactgcccccgtcctcctctccgccgccgcgccgccgcccgcccccatcgccgtccatgcgttccccacaccggcgccctccaccgctgcgtcgtcatcgctcccgcctccgacgccgctcgtccagcgcccacacccgccgccccagccgcccacggcggcggcgatggcggcgccgcagccggcgctggcgagggcaccacgcccacggcggctcagggtgccccacatcctgtcggactccagcgtgaccagccccgcgcagccgtcattccgcaagcagccgccagtgggaacaccatcctcctcgtccgcatgggactgggagaacttctacccgccgtcgccgccagactccgagttcttcgaccgccggaaggccgaggtcgagcaggccagccgcctccgggagctcgaggaggaggagaaggcccgagcctacctccaccatcacacccactacaacctcaaggaagaagacgaggccgctgaagacgacgacggtgaggtggaccatgaaccagatgggatgcattccggcggatgggaggacgacgagcactacgcgtccacgaccacgtcggagaccagatcggacgaggagggcgagatgggggacagatcggaatgcgggttcgcggccagatcagagtgcgggttcgtggccagatcggagtacggcgggacggcaccgtcagagtacgccgccgtaccattgcccctgaggagggatgaaaggtcggaggctggcgacttctccactgtcatggcggcgacagagatgcggatggtggtgcgtcatcgcaccctcgcggaaatcgtggcggccattgaggagtactttgtcaaggcagccgactccggcaacgatgtgtccgagcttctggaggccagccgcgcacaactcgaccgcaacttccggcagcttaaaaagacgggttaccattccaacagcgtgctatcagcattctcatcgacgtggacgtcaaaaccgccattggctgtacgatacaagttggacactaatgcactggagatggagtcaacggaagggaagagtcatggatccactctagagcggcttttggcttgggagaagaagctctacgaggaggtcaaggcaagggagagtgtgaagattgagcatgagaaaaagctttctactctgcagagcctggaatacaaagggagggatagtgcaaagctggataagaccaaggcctccataaacaagctgcaatcactgattgttgttacctctcaggctgccacaactacatcatcagccatcgttagagtccgtgacaatgagcttgcaccacagcttgttcagctctgttttgcgctattgggcatgtggaggtcaatgaaccatttccatgagatacagaatgagattgttcagcaagtccgtggtctggtggacagctccatggctgagtcaacatctgacctccacaggcttgcaactcgtgaccttgaggctgctgttgcggcgtggcactccaacttcgaccgcctcatcaagtatcagcgcgactacatccgctctctgtatggctggctgaagctcacactctgccaggtggatagctgtgtgccacagggagcccatgcctcgatgatctcgcgcgaactcaccagcttctgtgacgagtggaagcaagcactagaccgtcttccagacgctgttgcttcggaggcgatcaagagctttgtgaacgttgtccatgtcatctacgccaagcaggcagaggagatgaaggtgaagaagcgggcagaggcatactcgaaggagctagaaaagaaaaccaactcgctcaggtccgtcgagaagaagtactaccagtcctactcgatggtcggccttggccttcctggcagcggcgggcacggtggcattgacagccacgcgtacgacgcccgtgatcctcttgcggagaagaaaaccgagatcgcccagtgccgtcggaaggtggaggacgagatggcgaggcacgctaaggccatcgaggtcacgcggtcaatgacgctgaacaacatccagacaggcctgccgggtatattccaagccatagctggtttctcagggacagtggttgaagctcttgacgtggtgtgccgccgagctgggtcagtgcggtaggacctcttgccccaccagaattaccaagagaccatcctttctctctctgggtgattcagtagtttacttatatagggaaactgcaaaatataatataatataatatatagctcaaagtagagtgatggaatataggagaaggctcctggatgtttttccctgtcaggatggtttcggttgtagataatgtgattttgcccatgatttgttgatctcatctggccctttctctgggaagtgggaagggagatacataatgtacatacattaaggtcaccttgcactctagcgttgatcaagcctgtgcttctgcctaacaaaagcgttaactttcttt

SEQ ID NO: 153226 - DNA, 1279 bp, Zea Mays
atagtaacaaaattgtttcaaaattcatataactgtattcagcaaaaaaaaataacccacagccgcaagcctgcaactgcaactgaaaagcaaagattacaccagaatagtgcagcaatggatacatgtttctctgtatgacgattgacccacgtcatatacaccacaaacaactgtttgcgattccaaaacaacatcaccggtctgaagcgaagaatgaaacaggacgggatgagtaccttgccgcgtgctctgggaagtgcttgccgggctgtcgctgccggagcacgtggaggtcgccgccggggcagaactccatgacaaggcaggcgaaccggtcggtctcaaagtgcgcgtacagagtgggcaagaacgggtggtccagcagctggaggatctcccgctccgtctgcgcgcgactcagcttccgccggctctccagcgacgccttgtccatcaccttcatcgcgaaccagcagggccttgccacgtcgccatttccggggcctcccccgctgagctccgacaggtacaccgtcccgatgtcgccgcacccgagcctccgcagcagccggaagctgcccatcgcgaggggtccctcgcgcgcgcgcgccgcgaggatggccttccacctggggtcgccgcccttgtgcggcttccccgcgctgccgccgcagccgctgctggtgccgttgctccagccgctgccgtcgctggccgcgctgctgctgacgctggtcttggcgctgcggctggtgacggtgcagctcggcgcgatgctggtgaccgtggccgtggcgccggagctgtcgatgctgctgtctgggctcgccgcgccgctcggcggcctggacgcgtcccacgagatgactggcttcgggaccggcttctcccggccgtcgacagcgacaaagacggtgtccgtctcgtccactggctccggcgggtggctcgccccggagaaggagctcctcggcggcgcgtatccgtccgcctcgtcgtccctggacgcaatgctaatcctgaccttgtcgaactcgaactcaagaaccttctccgtcaccttaccgtctccgttccttgccccgccgccgccgacgggaacgccgcccatctggagctcgaacgcctccgggatgaaccgaaactggaagtcctggtactcagtatcggatcccggatccaggggcgcctccagcacctgggtgcggaagtgcgtgtgcgttctcgtttgatgtttggcgtgctgtgagcgcgacggctgcattgagagtgtgtg

SEQ ID NO: 153227 - DNA, 1219 bp, Zea Mays
ggatcaagctgtccagcccggattaaacaagtagtgatccgtgacctcccctcctccggcctcctgtcgccggcgtccgtcgctcgttgtcgagcccccgggagcaaaggcttccgccgcctgcgttccggatggagaatcccttcagcgtgaaggtgctgcaggtattcacaggtttcggcgtaggatgcggcgtcggcatcggcgtcggacgacccatctacctaggtatgatacctgggcttcagcaagttatgagtgctacaaggggagcaacagatgctttttctggtgtcacaaggcatgtcaattccgcgctaaggacggctggattaaagaacatcgaagcagggattggctgtggagttggtataggccatggttttggaataggaattgcattaaagccacgggtgcttcatggaattcagtcatctgttggggaaattatgtctaaatggacatcaaagctaaaagatacccctgagacgccgtcttcgtcaaatcctatggttcattctttgtctagcaatgaacaaactcacaacagcatgtcgatggatctagaggctaaggatgcagaaagtaatttgaaccaaacttcaagttatgaaatgtcaaaagtgcaatctactcagccggaagcattgactgtaagtcgaaccaaaaaggtcattgccaattttctacaggatccactgttccagaatgatacaaaggtggacttcagagatgccgtacgcacgaaaacattcttaaatgtattatttgtcccattgtagcttcagctatgacttttgctgctcaagtagaatgaacgattctctctttactcattttacagcctggaaatttgcatggaatggatagtgtacttcagttggtactgaagcaccaaaaggttattgaggaactgcaggaggaaaacgaaaatctgcgtcagattctgatagaggaacttaagatttcaccaaccaaattacaaataggtcataaaaatggagtgaaggcctactatccatgctcggactgctttgaatgtcgccgcagaagtcggagaacaaccagatagcagtgggcattgccgttctttggttgagcaaaattttggtcgtttgttcagtagcttacagctgttgattttattagaacgatatcctctttgagaacctgcagatgagctctgattgttcagtacaactgtcattactggttttca

SEQ ID NO: 153228 - DNA, 1112 bp, Zea Mays
ggatcaagctgtccagcccggattaaacaagtagtgatccgtgacctcccctcctccggcctcctgtcgccggcgtccgtcgctcgttgtcgagcccccgggagcaaaggcttccgccgcctgcgttccggatggagaatcccttcagcgtgaaggtgctgcaggtattcacaggtttcggcgtaggatgcggcgtcggcatcggcgtcggacgacccatctacctaggtatgatacctgggcttcagcaagttatgagtgctacaaggggagcaacagatgctttttctggtgtcacaaggcatgtcaattccgcgctaaggacggctggattaaagaacatcgaagcagggattggctgtggagttggtataggccatggttttggaataggaattgcattaaagccacgggtgcttcatggaattcagtcatctgttggggaaattatgtctaaatggacatcaaagctaaaagatacccctgagacgccgtcttcgtcaaatcctatggttcattctttgtctagcaatgaacaaactcacaacagcatgtcgatggatctagaggctaaggatgcagaaagtaatttgaaccaaacttcaagttatgaaatgtcaaaagtgcaatctactcagccggaagcattgactgtaagtcgaaccaaaaaggtcattgccaattttctacaggatccactgttccagaatgatacaaaggtggacttcagagatgcccctggaaatttgcatggaatggatagtgtacttcagttggtactgaagcaccaaaaggttattgaggaactgcaggaggaaaacgaaaatctgcgtcagattctgatagaggaacttaagatttcaccaaccaaattacaaataggtcataaaaatggagtgaaggcctactatccatgctcggactgctttgaatgtcgccgcagaagtcggagaacaaccagatagcagtgggcattgccgttctttggttgagcaaaattttggtcgtttgttcagtagcttacagctgttgattttattagaacgatatcctctttgagaacctgcagatgagctctgattgttcagtacaactgtcattactggttttca

SEQ ID NO: 153229 - DNA, 1167 bp, Zea Mays
tgatccgtgacctcccctcctccggcctcctgtcgccggcgtccgtcgctcgttgtcgagcccccgggagcaaaggcttccgccgcctgcgttccggatggagaatcccttcagcgtgaaggtgctgcaggtattcacaggtttcggcgtaggatgcggcgtcggcatcggcgtcggacgacccatctacctaggtatgatacctgggcttcagcaagttatgagtgctacaaggggagcaacagatgctttttctggtgtcacaaggcatgtcaattccgcgctaaggacggctggattaaagaacatcgaagcagggattggctgtggagttggtataggccatggttttggaataggaattgcattaaagccacgggtgcttcatggaattcagtcatctgttgggtttcccccctaggaaattatgtctaaatggacatcaaagctaaaagatacccctgagacgccgtcttcgtcaaatcctatggttcattctttgtctagcaatgaacaaactcacaacagcatgtcgatggatctagaggctaaggatgcagaaagtaatttgaaccaaacttcaagttatgaaatgtcaaaagtgcaatctactcagccggaagcattgactgtaagtcgaaccaaaaaggtcattgccaattttctacaggatccactgttccagaatgatacaaaggtggacttcagagatgcccctggaaatttgcatggaatggatagtgtacttcagttggtactgaagcaccaaaaggttattgaggaactgcaggaggaaaacgaaaatctgcgtcagattctgatagaggaacttaagatttcaccaaccaaattacaaataggtcataaaaatggagtgaaggcctactatccatgctcggactgctttgaatgtcgccgcagaagtcggagaacaaccagatagcagtgggcattgccgttctttggttgagcaaaattttggtcgtttgttcagtagcttacagctgttgattttattagaacgatatcctctttgagaacctgcagatgagctctgattgttcagtacaactgtcattactggttttcattagctgtgtggaggcaggggagcactggctggagcgtttgcacccccccccccccccccccccccaaaaaaaaaaa

SEQ ID NO: 153230 - DNA, 3224 bp, Zea Mays
gcaagcgagagaagaacacagctccaggccaaaacctcgccgcctcgccggcctccgcctcaattccatgcctcgccaatcagatccacgctcctcgccctctactatggactccggcggggggtcctcagcggacatggagctggcctggcaccttctcaccgtgctcatccgcctcggccgtcccgccgccgcctcggaactcaccgccgccgctaccgtcgcagcgccctccatctcgacgcgcgtcgtcaagcagatgtgttgcttacctaggtcaccactatggatctctgacgacggcgtcgtgacgccctccgagacggctatcctggcgtttctgaggttcatggggtgggatatcccggggcctaaggtgagcctgtggccttcggaggtgaggcggtggtcgggaaaggtgtccattaggtatgagcgtaagcggcaagggtcggatgcaaggtgcttcagcgcgaagaggcgccgactactggcatcggccgcagatttggtggaacaaacggagcaccagtcgtggcagctggttgcgcagacctgtactacggctgctactggagaggtacatttggaggttatgcaaaagttgcaggataggcttcccagtctcggcacatttctcggtgatcttcagcacaaacttgaccagcctcttagaggtgacgatgacttggctattgggaacatgtctttagcactggtgccaacaggtttttcagattgcccttgttctgtcaatcttcctccactggatgctgagaaattgagaaacatcaatatggaagttgatggtagaagcaacaagattagtgaatctgaaacagtttccttacttaacaatagagtagaggatagtgatgatctacaaaaagagtgtgcccttcccatggccagtcatgatgttttagttggagaatgcaaaaatggggctgatgaatatctaaatcctgtttgcaaaagtcctggcagtccgatagatcataatatgaaaacggctactagtattgaagcatttgatatgattctcaaccaagcagatgctctacaatacaattgcctaaatgatgggcatcatcagaatgccccaagttgtgttcagaaaaaaaatccacttcgtgctagtgcatatgcagaagtttgcactgataagacagcacaaattttgttccagccttctgtggttaacaaagttggatctatagcacctcaaatgatgataaatgttcaatctgaaacattaccacaagaaactacaaggcaagatggcatgaacatgaagcacctgaatattgttcctgaaaatagagatatcagatatctaaatcatggagagcagtccttgaacaaggcggaggtcaatgtatctaagaatgggcgggataagttgactgtgaagcagaaagagaagtgcaagaaaaatgaacagccaaaagaagataaggacaacacagcaaagactcaaaagggtcatgtagcaccaaaaccacttcctgctttcaagggttttgtcatagaagaggaggaagggtctggaggttatgggactgtttatagggctcagaggacaaaagatggaaaaacattcgctataaaatgtcctcacccaaatgctcattcacatcatgttaataatgaactaaagatactggagcgttttggaggcaaaaattgtgtgattaaatatgaatgctctttgaaaagtggtgatctagactgttttgttctagaacatgttgagcatgacagaccagagattttgaaaaaagacataaccttgcttgagctgcagtggtatggacactgtcttttcagagctcttgcaagcttacataaacagggggtagtgcatagagatgtcaaacctggaaacttccttttctgtcgcaaactgaagaaggggtatcttattgactttaacctggcaaatgatcttcaccaaaaattcttgaaaaactgtaaatctgatgcaacttcaagtgggaaggataccacatctcaatccctatcaactatttccccagtagttcatgtcaaagaaccagttgctgactcaaagcagcctcttcctttgaagaggaaaagatctagtagaagcccagtggatagtgcacgtgcacctatggtcgacagtaaaagtaggcatggtaaccaaactgcagatgtatctggtataacatctgccaaggatcctacgagcactaaaacatcattagataggttaaagcagccaatgccttacaaagggcgaaaagaactaatgaacttcttacatgagaccatgcaaagtccaaacaaaagtactatgcctactcctgtttcccaaaggaagagggtcgctgctccttttggtagtgtggatcgaaagctctttatactgacgccaatgcccctgcgttctggtggcagtgctgttgctggtgctggcatgttcaacaacaaaggacatggaaaacatcgaagagaaggtccatgtgttggaactaaaggtttccgagctccagaggttctccttaggtccttccaccagggctgtaaagttgatgtctggtcggctggggtgacgctcttgtacttgataattggcagaacaccttttggtggagatcctgaacagaacatcaaggaaatagcgaagctgaaaggaagtgaagaactatgggaagtagcgaagttgcacaactgcgaatcttcgtacccatcagatctctttgacgtcaaatttcctttgtgctcggtggatctaagggaatggtgtgcagccaacacacgcaggccagatttactcgagatgatacctgactcctttttcaatcttgtggagaagtgtttggccgtcaaccccaggtgcaggctctcatcagaggacgcgctcatgcacgagttctttgctccatgccgcgataacttcaggaagctcaggatgctgaggaggtcagctggttctgatgcagcatgttcatcgtctcaccaggacacaacacttggagcaagacagtcataggtcgttccaccgtacatacttattgacaccagaaagctgattgtgatcatctagtttattacagacatgacaatagccaaatcgtgttcccgtcttgatgtaagtaaacacttgtactaaatacgtactaaaccgttggtcggaaccaagatatattatttttgtcatgcaacgggagggacgaagagtccccacctgatatatt

SEQ ID NO: 153231 - DNA, 198 bp, Zea Mays
cattccagtatttgctcgccatcgctgctatgaggggtgatcgtgggaaagccgtcgcggggagaaggcacgagctctgggtctgcgcctcgctacggatccgcgctccatcatcggccgacctcctccattggcgcagtgaggtcacgtgtcatctgaagagcaagttggtacctgaaatctcaagtcccaggcaag

SEQ ID NO: 153232 - DNA, 1661 bp, Zea Mays
cacaaatcagaactggacgaggccagaggcgaccccacccgtcagtgatctggtagcacgtcgcctagtcattttggtgacgtgcgggttgctgcttggttcaggcagtttctacttcttcagagttcggggaggcgaggcgaggcgaggcgtggagggattgggaattttttgggaggggaggaggcgtgagcgggaggaaagtgaagagagagtagcttccgatctcgattaccccggtctccgtatcgggaatccaattcggttccatccaacgcctgagatcggattccaacccccatttcggaccgatcgctttccgcagaccgatcggctttgggggattttttttcccgagcgatttttctggaggctcagatcgggtcggtctgagtttagttgatcgcggagcgatgctaatcgaggagcttccgggcgatccgggtggaggacgaggtgagggcggggaggatgagctgctgctgccgcgtcgcgaggatggcgacgccgcggagggcgagagtggagtggtgatgcgggtggccgtcgacgcgaagcgcgcagcggtgggtgtaagcgctcggatgcttttctacccgacgctggtgtacaacgtcgtgaggaatcggttcgagaagcacttccactggtgggatcagatcgacgagcatgtcctgctcggtgctgttccattccctagcgacgttctccggctaaagacgcttggagtttgtggtgtggtgacacttaatgaatcatacgagaggcttgttcccacatccctgtacgaggctcatggaattgaaaatctggtgctaccaacaagggattacctttatgcgccttcatttgttaacctttgtgaagctgctgactttatccacagaaacgcttcatgtgggaaattgacgtatgtgcactgcaaagctggacgagggcgtagcactacagttgtcatttgctatttggtgcaatataaaaatatgactcctgctgaagcttatgaacatgtccgcttgcgtcggcctagggtattactagcttctgcacagtggcaagctgtgcaagagttctaccaactaacagtgaagaaaacggggaggtctacttggctggacaatcctttaatcaaaccacctttgttccttgccactcgcaaacttgttgcctttgatgatagcgcatttgtgatggtctcagaatcagacctcgaagggtataatgcagatgcactggcacttaatatgggcagtagattgtgggagataagcttgatataccgtgtccagtttgcgagcaagacagcatttgctgggttttcgtatctgtggcttcgatgtcgtgcctgcaaggaggctctacctgagaatctggggagagatagctgttctcttgaggttgaccagctaacaactggtcatccatgtctactgcaaggtgtcgtggttaatccatgactgctgagtctgtgtttttgccttgcgcttgtacatattaaagagcctcaatgtgaatctgtaacgtgggtctgcagcaaccaaagagtgaagttgctcgggtttgtatatatgacatgtaataagttgactgctacgtgtacgatgttcaatgttaaaacacaactctttctgatcaaatgtcagctccagcactcttgtctt

SEQ ID NO: 153233 - DNA, 1894 bp, Zea Mays
gcttggttcaggcagtttctacttcttcagagttcggggaggcgaggcgaggcgaggcgtggagggattgggaattttttgggaggggaggaggcgtgagcgggaggaaagtgaagagagagtagcttccgatctcgattaccccggtctccgtatcgggaatccaattcggttccatccaacgcctgagatcggattccaacccccatttcggaccgatcgctttccgcagaccgatcggctttgggggattttttttcccgagcgatttttctggaggctcagatcgggtcggtctgagtttagttgatcgcggagcgatgctaatcgaggagcttccgggcgatccgggtggaggacgaggtgagggcggggaggatgagctgctgctgccgcgtcgcgaggatggcgacgccgcggagggcgagagtggagtggtgatgcgggtggccgtcgacgcgaagcgcgcagcggtgggtgtaagcgctcggatgcttttctacccgacgctggtgtacaacgtcgtgaggaatcggttcgagaagcacttccactggtgggatcagatcgacgaggtcagggggtttttttctcccttttgatcgatgttgttgtgattgatttggtgttctggtcgcgttttccgatctattatttgatttatttgggaattttgactgtcctgtgtgtcatcatctagctttgtatcttgaatgtggtagcagttctgttgttccgcattagttttcgtttttctgcttcgtggcttgagtttttcttaattaattttggaagcacatgaataaaggtcatgcaacgttttacaatgttttgctgacctattatgttccaattcgtttagaattttctgatggttatgctttcatcgccttcaatcgcttttggtgtatcagcatgtcctgctcggtgctgttccattccctagcgacgttctccggctaaagacgcttggagtttgtggtgtggtgacacttaatgaatcatacgagaggcttgttcccacatccctgtacgaggctcatggaattgaaaatctggtgctaccaacaagggattacctttatgcgccttcatttgttaacctttgtgaagctgctgactttatccacagaaacgcttcatgtgggaaattgacgtatgtgcactgcaaagctggacgagggcgtagcactacagttgtcatttgctatttggtgcaatataaaaatatgactcctgctgaagcttatgaacatgtccgcttgcgtcggcctagggtattactagcttctgcacagtggcaagctgtgcaagagttctaccaactaacagtgaagaaaacggggaggtctacttggctggacaatcctttaatcaaaccacctttgttccttgccactcgcaaacttgttgcctttgatgatagcgcatttgtgatggtctcagaatcagacctcgaagggtataatgcagatgcactggcacttaatatgggcagtagattgtgggagataagcttgatataccgtgtccagtttgcgagcaagacagcatttgctgggttttcgtatctgtggcttcgatgtcgtgcctgcaaggaggctctacctgagaatctggggagagatagctgttctcttgaggttgaccagctaacaactggtcatccatgtctactgcaaggtgtcgtggttaatccatgactgctgagtctgtgtttttgccttgcgcttgtacatattaaagagcctcaatgtgaatctgtaacgtgggtctgcagcaaccaaagagtgaagttgctcgggtttgtatatatgacatgtaataagttgactgctacgtgtacgatgttcaatgttaaaacacaactctttctgatcaaatgtcagctcca

SEQ ID NO: 153234 - DNA, 2480 bp, Zea Mays
atgcgcaagggcatcctcacgggggccgcggccggcgtcgaggaggtggacatccaggggctcggcatgcaggagcgcaagaacctcatcgagcgcctcgtgcgcaccgccgaggaggacaacgagcgcttcctgctcaagctccgcgaccgcatggagcgggttgggatcgataatccgacgatagaggtgcgttttgagaacctgaacatcgacgccgaggcctacgtcggcaaccgaggtgtccccacgatgaccaacttcttctccaacaaagtcatggatgtactaagtgctatgcacatcgtctctagcgggaagaggcctgtctccatcgttcacgatatcagtggggtcataagacccggcagcttctcacctgtagcggcgccgcagcaactcgcattcttcagcggcgtagcgatggagagggtttcatcagctccagaaatggatgaggctgcctcaactgatcaatcaagcagattaacaaaaagaagggctaaagtttgggattacgttgatacagaggtagtagatgggaaagagaaggcagtctgcaaatattgtaaggtccacttatcttctgctgcgggtaaaggtacaactcatctgaataggcatatttctgtgtattgccatgcaattccacaagaagagagacaaaggtttttagcgacccaaaaaacaaagcctggcgatgatcatgtttttgaccagtagtctttcgtagtataatagccaagtacttccttagcgcagagatttcatttcaaaagtgtgaagatccatcctggaaagaaatgataaattactgtcaaccatcttttcgattagtcggtcgacagactgtccgttcagattgtatgttgttgtatgaagaggagaagttgcagttaattgagcagtttacaaagttgaaatctcatgttagtttgactgctgatctttggtcctctaaccaaaatcttggatatcttggtgtaacagcacatttcattagtgaagattttgagttgcataaaaagattattgcattcaagaagatttccttcccacatacatcttatgctgtgcaagatggtattacctcttgtttgctagagtggggattggttggtgatttgtttacccttactttggataatgctagtgtaaacaatagagcaatgaaagatatgcgagatgctttgggcagccagatgtttttcagtggtgaacacctccatgtgaggtgttcttctcatgtgctcaacatcatggttcaagctggactaaaggtcattccaaatgcagtcgggaaggtgagggacattatcaaggtcgtgatatctacaccatctcgtttacagatcttcaattctattgttcaaatattgggtcttaaaagtaaatcggggctgattcttgatgttccacatcgttggaatgcaacctatgatatgctaaatgaagccctaaaatataaggctgctctgaacagatatgcagtagagcaacaccatgaatgtcccactgaagaagattggtcgaaggcagaagctcttcatggttttctacaagagttcagtgatgcaaccaaagcattctcagcggataggcatcccatagctcatctttttctcaagatgttgctcgttatccgaggtgtgctgcttgatgagaattataactcaaatgaactccttaatgagatggcaaatgttatgtataccaagttccaaaaatattggataaatcctaatattgtgttgctcatagctcctgttctagatccatcaatgaaaactgaatttgtcaagttctatttctacacagttggtgacaatgttgatatgaagatgagggagctcaaaaggtacttgaagaaatattacctagagtacgagaaaatcatgaggagtcatagtttgcatgtctttattactcccgatgatcagatgagaagtgatccttctacctcttcacctctttgtggtaaaagaagggtggaacatgcatttgctcaatttgcatctcaaaatgcgaatgcccgtccagagcgaacagaaatggatacatacttggaggaccctaggatccttatcaagccagatgaatgcttcaatgttttaggatggtggaagaaaaattcagatgcttatccaatattgtctttaatggctagggatttcttggctattcctgtgagtacggtgtcctcagaatctgcctttagtgcagctggtagagtccttggaaaaaataggacatcactatctcctgaaacacttgaagctttagtctgtgctaaagactggttgattggattcaatgacgaaaaagaaggtaaattatcatataaaagtagactattatatgataatgagttaaattgtctacgtcatttcactaggtgaaccaatgactggaaagcgaatgtttgattcagatgatgaggaatatgattgggaaatttgaagcaggtaaaacaaaaaaaa

SEQ ID NO: 153235 - DNA, 259 bp, Zea Mays
caaataggctatctccgtggaaggtcaggagagcgtggttacagattacaatctcaaggtaagtaaaaatatactgcagaaaaagaaaatatgagaaatggatatatatgccccctaacagtaattgtatttcttttgcagattgcagattctgggtctggagatctgtgcggatacaatggttggagactctatgatcagaggtatctcaggaggacaaaagaagcgtgtcacaaccggtatatgcaatctgcagtta

SEQ ID NO: 153236 - DNA, 2869 bp, Zea Mays
tataaagttattggtatcaacagtaatcagaacgatggcacagcaacagcttctttcttgctaaccattgctagacataacttgacgaaaagaatagagcacatagaaaacgttctcaatgatttgaagaaatcacatctgttgaaccagcaaagcagcagcagcagcagtaagaaagaaaggagtagcaggcatgaggatattgagtacctgtacagaagcattgagcggaaggtaattggtcgagataaggagcgtgagaagcttatcagtatgcttcgtaggggacctggtccggagacaccaagctccagtagcagtaaacattattctgtgattggtatatatggcattgcagggtctgggaagagtaccctggcacaatatgtctgtgattatgagaaggccgaaggccaacattttgaccctgtcatgttcattcatgtgtctcagacatttagggtggataagatatttcgtgacatgctgagggagatcaggaaggacaggcaatctgacagcaacagtgttaaatgcctacacgatgagctgaaggaaaatgcttcttgttggtactggatgatctctgggtcactcgtgagaatcaggaggagcgcgctattctacttaatgtgctcgatgctgggcagagtggaagtcgggttctggtgacagctcagaagaaagatgtagctgcagcgataggcgctgaggagcagatcccgattccggatatggaagagaagcagtacttttcgatgttcatgcactacgccctagaaggcaagcgtgttggtgacggaaggtttatagcaatagggagaaaaatcgcgaaaaagctcggcagatcacccattgcagcagtcacagtggcagcacggcttcggagcaacagcagcatcgatttctgggagacaacagcgaaccttgacatgttggacgaaacaatgggagctctgtggtggagctatcagcagataggtgtagacgtccggcgatgctttgcatactgcagcacttttcccagaggatacaggttagtacgaggcgagttggttcacatctggatagtgcaagggttcataaacaccagggttaatgcaactgagcaaccagaagatataggcctgcactacattaacgaactgcggaccttctcatttctgcagatagaaagaacagtttttggcactgaaacggaggcgttcacgattcatgacctgctacacgagttggcagagagggtcagcggaagcgaatgcttcagagttgtttcaaatagctcaccaaaacatattccgcaggaggttcgccatctctttgttggcactgggactgacagtagagcagctatcgcaaagaaaattctaggtctggtaaatctacgcactctcatcatcgtcgaagagtacagcgaaaacaagaggaaaacatttgcagctgaagatgatgaggaacggtcaggccgcaccttagttaacgaggaagtcttgggcagaatgttcaggagcctgaggaaactgcgggcgctggtcgttacaacgaaacagtaccatgaaccagcgttgttagtcccagcatctatcgattagatgaagcatctgcgttatctaagctttaatctggactgttctcatcgcagtgtggagcttattttcccaagcacatttagcaaactttaccatatgcagagcatatatagtgagaaaatttcctgcgccaaagacgtgacacaaaatctcacttccttgcggcacagctcttcgtcgtggatgggatttgcaaacgttggcaggctgacgtcgctccaatcgctacggtacttccaagtgaagagagaacaggggcacgaactgaagcagctgaagcacctgaacaaccttcgaggcactctggcgattgacggtctgggggtcgtcagaagcaaagaggaagctcttgaagcacacctagccagcaaggaacaactaaggaaactggagctgacattctctgtccgttaggcgggggatccgaacgccgtggcagagatacttaaccgccttttaccgccggaggatccaaccaaccataggtaccatggctggatgatgggaggccaggctccagacgttgctgcagaggtccttgagggcctttgccccccgaaggatcttgcaacactcacaatcaaccgctacaagggttcgaggtaccctagctggatgctgagtagccagagtccaggagcgctgaagtacctgcaagagcttgagctccataactgcaaccgattggcatcttttcctgaagaagagaccgagctgttcagttgtctgcgtgagctactgagcttcgagttagcttgtgcgactgggacagcatgccagaaaatatggagccccttgtttcgctccagagtgtattgattatgaggtgcgataggatggagcgccttccaaccctgccccggtcgcttgcgaaggttgaaatccatgggtgccgcgtcctcagtagaacctgccaatcagagggacacgagaactggcagaagatcctgcacattccagagaaaaatatatccccaagaaggagcatggcgcagtgagggagggaggacgatgagaccactgtttccatgtttaccagcgacaactgacctgggattgtaatatgcatccattaactgaggattgttcttatacgtttgtgatgaatccacctgacaatctttttttttttgaaaataggtacactagctattattatcagtattattggaagtgtacttaatggatgatcagatcttttttattctctctatttggggaactttcttgtaagactttttcgtctctctaaatatataaagatgtgcagctttcctgct

SEQ ID NO: 153237 - DNA, 205 bp, Zea Mays
ccgagagccagcggctggcactcggcaaagaggattctttgccgagtgtcacaaatctagcactcggcaaagagccctttgccgagagtcttatccagacactcggcaaagtatatttttatttttttgattttgtctcccaaactttttgtggtatgttcctacactatgtagacctacatgtatcatttatggacaattataa

SEQ ID NO: 153238 - DNA, 1609 bp, Zea Mays
caatcaccactcaacagttgagtttaaccccgcctcctctcctctcccctcccctcccttcttcatctcttctcctcacaaggcttcctcccaccacctccagtcctccaccggaccaccacctccagtcctccaccggaccaccacctccaccactcctctctcagaacacgcgcaaaccgctcgaaccctagctggtggcgggaggcggaggtggctccgggatgacgcggcggtgctcgcactgcagccacaacgggcacaactcgcggacgtgccccaaccgcggggtcaagatcttcggggtgcacctcaccgatggctcggccatccgcaagagcgcgagcatggggaacctctccctcctctccgcgggatccaccagcggcggcgcgtcccccgccgacgggcccgacctcgccgacggcggcgggggctacgcctccgacgacttcgtccaggggtcgtcctccgccagccgcgatcgaaagaaaggtgttccttggactgaagaagaacaccggaggtttttgctgggattacaaaagctcgggaaaggggattggcgaggaatttctcgtaattttgtggtctcaagaacacctactcaagtagcaagtcatgctcaaaagtattttatacgccaatcaaatatgagcagaaggaagagaaggtctagccttttcgacatggttcctgatgagtccatggaccttccgccccttcctggaagtcaagaaccagagacctcaatgttaaatcaaccgccactgcctcctgctgtggaggaggaggtggaatcgatggagtcagatacttctgctgtcgcagagagttctggagcttctgctctcatgcccgagagtttacagcctacctatccgatgattgttccagcttatttctcgccgttcttgcaattctcagttcctttctggccaaatcaggaagatggaggcgatcttccccaagaaacacacgagattgtcaagcctgttgcagttcattcccagaatccaattaatgttgatgaactcgtgggcatgtcaaagctaagcatatgggagcatggtcaggagacagtgtctacttctctgtcgctaaatctgctagggggtcaaaataggcagtcggctttccatgcaaaccctcaaacaagagctcaagcctgatcatcccctaccagcacagaaactgcattttagatggaatcctgggcaaaataagctttgctcttttttcttcttctaaatttaagatcactgagtcataaggtcactggttcgaagtagcttctccgtatttgcggggaaagcctgccctggtttctctccttcatcagaccccactcatatgggagccttcaatattgtcttttttatatatttaagattgaccgtgctcggtagcttgtatcatgtgctgtaagttatgctatgtatgaatgtacctgtagtttgtatggcacgcatggtatgccactcttatgttagcaaagtcattaatgttagtgctgatctttatggttgtaattttataaacttctaaaaaaaagtataagccagttcttttcaactgcactcagttctctacctgatgtttcattgct

SEQ ID NO: 153239 - DNA, 189 bp, Zea Mays
gaagtggataagggcgttagatgggctagaaaccactatctgtcatcaacagctcttccttctatcaagggagacaagttaatcattccccatgagagtctggatatatcaattgagaggctgaaggaacagaaaattgaggcttgtcacatgagcatcagtcagaggtgcttcatgttaagcatctag

SEQ ID NO: 153240 - DNA, 860 bp, Zea Mays
ggagcgacaatcaccatggccagccgcctgaccgccatggagaagttggtcctcttccacaagctcgagagcgatctgttccaccgcctagtgcgcgacctcgcccaggacccggtgcccatgcgctgggtgatcgcgttctggctgtggctcgagtccgatggccaccacgacttcatccgccgcgtctccgcgctgccaggacccgtcgtgctgcggctcgtcgaggaggctatcgagtgcctccgccgcctcgccgccggccgcgagaggtgcctgctgccgccctgcccctgcacgaacgcgctcttggcgcccaacaagcgcatagacgatgcgggctgcttccaagggcaccgggaggttttggatggcgtcacctaccagtacaggagcgtatgcctcgccgtttgcgatgtgagcagcgcccgtgtgcttgccgccccgcccatggttggctcccctgtcctcgccgccccgacgaacccgatggcgtcctttccactgaacccgatggcgtcgccgtggatccgtttgcagagccctccgccggacgactaccggtccctattcgtcaccttctccagaggctaccccgttagcagggagaacatcgtggagttcttcaactcggtgtacgggccgtgcgtggaggcggtgatgatagagaaggtggcgccagggcagctgccggtgtacggccgcatggtgctgcgcagcgcggcaatgatccctgtggtgctgaacgggcggcagacggccaagttcctgatcaaaggcaggcacctgtgggccaggatctacgtccccagctccaggctctcctacgcctgacgacccccagccacacctacaggcta

SEQ ID NO: 153241 - DNA, 1403 bp, Zea Mays
cgagactcgggaagaatccattgcgtgttccaaatccgctggcgtagcgtagaacacagcatctccggtagcgtcaccgtaggcctcgcaagtaaactgacctgccttctccgctttcccctccgtctccgtcgggagtcgagacaaagggagccagagttagtcccggcgccgtgtcgcgagcggaaggagaaggactgaaggaggcgacgatgcaggtgaagcagaaggtctacgagttctacaaaggcacggtggagcgggtcacggccccgcgcaccgtctccgcgttcctcgagaagggcgtcctctccgtccccgagttcattctcgccggcgacaacctcgtcgccaagtgccccacctggtcctgggaagcgggcgatccaagcaagaggaagccgtatctccccgccaataagcagttcctcgtcacccgtaatgtgccctgtttaagacgtgccatctcggttgaggaagagtatgatgcagcaggagcagaggtggttctcgatgaggatggcgaaggctggcttgcaacacatggagtgcaagcatcaaagacagaagaggaggaagacattccctctatggacaccttggacatagggagatctgatggaataaagtctatcccctcttactttagcggtggcaaggatgaagaggaggaagatatacctgacatggatacttatgaagacacaggggataatttggctgctgctgaaccatcatactttatcgcagaagaaccagaagatgacaacattcttcataccagaacatatgatgttagcataacgtatgacaagtactaccaaactccacgtgtctggctaactggatatgacgagtcaagaatgccattaatgcctgaacttgtgtttgaagacatcagccaagaccacgcacgaaaaacggtgactattgaggaccatcctcacttattggctgggaagcatgcatcagtgcacccatgcaaacatgcagctgtgatgaaaaagatcatcgacgttccaatgtcggggggagtggaaccagaagttgacaagtaccttttcatatttttgaaattcatagcgacagtcataccgactattgagtacgattatacaatggacgtcgaccttggcagtacaagctgattattggttggcttgaagcttgtcacttgtctcgggaaaaggaagcaccctaccagaaggcgcaggaagaaggctgaattgcgtgtttgtggttgaacatttgtgcatatgtgcttgttccttggatcggtttgcatttgtgaacaaactctgaaaagctcaaaggcaagacccatcttgtacattctgtgacgctgtcagcttgtgaatccattcgttaatataaatctcaacaacccgttcggcgtgcgtggg

SEQ ID NO: 153242 - DNA, 1395 bp, Zea Mays
cgagactcgggaagaatccattgcgtgttccaaatccgctggcgtagcgtagaacacagcatctccggtagcgtcaccgtaggcctcgcaagtaaactgacctgccttctccgctttcccctccgtctccgtcgggagtcgagacaaagggagccagagttagtcccggcgccgtgtcgcgagcggaaggagaaggactgaaggaggcgacgatgcaggtgaagcagaaggtctacgagttctacaaaggcacggtggagcgggtcacggccccgcgcaccgtctccgcgttcctcgagaagggcgtcctctccgtccccgagttcattctcgccggcgacaacctcgtcgccaagtgccccacctggtcctgggaagcgggcgatccaagcaagaggaagccgtatctccccgccaataagcagttcctcgtcacccgtaatgtgccctgtttaagacgtgccatctcggttgaggaagagtatgatgcagcaggagcagaggtggttctcgatgaggatggcgaaggctggcttgcaacacatggagtgcaagacagaagaggaggaagacattccctctatggacaccttggacatagggagatctgatggaataaagtctatcccctcttactttagcggtggcaaggatgaagaggaggaagatatacctgacatggatacttatgaagacacaggggataatttggctgctgctgaaccatcatactttatcgcagaagaaccagaagatgacaacattcttcataccagaacatatgatgttagcataacgtatgacaagtactaccaaactccacgtgtctggctaactggatatgacgagtcaagaatgccattaatgcctgaacttgtgtttgaagacatcagccaagaccacgcacgaaaaacggtgactattgaggaccatcctcacttattggctgggaagcatgcatcagtgcacccatgcaaacatgcagctgtgatgaaaaagatcatcgacgttccaatgtcggggggagtggaaccagaagttgacaagtaccttttcatatttttgaaattcatagcgacagtcataccgactattgagtacgattatacaatggacgtcgaccttggcagtacaagctgattattggttggcttgaagcttgtcacttgtctcgggaaaaggaagcaccctaccagaaggcgcaggaagaaggctgaattgcgtgtttgtggttgaacatttgtgcatatgtgcttgttccttggatcggtttgcatttgtgaacaaactctgaaaagctcaaaggcaagacccatcttgtacattctgtgacgctgtcagcttgtgaatccattcgttaatataaatctcaacaacccgttcggcgtgcgtggg

SEQ ID NO: 153243 - DNA, 383 bp, Zea Mays
aaaactccactcaaattgcagcatagaacaatatattgaaaaatgcagtaacctgcactgaagactactctaacttgtcccaaaaataggtcgaatcaatcatagactagataggaagagaaacagagaggatagagcttccggctaaatgtgactgaaatccaggatgacgccaaccaatccctcgaccacctcctaattagacgaccttaccaacccatgaaaacgagtgtgagccctagacacgcgcatcgccgcttggcatgctcaatacccgatcgttagcacatcgcatgggggtggagactcatacgcatatgcctgatcagagtgccggtgatgccgtggtggtaggcgacgctggtgatgcccgcagggtgccg

SEQ ID NO: 153244 - DNA, 240 bp, Zea Mays
attatattttttatttactaggatttttatttaagaagaaatgttattcaataacaaaaatcaatcatgcgcaataaaaaaattattccaaatgcaaatacataacaaacacataaaagaatcaatcatggtcgctaaaaatcatgtttacttgttttaattaatttttagtcactaacatctacaggtatgttcaggctataagatttgatagtgatccttgctctatagcgacccacc

SEQ ID NO: 153245 - DNA, 1088 bp, Zea Mays
ctctctctctccctctcttcgttctcctccacacaccgagccgaccgagcacatcatcattctctcgcaaggcaccgcgtgtacgagctagccaagcggccggggcagaagcaaacaagctcacacaaaccacacgcggagagccagaggagtggtggaaggaggaggaagagcgaggggtcaagggctcaagctcaagagagagcgagtgagttcactcaacgtgcggcggcggcgacgtcctacgtcctacgcacaggatgtcggcgtcgagcgccgcgtgccgcgtatgtggcggcgtagcggagtgcgcgtgccacggccacggcgccggcgcgcggtgcggggccgccgtcgcggacctcaaccgcgggtttcccgggatgtggcaccagcaccaccagcagccggaggaggaggagcccagcgtcgccggcggtggcgcggcggcggggctgcaggagttccagttcttcggccacgacgacgaccacgacagcgtggcgtggctgttcaacgacccggcgccccacctgcaccgcggcccggcgccggccgcgggcgcggccgggaacggggttgtggccgaggccgcgcagcggagagcgccgctgttcgacgggtacgcgcacgctcagtacggccagctgccgggccacgggctcatgttcgacgtgccgctgggccggggcggcgacgacgacgcggcggtgctggaggcagggctggggctaggcggcgccggcgccggcgccggcgacagcaatccagcgacgacgtccagcgccacaatcatgtccttctgcgggagcacgttcaccgacgcggcggccaacggcagcgcaagcggcgccgacccggcagtggaccgggaggcgaaggtgatgcggtacaaggagaagcggaagaggaggcgctacgagaagcagattcgctacgcttcccgtaaggcgtacgcggagatgcggccgcgcgtcaagggccgcttcgccaaggtgcccgacggtgatgctcccgcgccaccagcgccggccgctgcggggggctacgaaccaggccggctcgacctcggatggttccgttcatag

SEQ ID NO: 153246 - DNA, 2736 bp, Zea Mays
atggaccatgacgatactgattttcagagccaaaattttcaactagctggtgtaggaagtagcaaattcccatcaggtttgcgaccatttgcactgccaaaacttgatatcgaggaccaactacaaggccatcttcgatttgataatttgatagattcagaagcatttttcagcgtacaagggcacgagaatagctggattgaggttctgtccactggaagcagtgttgttgattttagctctagcgcagctgaatcttgctcgatatctaaaactaataatgtctggtcagaggcaacgtccacagaatctgtcgaaatgctattgaaatcagtgggaggaaatgagacaactggtaacatggacagtaatgctcaccttcagttaattggtatggacagtcaaactgatcaatcgagtgttcatcctaaatctagtacctccccgacagatagtactgtagtgccaactgagaaagatcagtcttggagcactcattctagaatgactgctgacctttcaaacactgagtctcagcttgaacattttgtgcctttcttactggacaagaaagctgcgcaggcagcagattctgttgctgagaagtgccttacaggtgagaagttgtcctcttcaaacaacacaccaggaagctgcccaactgttggcaactattttggggcaggccatgatgataattctttggacaaatttaatgtaccctcagctgaagtagattcaaagaaattgaataatgaatctttcccagagttggctcccctgcagaacatatatactgattcatatcacttcaagaaagatattaaagaatctgaggctgttgttactcctcaagattcgaagttttgccatatcaatgaaaataaagttgaaggtggactacaagaactgcaaaatttgtcatgtgctggtcagtccttgggcgctgtaaacttgtccagtccaccaagcaatgaaactctattgtcaaaaagttctgatggattactagaagccatcacaaatccagttaagatgctgcacaggagcgatgatacttgccataaagtgaacatcactcttcaaccatcttttttagcagtgcaacatggaactgaaggcctgaaaagttcagttcacaggagcaatgagcttgttgttaaggagtttagtattggttcaaattctcttatctctcaccaatctgaggcagacccaagaaattctaatccacatcctgtcagttctgtgtctcccaaaagtaaaattaccgatgccacttgtgttcctgaagaaacaaacaacactgaaacgaatagtacaaacacctgctatacatatgatgaatcaaaacatgtagtgctggagtacaatcaaggttctgttgacaagctaaaaagtggtgacatgggagaaaaggcaactggggaggaaataccagcagtttcagggagcattgagcaaatgatagaaaattatcatgaagaaaatgctactggtacatccaacaataaggttggcctttccgacagtattgcacctgaaaactgtgcagctgacactttgaatgcttcagaggaaccaaacagtccttcgttaaatcatgagaggtcatttgaggaacacgaattgcctgctttaggagaggagcctaaaagcacaaatttactcctttctacttctgggtttcaagagaaaatttcagcatcagtgatcagttctagcagtggtgtcatgcctaccattgttactgacaacgttgctacttctgaggataataatggttgttcaataggtgtttcttctgttgattcttctgttttactagacgaaaaggatttgagaacgtccacagtgaataatgaggagccattcaaggaaggcactaaatctgctttaggagatcaagaaaacgatggtatttctcctggctctgaacaaggaggggaaatgccagctgtgcccatggattcaaacattgccgtttatagtgatactgtttctgctacagaaaaggagaaatacaaggaccatcctaattctttgggtagtttgaccacaggaggaacccaggataaatcaggtaaccatccagatgctctttcactgaaatgccagactggtagatcttcaatacatacagatcttatagatccaaccacggcacctatgttaggtatcccaactggaaaggtggctgaaaagatagtaaaaactccactgaatgcaagtgatgatttgaatgcacatatgcaagacatagtgttaaatcatggtacggattgtagtcctggtactgtgacatcccaaggaaaggaaggctcaagcttgctggaacctggtaatggtatctgcactggggttacatgcggatccccttcagtgattagttgcgctgaatcgtttccccaaggtggtggaaatggcagcaatgatttacttgatcacacactatgtgggcaatctgaggatcctaaagaccgtggggcctcagctgatgctactcagagatcaaaacaatgctgtaccagaaacatgaaatctgctcctggttctgaggagactagtgcagcaggaggtgatagaagcttttcatttgagacggtcacagaaaatcttcaagctggaagttctttgaaggatactagtgatgataatttagtgaattttccattcacagaggcacagcatttgcagctacgcgcacaaatatttgtttatggagctcttatgtga

SEQ ID NO: 153247 - DNA, 869 bp, Zea Mays
gactggagccccgagagcccagcactatttcttcccccgtcgtcactcctctccctctctcgtcactccactccagcccctcctctagatctctctcccccccctcctcacacgcactcactctcgtcactgaggctagctactagctggtactggaagcctggaacacgcactgtcacttgctcgtttcaaggacctgccctgtgccaattaagtagtacgccgtcgtacggtttgctctgagctagctcttcgtgttcgcgatggcgtcggagtgggaaatggccatgggggtggagctcggcatgggaatgggcggcacgtaccaccacaacgcctccagcatcaccaccgcgccgatgatgatgagcagccatccccacagccacagcggcggcgccgccagctactccacgccgcaccaccaccattactacggcgggatgccgcccatgggcgacgccatgcgcgtcgacgacctcctcgacctctccacccccggcgccggcgcccatgagttcttccccaccgcggcgccggccactgacaaggggcaccactcgtcgggggccatgggtgagccctcacccaccgccaactcgtcggatcaccggacgtcggccctctccttcgccgatgagttctacatacccgtgagtaccaataattaaacaaatgatcacatcgcacagctatgatgaacagaacacctatgcctatgcgtcgtctatgccacttgccaccatatataagaatgcgttacctactgtacttagctagagaggtttctatatatgcacgagatcgctaatcagttgcgatacaattaatgatccagaccgaggaagctgcggagctggagtggctat

SEQ ID NO: 153248 - DNA, 1625 bp, Zea Mays
gactggagccccgagagcccagcactatttcttcccccgtcgtcactcctctccctctctcgtcactccactccagcccctcctctagatctctctcccccccctcctcacacgcactcactctcgtcactgaggctagctactagctggtactggaagcctggaacacgcactgtcacttgctcgtttcaaggacctgccctgtgccaattaagtagtacgccgtcgtacggtttgctctgagctagctcttcgtgttcgcgatggcgtcggagtgggaaatggccatgggggtggagctcggcatgggaatgggcggcacgtaccaccacaacgcctccagcatcaccaccgcgccgatgatgatgagcagccatccccacagccacagcggcggcgccgccagctactccacgccgcaccaccaccattactacggcgggatgccgcccatgggcgacgccatgcgcgtcgacgacctcctcgacctctccacccccggcgccggcgcccatgagttcttccccaccgcggcgccggccactgacaaggggcaccactcgtcgggggccatgggtgagccctcacccaccgccaactcgtcggatcaccggacgtcggccctctccttcgccgatgagttctacatacccaccgaggaagctgcggagctggagtggctatccaagttcgtggacgactcctattcggacatgccgaattactcgtccgccacgcatgcggcgatggcggcggcggctgctgctgctgctaacgcggcaggcaacggaggaggcaccacctcggccggtcaagacagcggcgtcgccgcggcgcctggccgcggcgcgcgcagcaggcggtcccgcgcgaccgccgcggctgccgcggtgtggcactccctcgtgccgcgcccgccgtctcagtcgtccccttcatcgtcgtcctgctcgtcctcggacttcccgtcgtcgaacaagccggcgcgcccgaacggcggcagccgcggcaagaaggtcccgggtccccccggcggcgggcccgctggcggggaggcgggcctggagggcggcggcgtgcggcggtgcacgcactgcgcgtcggagaagacgccgcagtggaggacggggccgctgggccccaagaccctctgcaacgcgtgcggcgtgcggttcaagtccgggcggctgatgcccgagtaccggccggcggccagccccaccttcgtgctcacgcagcactccaactcgcaccgcaaggtcatggagctgcgccgccagaaggagctcatcctcatccgcggaagccaccgcgacgccgccgcaggatccgccgccggcgggccgaggccggagctcatgttccgtgactacggcgtgtgttagcccgctgcccggcaaaccggcaccgaggaggctcgcgtcgtgcgttgcatgcatggagctttagatccttttgcgaaattctgccgtttctgccttttttttaatctttccctgcgcgttccagatatttccgtttctttctcttttgttaattcttaaattgttggtacctacctacctcatccctgcttgagagatcaatgaattctgttggtataaatcgtgatcgtttgtgagtaa

SEQ ID NO: 153249 - DNA, 742 bp, Zea Mays
aactgatgatgcgccacacgttaccccctttttttcaatgccgaaggatctgaagtatgctgactctcatgaatgggtgaaagtggagggtgattcagcaaccgtggggattactgactatgcccagcgtgctttgggtgagcttgtttatgtggagctaccagaagttggcatcagtgtatcccagggaaagacctttgctgctcttgagagtgtgaaggcagccagcgatacctattcaccagtgtctggagaggtggttgaagtgaacgagaaactaagtgacttgcctggattggtgaatacaagtccatatgagaagggatggcttatcaaggtcaagctcagcaattcaggtgagctcaattcgctcatggatgatgataagtactcgaaattctgcgaaggcaaccattgaagaaatcagagtgtcttctgaagaccaggacctgtttttcaagctttatcactggttatggtctggagaccagctgtgacaaattggcaaggttcatcacaaggaataaatgttaggatttgccaatcctacaagggcatgggaaatccaagtttgtgttgtcaatgacgtggtcatatttgatatttctttgtagttgtaatctcgtgaattccttcttttttcttaaaaatgactctttttgattcctctatgcaaatttcttggtgcttttgcgaatggttcagattcttcagcattattaccgcgcacagtgagcaaaca

SEQ ID NO: 153250 - DNA, 100 bp, Zea Mays
gattctagattcacttcactcccactatagagtaactcagtttttagtcgtttggcttcctagaagtgattctcacttggagcagagctatggaagctct

SEQ ID NO: 153251 - DNA, 908 bp, Zea Mays
atggcgtccatctcctcctccaaggtgctcgcacttggtgcgctcatcttctccttccttgtcacgtatgcctcgtgcgctagaccggtcaacttcacagcctcagacttcaccgccgatcccaactgggaggctgccagagccacctggtacggcgcgcccaccggcgccggccctgacgacgatggtggcgcgtgcgggttcaagaacgtgaacctgccgcccttctccgccatgacgtcgtgcggcaaccagcccctgttcaaagacggcaagggatgtggctcctgctaccaaatacgatgccagaaccaccctgcctgctccggtaacccggagacggtgatcatcaccgacatgaactactacccggtggccaagtaccacttcgaccttagcggcacggcgttcggcgccatgtccaagcccggccgcaacgacgagctccgccacgccggcatcatcgacatccagttcaagagggtgccctgcaactaccccgggcggaaggtgacgttccacgtggaggagggctcgaacgccgtctacctggcggtgctcgtcgagttcgaggacggcgacggcgacgtggtgcaggtggacctcatggaggccaactccggctactggacgccgatgcgcgagtcctgggggtccatctggaggctggacgccaaccacaggctacaggcgcccttctcgctgcgcgtcaccaacgagtccggcaggaagctggtggccactcgggtcatccctgccaactgggcgcccaacacctactaccgctccatcattcagtactagctctctgctactgcgcctcgaccgattcggtgtcatttggcttcatttgaactgtatgtaattgtatcttcacgtgcacaggattacggtgccttaactagtta

SEQ ID NO: 153252 - DNA, 96 bp, Zea Mays
tatgcagtcaaacaacctcaaaataaattattttacatccactcatgcagctcaggcttcaagtatacatgcaaccaaacaaagacttgcataaag

SEQ ID NO: 153253 - DNA, 1316 bp, Zea Mays
tggccgtcgtacgcgacgagccgaatggcgactcttgatgccaattcgatcaacccggccggctttcgcctgcctataaatgtaccggcgatgtcgtcctccggtcgaccaagaaaaacaccgtaccgaacatccaatccaagtacgtgctcgctgaactcgagaactgcagccaggtgacttagctagctggccggtgcgatcgagctgagatggcctccgccttgacctcctactcctcaaaggtggctgcactcgctgcactgttcgtggtgcttgcgatgcacgccgaggcgggcagctggctcccggccaaggccacatggtacggcgcgcccgacggcgccggccctgacgacaatggcggcgcgtgtgggttcaagcacaccaaccagtacccgtacatgtccatgacgtcgtgcggcaacgagccgctgttcaaggacggcaagggctgcggcgcatgctaccagatacggtgcctcaacagcagccacgacgcttgctccggcagagccaagcgcgtggtgatcacggacatgaactactacccggtgtccaagtaccacttcgacctcagcggcacggcgttcggcgccatggccaggacggggctcaacgacaagctccgccacgccggcatcatcgacatccagttcaggagggtgccctgcaactacaagggcctgaacgtcaacttccgcgtccaggtgggctccaacccgaactacttcgcggtgctggtgcagtacgcgggcaaggacggcgccgtggtgcagctggacctgatggagacgaacaaggacaccggcaagccgacgggcgtgtggacgccgatgcacgtgtcgtggggcgccgtctggcgcctcgacaccaagcgcccgctgcggccgcccttctcgctgcgcgtccggagcgactccggcaagacgctggtggccagcaacgtcatcccggccgactggaagccgatgaccgactacccctcctccgtccagttcccttagccgcacgctgtgcgatcacccggatctatatctatcattgttattcgtccgattaattatatattgcttttttaattattgtgtttacgtgtcttaagatgcgtgggatgatggaggaggcaatgtgtatgtgatctcccgcccacgatcgcaacattgaaataagacagaatgcccttgttgctattgaaacttataattaatgattccttggttgccaccaaaatttataacatctcttggttgccatcaatttgtaatattttagtccttctttaacatcaccgttatatattagttgtattctct

SEQ ID NO: 153254 - DNA, 1144 bp, Zea Mays
cccctttttgcaatgtctgtctatatatgcgatatgcaggcctcgccccgctccgacaaaaaaaacacccaacacgtatatagtggagtagacagtaacagtacgacgatcctgagctgagatggccgtcgcgatctccatcaagctggccgcgctcgctgcgctcgtcgtctccgtgttcgccacgcacggcgctcgcgcgcagccgagctactacaatgcctctgccgctcgcagagaactgtactactccagcaccaccggcggcagctggctcccggccagggccacctggtacggtcggcccaacggcgccggccccgacaacaacggtggcgggtgtgggtacagcggcaccaacacgtaccctttcaactccatgacatcctgtggcaaccagcccttgttcagggacggcaaaggctgcggcgcgtgctaccagataaaatgcgtgagcaagaacaacgctgcctgctccggcgagcccaagacggtcatcatcaccgacgtgaactacgacaccaaggtcgccccctaccacttcgacctcagcggcacggcgttcggcgccatggctaagcctgggctcaacggcaagctccgcgacgccggcatcctcgacatccagttcaggagggtgccctgcgactacaagggcctcaacgtgaagttccacgtgatgggaggctgcaacccgttctacttcgcggtgatcgtgtactacgccggcagcgatggcgccgtcgtgcaggtggacctcaaggaggccaactcgccggcatggatgccgctctacgagtcgtggggcgccgtctggaggatcgaccccggccacccgctcaaggcgcccctctcgctgcgcgtccgcagcgactccggcaagactctggtggcctacgacgtcatcccgatcaactggaggggcaatgccgattaccgtaccatcgctcagttccactgatcactagctcccgcgcgcgtaatagggtccaatatttgtatctttctttcaatcgcgtgactggaaaatttggtttgcaacatcttattttacgttcttttcgagaattgaaggctccaccttgtaggtcacccgaccaatcttctgaagaattttgaatggaccaaaatatttcatagaaaa

SEQ ID NO: 153255 - DNA, 956 bp, Zea Mays
caccaactgataagcagaatcgatctcctcccatcacctccatcacaacctctcgacggcagcttcatccccacctcaatcggcggcagcctagggcttcatcccccacccccaattccatgtcatgtggatctgaatcagcccactcccaaatctccaatccactcgccggcttttcctcgtgcccagttcacgacatttgctcggggatctgaccaatgtcgtcttctgctcgtgttcctcgcagccgctcagattggagatcaagggtcaagttggtggacttgcaccccacataggcatggatgtcgagcctgtactcgaggagtgcctgcatctgggattatcaaacacagtttagtcaatttgtaggagagaggacgccatacatcaaagatgactgaagaagaggaagatgaagaatacctcgaagaggaagaagatgcccttgctggtgcaggggggaacacatttagtttcacaaccttcatctcttaacccctccgatcccggtgcgtggcggattagactccgatggggaagtctctggcgaggtggatcaagttcgtgctcttcgggaagaagtcgtcgtccaggatgattttggattcaagctgaaagaagaggctatgctgaatagagtactaaaggagacaatcttgtcaaaggtagttgccattgaacaattgcaatctgatctggcatcttcatttcgcatccaagatgttatgagaaatgagatccagagagtccagaatgaactttcttgcataacccacaaagctaagcagttggagcttcagaacgaggttgtatcgctgaagaagaagatcgaagccttggacgaagacatacttgtcaaggagggacagatcacgatattgcaggacagcatcgacaagccgttcaacatcatctgcagcccaagttcgatgcaagagttcgacatggcgtga

SEQ ID NO: 153256 - DNA, 1368 bp, Zea Mays
tcgatcgatgaggccggcggatcggtagtttaagcgtccccatttaaccgtcctgtgtctgctctctggtgcctataaaaaccacgccccagcaacgcagtgctctccacctcacaccatcggaacacatagcagctggcaggaacgactgccaagcaagtccatcggtcgaggtcctagctagcgcaacgacgatggccaccgcgctctcctgcaaggccctcgcagtggccgcgctcctgtccgtggtgtccgtcgtcacctacggcgctcgcgcccagcagcagcccagccacaacgcctccgactccgagtcgtcgcaggacaggtccttgctgtcctacagcagtggctggctgcccgccaaggccacctggtacggcgcgcccaccggcgccggccccgacgacaacggtggtgcgtgcgggttcaagggcaccaaccagtacccgttctcgtccatgacgtcctgtggcaacgagcccatcttcaaggacggcaagggctgcggctcatgctatcagatacggtgcctccggagcaaccacccggcctgctccggcgtgccgcagacggtgatcataaccgacatgaactactacccggtggccaagtaccacttcgacctgagcggcacggcgttcggcgccatggcgagttccggcctgaacgacaggctccggcacgccgggatcatcgacatgcagttccggagggtgccgtgcgacttcccgggcctgaccgtcaccttccgcgtgcagcacggctccaaccccatgtacctggccgtgctcatcgagcacgccaacatggacggcgacgtggtgcaggccgacatcatgcagaacaactccgggtactgggagcccttgcacgagtcctggggcgccgtctggcggatcgaccccagccgcccgctctgcggccccttctcggtgcgcatcaccaacgagtccggcaagcagctggtggcccagaacgtcatcccggccaactacatcgccgacgtcgactaccgctccttcgtccagtatacgaattaacccgaccggccgggcggggcgcccactgcatgagctagctcgatcggtcacctctgcgaccgtcgtacgtccgagatagctcgttgcttaagtgttcgtgtttagtggctgccgtcggcaaccgccggactgaggatttttaaacctcaattccggcgtggggtgtgtgttggtgtgtgtcttgaagatgtgtgggaaattagaggaggcgagcatcaatgcgctctcccgcccacggtcactctatcattaccggtgtgcggtgtgtaaccagcagaccatggatattggttaatactacatcagtgtgatgttgtttagctac

SEQ ID NO: 153257 - DNA, 1645 bp, Zea Mays
ccactcgtctcttcgttcctttcctctctccctctcggtcttgcttaatagtggacaggaggaggagcgatgcttgtcatctactcctgttaagttccccactccgcccaccccctcacacacttcttccgcctcactttccatcagattattgttatcgttgagtgagtgaggcccaaaggcagcagcagcacagagcaagaccgcaaagaaagcaagcgggcaagcctccttcaccattaccgcgcatgtgctctgcgccggtcatctgccttcggtgtaggaactcttgcctgtttgctcggtcatggacaggcacacctgcaagctctgcttccgtcgtttccacaatggccgcgcgctgggcggccacatgcgctcccacgtcatggccgcgtcgtcggctgcagcgtactactcgccgccgccgctctccctggcgtccacctcgtcgacagagatggacgacgacgccgatccggcgccgcagaagccacccacgccgtgcgttgcacgcgaagaaggcgccaagaaagcgttctgctttcctgaactctccggcggcggcagggccgcccgcggcgagtcgtcggtcgtgcaggacggggagagcgacacggagtcgtccccgcggttcgccgtgagccggcgacgctccaagcgggcgcgccggcgcgcgccgccgccggcggcgtccgatcccgagcatccggcgagcagcgtctccgacgcgacgccggaggaggacgtggccatgtccctcgtcatgctgtctcgggactcgtggacgcggcggtccaggcccgggcctgggcctgggcctgatccccgctggggcccggcgagctcgggggccgatcggagcaaggacggcggcgtccgctcgttcgtcggcgcggacgacgaggccgatcgcgagcacggcgacgtcgcccgcccgcgcgggaggcaccggtgcggcgtgtgcaggaaggtgttccggtcgtaccaggcgctgggcggccaccgcgccagcgtcaagaaaggcaagggcgggtgcgtgccggtgccggtgccgccttccgccgccgcgccgtcgcccaaggctcgccgcggccagaccggcccggccgtccacgagtgcccgttctgctctcgcgtgttcgagtccggccaggccctgggcggccacaagcgcgcgcacgtggcgcacggcgcccccgccccatggacgccagcgagatgcggcgacagctcggggtccatcgacctcaacgtgccggccgcgacggacgacgacttcgagctctccgccgtgtacgacgccgagttcggcagcgccaggcagtgaggccagccagctgctgacccgctcgtcgatgcctgctacgtacgactcggaccggccggtgctctttcacagcacagctgctgctgcggtaagggcttgggttccatacttccattcgaatattcgatgcgagaaacagatggagaagaacaacagttgagcatttttttgtgtgttcttcttctttgttacttgttagtgtagtaagtacgtacctaagttagacgaacagcacattcatattcttttggttctattgtacctaaatcaaagtgtccccttactcgaatctcgtcattggaaagtgcatccacc

SEQ ID NO: 153258 - DNA, 1853 bp, Zea Mays
ggccgccttctcgtcgtggtcgtccgcagtgggatcatcgaacagcgtcatagtgggcgggccaggggcggagcctttagccgtccccgcgctgtcgcagcccaccggcttcgccacctcgattgggtggtccgggggcgacgtgggacacctgccgtactacgacccgcagtaccagacggcgcagcatcccacggcggttgggggtggtataggtacactcaacggtgtaagcagaggtcgtgggccttcgcaaggtggaggcagaggtggaagccctatgtatcatcctcttatatggaatgcaggaattacatcaccacgtggtagaggccgtgggcgaggtcgaggcagtggccgaggtcgtagaaacaagagcagtgataggcagttagccattcaagcatccggtggatcttttgcattacaggctcagcccgaaacggtctgtgcaccagcacacatggtgcaagctacaaccagcagttcaacacggggtactgttgttccagctgcttggtgtgatatatgccacgtggggtgtaatagcaaggaaatccttgagcagcacaaaaatggaaagaggcataaacggtctgttcagagaatgcaagatatggctcgcctgcaaggtacgactcctgctatagctgacatgggtgctccatcatcttctcagttagctgaagtagaaggcccctctaggtcagtacatatggtcccacctcttggttcaacaagccttagtggggagcacaaagacttggctccagaaaatgtcggagcttcagtttatggggtgcaaattactgaggtgccaggcagttcttccaagcaaaacaaaacacatcatacatcaacagttggtcacggtgttgaagcacaggtagaactgcatgtcgctgttcaagcttgtcagccttcaaatgagatgaaagatggcggtgaagccccaccaaatgcaacaggtccatcaaatgcacaactggtggaagcaaggatgggtgtcaacggcaacaacaatggctcaaagaggaaaccgacaggagctggccgtggtcgaaagaagctgagagtgtctcaagccccacagcaaaggcggcctgagcgagtaagggagcaaccgctagtctgcaccatttgcaacgcgatttgtgatacaagagctgtatttgacatccatctggttggtaaaaagcatcaatcacgactcaagcgttctcaaggcccagacgtgttgttcggtcctttggttgggcatattcctccaaaccagtccgcagctcacatgacaggagcccctgagccactgtattttggctttaagagtatgggagcttctttggttgagcaggaggcatatctggctggcgcgatgcagcacgtgttgcccgttcttccacaagctggtccaaccatcatggctgctgattatcctgcacaaccggtggctagcaatcggtgctgctagcaatggaagacctgtaactgcatcactgtgcacagccgttggggaagctgaagtgagaatgtgacaggcatgcctgtatgtgccccgcatgatgtctactgcctcacaggtttcattgcttttcggtgggggcgactggagagcaaccgaattcgtagtagaagtagtactgaacaatctgaatatcagatgaaaccatagaactcgtctcccagtctgcaaaatgcacaaggcttccgtcgaattgctagtagtactatgatggaacaatttggttgacataggcctgggtgtatgtctgcaaaacgcttttttaaagtcggtctcaacagcgactttttatgatacattgtgttaataactgtgacaaccagcttcatct

SEQ ID NO: 153259 - DNA, 1068 bp, Zea Mays
ccaatggcgacggcgtgggtgcgctcgctcagctgcaggtcctcctacgccatgaccgacgccgccatcgcgccgtccccggccaagaagcccccgccgccgccgccactccccttcccctgcgccactgcggcggcagcggacgtgatggatgccgtggcctacgcccagcgggcccggaggaagaagatggaggggcagaggttagcgcgggagccgcgcccgcggcccaagaagaagcccaagccgatggcgaacgacgcgggcgccgaggcgctgtccacgccgtcgccggcgcccgtaagctcggcgttcctcacgatggcggagctgccggagggccactcgtcgcggcgggtcgtggagctgatcttcgcgtccggatggggaggcgcggggtccccggagctgtctccgtcgccgccgccgtcggtggaggcgctgttccgcgtccgcagcgcgccgcgcgcggtggcgcggttcgaggaggcgagggcggcggcggcccgcgcgcgcggcgccgcggcgcggtgcggcgccgacggcaatgagatgatgcggttccagtgccgcgcccccggtcccggcggcgtgttcggcgcgggcgtcgccacctgccgcctcggcgcgtcggcctcggccgtgcgcacgtttgcctgcagcggcgccgcgcacgccagcgccgccgccgccgccgccgcggtggggcgacgggcgatgctggtgtgccgcgtcatcgccggccgcgtctgccccgccaactacccgcgccacggccaaggccaaagctccgccgcggccgcgtacgactccgtggacatgggcgacggcgagctggtggtcctcgacagccgcgccgtgctcccctgcttcctcatcatctacaaggtctaggcgccgccgagccgactcgggacgtggctggagcactgaccgaccgccgtgaccgctaaccgccatcgttaatgtccacgctaatcgctaggcctctctagcgttgttttgggaccctgcttttcagcagtgtcagcctgtcaggtgtggatgagccacaggaaatggagccct

SEQ ID NO: 153260 - DNA, 1375 bp, Zea Mays
gacaagtatgtacaattacatatatcatcagtaatctaaacatcaaatttagatactaaatactgattaatatagtaattatgtataaatatgaatatgaagacatatgtctgaaattatagaaaaaaaaaaaaaaaaatttagcccagccagcccaggtggccaggcgcggcccaggtggacacacgcggcccagcagatcgacacagttggccagacgcgttctacgcattgagacgcgaggacggttagtgtttgcaagtccatattccaccttgcagccgccgccatggtgactcagtcggtcttggcggctccgatccgggctcatatggcatgggcgggtgagggtgagtcgggacagcccctcccggcgcacaacacgggcgcggcccgacccccggcgtgggcgaacaggggcgcggcggcctcggccccggcgacgaatgggcgtgtggcgtccctcgaccctggcggcccccagccccgacggcttgggcgcgtgatcccctgcgtcggcgcgcgggcgcagtcctccggcagtgcggccccgtcaggcgggcggctttggcgcggcaagaggctaggcccggcggcgcacagcaagccgctgcgaggcgggcgcgggatccagccatggggaggacggccgcggcagtgcgagccggtgcacagccccaaccccagccagggccccggtggcggcgcgggcacggcccccggcgtcggcgcgcgttccggcggtcgcgcgggcgcaaggccaggcgaggcgcggcgcgggcgctcggaccccggcggcaccatcgcggcccggtggcacggccccggccaggcgcgcgcgacgggcgggcgctctccggcgcgcagcttcacggctctggcacagccctcggccccggcagcgtcgcgggggcaggccccgggtgggccatggcggcgcaggtgaggcgccccccggcgcgggcgcggccacccggcagagcgccggtgcagcccctgcggctcgcgggcgaggccccgacggttgtcggccccggttcctgtgcagttgcctagccttgggcgggcacgcgactcggcggcagcctgggctggtggctccgacgcacagcccagcggcggtgcgggcaggggtgccacgcgcagtgcacagccgtggggttccagtcccacacgcgtacacaaaaacattgtccacgcgcattgcatgtagacgtaggtaataacatactgaaatacttacgattttcatgcttttgatcctttcttcttttttttcatttggctctgatggccgacgccatcgttttctcctgttctcgcgctgcacgcatacgagggcagatatgttctggaacctctcgttcatgcagcg

SEQ ID NO: 153261 - DNA, 996 bp, Zea Mays
actcctttctctcccagctcccaaaattccctctccgtcgccgccgctcccaaaatcccctctccgtcgccgcctctcgccaggtcgtttccaagccccgttgggggcctcgccggcgccggcattggatataacctcgcccgctacctccgtccgaatgcagggccttgatatttaatgggctggaggtggtacatgcatgttcgcagtgacaagaacacattgaaacgttggtttttcattgacaagaggcttgttaaagcatttttggtgcactaaccttttgttgtctgtaattggtttcacaacaagtttcttggggggttgtgtcctgttgatggatttgaagacaggcctcaattcacctgttattgctgaccatctccctacgttagcattgcctgctgctgtcatgactttcacaacacctactagctttccctctccggggctttgcttgaacactacaaagaagatacctctgcctggtaagattgaagaagttcgtgctgctggatggcttgatctcatgaaggcctcatcacctacccgcaaaaggcagatcaaggatgtcatctgtgatgctcaatctgatcttgatttgcaatactgcaactggacagtgaactatccttctgctttgatctcatttgaggcaattagtgatcttgctgggagtaaaaggttggcattgtttcttgactatgacggaacactttcaccgattgtggacaatcctgaaaatgcattaatgtctgatgagtgaggcatgcggcatcacttttcccaactgcaatcattagcggaagatctcgtgataaggtttttgactttgtgaagctaaatgaattgtactacgctggaagccatggaatggacataatgggccctgttaggaagactactgactccaatggcgtggaatgtattcggtcaactgatgtgcatgtgaaactactttctagatctttaccctcaatttaaatgttttacttg

SEQ ID NO: 153262 - DNA, 1501 bp, Zea Mays
actcctttctctcccagctcccaaaattccctctccgtcgccgccgctcccaaaatcccctctccgtcgccgcctctcgccaggtcgtttccaagccccgttgggggcctcgccggcgccggcattggatataacctcgcccgctacctccgtccgaatgcagggccttgatatttaatgggctggaggtggtacatgcatgttcgcagtgacaagaacacattgaaacgttggtttttcattgacaagaggcttgttaaagcatttttggtgcactaaccttttgttgtctgtaattggtttcacaacaagtttcttggggggttgtgtcctgttgatggatttgaagacaggcctcaattcacctgttattgctgaccatctccctacgttagcattgcctgctgctgtcatgactttcacaacacctactagctttccctctccggggctttgcttgaacactacaaagaagatacctctgcctggtaagattgaagaagttcgtgctgctggatggcttgatctcatgaaggcctcatcacctacccgcaaaaggcagatcaaggatgtcatctgtgatgctcaatctgatcttgatttgcaatactgcaactggacagtgaactatccttctgctttgatctcatttgaggcaattagtgatcttgctgggagtaaaaggttggcattgtttcttgactatgacggaacactttcaccgattgtggacaatcctgaaaatgcattaatgtctgatgagatgcgtgctgcagtgaggcatgcggcatcacttttcccaactgcaatcattagcggaagatctcgtgataaggtttttgactttgtgaagctaaatgaattgtactacgctggaagccatggaatggacataatgggccctgttaggaagactactgactccaatggcgtggaatgtattcggtcaactgatgtgcatggtaaagaagtcaacctgttccaacctgctagtgagtttttacctatgatcactgaggtgtatgaaaaacttggtgagagtgttaaggacattgatggtgcaaggatggaagacaacaagttctgtgtatctgtgcattaccgtaatgtggcggaagatgactataaaaaggttttccatcgtgtaactgctgttttggaaggttacccttgcctaagactaacccatgggaggaaggtttttgaggtccgtcctgttattgattggaacaaaggtaaagctgtggagtttttacttgaatcgcttgggctcagcgagagtgaagatgttctccctatctatgttggagatgacagaacagatgaagatgcattcaaagttctgaaggcaagcaaccgtggctttggaatattggtgtcgtctatacccaaagagagtgacgccttctactccttgagggatccagctgaggtaactcatagcactgtggcaaccacaacgaacttttgctttgaatatttcttgggtcaaaaggaaaac

SEQ ID NO: 153263 - DNA, 507 bp, Zea Mays
atggatagatcagccctgcaaccgtcgggtttgcccagtcacacacaggatcttgtcacccccactgcaacttcgctagctccagcgcgcccatgcctaaagcccaccataggaacagggccagctcaggtcgctggccccaagagagtcacgttcgccgcggcagccccgtcctctggacatcttctgctcaaagctcaaagctccgggccacagggcatggcagtgtcccttaagctcaaagctcctgctccggtctctccagagctccaagagaccccctgcttcgacagctccgactttcctccacttcaacaggtcgacatggtgaggtccagcgaccgctcggaacgcccgacggaatcgttcgccgttgctgcatcctacagggatatggacagcgagatggcgaggctcaacacccatgcggcgtgggcctggcttggaggtgttcgaccacctataggagcactaagagcaactccaacagtttatataaaatcctag

SEQ ID NO: 153264 - DNA, 390 bp, Zea Mays
atggctcccaaggttgcgctcttccttgccctgagcctcctgtttgctgccaccgcgcatggctgcgaacccaactgttctggcccagtcgtcccaacgccgccagtcgtgccgactccgtcgtcgcacagccacgggcgctgcccgatcgacgcgctcaagctcaaggtgtgcgccaacgtgctaggcctcgtcaaggtcggcctaccccagtacgagcaatgctgcccgttgctggagggtctggtggacctcgacgccgcattgtgcctctgcaccgccatcaaggccaacgtcctcggcatccacctcaacgtgccccttagcctcaacctcatcctcaacaactgcggcaggatttgcccagaggacttcacttgccccaactaa

SEQ ID NO: 153265 - DNA, 654 bp, Zea Mays
acaaagaaaacgcactgcagcaccacttcctgcgctgctgctcatcacacaccgtagtactaacactccatcgccacaatggctcccaaggttgcgctcttccttgccctcagcctcctcttcgctgccgccgcgcatggctgcggaccctattgctccggcccagtcgtaccaaccccaccagtcgtgccgtcgcacagccacgggcgctgcccgatcgacgcgctgaaactcaaggtgtgcgccaacgtgctgggcctcgtcaaggtcggcctgccccaacacgagcaatgctgcccgctgctggagggcctggtggacctcgacgccgcattgtgcctctgcaccgccatcaaggccaacgtcctcggcatccacctcaacgtgccccttagcctcaacctcatcctcaacaattgcggcaagatttgcccaaaggactttacttgccccaactaattgagctgaatatggagataaagccagcatccaaggaatgtaacccttagtgttccatctcgcgattccgattgttacttgatcatcatcactgtttatctatttttatatttaattatcaataagaaacattcacattttttgttttgagaaagatgacaaaatatgtgcaccattactattttagaacaatca

SEQ ID NO: 153266 - DNA, 1286 bp, Zea Mays
caagttatccatagttcggtatgtctcaaagtcatacggaagatgactttggttagagtgattcgagtgatagtgaggacgaaactcttttgcttgtcaacctactaaccctcaacattgcagctcaacgccatcaccgccgacggtcgggtttaccccgccgtgtcattcacatagatcatttcgcgggagaaaacctcatccaacatcactacttcgccgctaacccagtgtatccaccccatgtgtttcatagaaggttccgcatgagtaggcctttgtttctccgcattctgtaaggtcttcaacagcacgatatttactttacacaaagagttgacgcaattggtatgcccggactaggaccattacaaaaagtttgtgcggcaatgcgaatacttgcttatgggttaccttctgatgcagtagacgagtatattcaaattggggaatcaaccgctagggaatgccttcatcatttttgtcgcgcaatcattgcatgttttagtggctggtatttacgcactccaactcaagatgacattactcgcatcatgcataatagtgagtctcggggttttcctggcatgttgggttccattgattgcatgcactgggagtggaggaactgtccaacggcttggcgaggtcaattttgtgggcgcaatggtagggcatcgatgatacttgaagcagttgcatcttatgatctctggatttggcatgctttttttggcatgcctaggacaaacaatgacgttaacgtgctccactgatccccagtatttgaccctatgacttctggtcgaatgccaccagtcaattacacagttaatggtcatgcgtacaacttcggttattaccttgctgatggtatttaccccaactggcctacttttgtcaaagcaatccgacacccatacgaggaaaagaaagtctatttcactcagatgcaggaaagttgccgaaaggatattgagcgtgcatttggagttcttcaagcccggtgggcggtgctccgtggaccagcttatggttgggatcgtaatcgtttgacagagataatgacggcttgcatcatcatgcacaacatgatcgtcgaagatgaagggccttttgctgcaaacattgatttcggagacaactcttcaaggattgaatcatctcaaattataggggaaggccgggccgaatgggttattaaccactttgatctacgtcgccaagaaagatcgtgctcacttcaaaatgatcttgtcgagcatttatgggctcgccgtggaagt

SEQ ID NO: 153267 - DNA, 1593 bp, Zea Mays
gtcgccacaacgcaccctttttgttggctgcacgcatacgcacacggcacatacacccttctgtctgtcctgtggcgccatccatccgttcgttacaggtgcgccggcccggtctctcctcctcccagccggccggcggcctccgcttcgctcgcccgtccctgggttctcggttccgcggcaccaccgcgtgccatggggcctccgcggggctggacactgcctgccgccgccgttgccacggccggcgtcgcctcggtggtggccaccatcatcttgtccgcggcggcggccgatgtggtcgaggagaggctgacggtgcccatgacgatcgtcgctggcgcagcgtcggcgggggcagtgtgcctcgacgggagcccgccggcgtaccacctgcacggcggctccggcgcgggcgcgcggagctggctgctccagttcgagggcggcggctggtgcaacgacgtgcggtcgtgcgcggagagggccgggacgcgccggggatcgacgcgcctcatggcaaaggccgagtccttctccggcatcctcagcaaccgtccggccatgaatccagacttttacaactggaaccgtgtgaagctgcgttactgcgacggcgggtccttcatgggcgattcagcagtgtatataaacagctcctcggtgctctacttcagtggccagaggatatgggacgctattgtcgccgatctgctcaggaagggactggcgagagccgacaaggttctgctctcaggctgttcggcaggaggcctagctacgttcttccactgcgacggccttaagcagcggcttggagccgcagccacggtgaaatgcctgagcgacgccggatttttccttgatctgagtgacatttctgggagcaacaccataaggcaattctttagcagcctagtatccctgcagggaatccagaagaatttgaacatggactgcctgagttcaacttcaacagacaatgcatacctgtgtttctttccacagttcgcgcttgcgaacatccgaaccccgtttttcatcttgaattcagcttatgatgtataccagttccaccacattctggtgccgccttcgtctgatcctggaggccattggagccgctgcaagtcggatcctggtggatgcaacgcaacacagatcgcaaccctccaaggactgagaagtggaatgctgacatctctgagacagtttaaaagcaaaccggaggcagggatgttcatcaactcctgcttcgcgcattgccagagtgagctgcaggacacatggttcgcaccaaattctccatccatagataacaagaaaattgcagaggtggtaggtgattggtacttcgaaagaggagctgccgtggagattgactgcgcctatccctgtgattcaacttgtcgcaaccttataccaattgataagaatgggttcgctggcgcatgaagtggacctcgattcagagccatcaacatttgcccaaacatgattgattacctgtatatattgcacattgcatcacaattcaacttggcacatggatgaataaaatgtagagccagtgctctcgaaagatatgcaaaa

SEQ ID NO: 153268 - DNA, 1794 bp, Zea Mays
gccggcccggtctctcctcctcccagccggccggcggcctccgcttcgctcgcccgtccctgggttctcggttccgcggcaccaccgcgtgccatggggcctccgcggggctggacactgcctgccgccgccgttgccacggccggcgtcgcctcggtggtggccaccatcatcttgtccgcggcggcggccgatgtggtcgaggagaggctgacggtgcccatgacgatcgtcgctggcgcagcgtcggcgggggcagtgtgcctcgacgggagcccgccggcgtaccacctgcacggcggctccggcgcgggcgcgcggagctggctgctccagttcgagggcggcggctggtgcaacgacgtgcggtcgtgcgcggagagggccgggacgcgccggggatcgacgcgcctcatggcaaaggccgagtccttctccggcatcctcagcaaccgtccggccatgaatccagacttttacaactggaaccgtgtgaagctgcgttactgcgacggcgggtccttcatgggcgattcagcagtgtatataaacagctcctcggtgctctacttcagtggccagaggatatgggacgctattgtcgccgatctgctcaggaagggactggcgagagccgacaaggttctgctctcaggctgttcggcaggaggcctagctacgttcttccactgcgacggccttaagcagcggcttggagccgcagccacggtgaaatgcctgagcgacgccggatttttccttgatctgtaacatttggtcaccgagttaccattttttttcttcttctgctttttttccggccaatgcttgtgattctgatatcccttctctctctctccaggagtgacatttctgggagcaacaccataaggcaattctttagcagcctagtatccctgcagggaatccagaagaatttgaacatggactgcctgagttcaacttcaacagacaatgcatacctgtgtttctttccacagttcgcgcttgcgaacatccgaaccccgtttttcatcttgaattcagcttatgatgtataccagttccaccacattctggtgccgccttcgtctgatcctggaggccattggagccgctgcaagtcggatcctggtggatgcaacgcaacacagatcgcaaccctccaaggactgagaagtggaatgctgacatctctgagacagtttaaaagcaaaccggaggcagggatgttcatcaactcctgcttcgcgcattgccagagtgagctgcaggacacatggttcgcaccaaattctccatccatagataacaagaaaattgcagaggtggtaggtgattggtacttcgaaagaggagctgccgtggagattgactgcgcctatccctgtgattcaacttgtcgcaaccttataccaattgataagaatgggttcgctggcgcatgaagtggacctcgattcagagccatcaacatttgcccaaacatgattgattacctgtatatattgcacattgcatcacaattcaacttggcacatggatgaataaaatgtagagccagtgctctcgaaagatatgcaaaatttggcatgtttttcccggtactttgatctgcgggtcttccttcatttattggcggcaatgtttttttttttggctttactaacagttgactgggtagctgacttacggatttgtgtggtgctgtgattgtttctttggtcataaaaacagtagaccctactgctgcccgaattttggaggtttcacaagataatgggatttgtagca

SEQ ID NO: 153269 - DNA, 167 bp, Zea Mays
ggccatggctgaaagagtctgaaagaagccacccgtgtcagctgtcaaatgccgggatggagattgcgcgcgcctttttctgtgtccggaagaagacttggctcaatgctctagctagtagatcgaacgtgcgtatcgacaagcaatcaaaaaaaaaaaaaaaaaaa

SEQ ID NO: 153270 - DNA, 2754 bp, Zea Mays
aagggaccaaaacctcccccttcctttccaaccaaggtcaccgcgcgcctcccatggccacggcgcccctcgccttccgcctccccttccccttctcattcccctccgcctcccgccctcctccttccagaatcctagcccctccgaccccgcgccggctccccctacgcctcgccgccgcggccgcacgacggttccgcccgcccaccgccgacgacgaaccccctgaggccgcggaggactcttctcatggcctaacccgctatgaccagcttgcgcgaagcgtggagcgcgcccggatccgccagccggagatcacccctgacaacccgctcttctcgtccccctccactgcaggaggcggcggcggaggcagctacgacccagacgacgagttcttcgacgaaattgaccgcgctatcgctgagaagcgggaggagttcacgcggcgcgggctcatcaagccatcccctgcttcgccgccgccgtcgcaatcgcagccggaggacgaggacctcaccgacgagctctcccctgaggaggtgatcgatctcgatgagattcggaagcttcagggactcagtgttgtatccgtggccgacgaggaggatgaggaggtggaggggggcgaggacgaggacgatggattgccgctcgatgaggacggggaaggctttgacgtggccgaggagctcggcctcgagggtgccaggatgcgacaaccggctttccgcatgacgctggctgagctccttgacgagagcaagctcgtcccggtggccgtgacgggcgaccaggatgtcgccctcgcaggagtgcagcgcgacgccagcctggtggcggccggcgacctgtttgtgtgcgtgggagaggacgggctcgcggggctcaccgaagccgacaagcgtggggccgttgccgtcgtagctgatcaggacctcaacattgagggcaccctggcctgtcgcgcgctggtcattgtagacgacattttgactgcgctccgggtactccctgcctgcttgtacagccggccgtcgatgaacatggctatcataggtgtcactggcacagatggcgtaactaccacaactcacctcgtgaaagcaatgtacgaggctatgggggtgaggactggcttggtgggtgttcttgggacctatgccttcagcagcaacaagctcgatgcacgccctgatgcatctagtgaccccattgctgcgcagaagctgatggcaacaatgttacacaatggcactgaggcagtggtgttggagaaaggcactgatgggatgcctccatctggtgtggacagtgagatagattatgatattgctgttttgactaatgttaggcacactgatgaagagaatggcatgacctacgaggagtatatgagcagaatggcctctcttttctccagaatggtggaccctgagcgccatcgtaaggtggtgaacatcgatgatccaagtgccccatttttcgccgcacaaggagggcatgatgtccctgtggtaacatattcatttgagaacaagaaggctgatgtgcacacgcttaaataccagctttccctgtttgagacggaggttctggtacagacaccacatgggatcctcgagatctcctctgggctgcttggaagagataacatctacagcatccttgcaactgtggcagttggcattgcagtgggtgcaccactggaggacatagtcaggggcatagaagaggtggatgcgatcccaggtcggtgtgagctaatcgatgaggagcaagcctttggggtaatcgttgatcatgcaaggacaccagaagctctgtcaaggcttctggatggtgtaagggagctgggaccacgccggattgtcactgttgttggatgttgcggagagaaagaaagagggaagaggcccgtgatgacaaagatcgcagctgataaaagtgatgttgtcatgttgacatcagacaatccagcaaatgaagatccattagatatcctagatgatatgttggcaggtgtaggctggactatggaagaatacttgaaatatggtgctaatgattattacccaccccttccaaatgggcatagactattcctacatgatattagaagagttgcagttcgagctgctgttgcaatgggtgaacaaggcgatgtggtcgttatcactggcaaagggaatgatacctatcagattgaaggcgataaaaatgaattttttgatgacagagaagagtgccgagaagcattacaatacgtcgatcaattgcaccgagctggaatagacacctcagagttcccttggcggttaccagaaagccactgattttgatttaggcaagatagtcgagtttatcaactgaagagcaacaccagactcccaatttaaagaacgtgtgcttttttaggatttgaggatatgatatccaagtcctgcaagaaaattactccttacgtgctgagttttctaacccaagtgctaatggctaacaaattgctagcttatcagctattcagttacactgccatactagttagtagataaccagatggcccagtaaatgttgtattagttcatgcacgtaaatgaggtgtagctgtgaaagtagatcgatgaaggttcctgatgtgaaaaagtcaaaagacaatgtaggagcttctgggtcacagtttcaaaagattttgtcccttggcagtgattgtaagatcttttggaagttatgccttttgttgttctgccatct

SEQ ID NO: 153271 - DNA, 1414 bp, Zea Mays
cagccttatcttctggccgcgcgccttcttcttccgcacaaattttccagctccctctgcgtttctctctgctcgcctcggcctccaactccggccgtggtggccaccggaagcgtgtctcccggccccggctcaacggtctgcgttctccctgctctcccaagctgcgcgcccctgtcctgttccctgcgcgcgctgttcctgctcgctttggcgtccgcgccatggggccctgcgctcgtcgcgacagactccagtcctcctctaccgagcagcttgcccaaccttcttctccctacacgccggagctcgcccagccgaccgaagctccaagctccagccatggcgcgtcctcgctccctcttccctgctcgccggttctccttgccgagctcccctacgtgctgatctctgcgctgcggctttcctttccccaagctcctccagccacgcagcccagctgcttcttcctcctcccggcgttcttcctgtgccgcgcgccctgcccatctcccagtcccagcttgccgcacgcgcaactgctccttctgcccagccgccccggatcttgcttggccatagcaagttcctccctgtcctctgctcgcgctgctccagtcggccgcgcgtccagcttgccctgtctgcacgccgcgctcccttgtcgtggctttctgctttctcgttgcgcgcatagcgttccgttgttcctgcacatgctgtcgcgaagctccctgttcagttcgcctccatcacattgtcgtgggcgcgaaactgctcgcagtcgatatcaaatccatgacgcgcgtgttggacacgataaaacgctgcgtgtgctggtgtccgaactcgccctggccatggcgcttggtatcgtggtgtgctttttctctgcgcgcgtcctcttgttagctgtcgtgactaccgtcaaatcatcggagtcgttcaactcgccgatcacatcttggccggtcgtcgatttcctattcgtcatggtacaacaccgttattaaatctggtctccaacccgccatgacgttcgtcgtcctctagtcccagttcgacccatccgtgcgttcgctcttcgtccatcgggcttcacgcgtgctcgcatttgttgtcgagctgttgaacccgtctttccttgctcgtgacttcgtcatcgccagagccctcactaaattcgtgtcctcgcgagcttgctccagacttcaagcgaaggttgtcgtcgttcgtgcatccccaagaaatcccaagcgtcgaatgaagatgaagctagcagcgtggtattccctaagtgctcgacacaagagctgaaccagaatccttgccgtgttcgcggatagcgcgtcagatttagaatggtaagccaattcaaaatttccattagcttaattattgaagtagttcgatg

SEQ ID NO: 153272 - DNA, 766 bp, Zea Mays
cagactccagtcctcctctgccgagcagcttgcccagccttcttctccctacacgccggagctcgcccagccgaccgaagctccaagctccagccatggcgcgtcctcgctccctcttccctgctcgccggttctccttgccgagctcccctacgtgctgagctctctgctgcggctttcctttccccaagctcctccagccgcgcagcccagctgcttcttcctcctcctggcgttcttcctgtgccgcgcgccctgcccatctcccagttccagcttgccgcacgcgcagctgctccttctgcccagccgccccggatcttgctcggccatagcaagttcctccctgtcctctgctcgcgctgctccagtcggccgcgcgtccagcttgcccagtctgcacgccgcgctccctcgttgtggctttctgcttcctcgtcgcgcgcctagcgttccgttgttcctgcgcgtgctgccgcgaagctccctgttcaattcgcctccgtcgcgttgtcgtgcgcgcgaaactgctagcaatcgatatcaagtccgtgacgcgcgcgttggacacggtaaaccgctgcatgtgctggtgtctgaactagcccgggccatggcgcttggtaccgtgccgtgctgtttctctgcgcgcgtcctcctgttagctgtcgcgactgccgtcaaatcatcggagtcgttcaactcgccgatcacatcttggtcgatcgtcgatttcctattcgtcatggtacaacactgttattaa

SEQ ID NO: 153273 - DNA, 2667 bp, Zea Mays
gatggacaaatcttggatcaatgcaacactatttagcaagccacacctagaaggagttagtgagttcatgaagcttgtaatagagcgatttaatgcgaatgaagagatactttgtccatgccgcaagtgtttgaatcggcttagtggacatagaggacaggtggaggaccacttatatcttcatgggatggctagtacatacactaggtggatgtatcatggagaagccatggatgacataattaatgaaaatggtgaccacgaggatgaacatgtgagtttcaatgatgatgttggtatgaatcaagatgaagaagatcctgatgataggattaatggtatggtagaggagttatacacagccgaagatcaagataaaaggaaatctatgtttggagatatactagaggagatgaaacaagaactttatcctggtgcaacttatacaagattttcttttgtggtgaagttgcttcatattaagtcgttttatcgtatcagcaatgttggcttcactgcaatactgaagttgttgaaatcaggatttcctaattgctcccttcctgcatcttttggagaagcaaagaaacttattcgtgcactaggacttgggtatgtttcaatccatgtgtgcgtgaataactgtgttttgtttcagaagaactatgcaaagcacgatcaatgtccaatttgcggtgaatcaagatggaaagatacaaataaacggatccctcaaaaggtattgcgccattttccattgatccctaggctaaagagaatgtttgcttccaaagaaatagcaaaacaggcacaatggcataagttcaagaggaaacatgtggagaatgagcttagtcatccagctgatggagaggcatggaaagattttgatagaaaatatggtcagtttgcagaagatgcaaggaacattagacttgggctcgctactgatggtttcaatccttttggcaaaatgagctcatcatacagcatgtggccaatatttcttataccatacaactttcctccatgggaatgtatggaacaatccaacttcattatgggcctactcattcctggcccaaaatgcccaggaaaggattttgatgtctttatggaaccactcattgaagagttgttggagctttggaaaggtgtcactacttgggatgcattgagtggaaacaattttgaactacatgctgcagttatatggtgcattcacgactatccagctttgagcacattgtcaggtcgggtcacaaaaggctattacgcttgtgtgcattgtgacaaaaatccttgctccaaaagaataaggaacaagatatgctatgtttatcatcgacgtttccttccaaaagatcacatttggaggagaaataaaagttttgatggtcatagtgaacaacgtgagaaaccagaggaatttagcatagatgagttgatgcaacaattggagagggtaaaagatgtaagaccaggaatacatactaaaagcaaaaagagaaagagggaagtagaaggtcaatgttggaagcgaagatcatgtctatgggatttgccatattggtcaagtttgaagttgcgccacaatcttgatgtaatgcacattgaaaaaaatatatgtgagtactttcttggtacatttcttggcattgttggaaagacaaaggacaccattaatgctaggcttgatttggaggacatgggcataaggagacatttacacttaaagcataatggggactcatacaattttccgcatgcaccatacacaatgaataaaacacagaaggttgatttttgtgactttttgagaagtgtgaaattccccgatggctatgtttctaacttagcaacatgttttagtactgatggatgcaacctccaagcattgaaaactcatgattgtcatatccttcttcaaagaattttacctgctgctattagaggaatcatgagtaaggacatatatgaagcacttgctgaattaggtatttttttcagcacttatgtgctaagacattgaagttggatgttttacaaagaatgaaagttgaaatcccaatcattttgtgcaagcttgagaaaatatttcctccttctttctttgatgtgatgctgcacttggctattcatttacctgacgaggcaatcctaagaggaccagtgcaatatgggtggatgtatccagtggaaagaaggttgtatacattgaaacgttttgtaagaaatatggctagacctgaaggatccattgcagaagcatatgttgctaatgagtgcttgacagcttgctcgaggtacttcgatgatgttgacacacgacacaatcgggagggtaggaacaaagagcgtgttgatttgagcagaggcaaattttatgtttttcagcatggagttgaacttcttggagcaccaagaattacatacctccaagatgattatgataagatggtttggtatgtcctaaacaattgttcggaggtcgagccatatataaagtacgcatttccttatacgtttgtcatttttatatgaattgttattatcgcctctaatatataccatatcaggatgtataaggaagagttagagaatgaagggattgttaatgtggaaaaaaccattcagaagcacttttcctcctggtttaagaagcat

SEQ ID NO: 153274 - DNA, 596 bp, Zea Mays
atttgcaagacatcaagaattctggaagctggaagattgttcaaaaatttacacataggcacttgtggtgtgtggctgaaaatgacattgatgaaagacctagttcctcaggactatcataccaagatgatacatgtgttggttctgaagtgcaagttaatgaaggagatatggagataactggacatcaggatgctgacgaatctattaatgtcagtgcaagtgtggttgatgaatttcgggtgcaacgagaagaggaagtggaagagtatgagacaagcgacaatgaagatgaaactggatggcaatatgctagtgacaacgaagaatcaataactattgtcaatgacgatgatgatttcagcgataacgagtagcatgttttttgtttgatctgagagaagtgaactctatgccgtattttgtttgatttttaagaagtgaactagctactgttatttgagagaagtgaactgtatgctacaatttgtttgatttttaagaagtgaactagctactgttatttgagagaagtgaactgtatgctgcaatttgtttgatttttaagaagtgaactctaactgatgtaatactac

SEQ ID NO: 153275 - DNA, 1421 bp, Zea Mays
atgccccctggaagaatggatgaggcaaggacacgcaaagaccttggtgaggtgccaattactgagtatgaaaaggagagggctttaaatgtgatgaggaacaacaaaatgttgagtagtcttggtataactggattaacatcacttattcgatcaagtagtacaaggaagaactctatcgctcgtgaagactttgatccattgtatgaacctgatcatagtcaaatagatgtcatgacagataaatggataaggggaaaaagtatgggcaaacaattggaaaggataagtcgaggcttaaacactaagatcacattggtcatcactaaagggaatagacgtcctgaggttcctatgcaagctgcaatgcttgcatcagaaggaggaattgtaattaggcaacatatgccgatcctaacacactggaaggaatacaagaatgacaaatcctatttggaagacttcgtcggtagaattggtggtcaatttgccatagacaccaaaaacaaagatgtcaaatatgcatgtgctgatttgatgaggtgtaatcagcgacaaatgagatataagctcaagaaggcttactttaatggtgtggcagctgacaaagtgagaacaacatcaccgttgagtactatgacagatgagcaatggatgcaactcgtcaatatgtggtctaccccaaagcacaaggataaatgtgtgaacaacaaagtgattcgtggaaaagttcggttccagcaaaagacaggatctcggagttacattgcacatatgcatgccgtgaagcaagccaaatatggagatgcaccaccaagcgcgattgatctttttaaagagtgccattgtagtaggaagactggttttgttgagcctgtaaaggaagcaattgacacaatggaagcacttgtggctgagcctagagtagaagggaaagaatctaagacccctacagaagcagttgctcaagtgttgtcttcatcaaaatttctttataatattggtcttgtacccgccacaaagaaaagctgcaatggtggtgatcctacacgtgtggcagaacttgaggctgaacttgaatcagagaagcaaaactcattagaagttagagctcagttagatgccctaaagaagaaggtagaagaatcagaagaagcaagggctaaggagttagaaaagattaatgatctgcaaaaaggagcagatgagaccaatgctctccttcgtcgtctctttagcctcaataagtagttggtcgattgtgccctgattttgctgtcctatttgtactctgctttgcactctacttgatgctggtgataaaacatgatgatagttttaattttgatatgtccttttgttactgtccttagcacactactagatgctggtgtgatgaaacatggtgacaattttgaaaa

SEQ ID NO: 153276 - DNA, 1122 bp, Zea Mays
tgtgagatatttattaaagcttttaggaaatgattcaccatgaatcttgtgtctccatagatgaatttaggaacttccttcagcggatagattttaaactgaaggatgaagaagaacttaaagaaaggatggatgagatctgtaatttgggcgtcttataggggtcaaattctcaccagaacagtaagaggaatgatgtactacagaaaggcacttgaaatccaatgccttcaagatatgacagatcctgctaaagttgaccgagacagatcaataggatcctaccaagagttgcaatctgatattgaaatggcacaagctattgctgatatcaaattcacctatgttgtctcatgcaaggtagaagatgctaccaaagtacaaatgcttctgttcagtgccactctgtcagattgggtgaataagctctctatgaggtttctgaaagttgacaggaaaacagttgatcttgtcggtaatgagaaactgaaggccagtgcatctgttaagcaccttgttcttccttgtaataaggcagcaagggcacaagttattccagacattatccgatgttatagccatggaggtcgaaccatcatcttcactaagacgaaggattctgcatcagagctttctggtttgattcctggatcccgtgccttgcatggagatgtagcgcaagcgcagcgtgaagtaattcttgctggattctgtagcgggaagttccaagttttggttgcgacaaatgtggcggctcgtggtctggatattaatgatgtgcagcttatcattcagttcaagctctgcaacgggaggtccgttcagtttgacgtcggcaacgtggtcatggtgaccggcgggaggaacaccgggcgtgtaggagtgatcaagaactgggagaagcacaagggcatcttcgaggaaaacatagaatggaattcaaatttggtcgtcgcaaaagtgtggagacttgaattcatataaagttaggcttaacattagtgcaaatagttgtattttagtttagatttagagtacacttatgtatgccttatttgacaatgcttatttatgatatattgaatggtacttatttatattatatgaattataatgttgttc

SEQ ID NO: 153277 - DNA, 1175 bp, Zea Mays
acccgtcctccctataagtagctatcccagcaccgtcgtctatcaaccacacacagagcggcatttcgaataacacaggtgagcgcgacgatgggatccctcgttaataacatcatggtcgtgggcgccgtccttgcggcgctcgtcgccggcgggtcgtgcgggcccccgaaggtgccacccggccccaacatcaccaccaactacaacggcaagtggctcaccgctagggccacctggtacggtcagcccaacggtgccggcgctcctgacaacggcggtgcgtgcgggatcaagaacgtgaacctgccaccctacagcggcatgacggcgtgcggcaacgtccccatcttcaaggacggcaagggctgcggctcatgctacgaggtgagatgcaaggaaaaacctgagtgctcgggcaatccagtcacggtgtacatcactgacatgaactacgagcctatcgctccctaccacttcgacttgagcggcaaggccttcggctccctggcaaagcccgggctcaacgacaagattcgccactgcggcatcatggacgtcgagttcagaagggtgcgatgcaagtaccccgccgggcagaagatcgtgttccacatcgagaagggctgcaaccccaactacctggccgtgctggtgaagtatgtggcggacgacggcgacatcgtgctgatggaaatccaggacaagttgtcggctgagtggaagcccatgaagctctcttggggcgccatctggaggatggacactgccaaggcgctcaagggccccttctccatccgcctcaccagcgagtccggcaagaaggtcatcgccaaagacgtcatcccggcgaactggagacccgatgccgtctacacttccaacgtccaattctactagactttgaattcccttcgattcatccggcacagcgggctatggaccttcagcagcaagctaattaagttggcagcatgcaccgctaaccttatatactactgagacttccaaattctagtatatgtaatccttttgttcgggttcatgatcgaattccaaagagtggaaaacaagcaaaaggttaaatatacatgccatttttggaggcatttttttcatgagggcatgtttcgatatatggaccactaaatatacatatcatttactttcctaca

SEQ ID NO: 153278 - DNA, 996 bp, Zea Mays
acccgtcctccctataagtagctatcccagcaccgtcgtctatcaaccacacacagagcggcatttcgaataacacaggtgagcgcgacgatgggatccctcgttaataacatcatggtcgtgggcgccgtccttgcggcgctcgtcgccggcgggtcgtgcgggcccccgaaggtgccacccggccccaacatcaccaccaactacaacggcaagtggctcaccgctagggccacctggtacggtcagcccaacggtgccggcgctcctgacaacggcggtgcgtgcgggatcaagaacgtgaacctgccaccctacagcggcatgacggcgtgcggcaacgtccccatcttcaaggacggcaagggctgcggctcatgctacgaggtgcgatgcaagtaccccgccgggcagaagatcgtgttccacatcgagaagggctgcaaccccaactacctggccgtgctggtgaagtatgtggcggacgacggcgacatcgtgctgatggaaatccaggacaagttgtcggctgagtggaagcccatgaagctctcttggggcgccatctggaggatggacactgccaaggcgctcaagggccccttctccatccgcctcaccagcgagtccggcaagaaggtcatcgccaaagacgtcatcccggcgaactggagacccgatgccgtctacacttccaacgtccaattctactagactttgaattcccttcgattcatccggcacagcgggctatggaccttcagcagcaagctaattaagttggcagcatgcaccgctaaccttatatactactgagacttccaaattctagtatatgtaatccttttgttcgggttcatgatcgaattccaaagagtggaaaacaagcaaaaggttaaatatacatgccatttttggaggcatttttttcatgagggcatgtttcgatatatggaccactaaatatacatatcatttactttcctacaaatttgc

SEQ ID NO: 153279 - DNA, 162 bp, Zea Mays
ttattaaaacaaaactctcagtgcacttcggagcacggtcttgcgttaggtcctttacggacgacgaaagccccttggctacactctactcttcgcctccggctgttctttccttttggctcggcagagctgagctgggttccattacactctgtaagaaat

SEQ ID NO: 153280 - DNA, 2091 bp, Zea Mays
agcccctctcggccggctatcggcaaattcgacatccgctccgccgtctacagtctacataaggaatcgaggtagccccagtcgtcttcggcgctcaagtttcggccgccggccgcggtgccctccgccccttcccaatcctgcccccaagccccagtcagccatcgaaactccaacccccaggcggccaggcccaagcgtccggcggttgcggccccgcggcttggcgaaggcgaccggtggctaggccccagcgactcagggcggatcaagtaagatttgtagtttcaattaattaggcctgcagatgcacccccgatgcccggttttggatttcccactgccgatgcccgagatgaaggccgccactgcgctggggagctggctgctcccggctgcgcctgccattcgccccacactggtgaatctcagatcccgggggttctgcagtcatggttatttcccctcggcgtcccggatttcttgctcatcagagttatctgatagcgatagaggtctcgccaaggagatggagtcagaattcagtgacgagatatgtgccgagaatggtgctgaagaggacgatgaaacagaggatttaatttggagcaaagaagagatcgatgctatttcggcgctcttcgaccggccgatgcgccagaagcccctgaagccgcgaaaccccgcgaggcagagggcgcttccattgccactgccgcacaagacgaggctgcccgtggctcctgcgccgaagcagcacgtccgcctcgctgcaagagcggggctctcttctcgtgcttgcttcagcgaccaggtgcgcaagaaaccggagttccttctcgggattgcccgggagatcgcagcgcttcctcccgagcacgacgtctccacggtgctcgaccgttgggcgaggttcctccggaaaggctccctgtcacttaccattcgtgagctcgggcacatggggctccccgagcgcgcgctccagacactgtgctgggcccagaggcagaaagctgtgccgttgttccctgacgatcgtgttcttgcttcggccatcgaggttttggcacgctttgaacggctcagagtggagtctgcgctggagcaatgtgtgcccacggccagccgtgccgttctcgaggccatggcgagcgggttcatcagggcggggaaagtagaccgcgtgcgcaagctcctggaacttgcaaggatcaataacaggacgctgcaccccagcatctacgtgaagttgatgttggaagccacccggacacctgaaggctacgggcttgcgtcggcactggttgatgagcttggcgagaggccggagttggagttgcgtccacaggactgcacggctgtcatgaaggtctgcataaggctccgacggtacgcagccgtggagagccttttcagctggttcaggggggccattgggagccccaccgtggtgatgtacacgacggtgatccacagccggtgccgtgacgggaggcaccgagaggcactgtccctggtgtgggaaatggagcaggcaggctgcctgcttgatctgccggcctaccgagttatcgtcaagctatgcgtggcattgcacgatccggggagggctctccgctatctgtcaaggatgaaggaggctggttttattccaactggcgacatgtacgacagtctgatcgagggctatttggcagatgggaggctggccaagtgccgacagctgatcagagatgccgagtcagccggtgtgaagctggataggaggctgctttcgcggttgtctgaaactggaggcagacatccttagttgactctggtgagtgttgttgacatgtgttatgcacgggtagaatccggacaggacaggaacaccacagaggaaaattatctctagcatttattgtagagtaatacaaagagtaatcttggcagaagattagtacgttgttgcccagtttccctttgtatttgtcagtaatccatgatttcatgacaacgatgaattgctggctgaaatcggctccacctttaagccaaaatcctgaaactgctaacgcatgcttgcaagttcctttgtatcctttc

SEQ ID NO: 153281 - DNA, 1308 bp, Zea Mays
tgacgaatcttcttcgtgatgtggtggttctaccgcaaaggaccctccggcttctctggcgcctccacggccgaggaggtcaccgccggcgtcgacggccaccttctggtcgccgtcatcacaggtgcgacgagcggcatcgggctggagacggcgcgcgttctggcgctgcgcggtgtgcgcgtcgtcatggccgtccgcaacgtctcagccgggctcatggccaaggatgccatcgtggccaagacccccgacgcaagaatcgacgttctggagctggacctcagctccatagcttccgtgaggagattcgcctccgagttcgactctctcaaactgcccctcaacattctcatcaacaacgccggagtgatgacaaggaactgcacacgttcctgcgacggtctggagctgcattttgcaacaaatcacatcggtgtgtgtcattagcccaaaaattattcgaaccgcgatttcgttttgcagcgcgtcttgtttaatctacctcactttcggcacttgaattatgatgtatgagaacgattcctgctggtactgtagcagcattagacttgaatggtggcaggtcattttcttctaacaaacctcgtactggagaacatgaagagcacgtgcagggacacaggcaccgagggacggatcgtcaatgtgacatctgcagggcatgtgatgacctatcctgaagggatacgcttcgaaacaatccgtgatccatccggtttgaacgacttcattgcttacggccaatccaagctcgccaacatccttcatacaaatgaattgtcccggatcttcaaggaggaaggagtgaacatttcagccaattcagttcatcctggtctcatcgccacgaaccttttcagggcctttggcaggaccatcattgccgctttttttaacaccgttggaaggatcgtgcgtagaagcgtagaacagggcgctgcgacaacatgctatgtggcagtgcatcctcaagtgaaggggctaagtgggaagtactttgctaactgtaatatagccagcccgagctcgcaagcctcggatgctgagttggccaagaagctatgggaattcagtctgcagacagtttcttgattaggcgcttgtcagatctgctgatgcgcgtgtattcatgtgtatgtgtatgtttatacattttctccagagttcatgtcggtgtatgccgttaaatatgtctagacttttattcaaaattattcaagaatcgaactcatggagccctaagcttctagagtcgaagtcaatcgcaagagttgtgttttaccc

SEQ ID NO: 153282 - DNA, 1157 bp, Zea Mays
gacgaatcttcttcgtgatgtggtggttctaccgcaaaggaccctccggcttctctggcgcctccacggccgaggaggtcaccgccggcgtcgacggccaccttctggtcgccgtcatcacaggtgcgacgagcggcatcgggctggagacggcgcgcgttctggcgctgcgcggtgtgcgcgtcgtcatggccgtccgcaacgtctcagccgggctcatggccaaggatgccatcgtggccaagacccccgacgcaagaatcgacgttctggagctggacctcagctccatagcttccgtgaggagattcgcctccgagttcgactctctcaaactgcccctcaacattctcatcaacaacgccggagtgatgacaaggaactgcacacgttcctgcgacggtctggagctgcattttgcaacaaatcacatcggtcattttcttctaacaaacctcgtactggagaacatgaagagcacgtgcagggacacaggcaccgagggacggatcgtcaatgtgacatctgcagggcatgtgatgacctatcctgaagggatacgcttcgaaacaatccgtgatccatccggtttgaacgacttcattgcttacggccaatccaagctcgccaacatccttcatacaaatgaattgtcccggatcttcaaggaggaaggagtgaacatttcagccaattcagttcatcctggtctcatcgccacgaaccttttcagggcctttggcaggaccatcattgccgctttttttaacaccgttggaaggatcgtgcgtagaagcgtagaacagggcgctgcgacaacatgctatgtggcagtgcatcctcaagtgaaggggctaagtgggaagtactttgctaactgtaatatagccagcccgagctcgcaagcctcggatgctgagttggccaagaagctatgggaattcagtctgcagacagtttcttgattaggcgcttgtcagatctgctgatgcgcgtgtattcatgtgtatgtgtatgtttatacattttctccagagttcatgtcggtgtatgccgttaaatatgtctagacttttattcaaaattattcaagaatcgaactcatggagccctaagcttctagagtcgaagtcaatcgcaagagttgtgttttaccc

SEQ ID NO: 153283 - DNA, 749 bp, Zea Mays
atgccacaacataccttggggacaataagttgacagcaaggaaatctctatccatcttttatgctgctatctgctggcccaagttgtcacaaaattcaactggtctggaacatgaggttgcgacgaacctttgctttctgccaaaacaaacccatatttatatctagtatatctgccagtttgtagtgaccattcttctcctggtcttttggccaacaaatggtctcagttctcttccttacatgaacacattcatgagcttcatgaggtcggtgggtgctgaactgctttcaaggacaaggaaaaagatgacaaggaaggtggtgattttgatttggtttttgatgtggaaggatccatgcacttcattaaaaaggcagtggcaaagccccaagtgctagctcagactccagacctatagggcgcggacacgttgttgcaagggcaacagcaggaaaacaccaattggaaggtgcatgtcgacatgggttctgagattacatcagaagatgggggaagttggcccgtgctagcaaatcgagagcaaggaaggtgctccaacgactgtttcgtctcgttcaatcgatccttgtcattgccactctgaatgcccccttgtacatgatgcttctgttcaaggattggattgatcgttgatgtgagaatctattgtttttcggtgattcagtagattgatatcaatatgaactgcacataccaaaaaaataaagtttgttttttgctgaggc

SEQ ID NO: 153284 - DNA, 3846 bp, Zea Mays
atgccgacatatgggatgccgcctccggactttgcactgccaatgccaatgttggcgcctccacccccgcctccgcctccgtcacaattccctatgggatttcagacaccacccgcttcagttgccgcacctggagatgggtctggtcaggacgacacaacacattcgtgggtgaacaccattttcaacacgcagagtccagccggaggagctaaaaaaagggtgatcctcttcatggctccgacgatcctaggcttggttcccccaatcctttcccttgcatgcatgtcgcaaagctccatgcaggtgccagtagtatctgacaggttgttactttctataatctcagtggacacaggcaaaacaattgccaggtccagtaaagctgccgctcgaaatggaatttgtcaatggcctgactcgatcctggaatcaatatggttttctcgagatgaagtgtcaaaagaatatgaagattgtcgatgtaggattgttgtttccatgggatcaacaagaggtgctattctcggggaagtttttctaaacttgaataactatctgagttcggatggctcgactgcaatctcattgccattgaagaaatgcaattcgggaacaattttacagcttaagattcaatgccttggcacaaagtctaaatcaagatggtcaaatgtatttcaggattcaagcttctcaccatctcaaaggaatgattctgatgggggattgtacatagagaggcaagatactgctaattcttttattgactatatctgtgtgggtcgtgctgatctaattaatagatctaatgattcatctttcagttctcaaacttcaggtcaaaacatgctgcaggagagtattgatgagtcatccttaagtggtttcaatcatttgtcgtcaggggcatctggttcatccaaagatcttcttgatgccgctgaagaaacaattgaagaacttcttatcgaggcacaaatgtgggagagccattatcaaaaattgaaaattgatctagagaaattacagaaggagtctgatgaaaaatccaagaatcagactgagatattgctagaactttctgcttcacaagccgaacaagagtcgttgagacaagaaattgaagaattgaaattgtctttgaaggtggctactgaacgacaaacagttggtggaatttccaaatctggtgatgcaatagatgtccaatttgagctaaaagatgaggtacactttttgagggaatcaaatgaaaacttaacaatgcaactgaagaagagtcaagatgcaaatatagagcttgtttctattcttcaggaactggaagaaacaatagaggcacaaagaacaacaatctccaatttcactcaaatgagtaatatgattgatcaagatatacccacgaatgcattatcagctcaagaggatgcagagtgggaaagaaagatgtcattgaaagaagatgaaatcatagcattgagggagaaattggatcgtgtactcagcatagaaaatccaggtggtgttggttctgatgctatatatcttgaactggaaaaggagaatgattttttgaaggttaaaatgcaagatcttgagaatgattgttctgaattaacagaggaaaatttggagcttatacacaaattgaaagaagttagtggggtcgaagaacaagattcttgcctttctgatattgaggtaatgttaaatgcgacaggtctttctgggacttcaaaatctagagcaaaatacctagaaagaaaatgtgctgaccttgagcagaagatgttgaattttcaatcggagtctagagaactagaagagaagctcaaaaaaagccacgaggatctaaaaggacaaactcttgaattatctgagcttagagagaacctaagtagattccgtgctatggagctagagagaggggaaatcaatttttcaagaggctaccagttaagaagtgaagaactaggagatattgaaaccgaactgaaactgttgaagagtactgttcaactcaaagaaaaagagatcgaaggattacaacattctaaactagaaatggaaacctttatagatagtgtacttggaccaaagatacatgagcttgaaatctacaaagtggaactagagttgcatatatcaaggctagaagatgaaaaaatagaattattggagtccatttctggaatggaggttgagttgactaatttgacaagtgagtacgagtcatgtatagttcaaatggatgattctagaacaatgatcatagatctcaaggataaagtagaaaggaatcaaatggagttggaagctcaaaaggtggaattgaagaaaaaacaactagaatttcagaaaatatttttagaggcacaagatgattcagaggctctaagaagattgaatgctaaactgcaggctaaagttcataatcttactgaagaatacaattctcttcaagaattaacggatgatctaaagaaggaaaagttggaattacacagttttgctaaacaattagagcagaaattggagcactcgaaaagaaggaccacagatttttgtacaactgtggacttactagaggtaaaactttcttcgattcagaaagatatatctttaaaagagcaatcttttctcttggaactagacaatatatttcatgagcacaaggatcatgaagaaaagataaatcgtgcacatttccttttaaacaagattgataaagaaaaggctattgagatagagaatcttgagagggaggtcatcagccttactgcgcaactatcttcaacacatggggagcaagcaagttccatggtggatactattcgtgaggcctccatccttcgagcagacaaggcaaaacttcaggctaatcttcatgatgtaaatgaacagttgagacattatgaatctctactagaagatatacacaaggagtcaaaaaggaagattaaatcccttaccgattcactcaatgtatcgaaacaaaatgaagaaatgctgaagatagatgccgaggctgtcagaaggctgatggaagctgctaaatccaatgaagaaaatttaagaataacttcaaatgaactagaactgaaatataaatctagcgattatgagaaacaacaaataatggaagaaaattatggattaaaaattcaagttcgaaaaatagcaggtgtccaagatgaacttttggaagtgcaaagttcccttgatgaggctcaatttgaaaaggagagactagaagggatacttcggttgatatctgaagaatgtgatgaactaaaggtgcaaaatgccatgttaacagacaaagtctcaatgatgcaggatacttcaaacaatatcattgaagaaaaacaaactaaaacatccatgcaaacaaagatgagtaccataaatgaggggaacaatgatctagctactgataacagaggttgttgtctagttaatgaggaaccagacctgcaagtaaaggtccaatcattggaaagcggacttgccgaagttctagagaaaaatagcatgtatatgacacaggtgaagagccccactacagagcagcaagctgggagtaggaatggagaggggaataacgatgacaaaatagcacacctagaatcagaactaaaatacatacaagacaagaaacatgttgtgaaaactgccagaggcatccagatcttggaggtcaccatcgcgagaattgagcaagcgcagcaagaaccacaggtgttttgtagcctcagaaacaaatcagacaatgaatattttgagaacttgggatgccctggtcgtcttgagctgccaatattatacgactatgttggctag

SEQ ID NO: 153285 - DNA, 1660 bp, Zea Mays
ctattgttgcaatgtttgttttattttcatacatatcatctcgtttcatgttttatggatgaattcaattaattaatgattttattgatgttaatcaatataaggataggtaatggaccgaggttggatgtacaatgtgccaagaccacatccgttgtatattcgaaatttgagaagctttattgaagcggccaaaaagcacacgaatttgcgaaagagcaaggagatattatgtccgtacatcgactgtgataataagatagcttggagagatacaggagtaatccaatcacatctgctaaaaagagggtttaaaaacaattacacgatatggtcagaacatggtgagttggatccgtgtgaagtgcctggtaatgacgagagagttgtcggaattttagatcttaaagttgatggtaaagtggataatgtggatgctaatcaagattttgaagaatttgattgcgaagagatgttgcgccatatggaaccagaaatgttgagttctgtgggatcgcagaaagggctatctaaaatggagggactggaaagtgcttcaaaagaacctttatatgatgaatcaaagggttgtgacaaagagtttactacactgcgtacagttctagaacttctgaagttgaaggctagcgccggatggtcagatactagcttcacagatgttttgaattttctgtcccaattactaccaaaacccaacaaactaccaacaagcacttataaagcgaagaagcttatatctcccatagctctgggtgtgcaaaaaattcatgcatgtacgaaccattgtattctgtatcgtggcgattttgagaacgcatcaagatgcccagtttgcaatgtcagtcgatacaagagtgacgatgacacttttgatgacatggatgggaaaaagaagtcaaagaacccagctttggtgatgtggtatcttccagtaattgatcgcttaaaacgtttgttctcaaatcctagggaggctgagcttatgcgttggcatgctggaaatcgcaagcagaataaaaaacagattcgacaccctgctgatgcatcacaatggaaaaatttcgatcttatatttgctttgggtacagatggaatgaatccatttggtgaaaaaagaagtgtacatagcacctggcccgtgactttaacgatgtacaaccttccatcatggctgtgtcacaaaagaaagtacattatgttgactattcttattcaaggtccgaaatcagctggtgttgatattgatgtgttcctagaacctcttatggaagatatgacaaagctctggaatgaaggagttagaatatgggatgagtattgccatgagtatttcaacttaagagcaattatatttgttaccatccatgattctcccggtggcgccacactatcagggcaaaagactaaaggaaagaatggttgtgtagtgtgcgtcgatagaactacttccatgtaccttaaatcatccaagaagttggtgttcatgggacacagaagattcttgatgaagcagcataagtaccgaaagatgaaagcggaatttaacaatcaactggaaagtgaaggcgcaacaaagccttatagtgggaaacttgtttttgaaattgtaaagaacattcatgttgtattcggaaaggga

SEQ ID NO: 153286 - DNA, 1004 bp, Zea Mays
ctttcctttctcccagaacaagaagcagacccagggagaagtgaccaagtgtctcaagcaacctcccgtcctccccgccgccgcttcctcgtttctctcctccaatccacacccacccaccactctcctcttctcttctctcgaaaaaagaaccagctagcgagcaatccatatccccgccatgtccgcgtcgccggagttctacaagccagcgccgccggcgttctcgccgccgacgctcctcctgcacggggcaggggcggacgacagcgccgccgccgcgaccatgtggcaggaggatcaggactaccgctgccggacgccgacgggcggcgagagccaggtgaagccgccggggacgtgcccgccggcgccgcggaagccgcgggcgcccgcggcgtgccggaagcgcctgttcgaggtcgaagtgctcagcctgcggctggaggagctggagcagctcttctggcgcccgcgccccgcgcctccgccgccgccgcccgcccagaagaagaagcgccggagggtggcctgcacggggcccaacaagaagagcatctagatagctagggctagtagcttcgtgtactgtaggtgccagtagtggagatcgagtagcagcggtagctaggtgcagggccaagtggtcttggctggatgagatgagaggaggtgcatttcagtgcatgcatggtagtagggggtgttaggagtactgcgtttttttactgctgtactacagtctgctgttcctagatgctgttcactcgttcagttcagtgcatatatacgatgctagtgttgtggtcagagctccggctccagctcttatcaacaagccctactaacgcctctcaaaaagcccatgccattttcgaattagaaaccagaaccagagctttgctctgtctgtctctgttcctctcgaagatgctctataaacttattttactaaacgttcatgtaaatcgcttttaacttcattggataatctgcttcgcgtt

SEQ ID NO: 153287 - DNA, 1419 bp, Zea Mays
ccctcctcggacgccagcagcgggcgccaagtcttcgtcgtcgtccaggtagttttctttgagctttgtatgagcacggttgcgattttgacaccatagaaccttcagtatctacatatttgtaagttgaagcatgacaatgtgatggatcactgagagaatagctggcaactctaaaaaaatgatgaacatacgcggcgtgatgaaggaaacagattccttatgctgctgccagatctcaaaccttgagagacagcactgaggagatgaaatggcaggattctctttgtctatcattcaaaagatgctgcctcataccctctgtgtataaatagggtctcgatcggcagagacttgaatcatcaggcaaaaaagtccgcttctcatattacttctacctcatttcaaacacacaagaacttccagccagagactacaggtcgatatggcttgccaagtccataagcttgccgtccaggcctcagtccagcgaagccgcagtgcagcaggagatgtgtattctagaggcgatcatctcctcaccatcaacatgtatcgtcacgatgtgtgacggtttgaggaggcttggagacatctacagcagtgttgtggagatgactcacttgccgagcaaccaagtttgctcttcccagcaaaggaagatgctggacggagaaactgagtcttctctcgagctgctggatctctgcaacaccatgcaggagatcttcgttgagttgaaggccattatccaagagctgcaagtggctctaagaaaaggggatggtgcaaccgtccaagccaagatccagtcttacagccgcttggtgaagaaggctaagcagtctttcaagaagtcaagcaagaaggccgtttctgacaagacagactgtgcaatggtcaggctactgaccaaggccagggagatcgccatctctctacttgagtccacggtgcagctcttgtcaaagcaaattgaagtgccgaagcagtcacttgtctcaaaggcgttttccaagagaaaagcagttgtctgcgaggaggaccagttacaggcgttagagtgcagcattggagatcttgagagcggagcgggacacctgttcaggatattagtctagagcagggtctctctcctaaacattcttagctcatagatactccttgttgcttttgacatcctgtgattggcatcatccgcatttttgaggattagctaatcttgatgctgctttacaatatgtatatagagtacaaatgtatatgaaaaaatcggaaatgaaaaaaaggacagttttgatccaattccttttttgttgacgtggttttgtgcattcagtatggatcgctttgtttttagatccttggttagtggatcttgtccttcatacaagaagcatgccagatcacagccacaat

SEQ ID NO: 153288 - DNA, 537 bp, Zea Mays
ggcacaacagtcgccaccaccagtagatagactactccagctagctgtaatggagcatcaggagctggacctcgagctcagcctccagccctgctcggcctcggcggcggaggcggcgcctcccggcttcttcgtctgcacctactgcgaccgcaagttctacagctcgcaggcgctcggcgggcaccagaacgcgcacaagtacgagcgcaccctcgccaagcgccgccgggagatcgccgccgccatgcgcgcgcacggcgcccggcaggacgacgccgacgccgcctccgggcatcatgagatgatgaggtccaggctggtggaagcgcgtcaggtgcctgctgtgcactctgccgccttgctgcgcggcaggagcagctctctggagcacggcgtcgagcgcgccggcgagtcgctggatttgtctctgaagctatgacttttcgtttctctccactccagctgcatgcacgtcgccgttattgctgcctctttgcatatattagattcaatggaacccatggagtttgcttg

SEQ ID NO: 153289 - DNA, 2162 bp, Zea Mays
caacgccacaaagaactgctccatgtattgcggtagagtacatgtccacaatatctcagaatcaaatcttatgaaacttacataatctaaaattaatcttctaattaaaacctgatacagttagcatttacatgaaacaccttaacaaaacatcaaataaacaaacaaatagtagagtcattccactaataacacttctgcgttaacaatgttgtgcaactccagagtccagaggctaattcactctttcataaacaacacctgcatggttattttcacatgctcctgcacatttctggttaacaagactcccacgcatggaggtggtcaagctcgtataaaggtgataattagctctagattttacactattaaatttaatgattgaatcgaattagtatcgagctctattcctattcatttttaaagtaaaattaattgagctctaacttattgtgaataaacatttagataatgatcctttaccaccactaagctcgtatcaatcacaataacctcagaaccttctaaatctacatgagatgaacagtgaatcttcaaaaaacttgcgactgcggactcttcccaacaattcaatctttgtcatttggtttccccatcatggcaggcaagtacataaccgcaacttcaatcaccaatactcatttaatcaataaagcattggaacatgtgcatcagatcaaggtgttgaggaagatcgtgagcatgctctatcgcgttttttggatcattatgatctaaatcaatatgaccaaaaaacttccaactagtcataaaaaagttacagcttctaaagttttagatattagctactcataccaaagtacatatatctataataaccagttaaattagaaatcttatgcttaaaacaactacttcaaattagcttaatgttcccattcaaaaaatggtttaaagtttaaacataaacttgcatgtgtgttgcaacaacattgtaatcgaacaagtacatatgtatgttcagctacctaacctcagttcaacaatggttttggggtctgcttgtttggttcaaagcatgccactaagcagtctacaccccaggtacacaaaaaattccaaagcctggaattgcatgaagagccaggcaaagctgcctggattaaaaccaaacaggccaagattgaagcagggggataaaaccgatagtgtttggtggcaggggtagatgaataaagcaaaaatgtgcaactcggtgaaatttggcaggcaggagcaaagtttggtacatctagttcctgatgctaatttcattaaggccatgtgattctagtgctacttttttttatctaggatggcaatcacatatatcactgagaaggaagtagcccacatcttcgtggtaaagggaagtaacagctccttaggggggtttcgcgtaacatattcctggttttttgggtggcacataggaaacaagtatttcaaaaaaacgactaaactgaagctgaagcaggttccaaacaagcaaatacatgcagtctcaaatgcgacctttcgatacataggttcagaacatttgcggcagggctaaaaacataggcccagaagaagacataagtaatgtagtgtgaggaatatcaggtggtctatggcatccacacagtcctcctaagcttccaggttgggctctcttggccatctggtttgggaaggggctccaataagcaggctccaaacttcaatgtcttggctgtttttagtatgggaagggagcaagggggcaaaggtgaaacgagcaggtccatcagatacttgagttgggttcaatgtgttcaaaaggcaaaaaaaaaattaagccaggcaatgcataatcacataatcattctgacatatcgagaaaaggttgaagaatcatacctgctttatcaagcaatctaaatcctaataaccatgatgctttccatagtgaagagaactatgaccagataacctgatggaagttattatcagttacaaagaacagtgtgaacaactggctggaaaaaagacaaaacactaacagttgctatatacagctatgtaccagactgaatttctatactggtaaatcaaacattgaatagccctccttacccactactagaggagcgggcactgtatccgctgtaagccgc

SEQ ID NO: 153290 - DNA, 907 bp, Zea Mays
aaccattttgtatgaccgtataccaccccgcacccacccgaggtgattgggattgtgaagaagagaggagagaaggtgaagtggactgcacagcacacacaactcgtcctcggtcctccgtacccttccgcgctccgccccagcacgaaacgccgaaaccctaccctttggcttctccgtcctcgtcctcgcccccgcccatccgcgcaccagccgaatgtcgtcgggaggcggtggggggcagcagttccgctacacgcagacgccgtccaaggtgctgcacctgcggaaccttccgtgggagtgcgcggaagaggagctcgtcgagctctgcaagcctttcggccgcatcgtcaacaccaagagcggcgtcggcgccaaccacaaccaggcctttgtcgagttcactgacgttaatcaggcaatctcgatggtttcttatttcgcatcatcttcagaaccagcacaaatacgaggcaagactgtttatattcagtattcaaataggcaagaaataattaacaacaagagtcctggagagactgctggaaatgtcttgcttgttaccatagagggtgttcaatctagtgatgtcaccattgatgtgatccatatggttttctcggcttttgggtatgttcataaaatagccacctttgaaaaggctgcaggttttcaggcattgatccagtacactgatgcggctactgcttcagctgctaaagaatccttagatggaaggagcatcccaagttacttgcttccggagcatgtaacatcctgctgcctgcgaatttctttttctgcacataaggatttgaacatcaagtttcagtcgaaaccgcagcagttttcagatcgtctgatcgatcccactgggcgatcaggtgtcgatcagggcgattag

SEQ ID NO: 153291 - DNA, 198 bp, Zea Mays
atggatagaaacttgactgagttcagctacatgcatctgcatggataccctcaattccatttctgctatatattgcaaagtgtttcaaccaacacattagtgaatgagggaaaaaccattatcgggatggttgatgaggtgctggatgcagaggattcggggggtgcctgcatgagacattgtgatgttaaatgttaa

SEQ ID NO: 153292 - DNA, 230 bp, Zea Mays
gcctccttcattctgcttggaggagaacccaccaagcgtataacattccctcacgctaggattatgcttcaccaacctgctagtgcttattatcgggcaaggacaccaaaatttttactagaagtggaagagttacacaaagttcgcgaaatgatcacaagggtttatgcactaagaacaagcaagcctttttgggttgtatccgaagacatggaaagggatgtttttat

SEQ ID NO: 153293 - DNA, 552 bp, Zea Mays
atgtacatattaggtgttgctaaaagtccagcggctgaagttcaattcagcaccttcaccacggctcagatatatttgattttctctgagactggaggtcataatattcagcagttggtttcaaccatggtccccaggtatcccaagcattctaattttcgttctagacgattaagtgccagggagttaaatatgctgaagcgtaaagcaaagagtaatgccaaagatcatacaaaggctgtatctgaggatgatgaggttacactgaaaggatctgtgccctccaatggagcttcttctgaacaagttggtccacaaaatggtgtatttgatacagctgtcgaagaagacaatctggagtacaatgagaacggaagatggccttttcaacaatttgtggatcaacttattcatgatatgtttgatcctactcacccctctaaaggcgtttcgacatgtaaatcacagaaaaaactcaactccatatcacatctgagttctcatattcttgctccagaatgccgacgcatgaacaagaagaggacgggttag

SEQ ID NO: 153294 - DNA, 620 bp, Zea Mays
attttaaataaaaataaagctcgacgtcgtcgtcacctctctcgccgtccacgagtcacggcgagcggcgtcgacggcgggcgggggtcctggccgttcactgccatgcctgaccccaccaccaaacccccttcgccacgcccccgccgtcgccgcaggctctgcggcctctgcctcggcaccgcgctcctcgcgctcctcgtcgccgcgctcgtccatgtcgtcgccccgcttccgcgcgccgcttccgcctccgcgcgcttctccgtcatcatagacggaggcagcacgggcacccgggcccacgtcttcgtcacggggcacgacggcagcccggatctggcgctatccaccgtgatgcgcgtctccccgggcctctcgtccttcgccgccgacccggcgcgggccggggagtctttgaagccgctgatagattttgcgagggataagattgacggcgcgggcagcgccgctggggaggcggaggtgcgactcatggccaccgcagggctgcgcctgctcgaggagcgcacccaggaggcaatcttagcgtcctgcagggacgttctacgagcctctgggttccggttcgaggacgcgtgggccaaggtgatcccagg

SEQ ID NO: 153295 - DNA, 1083 bp, Zea Mays
cagcttgccttcgtttctgatgaagtacttccacccaaactgtcatataattatacttttattgaaacaacatacactctctataccaacagctttttaaactttggtcaaaatgcagctcaagactcgttccatgaaatgctgaggtcaagagaggatattcacgcaatgaagaaatgatgctgaggatgagtggtgcttcaaggtcaacattagagaaccagtatgttgataatgggactggaaactttacagaatgcatatcttcttcactgcttttactgcaaaaaggaaaggagaagtgccagtatcaacaatgtcacctgggatctactttcgtacctgagctgcgtggatacttcttggcaactgaaaatttctattttacatcaaagttctttggacttaagaagtcttcatcactctctgatttcatgtttgctggagaacaattttgcaatcaggatttgtccacccttagaaaaaaacatcctaataggtcagatgaagatttttcacggtattgcttctcgatggcatatattgtggctctactgcatgacagtcttggtgtatcactggatgataagaggattgagtattcaaaccaggttggagacattcaggttgaatgggctctaggagctttcatcacactgattcaaaatgcaagtttaaagccattacacaccgctgtggaatcaacccatagcaatagaccattgtttgctgtgctgggaatgtttcttttatgtggagtactttttgtatcaagatggaggaagcacaagacgaaagtcatatacgacttagagaaaggccggtacatcataacacacatcagctgatgctgaaccttgtgcagaagaactatatttatacgacaggaatagatgttgtgttgtacaacaatgtaccagttcaattatttgttttattttaggtagcagagctgggtgggtagagcatgaaatatagcacaaatgcgtatagaagaatgtgtagaacaagttgccatgtgttaattgaattattttggtgaataattatacctgttttgtttatcttatgagctccacattt

SEQ ID NO: 153296 - DNA, 1126 bp, Zea Mays
cagcttgccttcgtttctgatgaagtacttccacccaaactgtcatataattatacttttattgaaacaacatacactctctataccaacagctttttaaactttggtcaaaatgcagctcaagactcgttccatgaaatgctgaggtcaagaggctcttctgaaaatgctacacttgctgatccttgtgctcccagaggatattcacgcaatgaagaaatgatgctgaggatgagtggtgcttcaaggtcaacattagagaaccagtatgttgataatgggactggaaactttacagaatgcatatcttcttcactgcttttactgcaaaaaggaaaggagaagtgccagtatcaacaatgtcacctgggatctactttcgtacctgagctgcgtggatacttcttggcaactgaaaatttctattttacatcaaagttctttggacttaagaagtcttcatcactctctgatttcatgtttgctggagaacaattttgcaatcaggatttgtccacccttagaaaaaaacatcctaataggtcagatgaagatttttcacggtattgcttctcgatggcatatattgtggctctactgcatgacagtcttggtgtatcactggatgataagaggattgagtattcaaaccaggttggagacattcaggttgaatgggctctaggagctttcatcacactgattcaaaatgcaagtttaaagccattacacaccgctgtggaatcaacccatagcaatagaccattgtttgctgtgctgggaatgtttcttttatgtggagtactttttgtatcaagatggaggaagcacaagacgaaagtcatatacgacttagagaaaggccggtacatcataacacacatcagctgatgctgaaccttgtgcagaagaactatatttatacgacaggaatagatgttgtgttgtacaacaatgtaccagttcaattatttgttttattttaggtagcagagctgggtgggtagagcatgaaatatagcacaaatgcgtatagaagaatgtgtagaacaagttgccatgtgttaattgaattattttggtgaataattatacctgttttgtttatcttatgagctccacattt

SEQ ID NO: 153297 - DNA, 785 bp, Zea Mays
ctcttaatatgttgtacagattagccatggtcgattgtcagttcgctataccagtagtgattgactgatttttgtcactttcgtttttagggagtaggaacactagattcgtagactgtcgggccgcatcatcgccgatatgtggcctcacccgtgatataatcccttgcttgggttgggtgaacggtgaaaaagcgggagcggccgatcgggagctgctgggagctagttgggagccaaggcgtcgtcgtaggttgccgtctcgctgccgcccgccggccacagttgctgcggtgccgtcggccatatctgacggctgaccccttaccggcagttatcctcgtccctcacgcttccattcctgcgcctctcgaatctcgatggagggccgcctcttcgataagcccttgaacccgaataagctcctcaaggagcaattcgtgagcaacctgacggggtcttccctgctggagatcgcggcgctctccactgtcgttccggcattggtagttctcagaaagtggagcagcagaggtcagttcatctgaaatgctgtgaactctgctcttatattgtagctataaggcgtcactgaatcaatttccaccacagatctgcaagtgagatccactaatatgattgagaaatcagattactagtaggctgcaacttttgcagattgagttgtggatctgttttatgtaaatcgtgtattcaacaatgtagtccaagttattctacattgtcagcgtagaatatgtatacttttaactttctattaaaaa

SEQ ID NO: 153298 - DNA, 2810 bp, Zea Mays
ctcttaatatgttgtacagattagccatggtcgattgtcagttcgctataccagtagtgattgactgatttttgtcactttcgtttttagggagtaggaacactagattcgtagactgtcgggccgcatcatcgccgatatgtggcctcacccgtgatataatcccttgcttgggttgggtgaacggtgaaaaagcgggagcggccgatcgggagctgctgggagctagttgggagccaaggcgtcgtcgtaggttgccgtctcgctgccgcccgccggccacagttgctgcggtgccgtcggccatatctgacggctgaccccttaccggcagttatcctcgtccctcacgcttccattcctgcgcctctcgaatctcgatggagggccgcctcttcgataagcccttgaacccgaataagctcctcaaggagcaattcgtgagcaacctgacggggtcttccctgctggagatcgcggcgctctccactgtcgttccggcattggtagttctcagaaagtggagcagcagagataattctaggaaggagtcagcaaagaaaaatgatgatcaagttcatactgttcgtaaagattggatgcagtacttctctacactaggtgtagattatctcactgttgtattgccaattattttggttttcacagtcttatcggaatgggtttttatgtgtgctatttctcttgtaatcctgatatccatttacatcatgtttaaaaggtctcagtttcatcttaaagatggattcagtcagctgcctttgctcagggcagacatatcttcttaccgtgtctcagtggttctggtgacatgtttgtgcatattagctgtggacttcaaaatatttccaagacgctatgctaaggctgaaacatatggtagtggcatcatggatcttggagtaggatcttttgtagtggctaatgcactggtatctagacaagcacgaaatatagcctcaatgagtttcaaggcagttctttgttcgataagtccactcttatctcttggctttgctcgcattatatccacatggggtgttgattatcaggtccatgtaggagaatatggtgtgcattggaacttctttttcaccctcgcagctgtctctatccttacatccgttgtcagaattcatccaaaacattgtggcttagttggtctgcttatccttgctggataccagatttggctgtcttctggattgaatgagtacctcatttctcacaaaagaagtgctgatataatcacccagaataaggagggcatttatagcatccttggatactggggtatgtttctaattggtgtttctttgggtttctatctgttcgttgacactagttcaaagggcaagaaccggaacactcaagtcatgcaaatctgggttcttgctgcttctttttggattttggcaatcatctttgatagctacattgagagagtttctcgtcgaatgaggacatatattggacttctctttaacaatatgaactttatctgacagtgcctacaaattaacctataatgaggccaaagaaaggcaaggtgttaggtgcatattattagatgcattcttatatgctttaaatattttgtaatctttcagtcagtatgtcgtacatgtttccacttgatataatgtgcacagaatggttcaaaattccactattgattgctttgcctgctaatgttactgttttatgatttgggagcaactttgccatattatcagacccatggatagtagcaagggggtttgcaaagccatgaaatttactacttacccaagtaaataaacctgctttcctatgagtaccaacaatgggtttgtctggtttttttctttagttgtttggtctattatttttgttcacgcttcaggttagcttcactgttcatgctgactgattgtccaatataggttttatctatcctcacattagctgggtttgcctcatataaaaagaacttggttcttgaagatgcattcaatgaaaatatgcttggctccttccttctggcaaatatccttactggtctggttaatctctcagttaacacgctctctgcctcttccttcactgccttcatgattctgtcagtatacgcctttactttatgcatggttactggccttacccatttttgtggtgttaggatgaaattctggtgaattgtaagctaccatttgatatgatgtattcattcattaacttgtcaacaaactggtagctagcttgcttgaaatataatactacgtctgttcttgaatatttgtcgcccggtagtttatttttcaactaaaacgtgacaaataaaaaagtctgaataatttttagggaaagaagccaaattgctatcctaattagttgatccagttattaactctgcctagactcgggagcttacttctttcatgtgtgttcaaggttctttgtgtctcatcagaaacttcctagtttccttcatttcatggtacaacgtgtctgctggtattaatcaataccgctatttacttttgacctaaagacgacacatccacccacggtatatgtgttgacgaattgaagatggtctgtcaagagtttgctgtttcagtatttaatgtcagtcagaatcaggcttgaagtaccataggttcatactgctacagttacccacttgtcacagataaaacagtgggtccaggaaagcagtgctgtagtcgaatgttacttgctggatttctgcagatgacagagagaatttgagcactatgacattcatgacagatagtacatactcg

SEQ ID NO: 153299 - DNA, 2390 bp, Zea Mays
ctcttaatatgttgtacagattagccatggtcgattgtcagttcgctataccagtagtgattgactgatttttgtcactttcgtttttagggagtaggaacactagattcgtagactgtcgggccgcatcatcgccgatatgtggcctcacccgtgatataatcccttgcttgggttgggtgaacggtgaaaaagcgggagcggccgatcgggagctgctgggagctagttgggagccaaggcgtcgtcgtaggttgccgtctcgctgccgcccgccggccacagttgctgcggtgccgtcggccatatctgacggctgaccccttaccggcagttatcctcgtccctcacgcttccattcctgcgcctctcgaatctcgatggagggccgcctcttcgataagcccttgaacccgaataagctcctcaaggagcaattcgtgagcaacctgacggggtcttccctgctggagatcgcggcgctctccactgtcgttccggcattggtagttctcagaaagtggagcagcagagataattctaggaaggagtcagcaaagaaaaatgatgatcaagttcatactgttcgtaaagattggatgcagtacttctctacactaggtgtagattatctcactgttgtattgccaattattttggttttcacagtcttatcggaatgggtttttatgtgtgctatttctcttgtaatcctgatatccatttacatcatgtttaaaaggtctcagtttcatcttaaagatggattcagtcagctgcctttgctcagggcagacatatcttcttaccgtgtctcagtggttctggtgacatgtttgtgcatattagctgtggacttcaaaatatttccaagacgctatgctaaggctgaaacatatggtagtggcatcatggatcttggagtaggatcttttgtagtggctaatgcactggtatctagacaagcacgaaatatagcctcaatgagtttcaaggcagttctttgttcgataagtccactcttatctcttggctttgctcgcattatatccacatggggtgttgattatcaggtccatgtaggagaatatggtgtgcattggaacttctttttcaccctcgcagctgtctctatccttacatccgttgtcagaattcatccaaaacattgtggcttagttggtctgcttatccttgctggataccagatttggctgtcttctggattgaatgagtacctcatttctcacaaaagaagtgctgatataatcacccagaataaggagggcatttatagcatccttggatactggggtatgtttctaattggtgtttctttgggtttctatctgttcgttgacactagttcaaagggcaagaaccggaacactcaagtcatgcaaatctgggttcttgctgcttctttttggattttggcaatcatctttgatagctacattgagagagtttctcgtcgaatgtgcaacttcgcttatgttatgcttgtttttggccagaattttcaggttttatctatcctcacattagctgggtttgcctcatataaaaagaacttggttcttgaagatgcattcaatgaaaatatgcttggctccttccttctggcaaatatccttactggtctggttaatctctcagttaacacgctctctgcctcttccttcactgccttcatgattctgtcagtatacgcctttactttatgcatggttactggccttacccatttttgtggtgttaggatgaaattctggtgaattgtaagctaccatttgatatgatgtattcattcattaacttgtcaacaaactggtagctagcttgcttgaaatataatactacgtctgttcttgaatatttgtcgcccggtagtttatttttcaactaaaacgtgacaaataaaaaagtctgaataatttttagggaaagaagccaaattgctatcctaattagttgatccagttattaactctgcctagactcgggagcttacttctttcatgtgtgttcaaggttctttgtgtctcatcagaaacttcctagtttccttcatttcatggtacaacgtgtctgctggtattaatcaataccgctatttacttttgacctaaagacgacacatccacccacggtatatgtgttgacgaattgaagatggtctgtcaagagtttgctgtttcagtatttaatgtcagtcagaatcaggcttgaagtaccataggttcatactgctacagttacccacttgtcacagataaaacagtgggtccaggaaagcagtgctgtagtcgaatgttacttgctggatttctgcagatgacagagagaatttgagcactatgacattcatgacagatagtacatactcg

SEQ ID NO: 153300 - DNA, 2356 bp, Zea Mays
ctcttaatatgttgtacagattagccatggtcgattgtcagttcgctataccagtagtgattgactgatttttgtcactttcgtttttagggagtaggaacactagattcgtagactgtcgggccgcatcatcgccgatatgtggcctcacccgtgatataatcccttgcttgggttgggtgaacggtgaaaaagcgggagcggccgatcgggagctgctgggagctagttgggagccaaggcgtcgtcgtaggttgccgtctcgctgccgcccgccggccacagttgctgcggtgccgtcggccatatctgacggctgaccccttaccggcagttatcctcgtccctcacgcttccattcctgcgcctctcgaatctcgatggagggccgcctcttcgataagcccttgaacccgaataagctcctcaaggagcaattcgtgagcaacctgacggggtcttccctgctggagatcgcggcgctctccactgtcgttccgataattctaggaaggagtcagcaaagaaaaatgatgatcaagttcatactgttcgtaaagattggatgcagtacttctctacactaggtgtagattatctcactgttgtattgccaattattttggttttcacagtcttatcggaatgggtttttatgtgtgctatttctcttgtaatcctgatatccatttacatcatgtttaaaaggtctcagtttcatcttaaagatggattcagtcagctgcctttgctcagggcagacatatcttcttaccgtgtctcagtggttctggtgacatgtttgtgcatattagctgtggacttcaaaatatttccaagacgctatgctaaggctgaaacatatggtagtggcatcatggatcttggagtaggatcttttgtagtggctaatgcactggtatctagacaagcacgaaatatagcctcaatgagtttcaaggcagttctttgttcgataagtccactcttatctcttggctttgctcgcattatatccacatggggtgttgattatcaggtccatgtaggagaatatggtgtgcattggaacttctttttcaccctcgcagctgtctctatccttacatccgttgtcagaattcatccaaaacattgtggcttagttggtctgcttatccttgctggataccagatttggctgtcttctggattgaatgagtacctcatttctcacaaaagaagtgctgatataatcacccagaataaggagggcatttatagcatccttggatactggggtatgtttctaattggtgtttctttgggtttctatctgttcgttgacactagttcaaagggcaagaaccggaacactcaagtcatgcaaatctgggttcttgctgcttctttttggattttggcaatcatctttgatagctacattgagagagtttctcgtcgaatgtgcaacttcgcttatgttatgcttgtttttggccagaattttcaggttttatctatcctcacattagctgggtttgcctcatataaaaagaacttggttcttgaagatgcattcaatgaaaatatgcttggctccttccttctggcaaatatccttactggtctggttaatctctcagttaacacgctctctgcctcttccttcactgccttcatgattctgtcagtatacgcctttactttatgcatggttactggccttacccatttttgtggtgttaggatgaaattctggtgaattgtaagctaccatttgatatgatgtattcattcattaacttgtcaacaaactggtagctagcttgcttgaaatataatactacgtctgttcttgaatatttgtcgcccggtagtttatttttcaactaaaacgtgacaaataaaaaagtctgaataatttttagggaaagaagccaaattgctatcctaattagttgatccagttattaactctgcctagactcgggagcttacttctttcatgtgtgttcaaggttctttgtgtctcatcagaaacttcctagtttccttcatttcatggtacaacgtgtctgctggtattaatcaataccgctatttacttttgacctaaagacgacacatccacccacggtatatgtgttgacgaattgaagatggtctgtcaagagtttgctgtttcagtatttaatgtcagtcagaatcaggcttgaagtaccataggttcatactgctacagttacccacttgtcacagataaaacagtgggtccaggaaagcagtgctgtagtcgaatgttacttgctggatttctgcagatgacagagagaatttgagcactatgacattcatgacagatagtacatactcg

SEQ ID NO: 153301 - DNA, 2316 bp, Zea Mays
ctcttaatatgttgtacagattagccatggtcgattgtcagttcgctataccagtagtgattgactgatttttgtcactttcgtttttagggagtaggaacactagattcgtagactgtcgggccgcatcatcgccgatatgtggcctcacccgtgatataatcccttgcttgggttgggtgaacggtgaaaaagcgggagcggccgatcgggagctgctgggagctagttgggagccaaggcgtcgtcgtaggttgccgtctcgctgccgcccgccggccacagttgctgcggtgccgtcggccatatctgacggctgaccccttaccggcagttatcctcgtccctcacgcttccattcctgcgcctctcgaatctcgatggagggccgcctcttcgataagcccttgaacccgaataagctcctcaaggagcaattcgtgagcaacctgacggggtcttccctgctggagatcgcggcgctctccactgtcgttccggcattggtagttctcagaaagtggagcagcagagataattctaggaaggagtcagcaaagaaaaatgatgatcaagttcatactgttcgtaaagattggatgcagtacttctctacactaggtgtagattatctcactgttgtattgccaattattttggttttcacagtcttatcggaatgggtttttatgtgtgctatttctcttgtaatcctgatatccatttacatcatgtttaaaaggtctcagtttcatcttaaagatggattcagtcagctgcctttgctcagggcagacatatcttcttaccgtgtctcagtggttctggtgacatgtttgtgcatattagctgtggacttcaaaatatttccaagacgctatgctaaggctgaaacatatggtagtggcatcgagtttcaaggcagttctttgttcgataagtccactcttatctcttggctttgctcgcattatatccacatggggtgttgattatcaggtccatgtaggagaatatggtgtgcattggaacttctttttcaccctcgcagctgtctctatccttacatccgttgtcagaattcatccaaaacattgtggcttagttggtctgcttatccttgctggataccagatttggctgtcttctggattgaatgagtacctcatttctcacaaaagaagtgctgatataatcacccagaataaggagggcatttatagcatccttggatactggggtatgtttctaattggtgtttctttgggtttctatctgttcgttgacactagttcaaagggcaagaaccggaacactcaagtcatgcaaatctgggttcttgctgcttctttttggattttggcaatcatctttgatagctacattgagagagtttctcgtcgaatgtgcaacttcgcttatgttatgcttgtttttggccagaattttcaggttttatctatcctcacattagctgggtttgcctcatataaaaagaacttggttcttgaagatgcattcaatgaaaatatgcttggctccttccttctggcaaatatccttactggtctggttaatctctcagttaacacgctctctgcctcttccttcactgccttcatgattctgtcagtatacgcctttactttatgcatggttactggccttacccatttttgtggtgttaggatgaaattctggtgaattgtaagctaccatttgatatgatgtattcattcattaacttgtcaacaaactggtagctagcttgcttgaaatataatactacgtctgttcttgaatatttgtcgcccggtagtttatttttcaactaaaacgtgacaaataaaaaagtctgaataatttttagggaaagaagccaaattgctatcctaattagttgatccagttattaactctgcctagactcgggagcttacttctttcatgtgtgttcaaggttctttgtgtctcatcagaaacttcctagtttccttcatttcatggtacaacgtgtctgctggtattaatcaataccgctatttacttttgacctaaagacgacacatccacccacggtatatgtgttgacgaattgaagatggtctgtcaagagtttgctgtttcagtatttaatgtcagtcagaatcaggcttgaagtaccataggttcatactgctacagttacccacttgtcacagataaaacagtgggtccaggaaagcagtgctgtagtcgaatgttacttgctggatttctgcagatgacagagagaatttgagcactatgacattcatgacagatagtacatactcg

SEQ ID NO: 153302 - DNA, 2087 bp, Zea Mays
gcggccgatcgggagctgctgggagctagttgggagccaaggcgtcgtcgtaggttgccgtctcgctgccgcccgccggccacagttgctgcggtgccgtcggccatatctgacggctgaccccttaccggcaattcgtgagcaacctgacggggtcttccctgctggagatcgcggcgctctccactgtcgttccggcattggtagttctcagaaagtggagcagcagagataattctaggaaggagtcagcaaagaaaaatgatgatcaagttcatactgttcgtaaagattggatgcagtacttctctacactaggtgtagattatctcactgttgtattgccaattattttggttttcacagtcttatcggaatgggtttttatgtgtgctatttctcttgtaatcctgatatccatttacatcatgtttaaaaggtctcagtttcatcttaaagatggattcagtcagctgcctttgctcagggcagacatatcttcttaccgtgtctcagtggttctggtgacatgtttgtgcatattagctgtggacttcaaaatatttccaagacgctatgctaaggctgaaacatatggtagtggcatcatggatcttggagtaggatcttttgtagtggctaatgcactggtatctagacaagcacgaaatatagcctcaatgagtttcaaggcagttctttgttcgataagtccactcttatctcttggctttgctcgcattatatccacatggggtgttgattatcaggtccatgtaggagaatatggtgtgcattggaacttctttttcaccctcgcagctgtctctatccttacatccgttgtcagaattcatccaaaacattgtggcttagttggtctgcttatccttgctggataccagatttggctgtcttctggattgaatgagtacctcatttctcacaaaagaagtgctgatataatcacccagaataaggagggcatttatagcatccttggatactggggtatgtttctaattggtgtttctttgggtttctatctgttcgttgacactagttcaaagggcaagaaccggaacactcaagtcatgcaaatctgggttcttgctgcttctttttggattttggcaatcatctttgatagctacattgagagagtttctcgtcgaatgtgcaacttcgcttatgttatgcttgtttttggccagaattttcaggttttatctatcctcacattagctgggtttgcctcatataaaaagaacttggttcttgaagatgcattcaatgaaaatatgcttggctccttccttctggcaaatatccttactggtctggttaatctctcagttaacacgctctctgcctcttccttcactgccttcatgattctgtcagtatacgcctttactttatgcatggttactggccttacccatttttgtggtgttaggatgaaattctggtgaattgtaagctaccatttgatatgatgtattcattcattaacttgtcaacaaactggtagctagcttgcttgaaatataatactacgtctgttcttgaatatttgtcgcccggtagtttatttttcaactaaaacgtgacaaataaaaaagtctgaataatttttagggaaagaagccaaattgctatcctaattagttgatccagttattaactctgcctagactcgggagcttacttctttcatgtgtgttcaaggttctttgtgtctcatcagaaacttcctagtttccttcatttcatggtacaacgtgtctgctggtattaatcaataccgctatttacttttgacctaaagacgacacatccacccacggtatatgtgttgacgaattgaagatggtctgtcaagagtttgctgtttcagtatttaatgtcagtcagaatcaggcttgaagtaccataggttcatactgctacagttacccacttgtcacagataaaacagtgggtccaggaaagcagtgctgtagtcgaatgttacttgctggatttctgcagatgacagagagaatttgagcactatgacattcatgacagatagtacatactcg

SEQ ID NO: 153303 - DNA, 2056 bp, Zea Mays
gtaagttcagggtccctagcccacgaatcgaggctgcggttctagtcgctcccttctcgccttacggctctaattaacccatcccctgccttggtgatgcagattcgtgagcaacctgacggggtcttccctgctggagatcgcggcgctctccactgtcgttccggcattggtagttctcagaaagtggagcagcagagataattctaggaaggagtcagcaaagaaaaatgatgatcaagttcatactgttcgtaaagattggatgcagtacttctctacactaggtgtagattatctcactgttgtattgccaattattttggttttcacagtcttatcggaatgggtttttatgtgtgctatttctcttgtaatcctgatatccatttacatcatgtttaaaaggtctcagtttcatcttaaagatggattcagtcagctgcctttgctcagggcagacatatcttcttaccgtgtctcagtggttctggtgacatgtttgtgcatattagctgtggacttcaaaatatttccaagacgctatgctaaggctgaaacatatggtagtggcatcatggatcttggagtaggatcttttgtagtggctaatgcactggtatctagacaagcacgaaatatagcctcaatgagtttcaaggcagttctttgttcgataagtccactcttatctcttggctttgctcgcattatatccacatggggtgttgattatcaggtccatgtaggagaatatggtgtgcattggaacttctttttcaccctcgcagctgtctctatccttacatccgttgtcagaattcatccaaaacattgtggcttagttggtctgcttatccttgctggataccagatttggctgtcttctggattgaatgagtacctcatttctcacaaaagaagtgctgatataatcacccagaataaggagggcatttatagcatccttggatactggggtatgtttctaattggtgtttctttgggtttctatctgttcgttgacactagttcaaagggcaagaaccggaacactcaagtcatgcaaatctgggttcttgctgcttctttttggattttggcaatcatctttgatagctacattgagagagtttctcgtcgaatgtgcaacttcgcttatgttatgcttgtttttggccagaattttcaggttttatctatcctcacattagctgggtttgcctcatataaaaagaacttggttcttgaagatgcattcaatgaaaatatgcttggctccttccttctggcaaatatccttactggtctggttaatctctcagttaacacgctctctgcctcttccttcactgccttcatgattctgtcagtatacgcctttactttatgcatggttactggccttacccatttttgtggtgttaggatgaaattctggtgaattgtaagctaccatttgatatgatgtattcattcattaacttgtcaacaaactggtagctagcttgcttgaaatataatactacgtctgttcttgaatatttgtcgcccggtagtttatttttcaactaaaacgtgacaaataaaaaagtctgaataatttttagggaaagaagccaaattgctatcctaattagttgatccagttattaactctgcctagactcgggagcttacttctttcatgtgtgttcaaggttctttgtgtctcatcagaaacttcctagtttccttcatttcatggtacaacgtgtctgctggtattaatcaataccgctatttacttttgacctaaagacgacacatccacccacggtatatgtgttgacgaattgaagatggtctgtcaagagtttgctgtttcagtatttaatgtcagtcagaatcaggcttgaagtaccataggttcatactgctacagttacccacttgtcacagataaaacagtgggtccaggaaagcagtgctgtagtcgaatgttacttgctggatttctgcagatgacagagagaatttgagcactatgacattcatgacagatagtacatactcg

SEQ ID NO: 153304 - DNA, 1422 bp, Zea Mays
gcctctggaacctgaaccttgtcttgatttcttttcatacaccatccaccgggcgaagctgttggccggcggcatcgtcgacgacagaccgcgcggcggcgattccgacccatccatggggcggccgccgtgctgcgacaaggagagcgtgaagaaggggccgtggacgcccgaggaggacctggtcctcgtctcttacgtccaggagcacggccccggcaactggcgcgcagtccccgccaacacagggctgctgcggtgcagcaagagctgccgcctccggtggaccaactacctccgcccgggcatccgccgcggcggcttctccgaccaggaggacaggctcatcgtccacctccaggcgctcctcggcaaccgctgggccgccatcgcctcctacctccccgaccgcaccgacaacgacgtcaagaactactggaacacgcacctcaagaagaagctcctcgctcagcagcagcagcagctgcgcgcctcgccgtcgccgcccaaggggcagtgggagctcaagctgcagaccgacatcaacctcgccaggcgcgccctgcgcgacgccctctccatcgacgccggcccgccagggatggccgtcgcgggctcggcggcgccggcgccgtccgccggcccagcagcgccacaacaagcgtacgctctcaccgcgcgcagcgtcgacaggatgatgctggacgggtgggcggcggcggctccagcggcagggaggaggagctgcgtcgtcggtggcaccgtcgtcatcccggccccggcgacgacgcccggcgcggccgagagcgcgtcgaggtcgtcgtcggagctaacgacggcggagtgttctgcctccatctccagcgcctccgatcagcgcgccgcgccggtggccgaccaccagctgctcgcgtccgaggagaataattatacggcgtcggccgtgcagcagggagaggtgccgctgtcggcgatcgagtcgtggctgctggaggacgccggcgccggcgagcagaagctggcgcacgatggccccctgctcgatgccgcgctgcatagttttggcttctagtaaaatgtcaaaatgtgttactagaaatcgagtgtggttaattatgccagtcggtgccactactagctagtccttttctgccctactaatttagctcactagctgttctacttgtcatccgtagtacacagatgacgatttgtgtcactgcatgaagcaatgtgcaagtgggtgatcgtgatatatatactacgtcgaaagtgaaatgtaacacgatccgtctgctcgttttgtcactgcatgaagcaatgtgcaagtgggtgtgtctttattgtagtttttgagaaacgagtcgttctattttgcgtttgtcaaacatatcacatcagagtcactcattcttttggttg

SEQ ID NO: 153305 - DNA, 309 bp, Zea Mays
tttttagttttttttgttatgtcctttagacatgtgtttatgtggcatgtgattcttcttagtttgaccgctagtgcaactttggtttgttttcgtgcttgtgtgctggtagaatgcaggtagtttgtttgcataaacccaaagctaggtcatgtcctcgtttagtgaaccataacccaaatcgtcatcaatcctccaaaaattcctccaagtctccaagcatggatgagttcgagtttctcgttactactccatgaccgcttagataagctttttattggatgtaaaatgaacgttgacttaaaataa

SEQ ID NO: 153306 - DNA, 3704 bp, Zea Mays
aggcaaattgtggcaattgaggtaacgaaccaaacatgcccctagtgcatcgttacattacatccacctgcctgctatcctcctacagctaagcgaagaagctaacaccctgccctgtccatcatcgcccacgaatctcctgcagactcctcaattgtatcccttcatctccagcaacgcatgagaatacctctatgccctgtccatcgccggcatgcttgagcagcagacacagacagcttcaggtgaagtgcctgctgccgtccttcccagcctcaacactccgagggcgtcacgtcagctcctgttgtgaatcgggtccgagccccgccggaccttccacttgctcgtctgcgccgcgccaacggccgtcgccgtgacgagccgcttccctgtccaagagctgccgccgccgccgccgcctgccgcgggtgcctctgctggcgtcggcgcccgatcacggccgaggaccacgtcctctctcctcaggccgctcaccacggcagcagggtgtgccgccaggaggcagacaaaggccgatatggcgaacagccttgaccaccttcttgcgctcgccatgctgctgctgctgctgccgccgctcagctggagacatgcagcttgtgctgcctgctgctgtgctttggctctagcggcttggttgatgcagtacaatcatcagtcacagcactgtcctgtctgtagatatagcacaacaaccccaaggccacgccgggtcccaaagcacaacaaaggggcaagggacggcacgacatgtctaaggctgctcatagaaggttctgagaccctgacaggtacattttgcaaaagccattggaggactggatggccatgtagggcacaaccagagcaccagcaaagaaccaaccaagcccttgctttagacctctgtttgttgccatctgcgccatctgcctttacctattactactgtcttcagtaaaaaaaaacaaccaacaaacaaacaaacaaacaaaactgaagcattcatgcataggtagagagtagaggctgtggtagccagcagacaccagtacaacccaagtctttgcgcttttgtatgctttccattccatctcttgcgcttgcccttcttgcaagaagcacccttttcgctttgaatcttccaaggccaccaaagctacccattcaaacttaaaggacctgcaccgagtttcaatagcttctttctttcctcacgtttctccatgtaagatgatacgctaacacccaatgctttgcctgctttggcgcagaacgcagagagagagagagggtgaatcttaaagcaagttttagggatccaacgggtgtggtttcttggtcatggtccaaggatgacatttttatcagagtgccaaagttgaaagataagggggggaaaacagaaactaacgtcttttaaagtaaagatagggacagcttacctgcaaatatactgatttattgagtgccgagcacttagatgcagaaaacaagtagatgaatagctataaattgatgcaagattatgataagatcccaatatattccctgcttgtgaagtgggcaagggagcccacaagatcgccctagctgcaaaaggaaaggaggaaaaaattaaaggtgggtggaggaatgaattttccatgatttggccggccttttctttggacagattcctaaagtgctaattcagttatcttattttgaaaggtaaaagatttccacattcatgtcttgctaaaggaccaataaactaacaatcaacaggctttcgtctaggtctctaggacggcaagttagttacacacaaaaaattgggatcctattatacaaaagagcaatcatatcatgctagttatggaacaaaattaggtctacagatcctaggtcataaaaggcaatggaaagcaacaaattcagatttacttctctgctaaggaataggtaatgcaacattggccagagttagtgagttattaccagataaaaagagccatgatcttaaagcagataacatgttgatccgatcacagtaatgatggtgccctgattaaagtaacatcacagctgattccaaatggcatggttatttttctcttggtcatagttacttgcaaagttatgttatatgctagtaaagacgtactagtacagaacaaaccaacttttaccaaagattgcattggagctaaggcatgtccttttacttctctttaatctgagctgttaagacataatgcttgcattcactaactacccataatttaatctgaaacagattttgtaaaattgatagtgcagcaacttagagcgtttcatctaatctacttagaaaaatgacaaaaaatttaatctgaaacggattgtgtaaaattgatagtgcaacaacttagagcatgtcatctaatctacttagaaaaatgactcgtacggcacttaattgctcacaactgcatatggagacacgtccgtggtccacatatgatcaatattttgcaggacattagagatgaggctaacccatggtgcatggtgggtccaaatgccttaaaagcatttgaccatgattctgttattaggtcattgattgaggttttttggcattttctcttgttctttggacctttgcgctaatgggcatgtatgagtattctgtctcttttcttcttaattaaaatgacacccagatctcctgcatgatcaagaaaaaagaatcgtccatatccatcttcgtaattgatacaagaaaatttgcaaattatggtgaaaagcatcagttgttactgtgaacaaagtagccctacattcttttttaacgtaaaaagaagcccaacattcaattctcagatttccaagatatgctttgtattcccatgaaaataggtattcttactcataagtagcttaatcgaagacaactgcatagttgcttgaagtcctacaaatggatcgataatttttgtctctattctctataccttattgaagtgcatttgtcctgatgctattttcagtctaaaagagtagtttagactgagaaccgtaccgccttaagtacgccactgaaaaattgtagctggtgggcaaacagaaagatgttcaacaaaaggtaaaggtgaaagagaaagtacaacatgttcaaatgaaccttcatacccttgcttcggtgaaaagcgagcggtctgttcggactagacttgtccacacctgcaaaaatgccaccagatcacctgataaaatcatatgattttcaattggggttaaaaccgtttttgtgatgtttctatgccttgacaaagagaatctgcaaacttcagtgactcttgtaacaaaatgttaccactaagtgatcgcaagaaaaaacagaatatttcaggcaggaaacaagcccagatcaagagattccttcttggcgtttgaaatggaagcagcgagcgcacggggattgtgaagcaaagcagtggtttgccctggagcatctccactgcacgtccctgtgtgatgccaatttcttgctccatttatgccagagaagaagcgacggccgaagaagccacaccacgctttcgccctgccctaaaagtcatggctactcggctaggcattccgtcgagcagatgggcagcgccctgtatcaacagaggcgcacgacgcaggggcggcaatttgcatcggcgaggctgcggcggtgcggcctg

SEQ ID NO: 153307 - DNA, 2012 bp, Zea Mays
ggcaaagtagcaattttttcgactgcgagacgacaccgggaagagagaggagccgcccgccgccgcctcaggcctcagtccagacccctcgtctcactcgctccgccgctggcgattggtgaagagagctccgaggtgggctctactcgtcgcggttctcgcgaggtccgccgatccgcgccccgctctggatctctggctgatttgttgttctgcaagggtgtggtatggcacgaaacttgactgagaacaggaccagaaatacactaattgtgattgtggtttttggcctctgttccttcttctatctcttgggtgcttggcagaaaagtggttctggaggaggagacagaatacagaattgggtcaatgagcagaccaaatgtgcacaacttccaaatctgagttttgagacccatcatagtgcatccaaccttccaaatgatactggtagttccaaaatcgaacctttcaaaccatgtgatgagcagtacactgattacactccttgtgaggagcaaaagcgtgcgatgaccttccctagagataacatgatctatcgggagaggcattgtccaccggataaggagaagctttattgcctgatcccagcaccaaagggttatgttgctccttttcgatggccaaagggccgtgattttgttccttatgccaatgtaccacacaagagccttactgttgagaaggctatccagaactgggtgcactatgagggcaatgttttcaggtttcctggtggtggaacacagtttcctcagggtgcagataaatatatagagcagcttgcttctgtcatcccgatagctgaagggaaagtgagaactgcactggatactggttgtggggttgcgagtttgggtgcttacctgttgaataaaaatgttttgaccatgtcatttgcaccacgggataatcatgaggcacaagtacagtttgcattggagagaggtgtccctgcatatattggtgtcctcggatcaataaagctgccatttccatctcgtgtttttgacatggcccattgctcgagatgtttaattccatggagtggaaatgatggtatgtacatgatggaagttgacagagtactaaggcctggtggattttgggtgctatcaggcccacccattggctggaagattcactataaagggtggcaacgttcaaaggaagatcttcggaatgagcaaagaaaaatagaacacttcgcacaacttctttgttggaagaaggtatctgagaaggatggtatcgccatatggacaaagaggttaaatgacaagtcttgctccatgaaacaagataatccaaatggtggtaaatgtgatttgacaagcgacagtgatgtgtggtacaagaagatggaagtttgtatgacccccctacccgaggttaatagtgtagatgaggttgccggtggtcaactagagccttttcccaagaggctttatgcagtacctcctcgtataaccgatggctctgtgcctggtttctcagttgagtcatatgaagaggacaataacctttggcggaaacatgttaaggcttacaagaaaatcaataacttgcttgatactggaagatatcgcaatataatggatatgaatgctggtctcggtagctttgctgctgcactagaatctccaaaagtatgggtcatgaatgtcattccaacaattgcaaatacttccactttaggtgtaatctacgagcgtggattaataggaatgtatcatgactggtatgttgtattaacagtagttacattctacttttataatctggataactttccttatgctgttagatgggtagggttggtgcgggggcaattcgctcgacgggttagcatagctgtggggagcagcagcggctctgactgcaggaaatgggggagggcgagatggaggctgccactggagataggaggaggtgagcaggtggagccctgggacccttcttgggaaatggtcgaaggaagaataaggtag

SEQ ID NO: 153308 - DNA, 814 bp, Zea Mays
caggtgtgaaggattttctacttatccaaggacatatgacctcatacattctaatgatatcttcagcttgtaccaaaacaagtgccaatttgaagatatactcctggaaatggacagaatcttacgcccagagggtgcaatcataattcgtgacaaggttgatgttcttgtaaaagtggagaagatagccaatgccatgaggtggaagacaagattggctgatcatgagggtggccctcatgtacctgagaagatactcttcgcggtcaagcaatactggactgctgaaaaaacaagcagctaacgttgttcattttcatttttttctccagtcacagctaacttgccccctggctgtgtttattggaaaaatttctgtcgattatacagcccatgtttgttactgaaaatataaaacaacccccttgagggggagtaaattatgtgggatttagctgtgaacttgggatttgattattccactggtgccgagacgcagaagacatgccaaaaggatcaattggcattgtactagtgactcatatctgatcagacagatgcaactgcttatagttggaaccctgcagcagtccgtcaggaagttatgaactagcagtgaacttatagttttgtataggactcctttgcccctccactcactttttttttgttgtatctcagaatttcatcaactggattgtatctcaacccataaggtcttcctatcctattttattttaattgacaaacattttgggcccaaggatgcaacttgtgaccttggttactaatgagatgataatgttttcttttt

SEQ ID NO: 153309 - DNA, 983 bp, Zea Mays
gccacacccctcacaaaccacaaacacatctcgcggcggcggcggcggcagagacaggcggcggccgccgagcggcgtgggcagcgtcatccatggtgcacgtgaacttctatcgcaactatggtaagactttcaagaagccaaggcggccttatgagaaggagcgccttgatgctgagttgaaattagtgggtgaatatggcctgaggtgcaagcgtgagctgtggcgtgtgcagtatgccctcagccgcatccgaaatgctgcaagggagctgctcacccttgatgagaagaacccccgtcgtatctttgagggcgaggcactcctgcgccgcatgaaccgctatggtcttctcggtgagggccagaacaagcttgactatgtgcttgcactcaccgttgagaactttctgcagcgccgccttcagaccattgtcttcaagaatggcatggcgaagtccattcatcatgctcgtgtgctcatcaggcaacgccacattagagttgggaggcaacttgtcaacattccctcattcatggtgagagttgactcagagaagcacatcgacttctctcttaccagcccacttggtggtggagaacctggaagggtgaagagaaagaaccaaaagaaggcttctggtggaggcggtgacgacgaagaggaagagtgatcatgtgatgctagctccttcgttttgttagggacctaattttgttacatgaaaacaaaaagttggctgccgaggtttctgaaaaattgcaatttaaaattttgagaactgtaattgctaagactcttcattgccgaagttgtttatccgatgaacacatgttaattcagtgagcttgcactgctgcttacatgagatcactttctgtcaggaagatattagtgtgtactccgatatatagatctgggatatgttgtttcgaagtattttatttatatatagctacgcactcgacatgttgtattctta

SEQ ID NO: 153310 - DNA, 1300 bp, Zea Mays
ctttctgttcatttttttcacttacccctaactaacacgatggcactcagcactcaggacttgctcgaagctcacgtcgagctctggcaccagtccctgtgctacgccaaatcgctcgcgctcgcagtggcactggacctccgcatccccgacgcgatccaccaccatggcggcagcgccacccttccccagatcctcgccgagactgcggcccacccaagtaagcttcgcgctctacgccgcctcatgcgcgtgctcaccgtctcgggcacctttagcgtcgagcaacaaccgccagctggtggtgatgattcgaccgtcgacgcgccggacgaagctgtctacaggctcacggcagcctcccgcttcctcgttagcgacgaggtgagctcgtcgaccttggctccctttgtgagcctggcgctccatcctatcgctgtctctccgcacaccatgggcatctgcgcgtggttccggcaggagcagcgtgaaccgtccccgtatggcctggctttccagcaaacattcccaacgatctgggaacacgctgacgacgtaaacgccttactgaacaaaggcatggtcgcggacagccgcttcctgatgccaatcatgctcagggagtgcggcgaggtgttccgtgggatcgaatcgttggtcgacgtaggcggtgggcatggtggcgccaccgccgccatcgccgctgccttcccgcacctcaagtgcagcgtgcttgacctcccgcacgttgtcgccggcgctccgtccgatgtcaacgtgcagttcgtcgcaggcaatatgtttcagagtattccacctgcaaccgctgttttcctcaagaccactttacatgactggggtgacgacgagtgtgtcaagatattgaaaaattgcaggcaagctatatctccacgtgatgcaggagggaaggtaataatcttggacatggtagttggatacgggcagccaaacataacgcatctagagacacaagttatgtttgatttgtatattatgacggttaatggagctgagcgcgacgagcaagagtggaagaagattttcatagaagcaggattcaaagactacaaaatcctaccaatccttggtgcactatcagtcatcgaggtctatccatgaatgcttgctgagcaaaggcctccacaataaattgaagaatctgaaagtgctgatagtaatccatgaattgttctttttactatatacactttgaagcacatcgtcgtgtgtgcttccacatgtgatacgatatgtaaacgatgtgctatatatattaccc

SEQ ID NO: 153311 - DNA, 1355 bp, Zea Mays
tatataaatagacacgaggttctgtccgtctgtgcacacaaacccagcgctatcgagaaagagaattaggtagccacaacgacgatggcattcacagaggagagtagccaggacttgctccaagctcacgacgagctctggcatcagtccgtgagctacctgaaatcgctcgcgctcaccgtggccctggacctccgcatcccagacgcgatccaccaccacggcggcggcgccaccctcctacagatcctcgacaagacagcgctccaccaatctaagcttcgcgccctacgccgcctcatgcgcgtgctcactgtctcgggcaccttcagcgtcgtccagcaaccaccatgtggtgacgatgattcaactgtctacaggctcacggcagcctcccgcttcctcgtcagcgaggaggtgagctcggcgaccttggctccctttatgagcgtggtgctccatcccatcagccagtcctcccacgccaggggcatctgcgcgtggttccggcaggagcaccacgacccgtccgcgtttggcctggcgttcggccaagccccaaccatctgggaacacgctgacgacacgaacgccatactgaacaaagggcttgctgcccagagccgcttcctggtgccagtcatgctcagggagtgcggtgaggcggtgtttcgtgggatcgactcgttggtcgacgttggcggtgggcatggtggcgccgccaccgccatcgccgctgccttcccgcacctcaagtgcagcgtgcttgacctcccgcacgtcgtcgccggggctccatccgatggcaacgtgcagttcgtcgcaggcgacatgtttcagagtattccgccggcaaccgctgttttcctcaagacggctttacacgactggggtgacgatgagtgtgtcaaaatattgaagaattgcaggcaagccatatctccatgcgatgaaggagggaaggtaataatcatggacatggtagttggatatgatgagtcaaatacaaaacgtctagaggtacaaattttgtttgatttgtttatcatgatggtcaatggggctgagcgcgacgagcaagagtggaagaagattttcatccaagctggatttaaagactacaaaattctacccgttgttggctccctgtcagtcatcgaggtctatccataaatatttggtgtgaacaaaggacgccaaaacctgaagaccgtgcatgtttgtgctgatgttaattattactatggtccgatcgaaaattggtctttactttgtgagcttgtaataagctgatgagtaacttgcttgtttccttagcgtgaggtattgtggtgctaattacatgtggtatgaaa

SEQ ID NO: 153312 - DNA, 720 bp, Zea Mays
acacaagtacacatttgtacctatgtgcatttaagtatcatctattgcctcatggttgttagttagtcatatcatgatccagtattccagtgtatcaatttctcctttggtctccaagctcagaagagatgcatctgtcatccaattgttctgccttgtgctcgcacaaatgtcacttgctgatgactaaccaggcttgccgattgcaggagttttcaaggtcaagaatggagacgcaacatgatcgtctagacaatggaatacttacaagttggagcatggatcatccaatatatcctgcaagatgggttgaagaaagctgataatatcagcgagcttcctgggcagcccgagaaggctgcctttgatcagtatgccggcccgctatgtcatggttgatgcaacatctggaaaggccctctttgacttcttcgcagaggctgctgaagatccatctaccaaatcattggtcatttggctcaatggaggtaaggaaacctactaaccaattggtatgtggtttattttgcctttccagttccagcacacaattgtgctgttagagtggatgtactaaccagtccaacccaaaaacataagttgatggaagaagatagttaatccaattatacacttcaacaccctcactcatgtgcagctagagagaaaagcgcaaacgtgaaaataaatggatggagacacaaataaaacctttgtcag

SEQ ID NO: 153313 - DNA, 623 bp, Zea Mays
ctgccacaaaaaatgaaaccatttcgatacaagtatttcatcagaattgtttaggttggatattttgtagaaattgaatgattcagaacacagtgttggttctttgtaataatctcaatgtaagcaagtatactatatttcaaccaatcaaacagcagagggcaccttggtttgctcaagaaaagtataggcaggttccttcccaatctacaatctacagaagtcaaatggaccaaaaaaagaaatagttgagattgcccctattggtgttggggaatcctttttgcatggccactggaagatgatttttttttttgcagagttaaactagacatgattctatgagtttttctttattcgtagttgtaagcaatgaactcataagggaccagaatactaacagggggaaatattccttgctgcctttgtagccttgctctatttacatcttttttcctcgttcacttctctttgacaatatgtggtctgagaaggtattttgcatatgtgcgctgctagaaagtgggattcccttctaaagttgattcttcctgtcccatcacttcgtttttcaactctaagtccaaaagagtgagtccactccttgcatgaccaccaaccgg

SEQ ID NO: 153314 - DNA, 1370 bp, Zea Mays
aagacaccaaacacccatgcacacgcaacctatcaagatgaaaagaggcctcctggtactttggtccttgttctacttcagtgttgcaaacgctgacactagaaaccaggccaagcagcctcttgagttcaatcaattgagagtatcaaggaaatatgttcaaggaaaacaagattcaactcccaagaacggaaccagtccatcagtgcatagaggctcaacaagcaatcaacgggagcaggataagatcgtatgtatgcctgggcaaacaggggtagcagagtttgaccaatatgcaggatatgtgactgtggatgccaaggctggaagggctttgttctactattttgttgaggctcctcaagatccttcaaacaaacctcttgtcctatggctgaatggagggcctggctgttcatcctttggatctggggccatggttgaacttggacctttctctgttcatagtgacaacaagacactgtacaagaaaaggcatgcatggaacagaatggccaacatgttgttcattgagatcccagctggtgttggatactcatattcaaacactacatcagattactataacactggtcactatataccagaacttgcaaatctgattctctctaagaatagagccaccaatgtaactagtatcaagcttaaaggtgttgcgattggaaatgcagacttggatgataatttgactctaagagcatcatatgactactattggatgcatgctatgatttcgggaaaagcttataaagccgtcaaggataagtgcggctttaatgggacatacactgaagactgccaaaatgccatggacttagccacccaagaaaaaggaaatattgatgactatgacatctatgcaccaatatgccaagatgcctcaaacccttctaaatcaagtgactcgttagtgtttggtgatccatgcacaaaccactacgtctcctcttacctaaatcgtcctgaggtccaaagggcactccatgcaaacacaacagggttaggctacccatggatggactgtagtcagcagatatttgataattggaaagattcaccagagacaatgctgccatcaatcaagaaactcatttcaagtggcacgagaatatggctgtacagtggtgatatggatgcagtgtgctcattcatttcaacacaatatgtgctggacaatcttgggcttcctatagaagcagcttggcgtccatggcgcgtcgacaatgaggtacatagcccactgttcatcagatgaaagatggaatatcagcattcatgccaccagaatcctttggatcaagttgtatatgtgttccctaaaaagagcaaaaacagaaggatggttcatc

SEQ ID NO: 153315 - DNA, 871 bp, Zea Mays
ctgcccggccccctcgccacctccaccgatccagcgccatccgggtacgtccatggcgtccaccaccagcgatagcctcccctcctctccctccatccccaccaccgacggagccgccgaccaagagttctcctcctcccactaccaccaccacagcagcagcagcagcctcttcttcccgccgccgtcgtcctcctcctcctcccagctgcccagcctatacctcgactcctccttccacggcctcctccccactacatcttcccccgcggcggccacgtcgtccccttcccctcctccaccaccggtgccgccactccccccagcagcgcccgcgaagccggccaagaagcgcccgagggcctcccgccgcccgcccaccacggtgctcaccaccgacacctccaacttccgcgccatggtgcaggagttcaccggcttcccggcgccgcccttcgcccccgcgccgccccccaccgtccgcccgcggctcctcggcgggcccccgccgttcctcatgcgcccgtcgcctctcaagtaccccgtgctgctgcctcccggtcccagcacctgcaccaccaccactaacaccaccctagccaccgccagcgccagtagtacgagctccctcgtggacgcgctcgcgctcttcaccaagagcagcgcgacgccgtcggccggaggcggatcaggggttcctgatcattaccaccacggcgtcaccatgggagggttcaacttcaacccgttcgatgatttcgacccaccgccgccggcggcggcagcggaaggtgagacggggagcggcggcggcggcagccatggtttcttctcctccttcgccaccggggacaagtacggccgccactag

SEQ ID NO: 153316 - DNA, 1264 bp, Zea Mays
ccacctcctccacctcatcagtcgagcctccgtgcacgacgcattcgccttgatctccgatccctaccttcattaggagagagaggagaggagaggagaggggcagggagatggagagagcggcccccgtgaggagctcccacacctcgacggctggcctgctcgcgtggcctcaccccgatggcgccgggtcgctgccagcacgccggcctaaccagccgacggaggaattcaggaatgtggtgtttggggggcagctcacggagggggccgacggcctcaacaagacgaagaggaagacgggctcctcgcccaaggggaaggagacaacagggaccgggatatccaaggccgagagcgccgtcgcaactgcctcccgtgatcgtcaggctagccagatcaccttttcccaggacgggaccgttcctaccaggaaggcaacctcagtggctggggtggcaaggcagcgtgagcttagccataccgtcgagagtgagggggacagtaagatgaagaggcaggtgtccagtacgaaatccaaggagctcagtggtcacgacatctttgccgatcacgaagatcccaagcccaacaggtcaaggagatcagactatggcagctctgctgctcagtcaccagtgaaaaatgcaaatgtgagctccttctcgtttggagaggccgacattgacagcacagtgaaaacagcaaagaagaaagggtccagcaacttgtctactgatctgaacggcaagaccatgcccaagaaggattcagcgtctgcagagaaacagcctccgaaccgtgcgaggccgaaaggaatgagtggcagcagcaattttgcagacgggaaggcctcaacctcaacaaccggagatcatgaaggccgtcgtacccggcagcctcctggcggcgacagcagcattttgctgggctagcgtgcatatgaatcttgccctatgccgccgccgcacgggtggttggtccgtcagtctgtggtcttgttttcgtggtcaggccatgtgtcccatctccggtccttcagatgatctggttcgcatctgtcttgtgtatggttttgatatgtgttggttgtgacatgccccatggaacaaccctatcgctatgctgttttgttgtgtacaatggatgacgtgtgctgccgttttgttgtgtgtacaatggatatgtctggttgttgaataagaagaaattggtatatggtaccaataaaaattaattatccaaaaaaagtgtcagaaaaata

SEQ ID NO: 153317 - DNA, 2122 bp, Zea Mays
cgcccatctcccctctcatcgtctctctcatctcatccagcctgtgccaaaacaaaacgagaaaaaaaagtcttgctgctgctggtggtggagcgagaaaggaaaaaaaaaaagaaggggtaatctcaggaaccatctagatacagcggcggtacgtggactggactggagcgagcaagcctgcgccggcgccgccgtcctcccgaaacagaagctgtagttggtcaagaactggggatactgagttgaatatgatctcaaatccggtggactggtatagtttcggacccggatagaattggtagggatgcaagattggagggtgcgtgagttcgaaggtaaattcactgatgagtttgcccacagcagtagcaacgaacataaaggtggagttgaggcttctggtgtcattagtagtaagaagttgaagcatgcagttgctaatgagaaaatccaaggtgtcatccccggtacaaatagctcaggttcactgaaacgtaattcagagaacatccaacatgcgaacggggtattatcccagaatataagctgcgctggtgactacaaaaatggctccattgcctttcctttgagagaagaaaatacaataactgagaccagatgtccagatgataactggaactcctgtcagtttgcactgaacaatggttcgtccattctcaataaccacagtgctccccaggatagcctcacttatggagataatgatctaaactacatcgaatggcctggcattgacaattttgaggatgtcgatacattattcaggagttctgattcaacatatggtcagcagcagctggagaatgcagatgggttatcttggattccgtcttcagatgctgtttactctaccgatgttgctttgcaacaagggcttgattcgtcttattcagattatggtattctggatgatctctccgcattccaatgtgcagaagataaatcactacccttggttgatccttcatcagctttatgtgataatcaattcaatgatacctacctgttcagtgaacaaaagaatgtgaatgcatatggtgaacagatataccaagaggatttgatggagttgttgcccactgaccagatatgcagcggacatgaaaacattgatatggttggaaaccagtatccatctgaaaatgcaattcaaggtaccgaagataagaaattctctatagcgtcaacttcccagctgagttctcagaatttactgaatcaaagacaccacttagattccagttcaccaagcaatattacttcggagtcctatccaggaaagttcggtccatctagctgttcttctgcacaaagaaactcaaaagtgcagaagaaaactgtcaacatacaaccaagacagccagcaaatgataatgttatgaacacaagcagagcttcttacccttgtgagaactatgaaactgaaagaagaggattagggaaagaactctgggggatcctcaagttacaatgggtagttcaatggtagtggatggctcatttgtatcatctatgtcctctgataactcagtcgaagaaagcagctttcaacaactgcaggatgctgttagtcagctggatgtgcaaaccaaattgtgcatcagggatggtttataccgattggcacgaagtgcgcaacatagacaagtttttccaaatacgatgaacagcaatggtggtagcgaggacggaaaggaactggagaacgcagaaacttcgtgcaagttcatggaccctcggagcatcgagacgcagacaaacccgatcgatcggtctatagctctgctacttttccgcgagtcatctggcggccatgtccatgtggctgtagcagccgacgatgcctcgtcactgaaatcccctgctggtgtatgatttcctgcctgccacatctcagttccagggccctgctgctaacccaggatgtttctaggcatgtatgtaaaaaaaaaaacaagcgtattgtgtagccaatagtctgtactctgtagtcacattaattttgtcatgcttgtatcctattgctagacggccgatgtgctaacctagtgctgttgactcaaattttatgcgtaatctaaaaaaaattatttctttt

SEQ ID NO: 153318 - DNA, 2158 bp, Zea Mays
cgcccatctcccctctcatcgtctctctcatctcatccagcctgtgccaaaacaaaacgagaaaaaaaagtcttgctgctgctggtggtggagcgagaaaggaaaaaaaaaaagaaggggtaatctcaggaaccatctagatacagcggcggtacgtggactggactggagcgagcaagcctgcgccggcgccgccgtcctcccgaaacagaagctgtagttggtcaagaactggggatactgagttgaatatgatctcaaatccggtggactggtatagtttcggacccggatagaattggtagggatgcaagattggagggtgcgtgagttcgaaggtaaattcactgatgagtttgcccacagcagtagcaacgaacataaaggtggagttgaggcttctggtgtcattagtagtaagaagttgaagcatgcagttgctaatgagaaaatccaaggtgtcatccccggtacaaatagctcaggttcactgaaacgtaattcagagaacatccaacatgcgaacggggtattatcccagaatataagctgcgctggtgactacaaaaatggctccattgcctttcctttgagagaagaaaatacaataactgagaccagatgtccagatgataactggaactcctgtcagtttgcactgaacaatggttcgtccattctcaataaccacagtgctccccaggatagcctcacttatggagataatgatctaaactacatcgaatggcctggcattgacaattttgaggatgtcgatacattattcaggagttctgattcaacatatggtcagcagcagctggagaatgcagatgggttatcttggattccgtcttcagatgctgtttactctaccgatgttgctttgcaacaagggcttgattcgtcttattcagattatggtattctggatgatctctccgcattccaatgtgcagaagataaatcactacccttggttgatccttcatcagctttatgtgataatcaattcaatgatacctacctgttcagtgaacaaaagaatgtgaatgcatatggtgaacagatataccaagaggatttgatggagttgttgcccactgaccagatatgcagcggacatgaaaacattgatatgttgcaggttggaaaccagtatccatctgaaaatgcaattcaaggtaccgaagataagaaattctctatagcgtcaacttcccagctgagttctcagaatttactgaatcaaagacaccacttagattccagttcaccaagcaatattacttcggagtcctatccaggaaagttcggtccatctagctgttcttctgcacaaagaaactcaaaagctggtgtgacacttaagtgcgcaaatgcagtgcagaagaaaactgtcaacatacaaccaagacagccagcaaatgataatgttatgaacacaagcagagcttcttacccttgtgagaactatgaaactgaaagaagaggattagggaaagaactctgggggatcctcaagttacaatgggtagttcaatggtagtggatggctcatttgtatcatctatgtcctctgataactcagtcgaagaaagcagctttcaacaactgcaggatgctgttagtcagctggatgtgcaaaccaaattgtgcatcagggatggtttataccgattggcacgaagtgcgcaacatagacaagtttttccaaatacgatgaacagcaatggtggtagcgaggacggaaaggaactggagaacgcagaaacttcgtgcaagttcatggaccctcggagcatcgagacgcagacaaacccgatcgatcggtctatagctctgctacttttccgcgagtcatctggcggccatgtccatgtggctgtagcagccgacgatgcctcgtcactgaaatcccctgctggtgtatgatttcctgcctgccacatctcagttccagggccctgctgctaacccaggatgtttctaggcatgtatgtaaaaaaaaaaacaagcgtattgtgtagccaatagtctgtactctgtagtcacattaattttgtcatgcttgtatcctattgctagacggccgatgtgctaacctagtgctgttgactcaaattttatgcgtaatctaaaaaaaattatttctttt

SEQ ID NO: 153319 - DNA, 238 bp, Zea Mays
ccccacatgtcattgactcatgtggacccacatgtaagtgagatagtaatggtatggatccaaagtggtgatcttttaatggtatggatccaaatttccctaattagattgtacatgcccctacgagagcatgctggccctgatgtgtggtactggtacctactaccttctttcggttgctgcaagcctgtactgtaatccatcagcttgggtgttggagggagactgtgggcccaac

SEQ ID NO: 153320 - DNA, 1537 bp, Zea Mays
gatggcgggtcaaggttgaagccatcaaggcaacgtacgcctaggagtggagacgacgagagtggaggagggctgctgatgggcggaggagacgaccggagagcggcggcgctccagcgatcctcgtcgccatggagcgtgggcgagcggtggcgggcgcacgccgggatggtcctcgtcatgctcgcctacagcggttaccacgtcctcgccaagtccgtcctcaacgtgggcatgaaccaggtcgtcttctgcgtctaccgcgacctcctcgcgctcctcgtcgtcgcccccgtcgccttcctccgcgagagaagggttaggcctcccgtgacgcctcagctcctcgcttccttcgctctgcttggcttcactgggctgtatgggaacccgctcctctgcctcgtcggcctccgctacacaaacgcctcctacgccgcggctttccagccctccataccagtgctcacgtttctcttggctgccattgtcggtgttgaagcgatcagcgtcttcaccaaggacggcatcctcaaagtcaccggcacggccgtgtgcgtctccggcgccattctgatggccctgtaccgaggcccatccttgatcgcccttcttagaagcatgcccaccgcatggacgagcgctccctaccaccctgctacccccgactggttcacaccagccgtgcccgtgctcgagcagggtgtagaagcatggcagcttggcgtcctgtgcctcataggaaactgcctcttggtggctgtctatctagtcgtgcaggctccagtgatgataaagtatcctgcgagcttatccgtgacagcttactcctattttttcgccacaacctttatggtgctaactggagtatgcgcgactagtggcttacacgagtgggcactgacaaaagccgaggtcatagctgttctgtatgctggaattgtcgcatcctgtctgagctactcgatcatgacatgggcgaacaaagttcttggaccttctctggtcgccctctacaatccactgcaaccagccttttccaccgccctctcaactgttttccttggcgacccagtttacctcggaaggtttggttacgtttcgcacactgcccaatgacgactactaagccaattctgctatttgaaacattgttattggattattcctcaaactagcatcgattccttttttttttttttgaaacgaagcagcattgattatattctgaccctgtgtacgcttgtattatccacttccagcgttattgggggagtctctataattgctggtctctatctggtcatctgggctcgctacaatcaagggcagcgggcgcctacggatggttgtttggaccctcttattattgtggataatccaagaatccacaagacacaagaaagtcccttcgtgtagatcctgaaaaaaatgtgtggattatccacacatttgtataggtggtcttaaaagacagtatacttctatttgttaaacttcacatatgcattcaaataaacaagtggtcaaagattgt

SEQ ID NO: 153321 - DNA, 1520 bp, Zea Mays
gatggcgggtcaaggttgaagccatcaaggcaacgtacgcctaggagtggagacgacgagagtggaggagggctgctgatgggcggaggagacgaccggagagcggcggcgctccagcgatcctcgtcgccatggagcgtgggcgagcggtggcgggcgcacgccgggatggtcctcgtcatgctcgcctacagcggttaccacgtcctcgccaagtccgtcctcaacgtgggcatgaaccaggtcgtcttctgcgtctaccgcgacctcctcgcgctcctcgtcgtcgcccccgtcgccttcctccgcgagagaagggttaggcctcccgtgacgcctcagctcctcgcttccttcgctctgcttggcttcactgggctgtatgggaacccgctcctctgcctcgtcggcctccgctacacaaacgcctcctacgccgcggctttccagccctccataccagtgctcacgtttctcttggctgccattgtcggtgttgaagcgatcagcgtcttcaccaaggacggcatcctcaaagtcaccggcacggccgtgtgcgtctccggcgccattctgatggccctgtaccgaggcccatccttgatcgcccttcttagaagcatgcccaccgcatggacgagcgctccctaccaccctgctacccccgactggttcacaccagccgtgcccgtgctcgagcagggtgtagaagcatggcagcttggcgtcctgtgcctcataggaaactgcctcttggtggctgtctatctagtcgtgcaggctccagtgatgataaagtatcctgcgagcttatccgtgacagcttactcctattttttcgccacaacctttatggtgctaactggagtatgcgcgactagtggcttacacgagtgggcactgacaaaagccgaggtcatagctgttctgtatgctggaattgtcgcatcctgtctgagctactcgatcatgacatgggcgaacaaagttcttggaccttctctggtcgccctctacaatccactgcaaccagccttttccaccgccctctcaactgttttccttggcgacccagtttacctcggaagcgttattgggggagtctctataattgctggtctctatctggtcatctgggctcgctacaatcaagggcagcgggcgcctacggatggttgtttggaccctcttattattgtggataatccaagaatccacaagacacaagaaagtcccttcgtgtagatcctgaaaaaaatgtgtggattatccacacatttgtataggtggtcttaaaagacagtatacttctatttgttaaacttcacatatgcattcaaataaacaagtggtcaaagattgtagtgaacctaggctctaattagaattgtatgttttgtagaacatttttataggctattcacctatctctagccatctagatcctatcagtcaccctgtaaaaatccatatagtccttcaatcgttggaaacagataaggatccattttgacataagg

SEQ ID NO: 153322 - DNA, 1163 bp, Zea Mays
acttggacataacgcaacgcccgccgcgaaaagcactaccggcctgtgctgctgtggtagttagtttcaagcagcaatggaagccgtggtggccacgacgacaacgagggtgtccttccctctgctgcccaccgcggggaggcccctgctcccgccggtcctggcgcggccccgccgcggcttcgcctccgtctccgccacctccacatccggcgcaggcggcggcggggggcgctcatctgcaggcggctgcggcggcgacggtggaggggacgactccggtgccggcgcagccgcggccgccgcggctgtggcggctctgggtgagtccgagcagcaggaggacggcgactctgacgcaatcgtgctccatgtcgggggaatgacgtgcggcggatgtgcggacaaggtgaagcgaattctggagagccagcctgaggttgctgcagctacagttgatgtcgaaaaggccaccgctattgtgtggacgacacctgaagcgaaggctaccaaagactggcaaaaacaattggccgagaaacttgccaaccatctcacctcttgcgggttccagtctcatctgcaagacgaaggcgaggctgaacaaactgatgcttaacctcagcagtgcattacgtatgtatgactatgagtggccaggaagttttagcatggagggtccttgcatgaagcaatgtctcccacttcagaagttgttacatgcgggtctacgatgtacttcttttatttatttgtcgcagtttagttcaaaaatgaactcgcaggaagtttttatgccgttatattgttgttaaggacttgtggttgaacttcgaaacagctgaactgttgagtatcgaaggcgaactagcgataaaataaaatgatgaagtatcgtacaagcttactcctacagaaacgtttggaaagattttgagggcctgtttggtaaatgtttcttaaaaccatgattttacaatactacacttgcaattgcaattgtcatgacaatattatagttttagtcagctacaaaactaatagctattatttagatacaacattgtagtttatggtatttagataaaagctaggcatactattcaaactttaagttggagccgagtcttcaatactccaaagatactatggtatctaaaata

SEQ ID NO: 153323 - DNA, 77 bp, Zea Mays
ttagattctgtatcgatggcaacgggttctagaacagtacacaaggcaatttcaagacggttattcaattgttcaaa

SEQ ID NO: 153324 - DNA, 3165 bp, Zea Mays
actaacctcgtcgtgaatgaatctgcagacatctcgcagatactgcaggaggctcagaaccggtggctgcggcccaccgagatctgcgagatactgtccaactacaagctcttctccatcgccgccgagccgcccaacatgccgaggagtggctctctttttctatttgatcgcaaagtactgaggtacttcagaaaggatggacacaactggagaaagaaaaaagatggcaagactgtcaaagaagctcatgagaaactgaaagctggcagcattgatgtactccattgctactatgcccatggagaggagaacgaaaactttcaaaggcgaacatattggctgttggaagaggatttcactcatattgttcttgtacattacctagaagtcaagggatgcaagcaaagtttcaatcgtgtgaaagaagaacttatgcagctatcgaatgtcgacagtccttcatgttcaaattccatcactagtcagaatcagatgggcccacaaaacatggaggctgctgaaagcccaataagcggacagatttcagaatatgaagacactgaatcagataattgccgagcaagctccagataccaccctctcgctgagatgcagcagcttgtggatggagtcataacggaaaacatgttatacccttccgcatcaactgttggtagtagacaaggttatcatggtgaaatgttgccaataacagataacttagataaccgttcattttctaaccatgacatagctagaatgctcgacggcgccaacattgggctaagcgatgtttccagcactctgtttgattcagtgccattcaatgagcccttcaccaattattcagctgggttcacagagccaacactccattcttcatttgcctgcttagaggctaacgatttggacgatagctcttgtttgcagacatttacatctgaggctctatacactaaccacctcaaccagaaggaagctgatgcactgggtttcactggcatattagcatcagaggtgaacagagatagatataatgatggtagcatcaaacattcactcttgaagcagtcatcattggatctattgacgattgaggctcctggtttgaagaaaaatgacagcttttcaagatggatgagtaaagaacttgaagagctggatgcttatgtagtgaacccttcactttctcaagaccaactattcagcattctcgatgtttcaccaagttgtgcatatattggtacaaatacaaaggtttcagttactggtacattcttggtgaataaaaaacatgtggaaagtcacaggtggtcatgtatgtttggggatgttgaagtaccagctgaggttttgaccgatggcaccctacgctgctatgcaccagcacaccaatcaggaagagttccattttatgtgacctgttcaaacagggtggcttgtagtgaagtgcgagaatttgagtatcgtgattctgaagctcattacatggagacttctcgttcccaagccaatggtgtaaatgaaatgcatctacacattcgtcttgagaagctactcactttggggccagatgaccatcaaatgcttgttataagcagtggtaatgagaaatatgagataatgaatgctataaattccttaatgcttgatgggaaatggtcaaatcaagaatcttctgtcaaggaagtagtttccactgctagggtccaaagtttaaagaaactggtgaaagagaagctgcatcaatggctcatctgcaaagtaaacgatgatggaaagggtcccaatgttctgtgcaaggaaggacagggtgtgattcatttagtagcagcactgggttatgattgggctataagaccgataatgattgctggtgtcaatgtgaacttccgggatgctcatggatggactgcactccactgggctgcatctttgggaagagagcggacagttagtgtcctcatagcaaatggagctgcagcaggagcactaaccgatccaacttctgagttcccttctggaagaagtccagctgatttagcttcagtaaatggacacaaggggattgctggttttctcgcagaatctgctttgacaagccatctgtcagcacttactattagggaatcaaatgatagcactgtagaagcgtgtgggctaccatttgctgaagatctcactggcatcgattctgtccatctcgctggagagggtcctgatgctgaatcacttgaaggttctttaagtgccgtgcggaaatccactcaagctgcagctcgtatatttcaagccttcagggtggagtcattccacagaaagaaagtcgtggaatacggagatgacacctgtggattatctgatgaatgcacactttcacttgtttctcttaaaaatgtcaaaccaggacaacatgatacacatctgcattctgctgctgttcgcatacagaacaagtttcgcggatggaagggaagaaaggaatttatgatcattcgccagagaattgtcaagctacaggctcatgtacgaggacatcaagtgaggaagaactatcggaaggtagtctggtcagtcggtatcgtcgagaaggtcatactgagatggaggagaaagaggcctgggttacgcgggtttcggcccgagaaacaactagaaggtccatcgcaaatccaacctgcaaaggctgaagatgaatacgatttcttgcacgacggcagaaggcaggccgaagccaggctacagagagcacttgcccgggtgcactctatgtcacagtacccagaagcgagagagcagtaccacaggcttacaacctgcgttgctgaaatgaaacagtccaggatgatgcaggatgagatgctaagccaggcggctggtggtgcggacgatttcatggctggactggaggacttgatctgcatagatgatgccccgccccgatgtctgccattcggtgaagctgagcctttttacatcagataggcagggaggcggtttccttgctccccttttgtcagactagccctgtaaatattcttcagctagttgttcaccccgactgtttactcgctttctgctagtgtacaactataacatagtttcaatgcactgattatcggtagaataatcgcctcttatttgatatatagtttatattaa

SEQ ID NO: 153325 - DNA, 1664 bp, Zea Mays
atgcatctacacattcgtcttgagaagctactcactttggggccagatgaccatcaaatgcttgctataaattccttaatgcttgatgggaaatggtcaaatcaagaatcttctgtcaaggaagtagtttccactgctagggtccaaagtttaaagaaactggtgaaagagaagctgcatcaatggctcatctgcaaagtaaacgatgatggaaagggtcccaatgttctgtgcaaggaaggacagggtgtgattcatttagtagcagcactgggttatgattgggctataagaccgataatgattgctggtgtcaatgtgaacttccgggatgctcatggatggactgcactccactgggctgcatctttgggaagagagcggacagttagtgtcctcatagcaaatggagctgcagcaggagcactaaccgatccaacttctgagttcccttctggaagaagtccagctgatttagcttcagtaaatggacacaaggggattgctggttttctcgcagaatctgctttgacaagccatctgtcagcacttactattagggaatcaaatgatagcactgtagaagcgtgtgggctaccatttgctgaagatctcactggcatcgattctgtccatctcgctggagagggtcctgatgctgaatcacttgaaggttctttaagtgccgtgcggaaatccactcaagctgcagctcgtatatttcaagccttcagggtggagtcattccacagaaagaaagtcgtggaatacggagatgacacctgtggattatctgatgaatgcacactttcacttgtttctcttaaaaatgtcaaaccaggacaacatgatacacatctgcattctgctgctgttcgcatacagaacaagtttcgcggatggaagggaagaaaggaatttatgatcattcgccagagaattgtcaagctacaggctcatgtacgaggacatcaagtgaggaagaactatcggaaggtagtctggtcagtcggtatcgtcgagaaggtcatactgagatggaggagaaagaggcctgggttacgcgggtttcggcccgagaaacaactagaaggtccatcgcaaatccaacctgcaaaggctgaagatgaatacgatttcttgcacgacggcagaaggcaggccgaagccaggctacagagagcacttgcccgggtgcactctatgtcacagtacccagaagcgagagagcagtaccacaggcttacaacctgcgttgctgaaatgaaacagtccaggatgatgcaggatgagatgctaagccaggcggctggtggtgcggacgatttcatggctggactggaggacttgatctgcatagatgatgccccgccccgatgtctgccattcggtgaagctgagcctttttacatcagataggcagggaggcggtttccttgctccccttttgtcagactagccctgtaaatattcttcagctagttgttcaccccgactgtttactcgctttctgctagtgtacaactataacatagtttcaatgcactgattatcggtagaataatcgcctcttatttgatatatagtttatattaattcaacgtattttatggttttatctgtaattctgcattcgtatcgagccataacagtgtgaatttgcg

SEQ ID NO: 153326 - DNA, 711 bp, Zea Mays
atgttgcagcagaacgggaggtcgaggacggtggcgctgtggcaggcgtcgacgacggcgtgcagcttgacgccgtggaccagcgggcggaccatagtctcgttgatctcgtcgtccaggatgggtcccttctggaacgagtccatcgggcagatggcctcgtcgtacccgtccagctcgtcgccgtcgtcgtcggcgacctgcgcgcccaggccggagaagtggaacacgagggagtcgccctcgctgctcccctccaccagccactgcatccccaaccggatgttgtccttggtgggcagcctgaacgggtccttctggtcatctgtgagcatgatgatgcagtcgctggggaaggcgaagcgctggcagaggagttgcctcatgcacttgacgtcgttgagggcccccctcagctggccgcagccccgccgcgtacgtgatgccgatcaggagggcccgcttcttgccgcgggcgcgcgggaagcccgtggtgggcggcgccgccgccggccgctggacccgccgccgccggatacgcgtcacgccgcagcattgcgtgcactggatggcgcgctcgccggggcacacggtgagctgcgtgctgcagtgcttgcaccggactgtcgacggggacaccccacccatgttcatggcgaagctagccgggcgctcgtagctttgcccacgctgcttactgcgcgttgctag

SEQ ID NO: 153327 - DNA, 2192 bp, Zea Mays
aattaataaaataatgttgagtatctccttcgcccctccccacctggctcctgctctacacaagcagtcaagggccataaagcgcagcaggatctccctctgcccaaaaccaaacctgcctccgcacctaccatttcctcccccaaaccaccatggacttctccgccggagggagtgggagcggcggaggaggcggaggcgccggcgacggccgggcgcaggcggagcgctggctggagatcgccgagaagctcctcgcggcgagcgacctcgtcggctgcaagcgcttcgcggagcgggcgttggaggcggacccgctcctccctggcgccgacgagatcctcgccgtcgccgacgtcctcctcgcctcccagtccatgggcccctcgggccaccaggacccgctcgccatcctccagctgccgcctggggtcaaccccgaccaggcctccgtctcccgcgcattccgccgcctcgcgctactcctcgggccccgcaacccgcaccatggcgccgagatggcgctccgcctcgtcaacgacgcctacgccttcctctccgatccgtctcgccgcccccctccgcccgccaatcccgccactggtaccccttcctcctcccactatgcggccgctcccgcccccgatccccgggagttctggacggcgtgccccttctgctgctacgtgcaccagtacccgcgtgacctggtcgggcgcgccctcaagtgccccaacgagggctgccgccgcggattcgtggcttctgagatcccgaccccacccaccgttgtgccaggcactgatatgtaccactgcgcctgggggttcttccccctcggatttcccaacgcggccgacctgggcgccaactggaagccattctacaaggcgttcccttggaacacggctcccagtggtcaaggtgctgatggtaggagccatggcaaccgtggtggcaggcaggcacagaatgacagtgctcgtggtggctcctctagaggtaggatcaagaagactaccgcccgcaagaaggtcggggcagggttgaggaggcgttctcttggtggtggtgtggagagtggcattgattcttcgatgctcgggcaggaaggctgggctggggatgaggacggtggagatggaaggaccgaggaggtgaggggaattaacataaatgaggcggcgcaagctacagacggcactggtagggttaatgttagcggtgctggtggagttgaagatatgggcaacttccatatcgatgttgatgcaaccgaggatatattggggaatttgcacaacctgcccttcctgagggtggacaatcttgggcggatgatttaactgttcttatggtttgctgtggctagaaaagtattgtatgattagccaggccgaaacagatgtctcagggactggcccttgctgttcaactgttcgttttattttaactgttccatctcctgttatgccatgttgtagttgtagacttgttgtctaccttgtacctgtagttacttagcatcagacatgggaaatttgtatctccattagatggagatcatgccctttgccttagcaaacaaacttgcggagttttatggtgatggaaataatgcttcaaagaggtgtggctggtgcttaccatgccacttttggtttcttcctggcatggtgacacaaatgttgctgagatcaagtagatgactgttttggccacccgcagtgggttgtccataccatgtcctgaaggaagcaaagtgcggttggcccagcttagtggggatatcagcagccctcccctgaagggcgaattccttttgctgttttaacccatgtttgttaggccttttattccagaaacctatgcaaaactctgctataagtttgccaagaaatgctaactgcagttgttatgttttcagcaatttcagggtaagaagatgttaacaagcaaagcaacctctctgcatttgcagggaattgcaggggaagccttctctcagtttatccctttcttagggcctctttgcatttgcagggagggcttatctcggtttatttcttcttcatactctacctgagtgggaacttttgatgctgagtttgtcttatgcctatttattttaagtcgaatgaaatatgaaggccaaatcttgactgattactagtgactatttagctcgctta

SEQ ID NO: 153328 - DNA, 1424 bp, Zea Mays
gggccgcccataagagtccacacgcttgcgctgccctgccccgccctcccccgcagccgccccgcccttggcctcgcctttccttgcttccttctcgagcagagcaacagagcaggtgaggcagtcagcacgctcagccacacccacagagacgcggcacgcctccactcctcctccgactccgaggccagcacgccgcacgctccgcctcgcagtcgcagcccctagcctctcgcgcgtgcttcttcttcctcctcgctccgggggctcgatctggtaactctggtgggggacaatcaagaactgaacactcgacactggcacagagctctggcagcatgcggtggctcggtctatctgtcgatgtgttccgcagggggatctccttgaacctttactgccgtgtgattctgtaaatcgtctccgtggctaccggcttttccttcgcacgcctcctgattcatgagaggcttgtgaaggcactttacatcttccccacccagtcattaattggcgtcgctgttaggctgttgtggttgtttggccaaggcttttgaggagaacgggctggagtactgatggtgtggaaagcagccgctcagacgagattccgcgtgtttaagcatgagaacggaatcacagtgagggctattgcttgcttccagccgctgcaaaattgccaggccgagtacttccgccatctcctcaagcccgtgacgtagctcccctctgctctccacctgctgctgaataaacttacagccttagttttttctccatagcaactgaagtgggagaacatcccagtcgttcatcgggactttctgctggtagttctgtccggtggttgttttaatttattcatcatgggggacaagcatcgtcgattgctgagagacctcttccaatgggcccgagacacgtcacgacattggcaccaagtttcgaatcgcctgcaccgtgtccctcgcgtaagagaccttcagtcctctaccagaaggaaactcatggtcccaccgcagctcctttgcggaggagcaaggggccactggatcctgtgccggagctccaaggtagcaacgagaccaacgtaaccgacgttggagcagaagaaaccgagggtgttcacgagaacacagacgagatcgatgccctcctggactcctccgactcggacgaagggccgcacgaactcgacagggccaggaggcagcctgctgcagagaacgagacctcgagcgtcgagtcggtggccagtgccgcaggttctgcgccgccggccaagaagaggaggctcagctcttgcacggacaggtccgtcgtcgacaccgccagttcggcgaggccggaccattccgtcgagcagaagcctctcgcgagcgactgcgacgcgcagtcgtgctgcgtcggcgaggtggtggaaa

SEQ ID NO: 153329 - DNA, 2429 bp, Zea Mays
gggccgcccataagagtccacacgcttgcgctgccctgccccgccctcccccgcagccgccccgcccttggcctcgcctttccttgcttccttctcgagcagagcaacagagcaggtgaggcagtcagcacgctcagccacacccacagagacgcggcacgcctccactcctcctccgactccgaggccagcacgccgcacgctccgcctcgcagtcgcagcccctagcctctcgcgcgtgcttcttcttcctcctcgctccgggggctcgatctggtaactctggtgggggacaatcaagaactgaacactcgacactggcacagagctctggcagcatgcggtggctcggtctatctgtcgatgtgttccgcagggggatctccttgaacctttactgccgtgtgattctgtaaatcgtctccgtggctaccggcttttccttcgcacgcctcctgattcatgagaggcttgtgaaggcactttacatcttccccacccagtcattaattggcgtcgctgttaggctgttgtggttgtttggccaaggcttttgaggagaacgggctggagtactgatggtgtggaaagcagccgctcagacgagattccgcgtgtttaagcatgagaacggaatcacagtgagggctattgcttgcttccagccgctgcaaaattgccaggccgagtacttccgccatctcctcaagcccgtgacgtagctcccctctgctctccacctgctgctgaataaacttacagccttagttttttctccatagcaactgaagtgggagaacatcccagtcgttcatcgggactttctgctggtagttctgtccggtggttgttttaatttattcatcatgggggacaaggtgaatccctggtgccattggcctaatcctcaatggaaattcaacactgagagttctgccggcaatctgcacccacctgatgtcgggcttgctaatgccgattcggtggcattgcctgcataccaccttaacgcagcacctatgccatttttcgcagcatcgtcgattgctgagagacctcttccaatgggcccgagacacgtcacgacattggcaccaagtttcgaatcgcctgcaccgtgtccctcgcgtaagagaccttcagtcctctaccagaaggaaactcatggtcccaccgcagctcctttgcggaggagcaaggggccactggatcctgtgccggagctccaaggtagcaacgagaccaacgtaaccgacgttggagcagaagaaaccgagggtgttcacgagaacacagacgagatcgatgccctcctggactcctccgactcggacgaagggccgcacgaactcgacagggccaggaggcagcctgctgcagagaacgagacctcgagcgtcgagtcggtggccagtgccgcaggttctgcgccgccggccaagaagaggaggctcagctcttgcacggacaggtccgtcgtcgacaccgccagttcggcgaggccggaccattccgtcgagcagaagcctctcgcgagcgactgcgacgcgcagtcgtgctgcgtcggcgaggtggtggaaagcggccgccttaggttctctccgggggagggggagggggaggtggaggcagcagaaggcgacagccccgacgaccagaggcggaggagagagaggatccaagagaccgtggctgcgctgagaaacatcgtcccggggggcaccgccaaggacgccacggccgttctcgacgaagccatctgctacctgcagtatctgaagctgaaggtcaagacgctgggagctgcctccctctagcctcctggacagggagtcatctggctttctgctgttctacataagtatggagtgcaggcaggcattgggtaataaggtgaaagatgccggagaccatatcagaatttggcggtgcttcaggacacgcaccacaccaggggtgaaaacaacggggagaagggggaaaaaaaggtccaatggtgcttgctttgctgcttccccgcccgtgtaccacccccaccacaaggctctcgaacgatgctgtgggcaacgactggcgtgcagcattgcgaagagcgtcttcaaccgaagcgaggcgggtatgttttccgtcgtccatttgtggcggagcaacatggaggccaaaagatccatccaccagtcaccaccacctaatatgctgctctccagtgacagtgagctgctagtgtaagcaccatctttctgtctgggagcatggatcttccaccctaagagctgtcggtgcctgcctgtatcactcgccgtcctcaaaaaggccctcacggcacgggttggtgcaacgtatgcgctatgcaaagctagaagacatcttttgctgaccgtgatccaaagcaaagagcggcactgaccaccaaaggcaaggaaaggggg

SEQ ID NO: 153330 - DNA, 3097 bp, Zea Mays
cgcccttggcctcgcctttccttgcttccttctcgagcagagcaacagagcaggtaactctggtgggggacaatcaagaactgaacactcgacactggcacagagctctggcagcatgcggtggctcggtctatctgtcgatgtgttccgcagggggatctccttgaacctttactgccgtgtgattctgtaaatcgtctccgtggctaccggcttttccttcgcacgcctcctgattcatgagaggcttgtgaaggcactttacatcttccccacccagtcattaattggcgtcgctgttaggctgttgtggttgtttggccaaggcttttgaggagaacgggctggagtactgatggtgtggaaagcagccgctcagacgagattccgcgtgtttaagcatgagaacggaatcacagtgagggctattgcttgcttccagccgctgcaaaattgccaggccgagtacttccgccatctcctcaagcccgtgacgtagctcccctctgctctccacctgctgctgaataaacttacagccttagttttttctccatagcaactgaagtgggagaacatcccagtcgttcatcgggactttctgctggtagttctgtccggtggttgttttaatttattcatcatgggggacaaggtgaatccctggtgccattggcctaatcctcaatggaaattcaacactgagagttctgccggcaatctgcacccacctgatgtcgggcttgctaatgccgattcggtggcattgcctgcataccaccttaacgcagcacctatgccatttttcgcagcatcgtcgattgctgagagacctcttccaatgggcccgagacacgtcacgacattggcaccaagtttcgaatcgcctgcaccgtgtccctcgcgtaagagaccttcagtcctctaccagaaggaaactcatggtcccaccgcagctcctttgcggaggagcaaggggccactggatcctgtgccggagctccaaggtagcaacgagaccaacgtaaccgacgttggagcagaagaaaccgagggtgttcacgagaacacagacgagatcgatgccctcctggactcctccgactcggacgaagggccgcacgaactcgacagggccaggaggcagcctgctgcagagaacgagacctcgagcgtcgagtcggtggccagtgccgcaggttctgcgccgccggccaagaagaggaggctcagctcttgcacggacaggtccgtcgtcgacaccgccagttcggcgaggccggaccattccgtcgagcagaagcctctcgcgagcgactgcgacgcgcagtcgtgctgcgtcggcgaggtggtggaaagcggccgccttaggttctctccgggggagggggagggggaggtggaggcagcagaaggcgacagccccgacgaccagaggcggaggagagagaggatccaagagaccgtggctgcgctgagaaacatcgtcccggggggcaccgccaaggacgccacggccgttctcgacgaagccatctgctacctgcagtatctgaagctgaaggtcaagacgctgggagctgcctccctctagcctcctggacagggagtcatctggctttctgctgttctacataagtatggagtgcaggcaggcattgggtaataaggtgaaagatgccggagaccatatcagaatttggcggtgcttcaggacacgcaccacaccaggggtgaaaacaacggggagaagggggaaaaaaaggtccaatggtgcttgctttgctgcttccccgcccgtgtaccacccccaccacaaggctctcgaacgatgctgtgggcaacgactggcgtgcagcattgcgaagagcgtcttcaaccgaagcgaggcgggtatgttttccgtcgtccatttgtggcggagcaacatggaggccaaaagatccatccaccagtcaccaccacctaatatgctgctctccagtgacagtgagctgctagtgtaagcaccatctttctgtctgggagcatggatcttccaccctaagagctgtcggtgcctgcctgtatcactcgccgtcctcaaaaaggccctcacggcacgggttggtgcaacgtatgcgctatgcaaagctagaagacatcttttgctgaccgtgatccaaagcaaagagcggcactgaccaccaaaggcaaggaaagggggggagatgggctggagcctggagtccaacaaagtgctgtgtgcctgacgtggatgagctcaaactctgagccacaccaattgcgcgggcgggcgcctttcatcatctcacgctgctttgctttctctcaaatcccgctgcatgtgccaccacactagcgtacatacgtatgtatgcttgtgtaatcgctttgacacgcctttgtacgcggtgtaatcatgtatagtcctagctttaggacggtttctctgctggatccggatgaatgagccttgctcgtcaagtgtgcgtgcgtgcgtgcgtctatagtcctgttctgttggcaatgattgtttggaggctgcatcgtcgtcgtcccgttgttgcccctcgactagaaggggattaaatcctcttctggattggtataaccgaagccgaagagtgctgctgcggcgctgccactgccggattgggaaccgctttggtccctgtagggaacggatggcgggagggattccgagtgggggcacgcgtggggagcggagcgtgcagcgaccgtcgcggcggaatgagtggcgaggcagatggagtggagccgtcgaggccgcctgctttccttcggttcgttgcgccgaggtgaggtggggccggccccaatgccaaagcggaagatggagaggactgcactgcacaggcatcatcgcactcgcatgcgcatgcgacggaacggagtgcgggccgtagtatccgccccccctcaactccctgtagcaaagcctttatagacgtgcaaaccaggtcacctggcggtggtcatacattgaaggagtcttcgaaaccattgctttacttctgtaacaccctgttttaaaggaacaaagctgggtgcatctcatacatgcgccaagaag

SEQ ID NO: 153331 - DNA, 1908 bp, Zea Mays
attacctatcatggtcttggcgtggacgtagatcatgaagcgcctcgcccgctgcgccctctcgtagtcggtgttggggtccgggtgctccggcggcacgtactcgccggggcatggcgcctcgcggttgccgaggcagaagaaagtgaggtagtccctggggtcggcctggagtcccttggcgcgaatggccatgaggacgtccttgtacatcatctccatggtgcggcgctgccagtccaggatggcctgcacggagccgctctccggcacgccctccggccacaggggcaccaccacgtacacggcgaaccgctcaccggcctcgatcttgctgacgatcttgagcgacagctccctagggatgaggtgcagcgcgttgatgtcctccaccgacacgccgtcgttctgccgccacgcgtaggagctccccaggaagtactggttctcgatgtacacgaagtcccgcgcccgccggatggcgtggatgtacgcgtcctggatgctgcgctccatcacgtggtccttgccggtcaccagcccgagcgccgcggcctcccggggcgcgtccgcggagggctcggggaaccccgccgccgcgccgccgtcgatggaccggaacacctgcacgttccacgactcggcgtcgccccgcggggccgcctcgcgctccgcccactccttgttcagcgccaccaggaggttgtcgcccttgccctgcttcctccacctctgctcgaagttctccagcacgtcccacgccgccgggccctcgacgcggcagtggatgtcgtgccacggctccctcggcccgcccttgctgatggacgcgccggggaagttgggctggtggaagtccctgttgtgcgtggtgcccagcgtgcggaacagcgggtggtcctgcgtgtcgtacctcccgtcgcacatgtcgatgccgccgaggaagcccacgaggcccggcggcgaccacggcgccggcctgccgccgccgtcgacgatcaccgtcttctggtggtgcgtgaacatggtgtccgtctcgatatcctgcacgtagctccggtccttgtcggggttccgcgggcacagcacgcactgcacgcgcgtgccacggaagaaggccgccgtgtcctggtcgcctgtggccatcagcccgtcgcgcctgatggggccgagccccaccgacgtgcggtcgtcccacaccagcatcagcaccgtgacgccctcgtttgccttccggatgagcagctcgccaaggttctcggacgccgccgccgcctgcttccgtgggtcgcgcaccagcacgacgtcggtgttcacggaccacccggcgatgtacaccatcctgcgggccctgttgatcgcgtcgaacacgtccacccagcaccggcgcggctcgtagaacctgccccccgcgagccggatgcgcggcgagaagtcggcggcgacatgcgcgtcctcgtacagccgcacccggcagccgcgccgctgcttgaagaaggtgtggggcacgccgtcgtacgccgcgctgccgaccccggcgccccagccggcggtcgggtccgcggcgacgtcggtgaactggagctggacgtgtatctggtcaccaccttccagcggctggcgcttctcgtcgcggatggggagccacaggttcaccttgttgccggcgacgacgctatccgtgggcaggtaggcgcggccgatgagcgtggcgccgatggcgttgtcggccttgacggtgaagatgatgtcgctggcgtcgtgcgcgcagtagatgcggaaggactcgtcccacttgggggagttgacggggggcaccatgcgcgtccgccccacgcgagccttgtcgatgtccaccgtcgcgtataacttgccgtccgtgccgaggccgacggcattctccagctg

SEQ ID NO: 153332 - DNA, 2077 bp, Zea Mays
ttttttctgctgatccacatacaggtggttactagtatttaggttctgcaattgaagctgaccttaaaaattgaatgtatgtaattcactgtttggattgtttgtttggtctgtaacaaatggcttgtgatttggtcttaatattaaacctgatggaaggtctatttctttggaccagatgcaaggtcaaaattcatcatgattttgtcacatgtcatgacatggtccagggatggatcatgttgtatgaaattgatgagaaccattgttatgctagcaaagccacaaagtatatgagaaagttcattgtgccagtccatgcatagatagttgcaatattttgtggctagaatctgtagtagcaggtcacaggtcatacttatccttttatcaaaataacacacttggggtttctaaaaaaggatttgaggtcgttctcagcttctgaacccagtggacgtaccaactcagaattgcgtgcaagctcagccttctctgcatggtttagttatgctttaatttatataagaaattatatgcacattttcaaaaacttctggagaatttgagttgcttttcatgcttacaatagattgatggagccatccacatttgatgattctatggattaccaaatccttgcgtgccttgtaactaataagacgttggcaaaagatcgctcttcatgggatcctactgatgatgaggtgcagcgtgttgttctgtctttgttggaaggttccaaggatattgatgccaataaactaaaacaatatattgccgaatttgagatgatagtcaaaaacaattgggaatgttctgaacgaattgtggcaaataaggagatgatgcttgatgtgttcgactatgtcgttgctgactttgtccccaatttttatcaggagccaacccttcgtttgccttctatttctcctagaagtaatggttgttggaccaaagagcagctgttcaagaaattgacgggccctataagtatgaaccattgtaccgaaaaacttaagaaatgtggtttttcaaaacagcaactttgggatgctatcgatatattgaaggctgatttagaattgcgtcgggtattcatcagattagaagattctgaggcaagagggtatatgattcatgccctgcgtaacagcaatgtttagctgtctgtaataaatttatcactcttatgaggtttgggatgtgaggaagaccatttcgcctgtaagggaatttgttggccattcagaaagtttcatttctctcactgctctttgtgttttccccatctaatgcttatctatatgtattcataatatatttaactccatataaaaacacagcccaaagcaagatttttttgacccaaaacagcctgctttctgttcttgtgcgtacgcaccccgcccgcgctgcagttctgactcgagtcccgttggttcctatccccgtaaggccagaacagaaataacttagagcaacttagagctcagaacagaaataactgagagccagataggaataactgaggtacgtagaacacaataactgagttgtcacaacagaataactgagtatgcacagcagaaataactgagatcctgtaggaatcacagagtagcgagaacaaaaataactgagtagggagaacagaataactgatgaataactgattagtcagcagagaataactaagtcccgagaacaaaaacaacggagcaggtataacttgaattccttctttttcgatttcccatccttctcctgctgcttcctcttccccttgcttgcgttgtgcaaaccaaacccccagttctattcattcatttggccgcctcatttttaaaacaagatgcacctctctcgcatgtactacgtatttaatctgatttgatttatcataatgtattttaagcatagacttaatttttttcagattttgccggcataggagtacatattttcaaagctaaatattaggtgcttgttggcgatagacggacccatcggtctgctcatcggcggccccgaccatcgcatcaaatattttgactagagcagaggaagtgacccc

SEQ ID NO: 153333 - DNA, 570 bp, Zea Mays
atggagccatccacatttgatgattctatggattaccaaatccttgcgtgccttgtaactaataagacgttggcaaaagatcgctcttcatgggatcctactgatgatgaggtgcagcgtgttgttctgtctttgttggaaggttccaaggatattgatgccaataaactaaaacaatatattgccgaatttgagatgatagtcaaaaacaattgggaatgttctgaacgaattgtggcaaataaggagatgatgcttgatgtgttcgactatgtcgttgctgactttgtccccaatttttatcaggagccaacccttcgtttgccttctatttctcctagaagtaatggttgttggaccaaagagcagctgttcaagaaattgacgggccctataagtatgaaccattgtaccgaaaaacttaagaaatgtggtttttcaaaacagcaactttgggatgctatcgatatattgaaggctgatttagaattgcgtcgggtattcatcagattagaagattctgaggcaagagggtatatgattcatgccctgcgtaacagcaatgtttag

SEQ ID NO: 153334 - DNA, 1367 bp, Zea Mays
gttggacgggtgacccaccggctcgggaacggcaacccaggacggcaggcgcggcgacacatggtcggggtacagggcctggccgtggccgcctcctgctcttcgatctcacgctgcgatggagcggtacgaggtgatcagggacatcggctcgggcaacttcggggtgacaaagctcgtccgggacgtcaggaccaaggagctcttcgccgtcaagttcatcgagagagggcaaaagattgatgagcatgttcagagggagattatgaaccaccggtccctgaagcacccaaacataattagattcaaggaggtcgtgctaactcccacgcatttggcaatagttatggaatatgctgctgggggtgagctatttgaaaggatctgcagtgcggggagatttagtgaggatgaggcaaggttcttcttccagcaactgatttcgggagtgagctattgccattccatgcaagtatgccatagagatctgaaactagaaaacactctcctagatggtagtgtcgcaccccggctcaagatctgtgatttcggttactccaagtcttctgtgctgcactctcaaccgaaatcaactgttggcacacctgcatacattgctccagaggtcctctctagaaaagagtacgatggaaaggttgctgatgtctggtcttgtggagtaacactatatgtgatgctcgtcggcgcgtatcctttcgaagaccctgatgacccgaagaacttccgcaagacgatcacgagaatactcagtgtacagtactcaattccagactacgttcgcgttacaatggagtgcggacatctgctgtctcggatatttgttggaaatcctgagcagagaataaccattcctgagatcaagaagcacccgtggttcctcaagaatctgcccatcgagatgaccgacgagtaccagcagagcatgcagttggcagacatgaacaccccggggcaaagcctggaggaggtgatggcgatcatccaggaggcgcggaagccaggggacgccatgaaccttgccgggcagctgccctgcctggggagcgtggaccttgacgacattgattttgacgatattgacgacatcgacactgagaacagcggcgacttcgtttgtgcagtgtgactgtgtgaggctcagcagggcaggagctagcttcctttggtcgttggtgtctgtagatccttgttgtgctatgcttccattcgttcctggatcagatatgttgttgtgtaaccgagaaaattggcgttgctgtggacaatagaaacagacccataaacttatgcggaaatctaccccccaaaaaagaaaaaaaatcctctgtgatctgttgaattagaac

SEQ ID NO: 153335 - DNA, 1426 bp, Zea Mays
acaggggtacgtctctttctccacgctcgatgcccagtgcaagtgcccaacctcagactcctcccggaccagctgacctccgctccattcaccccacaccttcttcttcgtcgtcgtcttcccctgctgcggttagcctggccgtggccgcctcctgctcttcgatctcacgctgcgatggagcggtacgaggtgatcagggacatcggctcgggcaacttcggggtgacaaagctcgtccgggacgtcaggaccaaggagctcttcgccgtcaagttcatcgagagagggcaaaagattgatgagcatgttcagagggagattatgaaccaccggtccctgaagcacccaaacataattagattcaaggaggtcgtgctaactcccacgcatttggcaatagttatggaatatgctgctgggggtgagctatttgaaaggatctgcagtgcggggagatttagtgaggatgaggcaaggttcttcttccagcaactgatttcgggagtgagctattgccattccatgcaagtatgccatagagatctgaaactagaaaacactctcctagatggtagtgtcgcaccccggctcaagatctgtgatttcggttactccaagtcttctgtgctgcactctcaaccgaaatcaactgttggcacacctgcatacattgctccagaggtcctctctagaaaagagtacgatggaaaggttgctgatgtctggtcttgtggagtaacactatatgtgatgctcgtcggcgcgtatcctttcgaagaccctgatgacccgaagaacttccgcaagacgatcacgagaatactcagtgtacagtactcaattccagactacgttcgcgttacaatggagtgcggacatctgctgtctcggatatttgttggaaatcctgagcagagaataaccattcctgagatcaagaagcacccgtggttcctcaagaatctgcccatcgagatgaccgacgagtaccagcagagcatgcagttggcagacatgaacaccccggggcaaagcctggaggaggtgatggcgatcatccaggaggcgcggaagccaggggacgccatgaaccttgccgggcagctgccctgcctggggagcgtggaccttgacgacattgattttgacgatattgacgacatcgacactgagaacagcggcgacttcgtttgtgcagtgtgactgtgtgaggctcagcagggcaggagctagcttcctttggtcgttggtgtctgtagatccttgttgtgctatgcttccattcgttcctggatcagatatgttgttgtgtaaccgagaaaattggcgttgctgtggacaatagaaacagacccataaacttatgcggaaatctaccccccaaaaaagaaaaaaaatcctctgtgatctgttgaattagaac

SEQ ID NO: 153336 - DNA, 1398 bp, Zea Mays
aggggtacgtctctttctccacgctcgatgcccagtgcaagtgcccaacctcagactcctcccggaccagctgacctccgctccattcaccccacaccttcttcttcgtcgtcgtcttcccctgctgcggttagcctggccgtggccgcctcctgctcttcgatctcacgctgcgatggagcggtacgaggtgatcagggacatcggctcgggcaacttcggggtgacaaagctcgtccgggacgtcaggaccaaggagctcttcgccgtcaagttcatcgagagagggcaaaagattgatgagcatgttcagagggagattatgaaccaccggtccctgaagcacccaaacataattagattcaaggaggtcgtgctaactcccacgcatttggcaatagttatggaatatgctgctgggggtgagctatttgaaaggatctgcagtgcggggagatttagtgaggatgaggcaaggttcttcttccagcaactgatttcgggagtgagctattgccattccatgcaagtatgccatagagatctgaaactagaaaacactctcctagatggtagtgtcgcaccccggctcatcttctgtgctgcactctcaaccgaaatcaactgttggcacacctgcatacattgctccagaggtcctctctagaaaagagtacgatggaaaggttgctgatgtctggtcttgtggagtaacactatatgtgatgctcgtcggcgcgtatcctttcgaagaccctgatgacccgaagaacttccgcaagacgatcacgagaatactcagtgtacagtactcaattccagactacgttcgcgttacaatggagtgcggacatctgctgtctcggatatttgttggaaatcctgagcagagaataaccattcctgagatcaagaagcacccgtggttcctcaagaatctgcccatcgagatgaccgacgagtaccagcagagcatgcagttggcagacatgaacaccccggggcaaagcctggaggaggtgatggcgatcatccaggaggcgcggaagccaggggacgccatgaaccttgccgggcagctgccctgcctggggagcgtggaccttgacgacattgattttgacgatattgacgacatcgacactgagaacagcggcgacttcgtttgtgcagtgtgactgtgtgaggctcagcagggcaggagctagcttcctttggtcgttggtgtctgtagatccttgttgtgctatgcttccattcgttcctggatcagatatgttgttgtgtaaccgagaaaattggcgttgctgtggacaatagaaacagacccataaacttatgcggaaatctaccccccaaaaaagaaaaaaaatcctctgtgatctgttgaattagaac

SEQ ID NO: 153337 - DNA, 477 bp, Zea Mays
tccttcgtgtattcctcctcattcacgtccccagtcacgacgccgtacgcgtagactcgacagctcacgccgtattgccctcttgatgctcgacatcgccaagtccagcgctcgcctctctagctcgactcatcggacctgccctttctcagcttgctgtctcccagccgtgtgccatgcctctgctcgacatcgactagcgtcgctagccatcgcgcccacctgctggtcgccgagtttgccgacgctcgtcagtgtcgcatccaacctcgcagagctcgacaccaccaagatcacgttactggtggatcaatcgcttggtgaaacaatttcctgaaggctggtcatcaccctgaagacttgtgaaattttatttcctcagtcttcggctcttctctgcaacaaaggtcttagttttgtgctgctgatggtggtgttaagtgccggtgggctcagcttttttataagtctaagtaa

SEQ ID NO: 153338 - DNA, 1634 bp, Zea Mays
gttcctctctcccacctctctgcacgatgcgtgcccggacccgaaaattctctccaaaccagctctgagcctctgacagcggtacactcgtgttcctctcccccacgccctccctcccatcgcgccatgcctcctcccccagacctctcccctccccacgatccttctttggccaggcggtctgtcggtgcttgcgcccgggcccctcgcgcgctcgcccggcgtcccacggacagcaggggcggcggcggcaagccggtgcgtcagcttctatcgcacgtcgcccgcacgatgcgacccgcgcccgcggcccgccccctttccctcgccgccacacgatggtcgacaccgggcggagcttcgtggtcaatcaccggggcccgtccgagaagtcccctccgtcaccgccaccgacgcaggcggaggccacgacttccctaacgaaggcaggcgcgccggtggagcccgcgtcgcccccaccgccgtcctagagccgatcggccaagcccaccaaggttgtggttgcgcgggcggaggaccccggtgcgccgcgcggcaaggcggtgggcccagccgcggtcgacgtcctcgacagttccgtccgtggcaaacctgcagggcatggccaggccgtcgggcatcaacatggcctctttctccgccgtgtccaattccggaggcgcgtggagggtttttttatatatctttatggttttcttggttacagggaggaggaagaagaataggccggtgagggtgttcccgacggacaaggggacgctctggaagacacgatccgccgatggccacgctgagtcctggggtagattgatttcgcagtctagattggtgaggagatttgtatggtcaggtatcgaatacaattcttccaagagatatacgtgtactgggttggtgtcatgttccagcatattttaatgcaagatgcggtcgctggcgctcatgctgacgtggtccgtcgccaccgtgctcactctcctcgccgtgggctcgccccatccaccacctcagcaatgctagaacggaaaaccaggttgtgcaaaagagtacttgcgactttgaaggtcttatggtcagtaatagaggatatgacgaagtacatatcaccagaggatgcaaaaagattgatatctaaagaggtatatactagagcgaagagcgaacaacaatctaagattgcagcaagaaaggtccagcaagaaccagattatgtacatgtatatgtgtggatagaactaaccgccgatattatcctaaatctaagcacggtcacccacaaaaaatgtgtaatttgcttcttcccagacatacgaaatgtgttatgcggactatgttggctattggaaaggcattctaaatgccgtctgtaatgtttgatggttacaaactattgtcgtgctatgtaatatgcggtcttgacataaccgctaggtttgtgatgttgttgcatgttacagctgcaactttatattattgtgccatgtgttatttgtgttcttttcttttttgctatcattatgtctctctctattacaagagaaaataatgtagtatctataactttggttaagcttcattttcagcggttgatcctaacacctccaactgtaggg

SEQ ID NO: 153339 - DNA, 1595 bp, Zea Mays
ggacccgaaaattctctccaaaccagctctgagcctctgacagcggtacactcgtgttcctctcccccacgccctccctcccatcgcgccatgcctcctcccccagacctctcccctccccacgatccttctttggccaggcggtctgtcggtgcttgcgcccgggcccctcgcgcgctcgcccggcgtcccacggacagcaggggcggcggcggcaagccggtgcgtcagcttctatcgcacgtcgcccgcacgatgcgacccgcgcccgcggcccgccccctttccctcgccgccacacgatggtcgacaccgggcggagcttcgtggtcaatcaccggggcccgtccgagaagtcccctccgtcaccgccaccgacgcaggcggaggccacgacttccctaacgaaggcaggcgcgccggtggagcccgcgtcgcccccaccgccgtcctagagccgatcggccaagcccaccaaggttgttgcgcgggcggaggaccccggtgcgccgcgcggcaaggcggtgggcccagccgcggtcgacgtcctcgacagttccgtccgtggcaaacctgcagggcatggccaggccgtcgggcatcaacatggcctctttctccgccgtgtccaattccggaggcgcgtggagggtttttttatatatctttatggttttcttggttacagggaggaggaagaagaataggccggtgagggtgttcccgacggacaaggggacgctctggaagacacgatccgccgatggccacgctgagtcctggggtagattgatttcgcagtctagattggtgaggagatttgtatggtcaggtatcgaatacaattcttccaagagatatacgtgtactgggttggtgtcatgttccagcatattttaatgcaagatgcggtcgctggcgctcatgctgacgtggtccgtcgccaccgtgctcactctcctcgccgtgggctcgccccatccaccacctcagcaatgctagaacggaaaaccaggttgtgcaaaagagtacttgcgactttgaaggtcttatggtcagtaatagaggatatgacgaagtacatatcaccagaggatgcaaaaagattgatatctaaagaggtatatactagagcgaagagcgaacaacaatctaagattgcagcaagaaaggtccagcaagaaccagattatgtacatgtatatgtgtggatagaactaaccgccgatattatcctaaatctaagcacggtcacccacaaaaaatgtgtaatttgcttcttcccagacatacgaaatgtgttatgcggactatgttggctattggaaaggcattctaaatgccgtctgtaatgtttgatggttacaaactattgtcgtgctatgtaatatgcggtcttgacataaccgctaggtttgtgatgttgttgcatgttacagctgcaactttatattattgtgccatgtgttatttgtgttcttttcttttttgctatcattatgtctctctctattacaagagaaaataatgtagtatctataactttggttaagcttcattttcagcggttgatcctaacacctccaactgtaggg

SEQ ID NO: 153340 - DNA, 956 bp, Zea Mays
tacataccgggcaacgctcacttgccgcaggccacgcatcttggagatggacaggtacgcgcccgcgctcctctgcctttgcctcggcgcgctccgtgccggttccgccgcgcctaccaccaccgggacccccgacggctcggagctgtgggggtacgtcgaagtccggccaaaggctcacctgttctggtggtactacaagagcccgcaccggacgtcgacgcccagcaagccatggccgaccatcctctggctgcagggcggcccgggcgcgtccggcgtcgggctcggcaacttcctggaggtggggccgctggacgtggacctgaagccgcggagctcgacgtggctgcagaaggccgacctcatcttcgtggacaacccggtgggcgtcgggtacagctacgtggaggacgacagcctgctggtgacgaccgactgggagcaggcggcggacgccaccgcgctgctcaaggcgctggccaaggaggtgccgacgctgcagggcagcccgctgttcctggtcgccgagtcctacggcggcaagtacgccgccacgctgggcgtgtccgtcgccagggccgtccgcgcgggcgagctcaaggtcacgctggcaggttggtaaactaccagtcacagtcagtcaaaggtgttgcctgtttcgtgtggatatgataataatgatacaactaccaagtctgtgttgtcgtctgtttcgcgcgcgcgcgcacaaaggtgttgccctcggggatagcttcgtctcaccggtggatttcacggtctcgtacgtgccgctgctcctgagcgtgtcgaggctggatgacaacgccgccggcgaagcaaacaagtaattagctagcacacacgacgctaccaattcgtctctctcccaatcagacacaagctagctcacgacatagccggccggcgggctacgcatccatgtctcaggagga

SEQ ID NO: 153341 - DNA, 1423 bp, Zea Mays
tacataccgggcaacgctcacttgccgcaggccacgcatcttggagatggacaggtacgcgcccgcgctcctctgcctttgcctcggcgcgctccgtgccggttccgccgcgcctaccaccaccgggacccccgacggctcggagctgtgggggtacgtcgaagtccggccaaaggctcacctgttctggtggtactacaagagcccgcaccggacgtcgacgcccagcaagccatggccgaccatcctctggctgcagggcggcccgggcgcgtccggcgtcgggctcggcaacttcctggaggtggggccgctggacgtggacctgaagccgcggagctcgacgtggctgcagaaggccgacctcatcttcgtggacaacccggtgggcgtcgggtacagctacgtggaggacgacagcctgctggtgacgaccgactgggagcaggcggcggacgccaccgcgctgctcaaggcgctggccaaggaggtgccgacgctgcagggcagcccgctgttcctggtcgccgagtcctacggcggcaagtacgccgccacgctgggcgtgtccgtcgccagggccgtccgcgcgggcgagctcaaggtcacgctggcaggtgttgccctcggggatagcttcgtctcaccggtggatttcacggtctcgtacgtgccgctgctcctgagcgtgtcgaggctggatgacaacgccgccggcgaagcaaacaagaggactcagacggtgaaggatcagatcgccgcggggcagttcgcggcgtctcaggggtcgtggaacgacctgctggccttcatagacaccaagagcggcagcgtggacgtgtacaacttccttctcgacagcggcatggacccagtgtccacagactcgtcgccgtcgtcgtcgtcgcccagcagcgtgctgcaggcgctgaggtactcgacgtacctcggcagccagctgggggactcgtccgccggctcctccaacaccatcgacggcatcatgaacggggtcatcaaggagaagctcaagatcatccccaaggacgtcaggtgggtggaggtctccaatgccgtctactacgcgctggtcaacgacttcatgaagccacgaatcgacgagattgatgagctgctatcgtatggtgtgaatgttactgtatacaacgggcaggtcagtagctctctcccccattcttactgtgtgtatatagacctccagagaaaatgaaaatagtgggctgggccaccatgcatgttaagataggatgaaaatgctatagtgccatagtgcttcaacgatggtgatccagacactactgaaagcgaaccgacgctgtttccattgatcctgggattgaaacatgccgtgcaagcgaccgagtatatcatactataatatactcctaagaatgaaaaaaaa

SEQ ID NO: 153342 - DNA, 1611 bp, Zea Mays
tacataccgggcaacgctcacttgccgcaggccacgcatcttggagatggacaggtacgcgcccgcgctcctctgcctttgcctcggcgcgctccgtgccggttccgccgcgcctaccaccaccgggacccccgacggctcggagctgtgggggtacgtcgaagtccggccaaaggctcacctgttctggtggtactacaagagcccgcaccggacgtcgacgcccagcaagccatggccgaccatcctctggctgcagggcggcccgggcgcgtccggcgtcgggctcggcaacttcctggaggtggggccgctggacgtggacctgaagccgcggagctcgacgtggctgcagaaggccgacctcatcttcgtggacaacccggtgggcgtcgggtacagctacgtggaggacgacagcctgctggtgacgaccgactgggagcaggcggcggacgccaccgcgctgctcaaggcgctggccaaggaggtgccgacgctgcagggcagcccgctgttcctggtcgccgagtcctacggcggcaagtacgccgccacgctgggcgtgtccgtcgccagggccgtccgcgcgggcgagctcaaggtcacgctggcaggtgttgccctcggggatagcttcgtctcaccggtggatttcacggtctcgtacgtgccgctgctcctgagcgtgtcgaggctggatgacaacgccgccggcgaagcaaacaagaggactcagacggtgaaggatcagatcgccgcggggcagttcgcggcgtctcaggggtcgtggaacgacctgctggccttcatagacaccaagagcggcagcgtggacgtgtacaacttccttctcgacagcggcatggacccagtgtccacagactcgtcgccgtcgtcgtcgtcgcccagcagcgtgctgcaggcgctgaggtactcgacgtacctcggcagccagctgggggactcgtccgccggctcctccaacaccatcgacggcatcatgaacggggtcatcaaggagaagctcaagatcatccccaaggacgtcaggtgggtggaggtctccaatgccgtctactacgcgctggtcaacgacttcatgaagccacgaatcgacgagattgatgagctgctatcgtatggtgtgaatgttactgtatacaacgggcagctcgacgtgatctgctctaccgacggcgcagaagcatgggttcagaagctcaagtgggacggactcaagaccttcctgagcctgcccaggcagcctctgtactgcggccccggcaaagggaccaaggcgttcgtccggtcctacaagaacctgcacttctactggattcttggggctggccactttgtgcctgccgaccagccttgcatcgcgctgagcatgatcggcagcatcacccagtctccagccagttagaagggttttgtttatgtcatacgcaaaggtcaaatgaggaggactctcgagtacagtgaaggtcgcatatatagttgaaagccaattcagttgatcatgatacatgcatacagttctccatcatgtgaaagaaaaaaaatacagcactcgcgtgacaggacaatataatcattttttcagtg

SEQ ID NO: 153343 - DNA, 3026 bp, Zea Mays
cggcttttaactatttcctcctctcctcccgatccagctagcctggcctcccacctcccctcccctctcttgaactgaatcccccactccgtcctccagttcgatcgcgttcgcggccccccactccgtgttccggaataagtagccggcggtttcctcaccccaggttttgcagttgctggggagtgggaaattcgtccggctccggtttggccaatgctcctgcggtttcttggagaggccgctgaagcagcagcccttgcctgagggattctccttttctcgggcggagagttcggttgcggcggaaaaaaaaaagaattctttcgtcggattggcccaagttcttggttgatccgttacaaagcccccactgtacgctgtgttagcctttttccacgcgtttctttccttactctagatccgtgtccccgcccgattatttgggggaataggcagcccatcgatcgggggaagagggatttggaggcctgacctccgatggaggtgcacgccgacgtcgatgggtccggtgtgcccctggccgtgctcctcaagcgggagctgtgcaaccagaaggtggagaggccggacattctgttcggggaggccaacaagagcaagaaaggggaggacttcacgctcctcttgcccaggtgccaccgcaccacaggcgaaggcggcggcagtggcggcggcgagaatgcaggcggcggcgacgacgacgacaccatttccgtgtttgcgatttttgatggacacaatggctctttagctgccatatacacacgggagaatctaataaacaatgtgctggctgctattcctccaaatctcacaagtgaggagtggacagctgcgttgccaagggcactagttgctggttttgtaaaaacggataaagacttccaaacaaaagctgcacgttcagggaccactgtgacttttgttataatagatggatgggttgtcactgtagcatcagttggcgattcacgatgtattctagaatctgctgaaggttcagtatattttttatcagcagatcatcgcctggatgctaatgaagaggaggtggagcgtgttacagcaagtggtggtgaagttgggagaataaatattgctgggggtgctgggattggtccgctcagatgctggccaggcggattgtgtctatcaaggtcaataggtgacattgacgtcggggaatttatagttcctgtcccacatgtgaagcaagtaaagttgtccaatgctggtgggcggcttgtcattgccagtgatggtgtgtgggatgcgctgtgttttcaagaggctctgaactacatcaggggtctaccagccgaagctgctgctaatcgaattgttaaggaagctgtcacttcaaagggattaagagatgatactacttgcatagtagttgacatactacctccagaaaagttaagccccccactaaagcgacctggaaaaggagtcatcaaaactctgttccgtcggaggccctcggatgaaatgtctgaagatcagatggacagaggatgtttagaacctgatgtcgtggaggaaatatacgaggagggctctgcaatgcttgctcgaaggttgaatataaattacccatcgggaaatatgttcaagctgcatgattgtgctgtctgccaattggagatgaaacctggtgagggcacctctgttcacggtaacatgcccaagcattcaagagttgacccctggggtggtccttttctctgttcctcctgtcaattgaaaaaggaggccatggaagggaagctacattcaagaaattcccaatttgatgttcgacctatgcctaagtaggcattccctggcggtttctatacattggttcatacacacaaactaccactaacaacatcattatcaaataaagtagactcgacaatatcatcttattcatcaatcaatgtctgacagaatcaggaattttcacctactacattcttatcaaatggtggtcggtacagattatagagacttatgtcatttatatgatgcagtacagttgtttcgtagaaggttaaaatatgagcttatcaagttgtattcagataaaccacaactgcctctaggttcagatgaactggtagccttaagctgtgctgccttccgtagctgtcattgattatcaagtctgcacgacttgtctattagtgaataccagtcgttggttgagtcccatttagtctggacgtagtagttttttttcccacttgtcacactgcttgatgcgtgaccataaaggccgccttttccagtctgagtcacacaatgcttctcccttgttaatcctttcaccacatggattttcctttcttttttattctttaccatgtgtatagtcatgaggcacatcagtacatcacattgactacctttttttcgcatttacaccataattctgcggttgtaccattgtacatttgtactcacaattttctaacaaatatttattccttttctttttggaacttttgcttctctgaaacagcagcagagtgacactgcgcgccctcttgcatatcgaatttaagctatggcagccattgttttctgctgcaaggatgagttcattacttttttggccaaggcagcaagattctcaatacgggagtcatttgtatagacgttcctaatttcctactcatctttcccatgaaagagcccatacagatacagtcttccaccacgatttgaagccagttgcagtacatgtgggttgctttttactaagatgcatgaagtttagaataatgtacgtagatgctaatgcatagacatggcatggtattcttagcatcattttgctaaggggtgttttgaatgcagagtaaatacttagagcatatccaagaggcactttatttttgtctctctgtttaactctctatttaatttttcataatgattacactctatatgtagcatttcacttcaacatactatctatttagttttgctagtcagatgactagccaaattta

SEQ ID NO: 153344 - DNA, 2492 bp, Zea Mays
cggcttttaactatttcctcctctcctcccgatccagctagcctggcctcccacctcccctcccctctcttgaactgaatcccccactccgtcctccagttcgatcgcgttcgcggccccccactccgtgttccggaataagtagccggcggtttcctcaccccaggttttgcagttgctggggagtgggaaattcgtccggctccggtttggccaatgctcctgcggtttcttggagaggccgctgaagcagcagcccttgcctgagggattctccttttctcgggcggagagttcggttgcggcggaaaaaaaaaagaattctttcgtcggattggcccaagttcttggttgatccgttacaaagcccccactgtacgctgtgttagcctttttccacgcgtttctttccttactctagatccgtgtccccgcccgattatttgggggaataggcagcccatcgatcgggggaagagggatttggaggcctgacctccgatggaggtgcacgccgacgtcgatgggtccggtgtgcccctggccgtgctcctcaagcgggagctgtgcaaccagaaggtggagaggccggacattctgttcggggaggccaacaagagcaagaaaggggaggacttcacgctcctcttgcccaggtgccaccgcaccacaggcgaaggcggcggcagtggcggcggcgagaatgcaggcggcggcgacgacgacgacaccatttccgtgtttgcgatttttgatggacacaatggctctttagctgccatatacacacgggagaatctaataaacaatgtgctggctgctattcctccaaatctcacaagtgaggagtggacagctgcgttgccaagggcactagttgctggttttgtaaaaacggataaagacttccaaacaaaagctgcacgttcagggaccactgtgacttttgttataatagatggatgggttgtcactgtagcatcagttggcgattcacgatgtattctagaatctgctgaaggttcagtatattttttatcagcagatcatcgcctggatgctaatgaagaggaggtggagcgtgttacagcaagtggtggtgaagttgggagaataaatattgctgggggtgctgggattggtccgctcagatgctggccaggcggattgtgtctatcaaggtcaataggtgacattgacgtcggggaatttatagttcctgtcccacatgtgaagcaagtaaagttgtccaatgctggtgggcggcttgtcattgccagtgatggtgtgtgggatgcgctgtgttttcaagaggctctgaactacatcaggggtctaccagccgaagctgctgctaatcgaattgttaaggaagctgtcacttcaaagggattaagagatgatactacttgcatagtagttgacatactacctccagaaaagttaagccccccactaaagcgacctggaaaaggagtcatcaaaactctgttccgtcggaggccctcggatgaaatgtctgaagatcagatggacagaggatgtttagaacctgatgtcgtggaggaaatatacgaggagggctctgcaatgcttgctcgaaggttgaatataaattacccatcgggaaatatgttcaagctgcatgattgtgctgtctgccaattggagatgaaacctggtgagggcacctctgttcacggtaacatgcccaagcattcaagagttgacccctggggtggtccttttctctgttcctcctgtcaattgaaaaaggaggccatggaagggaagctacattcaagaaattcccaatttgatgttcgacctatgcctaagtaggcattccctggcggtttctatacattggttcatacacacaaactaccactaacaacatcattatcaaataaagtagactcgacaatatcatcttattcatcaatcaatgtctgacagaatcaggaattttcacctactacattcttatcaaatggtgcagcagagtgacactgcgcgccctcttgcatatcgaatttaagctatggcagccattgttttctgctgcaaggatgagttcattacttttttggccaaggcagcaagattctcaatacgggagtcatttgtatagacgttcctaatttcctactcatctttcccatgaaagagcccatacagatacagtcttccaccacgatttgaagccagttgcagtacatgtgggttgctttttactaagatgcatgaagtttagaataatgtacgtagatgctaatgcatagacatggcatggtattcttagcatcattttgctaaggggtgttttgaatgcagagtaaatacttagagcatatccaagaggcactttatttttgtctctctgtttaactctctatttaatttttcataatgattacactctatatgtagcatttcacttcaacatactatctatttagttttgctagtcagatgactagccaaattta

SEQ ID NO: 153345 - DNA, 2489 bp, Zea Mays
cggcttttaactatttcctcctctcctcccgatccagctagcctggcctcccacctcccctcccctctcttgaactgaatcccccactccgtcctccagttcgatcgcgttcgcggccccccactccgtgttccggaataagtagccggcggtttcctcaccccaggttttgcagttgctggggagtgggaaattcgtccggctccggtttggccaatgctcctgcggtttcttggagaggccgctgaagcagcagcccttgcctgagggattctccttttctcgggcggagagttcggttgcggcggaaaaaaaaaagaattctttcgtcggattggcccaagttcttggttgatccgttacaaagcccccactgtacgctgtgttagcctttttccacgcgtttctttccttactctagatccgtgtccccgcccgattatttgggggaataggcagcccatcgatcgggggaagagggatttggaggcctgacctccgatggaggtgcacgccgacgtcgatgggtccggtgtgcccctggccgtgctcctcaagcgggagctgtgcaaccagaaggtggagaggccggacattctgttcggggaggccaacaagagcaagaaaggggaggacttcacgctcctcttgcccaggtgccaccgcaccacaggcgaaggcggcggcagtggcggcggcgagaatgcaggcggcggcgacgacgacgacaccatttccgtgtttgcgatttttgatggacacaatggctctttagctgccatatacacacgggagaatctaataaacaatgtgctggctgctattcctccaaatctcacaagtgaggagtggacagctgcgttgccaagggcactagttgctggttttgtaaaaacggataaagacttccaaacaaaagctgcacgttcagggaccactgtgacttttgttataatagatggatgggttgtcactgtagcatcagttggcgattcacgatgtattctagaatctgctgaaggttcagtatattttttatcagcagatcatcgcctggatgctaatgaagaggaggtggagcgtgttacagcaagtggtggtgaagttgggagaataaatattgctgggggtgctgggattggtccgctcagatgctggccaggcggattgtgtctatcaaggtcaataggtgacattgacgtcggggaatttatagttcctgtcccacatgtgaagcaagtaaagttgtccaatgctggtgggcggcttgtcattgccagtgatggtgtgtgggatgcgctgtgttttcaagaggctctgaactacatcaggggtctaccagccgaagctgctgctaatcgaattgttaaggaagctgtcacttcaaagggattaagagatgatactacttgcatagtagttgacatactacctccagaaaagttaagccccccactaaagcgacctggaaaaggagtcatcaaaactctgttccgtcggaggccctcggatgaaatgtctgaagatcagatggacagaggatgtttagaacctgatgtcgtggaggaaatatacgaggagggctctgcaatgcttgctcgaaggttgaatataaattacccatcgggaaatatgttcaagctgcatgattgtgctgtctgccaattggagatgaaacctggtgagggcacctctgttcacggtaacatgcccaagcattcaagagttgacccctggggtggtccttttctctgttcctcctgtcaattgaaaaaggaggccatggaagggaagctacattcaagaaattcccaatttgatgttcgacctatgcctaagtaggcattccctggcggtttctatacattggttcatacacacaaactaccactaacaacatcattatcaaataaagtagactcgacaatatcatcttattcatcaatcaatgtctgacagaatcaggaattttcacctactacattcttatcaaatggtgcagagtgacactgcgcgccctcttgcatatcgaatttaagctatggcagccattgttttctgctgcaaggatgagttcattacttttttggccaaggcagcaagattctcaatacgggagtcatttgtatagacgttcctaatttcctactcatctttcccatgaaagagcccatacagatacagtcttccaccacgatttgaagccagttgcagtacatgtgggttgctttttactaagatgcatgaagtttagaataatgtacgtagatgctaatgcatagacatggcatggtattcttagcatcattttgctaaggggtgttttgaatgcagagtaaatacttagagcatatccaagaggcactttatttttgtctctctgtttaactctctatttaatttttcataatgattacactctatatgtagcatttcacttcaacatactatctatttagttttgctagtcagatgactagccaaattta

SEQ ID NO: 153346 - DNA, 2297 bp, Zea Mays
cggcttttaactatttcctcctctcctcccgatccagctagcctggcctcccacctcccctcccctctcttgaactgaatcccccactccgtcctccagttcgatcgcgttcgcggccccccactccgtgttccggaataagtagccggcggtttcctcaccccaggttttgcagttgctggggagtgggaaattcgtccggctccggtttggccaatgctcctgcggtttcttggagaggccgctgaagcagcagcccttgcctgagggattctccttttctcgggcggagagttcggttgcggcggaaaaaaaaaagaattctttcgtcggattggcccaagttcttggttgatccgttacaaagcccccactgtacgctgtgttagcctttttccacgcgtttctttccttactctagatccgtgtccccgcccgattatttgggggaataggcagcccatcgatcgggggaagagggatttggaggcctgacctccgatggaggtgcacgccgacgtcgatgggtccggtgtgcccctggccgtgctcctcaagcgggagctgtgcaaccagaaggtggagaggccggacattctgttcggggaggccaacaagagcaagaaaggggaggacttcacgctcctcttgcccaggtgccaccgcaccacaggcgaaggcggcggcagtggcggcggcgagaatgcaggcggcggcgacgacgacgacaccatttccgtgtttgcgatttttgatggacacaatggctctttagctgccatatacacacgggagaatctaataaacaatgtgctggctgctattcctccaaatctcacaagtgaggagtggacagctgcgttgccaagggcactagttgctggttttgtaaaaacggataaagacttccaaacaaaagctgcacgttcagggaccactgtgacttttgttataatagatggatgggttgtcactgtagcatcagttggcgattcacgatgtattctagaatctgctgaaggttcagtatattttttatcagcagatcatcgcctggatgctaatgaagaggaggtggagcgtgttacagcaagtggtggtgaagttgggagaataaatattgctgggggtgctgggattggtccgctcagatgctggccaggcggattgtgtctatcaaggtcaataggtgacattgacgtcggggaatttatagttcctgtcccacatgtgaagcaagtaaagttgtccaatgctggtgggcggcttgtcattgccagtgatggtgtgtgggatgcgctgtgttttcaagaggctctgaactacatcaggggtctaccagccgaagctgctgctaatcgaattgttaaggaagctgtcacttcaaagggattaagagatgatactacttgcatagtagttgacatactacctccagaaaagttaagccccccactaaagcgacctggaaaaggagtcatcaaaactctgttccgtcggaggccctcggatgaaatgtctgaagatcagatggacagaggatgtttagaacctgatgtcgtggaggaaatatacgaggagggctctgcaatgcttgctcgaaggttgaatataaattacccatcgggaaatatgttcaagctgcatgattgtgctgtctgccaattggagatgaaacctggtgagggcacctctgttcacggtaacatgcccaagcattcaagagttgacccctggggtggtccttttctctgttcctcctgtcaattgaaaaaggaggccatggaagggaagctacattcaagaacagagtgacactgcgcgccctcttgcatatcgaatttaagctatggcagccattgttttctgctgcaaggatgagttcattacttttttggccaaggcagcaagattctcaatacgggagtcatttgtatagacgttcctaatttcctactcatctttcccatgaaagagcccatacagatacagtcttccaccacgatttgaagccagttgcagtacatgtgggttgctttttactaagatgcatgaagtttagaataatgtacgtagatgctaatgcatagacatggcatggtattcttagcatcattttgctaaggggtgttttgaatgcagagtaaatacttagagcatatccaagaggcactttatttttgtctctctgtttaactctctatttaatttttcataatgattacactctatatgtagcatttcacttcaacatactatctatttagttttgctagtcagatgactagccaaattta

SEQ ID NO: 153347 - DNA, 2265 bp, Zea Mays
agctagcctggcctcccacctcccctcccctctcttgaactgaatcccccactccgtcctccagttcgatcgcgttcgcggccccccactccgtgttccggaataagtagccggcggtttcctcaccccaggttttgcagttgctggggagtgggaaattcgtccggctccggtttggccaatgctcctgcggtttcttggagaggccgctgaagcagcagcccttgcctgagggattctccttttctcgggcggagagttcggttgcggcggaaaaaaaaaagaattctttcgtcggattggcccaagttcttggttgatccgttacaaagcccccactgtacgctgtgttagcctttttccacgcgtttctttccttactctagatccgtgtccccgcccgattatttgggggaataggcagcccatcgatcgggggaagagggatttggaggcctgacctccgatggaggtgcacgccgacgtcgatgggtccggtgtgcccctggccgtgctcctcaagcgggagctgtgcaaccagaaggtggagaggccggacattctgttcggggaggccaacaagagcaagaaaggggaggacttcacgctcctcttgcccaggtgccaccgcaccacaggcgaaggcggcggcagtggcggcggcgagaatgcaggcggcggcgacgacgacgacaccatttccgtgtttgcgatttttgatggacacaatggctctttagctgccatatacacacgggagaatctaataaacaatgtgctggctgctattcctccaaatctcacaagtgaggagtggacagctgcgttgccaagggcactagttgctggttttgtaaaaacggataaagacttccaaacaaaagctgcacgttcagggaccactgtgacttttgttataatagatggatgggttgtcactgtagcatcagttggcgattcacgatgtattctagaatctgctgaaggttcagtatattttttatcagcagatcatcgcctggatgctaatgaagaggaggtggagcgtgttacagcaagtggtggtgaagttgggagaataaatattgctgggggtgctgggattggtccgctcagatgctggccaggcggattgtgtctatcaaggtcaataggtgacattgacgtcggggaatttatagttcctgtcccacatgtgaagcaagtaaagttgtccaatgctggtgggcggcttgtcattgccagtgatggtgtgtgggatgcgctgtgttttcaagaggctctgaactacatcaggggtctaccagccgaagctgctgctaatcgaattgttaaggaagctgtcacttcaaagggattaagagatgatactacttgcatagtagttgacatactacctccagaaaagttaagccccccactaaagcgacctggaaaaggagtcatcaaaactctgttccgtcggaggccctcggatgaaatgtctgaagatcagatggacagaggatgtttagaacctgatgtcgtggaggaaatatacgaggagggctctgcaatgcttgctcgaaggttgaatataaattacccatcgggaaatatgttcaagctgcatgattgtgctgtctgccaattggagatgaaacctggtgagggcacctctgttcacggtaacatgcccaagcattcaagagttgacccctggggtggtccttttctctgttcctcctgtcaattgaaaaaggaggccatggaagggaagctacattcaagaacagcagagtgacactgcgcgccctcttgcatatcgaatttaagctatggcagccattgttttctgctgcaaggatgagttcattacttttttggccaaggcagcaagattctcaatacgggagtcatttgtatagacgttcctaatttcctactcatctttcccatgaaagagcccatacagatacagtcttccaccacgatttgaagccagttgcagtacatgtgggttgctttttactaagatgcatgaagtttagaataatgtacgtagatgctaatgcatagacatggcatggtattcttagcatcattttgctaaggggtgttttgaatgcagagtaaatacttagagcatatccaagaggcactttatttttgtctctctgtttaactctctatttaatttttcataatgattacactctatatgtagcatttcacttcaacatactatctatttagttttgctagtcagatgactagccaaattta

SEQ ID NO: 153348 - DNA, 1149 bp, Zea Mays
aactcgactcgggtccggcgctgagccgctgaccgtcgacccgaccttgccctggctcgcctcctccgctgcggcggtctggaagggatcactggatcgtagatcccactcggcaaacccaaacggccaaacctttgcttgcattcagcacccccggcgagacgccactccaactgccgggatccagccgctgcacgcggcggccaccccgccctgccggccgaccaggggggttgagagcgggcgaggcggagatgcagagcgccacgcggctgacgctgctactgtgcgcggcgtgggcggccgcgctgctgtacggcgagatgggcgcctactgggtctcctacctcgcatgctcgtggccctcgtcgtcctcctcgccgccgaataaccatgtcaaggttgctgttgttgctgacccacagcttatggatagcacctcccttggtcttccatcaagctcagttgctctccaagctgctgagttttacacggatttgaacatgagaaggtccttccagtccaccatactgccattcaaacctgatgtggtcttatttcttggtgatcactttgatggaggcccttacatgcccgatgaagagtggcaggaatcattgtttcgatttaaacatatattcggcctgaatgatcaaagaacaaagcaacagatccctatctactaccttccaggaaatcatgatattggttactcagcatttcattcagtccatcctgaggtgctcagtcggtatgaaaaagaatttggatcaagaaattatcaattttctgctgggaaggtggacttcgttgttgttgatgcccaaacacttgatggagctaaacaaagcaaagaaaggtcctcctcttgggagttcattaaaactctatctccaggtaacacatcaaacccaaaggttctgctaacacatattccactataccgacctgataactctccttgtggcccgcatcgttcttcacctgttataaatcagagggtatcttatgccgccttagaccaaggaatcacctaccaaaattatctaactaaagagacttctgaccttttgctaagcttgttgaagccgatccttgtgctctcaggccatgatcatgaccaatgcacagttgtccactccactcctt

SEQ ID NO: 153349 - DNA, 575 bp, Zea Mays
ttttgcctaaacaaacccatatttatatctggtatatctgccagtttgtagtgaccatccttctcctagtcttttggccaacaaatggtctcggttctcttccttgcatgaacacattcatgagcttcatgaggtcggtgggcgccgaactgctttcaaggaccaaggaaaaagatgacgaggacgatggtgattatgatatggtttttgatgcggaaggatccatgcacctcgttaaaaaggcagtggcaaagaccccaagtgctagctcagactccagacctactggacgcggaagtgttgttgcaagggcaacagcaggaagacaccgattggagcctgattcatcgattcgtgtcgacatgggttctgagatgacatcagaagatgggggaaagttggcccgcgctggcaaatcgggagcaaggaaggtgctccaacggctgttccgtgtcattcagtctgttcttgtcattgccgctctgaatgcccccttgtacatgatgcttctcttcaaggattggattgatcgttgaagtatgtgagaatctattgtttttcagtaactcagtaga

SEQ ID NO: 153350 - DNA, 1605 bp, Zea Mays
ggaccaggccgtctctgcatttgcgcggatccgccggcgcggtccctgattcgggccgcgctctcgcagatgatggtggcggagaagcccgcgctggggttccaggcgcacggggacggggacgacgagctggagctggagctagcgtcgccggcgccgccgccccggaagatgcactcgctggaattcgagcacatcggctcgctcgccgccgtggccgagtcgctcgcgcccgggagcaggtggcagagggcgctcaccagcgtgcgcgtcgtcatcttccaggccaagatcaacgtgctcctccccttcggcccgctcgccatcatgctccactacctctccggaacgcaccaaggatgggtttttcttttcagcttaatcggcattaccccgttggccgagagattgggatacgcaactgagcaacttgcttgctacactggcccaacagttggggggctactgaatgctacatttggaaatgcaacggaaatgattatatcaatatacgcactgaaaaatgggatgattcgggtcgtccagcagtcactactaggctcaatattgtcaaatatgctgctggttcttgggtgtgctttctttgctggtggtcttgtccattctgacagggaccaggtcttcaacaaggcatcagctgttgtaaactcaggactactgttgatggctgtcttaggccttatgttcccagcagtgcttcatttcacacattcagaagcgcagtatggaaaatctgaagtagctctttcaaggtttagcagctgcatcatgcttgtggcctatgctagctatctattttttcaactaaagagccaccgcagtatgtacagcccaattggtgatgaagaagccgccgctgaggaggaggatgaaaaggagattacacaaggggaagccatctgctggcttttcatattgactatttggatttcagtactctcagggtacctggttgatgccattcagggtgcgtctgattcattaaacttgccagtggcctttattagtgttattctgcttcctattgtggggaatgctgctgaacatgcaagcgccatcatgtttgccatgaaaaacaaattggacattacattgggagttgcgatagggtcatcaacacagatctccatgtttgtgattccattctgcgtggtaattggctggatgatgggacaagaaatggacttgaattttcaactgttcgagacagcgactctctttataactgtactagtggtggcattcatgctacaggaaggcacatcaaactattttaaaggtcttatgctcatcttatgctacctcatagttgctgcaagcttttttgtccatgtcgaccctgatgcaagtgataactaagtgacaaatctgcttacagcatacctgtgaactgaatggagaggctacgacctaactgcagagttagccaatagcattgccctgcgtagacaaggacctgcaagagtcctgaatttggaagcaacttgtgggcagaatctcggaccgagggtttaacttggggctcaagattacaaggagctgatgcagcttttttaggatagcaacagcatcgcccgttgagga

SEQ ID NO: 153351 - DNA, 295 bp, Zea Mays
gcattcattcatcccatcatctgcatctcataatgatccacttggttggtctgaagcaggtgataactaagtgacaaatctgcttacagcatacctgtgaactgaatggagaggctacgacctaactgcagagttagccaatagcattgccctgcgtagacaaggacctgcaagagtcctgaatttggaagcaacttgtgggcagaatctcggaccgagggtttaacttggggctcaagattacaaggagctgatgcagcttttttaggatagcaacagcatcgcccgttgagga

SEQ ID NO: 153352 - DNA, 2330 bp, Zea Mays
ccagctcgtgcgctctcgtcttcgcgatcgcgaacagtcgcggcggcctcgtcattgccgcagaaaccctaaccctagatccgccgtcatggatctcctccagtcctcttacgcgccggacgacgcgtcgtctccggaggcttcggcggccgcgtcctcgccggactcctcgccgctccgccttccgtccaagtccgccgcccccgccgtcgatgacaccgcgctcgcactctcctccgcggcgtccgccgcccgcccactcgacccttcgctccacctcgtcgccttcaacccaactgctgaccagctctgggctcccatcctcgggccccagcacccccacgccccgatctcgtccgcctccggcaaccgcaaccacaagctcggccacgttgaggacgccgctgtcctgccattcctattcgacgagcagtacaacaccttccatcggtttggctacgccgccgacccgtctggcctccacatcgtcggcgacgcccagccccaggcgcctgagcccgacactgtctacaacctcgccccttccgagcacaagcgccgtcgcctcctggccaaggcggacaacgaggcggagctagcccccccggaggcaaagaaccccgcctccgaggaatggatcctccacaacaagcagagtccctgggctgggaagaaggaagcgcctcccgcggagctcactgacgagcagaagcagtatgcggaggcgcacgctgccaagaaggccgagaaggaggcccgcctcgaagggaagagcgagaggacagaggttgtggtcaagaccaccttccacggcaaggaggagaaggactaccaaggacgctcctggatcacgccgcccaaggatgccaaggccacaaacgaccactgctacatccccaagaggtgtgtgcacgagtgggtcggtcacaccaagggggtctcagctatcaggtttttcccgaagtatggacatttgctgctctctgcgagtatggattgcaagattaagatctgggatgttcttgggtcacggacatgtatgcgtacctatatggggcactcaaaggcggtaagggatatatcattctccaatgacgggactaagttcttgagcgctgggtatgacaggaatatacagtactgggatactgagacagggcaggtgatctcgaccttttcaactgggaaggtcccatatgttgtgaagctcaatcctgatgaggataagcagcatattctccttgccggaatgagcgataagaagattgtgcaatgggatatgaagtcagggcagattacacaagagtatgatcagcatttaggggctgtgaacaccataacttttgtggataacaacaggagatttgtgacctcaagtgatgacaagtctcttcgtgtgtgggagtttggcatccctgtggtgattaagtacatcagtgagccgcacatgcattcaatgccatcgatgtcactgcatcccaactccaattggctggcagcacagagtttggacaatcagatactgatatacagcaccaaggagaggtttcagcttaataagaagaagagatttgctggccacattgtggcaggttatgcttgtcaggtgaacttctcacctgatgggaggtttgtgatgtctggtgatggcgagggtagctgctggttctgggactggaaaagctgcaggagattcaagactttgaagtgtcacaacggggtttgcattggatgtgagtggcatccgttggaaactagcaaggttgcaacctgtggatgggatggtgtaattaaatactgggactgaactttggcagagatattggttgagctcctgggaaaggttttgtaacaatccgattcacgccgaatgtcatggcatactgtaagtcacatgctcgacaagagaatcccggaggaaaaaacatgtgttttttgaggttacatatatgggagaaaaaggtggggttttgctgctacctttgtgttggttctgccctgttagatgtccaaatgtacaatattcgcaccatattcaaatttttagttgtatctctgccactagcaacttgtttgcggtttctggtaatcctgttccttcgaacgtttgtaccatctgaggaagtgtctgttgtgtagtatccccctccggtctgttttataacttaggggttgtttgtttgggattataatctgtccagatcaaaataagttaagattatataatttgggcagattataatcacaaacaaacaggcccttagatagctccctattttaatagctggggccaagtgaacaggaaataaatagagattgagttgagacaa

SEQ ID NO: 153353 - DNA, 1509 bp, Zea Mays
atggcggcggcgctgcgggcgctggcggtgctgctgtgggtggcggcggcgtaccctgtggtgttccgggcgcggcccgtgcaggcgctggcggccaactggggcacccgcgcgctgcacccgctgccgggggacatcaccgtacgcctcctgcgggacaacggcttcgacaaggtgaagctgttcgaggcggacccgccggcgctcagggcgctgggtcactcagggatccaggtcatgctgggcctccccaacgagctgctgggctccgtggccgccagcgtgaccgccgccgagcagtgggtgatccagaacgtctccacctacgtctccaagtacggcgtggacatccgctacgtggccgtcggcaacgagccgttcctcaagtcgtacaagggcaagttcgaggccgccacgctgcccgccgtgcagaacgtgcaggccgcgctcgtcaaggcgggcctcgccaggcaggtgcacgtcaccgtcccgctcaacgccgacgtctacgagtccggcgacggccgcccttcctcgggcgacttcaggcccgacatcgccggcctcatggtcagcctcgtccgcttcctcctcgacaacggcggcgtgctcaccatcaacatctacccattcctctccctgtacgccgaccccaacttccccgtcgactacgcctacttcccgtcccccggcgcgcgcccctcgcaggccagcgtgcaggacggcaacgtgctctacaccaacgtcttcgacgccaactacgacaccctcatcgccgcgctcgagaagcacggcctcggcgccatccccgtcatcgtcggggagatcggctggcccaccgacggcgacaagaacgccaacgccgccaacgcgcagcgcttcaaccagggcctcttcgaccgcatcatcgccggcaagggcaccccgcggcgcccgcagatgcccgacgtctacgtcttcgcgctgctggacgaggacaacaagagcatcgacccgggcagcttcgagcgccactggggcgtcttcaactacgacggctcgcccaagtacccgctcaggctcgccagcggcagggcgatcgtgccggccaagggcgtccgctacctctccaagcagtggtgcgtgctccgcccggacgccagcgcctccgacccggccatcgccggcgccgtcggctacgcctgcgagtactccgactgcaccagcctcggcgccggctcctcctgcggcagcgtcgatgcgcgcgccaacgtctcctacgccttcaaccagttcttccagtcggccaaccagcagaaggccgcctgcaaatttaacaacctctccgttatcaccaccaccgacccgtcccaggggacctgccgcttcgagatcatgatcgacaccggccgccacgagctcaccggaaagccggcgtcgcccgccgccagggcgggtccttcagcttcatcttggagcgccgtgctgctgctcggcttggctggccttactgctctggttgcctggtaa

SEQ ID NO: 153354 - DNA, 447 bp, Zea Mays
atgtccgtcgcgggcgccgtgaccacagccgccgttccgtcccgagcgcccatgtcgtcggcgtccgtcgacgaggcgcgctgcgggggcggggccactgcggcagcgggggcgggtggctcgccgttgccggccccacctcacgagtgcgcggtgtgcctgtccgagctgccggctggagccgaagcggcggtaccggtacggcgacggacgctgccggcgtgcggccacgcgttccacgcggactgcatcggaaggtggctgccgctgcgccccgagtgccctctctgccgccgccccgtgctgctcgccggtggcggcggacaacgggcggccgccggggcgccagctgcgtgggcgcggccggcggcgaccatagcgtgcggcttcggcgacgggagggtggtgtggtcgcgcagccccgtccctccgccagacagtgactga

SEQ ID NO: 153355 - DNA, 954 bp, Zea Mays
agatacatagattgtcagctgtgagaagactcccatccccacaagcccatcatgtcttgcataggtggttcctcctcttccacggcgagcaacaagagaaagggaaaggagattgtggtggaggtgtcagctgtggtggaggaggaggagaagcagcagcagcagcagagaaagggaaaggaggttgcgttggaggaggtgccactgcctgcagtggcggagtcttacgacgattcagatttagattcgggttctggttgggacttctacgaggaggagtactcggagaagaaggagcaagagaggaaggaaaagaaacctgcatggctggatacgctgctgagaaccaagttctgggacccgtgcaaggagcacgggtccaagaacagggcagaccagtgcatgttctgcctcaggtgctccaagctgagctgccctcgctgtgtccacgaccagcccggccaccgcctcctcaagatccgccgctacgtctaccgctccgtcgtccacgcttccgacatgcaggagctcggcatcgacgtctccaggatacagacatatgtcatcaatgcgagaaaggtgctgcatctgaggcccatgaacagatccaagcatttcaggcctcaagcagggacacctcgctgcataacctgcaggacctggctgcgtagcgcgcccaacttattttgctcccttacctgtgaggaggatgttgatgtgtcgcaagatgacttctcagggcccgaagctgagctccgctacaggagtttccaagtgcatatggctgaacctgctgaggagctgttgcctgatgaccctgaagttgagcatgagatcatgcctgcacaagttgagccgccaccactggcggcagccgccgccgcaaatcagaacgtgtcactccgcaggcgggcgcgcaagcaggcagcgccattgagggcgccgttcttctga

SEQ ID NO: 153356 - DNA, 2976 bp, Zea Mays
atgtcgtcgtccgatggcggccagtcgcgcaagaggctcgtggtcggcgtcctctctgtgtgcctgctcgtcgccatggttatcgggacggtcatgttcttcgtgagcgagaaggccggctacgactcggagctgaggaagcgcaacatgagcaagacgatgcgcagcgtggaactcttctgcgcgcccgcggactaccagggcacgtgccacgagacgctggagacggcgctgtcgcggacggacccggccaagcacccgcacgccgccgcggccgccgcgatcaccgccgtggagcgcgcgctggcggaggggttcaaccggacgtcggtgctggacgccgtgcggcagagcaacgacaccctggtgtgggaggctatccacgactgccggatgctgctggaggactgccgcggcaacgtggagcgcgcgctgtccagcatcgcgtggcgcggcgtggaagggcccgcgcaggacctccaggcctggctcagcgcggtgatcacgttccaggggtcctgcgtcgacatgttccccaagggggaggtccgcgacgaggtgaagagcaccatggagaaggcgcgggaggtgtccagcaacgccctcgccatcatcaagcaaggcgccgccctggcctccatgctcgaccttaacaccggcgttgacaacgtcgacggcaagggcaaccgtcagctcgaggaagatgaggaatccgcctcgtcgttgtccgtccccacgtgggtgcccgacgaggagcggaagctgcttggcgtcaagggcgggcggcgcagggccgcgctcacgccgaacgtgacggtggccaaggacggcagcggcgacttcacaaacatctcggcagcgctggacgccatgccggagaagtacagcggcaggtacttcatctacgtcaaggaaggcgtctacgacgagacggtgaacatcaccggtaggatggccaacgtcaccatgtacggcgacgggtccaaggcgtccatcgtgacgggcagcaagaacgtcgtggacggcatcaggatgtggagaaccgccactttcgctgtggacggcgacagtttcatggccatgaagctgggcatccggaacaccgcgggggtggagaagcagcaagcgctggcgctgcgggtgaagggcgacaaggccatcttcttcaactgccggatcgagggcaaccaggacacgctgttcgctcaggcctaccggcagttctaccgcagctgcgtcatctccggcaccgtggacttcataatgggcgacgcggcggccgtgttccagcgctgcctgcttgtggtgcggcagccgcggcgggggcagccggccgtggtgaccgcgcaggcgcggcgagaccaccaacagaccacgggcttcgtcatccaccggagccagatcgtcgccgacgagcagctcctcgccagcagcagcggcgagtccgggtccgcgccggtcaggacgtacctgggccggccgtggaaggagttcgcgaggacggtggtgatggagtccaccatcgacggcttcgtgcacgggcaggggtacatgccctgggagggcaaggatagcctcggcacggccttcttcggcgagttccggaacgccggcgacggcgccaacgtcaccgggcggaaggacatgcaggggttccacgtgatgggcaaggacaaggcgctgcagttcacggtgggccacttcttgcacggcgcggactggataccggagaccggcacgccgcgccagccaccagggaggttcgagctcgccccctccgcgccctccctgctcgctgccctccagctcgccatatctcttgcacgcacctcatcttctccatcccctccccatcttcctctagcgccagccaccagggaggttcgagctcgccccctacgcgccctccctgctcgctgccctccagctcgccagtcgtgctcagctctgctccatcttcctgcgccgcccaagtccagtcaggaacttcctagcgcctccctctctgctcctgcgctcggtgcccatccctgtggtgctcagcgtttctccctctctggtagccgcagccctagctcgtccatggcgtttgggccaaagttccttatccccttcacgccggccgtccttgttcaaccatggtcacatggtggtggaacacctaggtccgtccacggtcgctcccttcgtcgttggtgctcgacgacctctgctgcttctcctctggtgtccttccggtctgcagatgtgctccagtggagcttaccgctaccactttgtgttggacacttgaactgcaatgcacagtcacgggcacagatagtctcatctcatagtcagatccagcctctccgaatctggccagccttgaccagcctgaacgactggcacacagcacagggaacaacacgccgtgcacgcacgccccgcatgaggggaaagaaccgattcagatcggtcctgaccagattgaagctctgtatcagtatgccaaatttcagtttgagtgtggtaactactcaggggctgctgattacctttaccagtatggtgctttgtgcacaaacagtgagcgaaatgtacttgaatgctataccgacaaatgcacaccatcttattaggtatctagctactgcagttgttgtcaacaaaaggagaaggaatatgcttaaagagttgattaaggtcattcaacaggagcaccatacctacaaggatcccataactgaatttctggaatgcttatatgttaactatgtagttgtgggcttttgaacaatagctagagtgatatgaaacattagtgatgtagttgtgggcttttgaactgcttcaagctggagtgatgtcgttgtggtgcttttgtgactgatcatctctggagcttttgtgaatgatctagctagctatctgtaaatgatctagttgtgaatgatattataattgtgatgcttttgtgaatatataattgtggtg

SEQ ID NO: 153357 - DNA, 1145 bp, Zea Mays
aaaattgtggagagatgcatatacggccaggtaagttaagtgtagttttttttttcttctaatttctagaactccagttatattatttccggtcgctgcagggaagcgtggtcctggtacgtggaggccgcacagccgcgcatgccaacaaaccagacgatcactgggcatccaaatatacgcctagattgtctggttccaactacccatctgtgatctgtctattgggtatatgtatgttatgtaatatagtatgaagttatgaagtccgacccataccaccgcgcctagactgtgcctgcatccctcatcgctcggctcgatcgctgatcagttctgcggccggcgacgtgtgctagctcacgacgacgacatgggctcggcggtgaagatcgggacgtggggcggcgacggcgggagcccctgcgacatcacggtggcgccgcggcggctggagagcatcaccatccgctggggcaaggtcctcgactggatcgccttctcctaccgggaccagagcggggagctgcacaccgccggcccctggggcggcaacggcaaaggagagggcacggagacgatcacactggaggcctcggagtatgtaacgggagtggcctggtccgtgggcccgttcaagttcaagaacgtggagcgctgcatcacctccttcaaggtcgtgaccaacctccgcagctacggccctttcggccacggggtggacagcacgcaccacagcttgcccgtgctcgacggcagcgtcgtcggcatgttcgcccgcgcaggggattttctcgacgccatcggcttctacgttctcccagatgccctccctgctctaaaaccgacgacggaccctgctgaacaagaagaaaaagaaaaggattctggccatcaacagaatgggaaggcaaaatctaaccaagaagaaaacgaggactccaaaaacgagaaggataaacccttgtcgtagttcgttttctacgacaaaaaatgaatcctaatctttgtcggatatctatttgtgctcttgttgtgagtctcttcagctattgttccaactattattaatatatgtacatgcgtgggagctatgcattgtaataatcaattttcagaaaataaagagtattttccctattttt

SEQ ID NO: 153358 - DNA, 705 bp, Zea Mays
gacaacgcaagtcacaataagcaaacataatctctctgctcgttttcctctgtgtcgtcctgccgcgcgcagggctcggcggtgaagatcgggacgtggggcggcgacggcgggagcccctgcgacatcacggtggcgccgcggcggctggagagcatcaccatccgctggggcaaggtcctcgactggatcgccttctcctaccgggaccagagcggggagctgcacaccgccggcccctggggcggcaacggcaaaggagagggcacggagacgatcacactggaggcctcggagtatgtaacgggagtggcctggtccgtgggcccgttcaagttcaagaacgtggagcgctgcatcacctccttcaaggtcgtgaccaacctccgcagctacggccctttcggccacggggtggacagcacgcaccacagcttgcccgtgctcgacggcagcgtcgtcggcatgttcgcccgcgcaggggattttctcgacgccatcggcttctacgttctcccagatgccctccctgctctaaaaccgacgacggaccctgctgaacaagaagaaaaagaaaaggattctggccatcaacagaatgggaaggcaaaatctaaccaagaagaaaacgaggactccaaaaacgagaaggataaacccttgtcgtagttcgttttctacgacaaaaaatgaatcctaatcttt

SEQ ID NO: 153359 - DNA, 342 bp, Zea Mays
atggacaagagcatgctcgacgacctggatggcctccccgaggaggacaagagcatgctcgacgacctggatgccctgcaacttctcctccttcgtccgccagtttgtatagagttcgctacacttacttgtgatttcattaacgaaggatcttctcgcacccgagcaggaccaccggatctgctgccgaccatcgacttccaacaaatcgtccccaagccaagccaccatcagaaggtgagccctttcctcgatttgcacgttgcgcctccttgcgtgtcgaatcggctctgcgggagagaccgagcttcacatatttgcattggtagtctgggcgcctag

SEQ ID NO: 153360 - DNA, 126 bp, Zea Mays
gggctaaactaaggaaatgaaactagggttttctaagcaagagactaatgtgctaaccaaagagagatggctacacacaacggccctccaacgtatttgcaggggggttatttcactagtttaaac

SEQ ID NO: 153361 - DNA, 2082 bp, Zea Mays
gagaagttcttgtaaaatactccgtactacttactgaaaagaataaaaacttcggtcttaaaagtttttactactagcaaagactcctcgactcgagcgaggtcgaggaaaagtttcgccatccggtttggttgtgttggattttccttctattaaaccacaccatctgtgctcctgactccgctgctctggtctttcccaccaccgcgaacacctggcaatggcggcccccgccccgtcggccacctcccagatgtcctcaagcggcctcctttcttactgagctcacccaccacccgccacgcccccgactcccacgaactcctccgcctacccacccctaccctacttctctcgcccgccggacgcatctcggggctctgctccccggttctcggggccggtggatgcgaccgcgtccccgcccccgaaatcagctgcccggcgtcctcatagcgttcccgggatctaggccctgagcaatggcagcggcggtggcgccgccgctctgcacctggctcgtcgccgcctgtctctccgcggcctgcggcgatggcgagaaggagaatgaacgcaggcaccgcggtggcggcgtagggggtttcttcggctcgcgccgccgcctcggctcagggcgccgcggcgtggggcgctctggaatggccatgtctgttgccttgcatcctgaaaggacagctgtggaaaataagaaacctgatatgaaacagaggagagtggttgtcactggcatgggtgtagtgacgccactagggcatgatcctgatgaattctacaataaccttttaaggggtatcagtggaataagcgagatagaggcatttgattgttctcactatcccacgagaatcgcgggagaaatcaaatcattttcgacagatggttgggttgcaccaaagctagctaagcgaatggacaagtttatgcaatatttgataacagctggaaagaaagcattggagaatgctggaatcactgaagaagtcatgaatgagttggaaaaatcaagatgtggagtcctcattgggtctgctatgggtggcatgaaggttttcagtgatgcaattgaagctttgagggtttcatacaagaagatgaacccattctgtgtaccttttgcaactacaaacatgggttctgcgattcttgctatggatctgggttggatgggcccaaattactctatctctactgcttgtgctactagcaacttctgcattctgaatgcagctaatcatatcagaaaaggggaagctgatgttatgctttgtggtggttctgatgcaccaatcatccctattggattgggaggttttgtggcctgcagagctctttcacagagaaacagtgatccagcaaaagcttctcgaccttgggatgtggatcgtgatggatttgttatgggagaagggtctggtgtgcttgttttggaagaacttgagcatgcaaagcaaagaggtgcagaaatatatgctgaatttctaggaggaagtttcacatgcgatgcataccatatgacagaacctcatcctgaagggaaaggggttattctttgtattgaaaacgcattagcagattcaggagtaacaaaggaggacattaactatataaatgcccatgcaacatctacacagatgggtgatttgaaagaatttgaagctctcaaccgttgttttggccagaatcctcagctacgagtgaactcaacaaagtcgatgacaggccatctgctaggagctgctggtggaatagaggctgttgctgctatacaagctataaggacaggttgggtgcatccaaatctcaatttggacaatccagagaaaaccgtggatgtcaggatgctggtgggcccgcagaaggagagatgtgatgtgaaggtggcgctgtcgaactcgtttggatttggcgggcacaactcatcgattttgtttgcaccattcaagtgatagccgttgacaaatttcttgtggtgggctacacaccgtcgaactgagaccttgtataagaatgtatttaccggacgcagcaatatctcctgtactgcaagattaggaagacgat

SEQ ID NO: 153362 - DNA, 2338 bp, Zea Mays
gagaagttcttgtaaaatactccgtactacttactgaaaagaataaaaacttcggtcttaaaagtttttactactagcaaagactcctcgactcgagcgaggtcgaggaaaagtttcgccatccggtttggttgtgttggattttccttctattaaaccacaccatctgtgctcctgactccgctgctctggtctttcccaccaccgcgaacacctggcaatggcggcccccgccccgtcggccacctcccagatgtcctcaagcggcctcctttcttactgagctcacccaccacccgccacgcccccgactcccacgaactcctccgcctacccacccctaccctacttctctcgcccgccggacgcatctcggggctctgctccccggttctcggggccggtggatgcgaccgcgtccccgcccccgaaatcagctgcccggcgtcctcatagcgttcccgggatctaggccctgagcaatggcagcggcggtggcgccgccgctctgcacctggctcgtcgccgcctgtctctccgcggcctgcggcgatggcgagaaggagaatgaacgcaggcaccgcggtggcggcgtagggggtttcttcggctcgcgccgccgcctcggctcagggcgccgcggcgtggggcgctctggaatggccatgtctgttgccttgcatcctgaaaggacagctgtggaaaataagaaacctgatatgaaacagaggagagtggttgtcactggcatgggtgtagtgacgccactagggcatgatcctgatgaattctacaataaccttttaaggggtatcagtggaataagcgagatagaggcatttgattgttctcactatcccacgagaatcgcgggagaaatcaaatcattttcgacagatggttgggttgcaccaaagctagctaagcgaatggacaagtttatgcaatatttgataacagctggaaagaaagcattggagaatgctggaatcactgaagaagtcatgaatgagttggaaaaatcaagatgtggagtcctcattgggtctgctatgggtggcatgaaggttttcagtgatgcaattgaagctttgagggtttcatacaagaagatgaacccattctgtgtaccttttgcaactacaaacatgggttctgcgattcttgctatggatctgggttggatgggcccaaattactctatctctactgcttgtgctactagcaacttctgcattctgaatgcagctaatcatatcagaaaaggggaagctgatgttatgctttgtggtggttctgatgcaccaatcatccctattggattgggaggttttgtggcctgcagagctctttcacagagaaacagtgatccagcaaaagcttctcgaccttgggatgtggatcgtgatggatttgttatgggagaagggtctggtgtgcttgttttggaagaacttgagcatgcaaagcaaagaggtgcagaaatatatgctgaatttctaggaggaagtttcacatgcgatgcataccatatgacagaacctcatcctgaagggaaaggggttattctttgtattgaaaacgcattagcagattcaggagtaacaaaggaggacattaactatataaatgcccatgcaacatctacacagatgggtgatttgaaagaatttgaagctctcaaccgttgttttggccagaatcctcagctacgagtgaactcaacaaagtcgatgacaggccatctgctaggagctgctggtggaatagaggctgttgctgctatacaagctataaggacaggttgggtgcatccaaatctcaatttggacaatccagagaaaaccgtgtgtatggaatggtgggcaccggattgctgtaaagtgactaatagagccaaaatccaaacaggaagagctaaaagtgactccgtttagctcctaagtgactaaactttagtcatttttgctatgaaaccggaaatggaacaacaaaccagtgtatcagtttgcaatcaggcccatgtagtttgtgctgatctcttgttttccatctatctgaaagcagtgcccaatatgctttttttttccttccatcttggcttaggatgtcaggatgctggtgggcccgcagaaggagagatgtgatgtgaaggtggcgctgtcgaactcgtttggatttggcgggcacaactcatcgattttgtttgcaccattcaagtgatagccgttgacaaatttcttgtggtgggctacacaccgtcgaactgagaccttgtataagaatgtatttaccggacgcagcaatatctcctgtactgcaagattaggaagacgat

SEQ ID NO: 153363 - DNA, 3338 bp, Zea Mays
cgagcgaccctctgcgctcgcgcgaatcccgcccgagatcgccgccgatccgaagcaacggcaccgtgcccctccccctcgcgagatccgcgaccgccccatcccggcgccgcgggatccacgcctccgccctcgcccttccccacccccacccgctaatctcgcggtcgatccgcgcccggtcctgaccccgcctccgtcctcagcaccgccactccgtcccccatcttcggcgccgccgtctcccgctcccctggcacgcattcggggtccttgcgggcgacaagcacctccgtcccggaggcatctgccgctgcagcatagaccaccatgtcctcgctcggcagcaccgatgttgacgatggcaacgaggaggaggacggctccgcgagcacccccgagatctactgctgccactcccacgcagttcttgctcacgagatctgtgtgcaggttgatgtcctcgtggtgccacgccgacctcgccgccaccaagcgcgccacccatgtcctcaccgacctcgccaaaattggacggatcgaagcaccataataagtgtttagctttcctccgcgcctcgggcggccgcggcacaggcgccgccgcgcccgctcgccgcgaagcacaaggacgagccggaccccgacgacggcaggcagagggtcactgtcttcttcggcacgcaaaccggcaccgctgagggctttgccaagtgcatgactcgtgcccgcgccaggactcgttgccaatattgcactcttagtgcaaagaatagctgagcttgttacagataatatgggtggacctgtcaaagatgctaacgacatgctcacaaggtggctggagaagagtactgagctgagaacatcgctacaaacaagtttgttgcctattggttgcatcaagatagggttatcacatcaccgtgccctacttttcaagatccttgcctatagtgttgggattccatgcaaacttgtcaaagggagcaattatactggtggtgatgacgacgatgctataaacataattaagatggacaatgaaagggagtttttggttgatctgatggctgctcctggtgctcttattccagcagatatcttaagttggaaaggcaattcgttaaattctaatcgaaaactcggcctgaatcgaacagctggatcatcaagtactgttgatgctaatgtggatcctactgtattgccacttgaacctaaaggtggccaactgcctttgttcagcagtggtgattggatgtcagacattgattctggatatgaggcagcagaaattgcagcttctactcaaacctcttcgggtgtcacaccatatctgtgttctgctggaagtgtttttggcagttcatggatgctggttaatcatgaccaatcagatggaccatcaacttctgctggtacatcatcgcagcagaaagttgtacctcaaagcgagcatcagcggaatttaaaccgccttccagatctgcaggaaattccagagtcaaaaaacctttttgctgaccttgttccttctggggataataagtccaagaaaacttcagtaccattcaaaggaccagatcataggaacaatgagttgcaaaagcgcagagagaacattgtccctaatgctggaagaccacatcagcggttagttatgaagaattggtctccttacaatgatgtttccaacaacaaacagtacaattatgtcgaggattcgtttgctcgtagaaatgttggtaataatgctgcaccatcatcatcccagatgccacgaccagccgcaagatctaaccttaattctagattgcataatgatgcatcatatcataattatgatagcattatggctggtacctctgccatgaacattacatctacagctgagaccgggaaggttcctgaaagggttatgcgtggtgatttggacaaaggccaaacaaattatagattggaggatcaacatgtcatagttcaaccaccacagggaagacttccatggggtattcctgcagaaggaagcgttccaatgaatagagttcagagtcaagcaaaacaacacttggaaaacatggatgcaaagcaagaccataagaaattgctccctgatccaaaaaaatctccccttgacaaattcatggacacatcattgccttcaagaaacatggacatgaggtcacagaggcttgacttcgatgatgtctctgagtgcgaaattccttgggaagatcttgtgattggtgaaaggattggcttaggtacttattttgctaccaagttttgatatacactcttctgcttttgaactactcccttcggtttcgttttaactgaggtcctagccttttttgtgtgaatgttaattattgatgttttacctattataactattttatgaccatgctacccttcattaatgataagctaacgcctcgtttcctccaacgtttcgtttgccgttccatgctagcgactgataacaagcagtacgccagccaaaaacagcaaggcgcgaatcgcgatagaaaaaaaacggcagtgcgacaatgtaaaatagtgtcctgaaaaaaaatgccaagctatgtaaaatatgccatgcaaaaataaacgtgctatggcaagactcgaacccaagtgctcgggtgtttttgctatagcaagcaaccagtaggcatcaaagcagatctggttgaggtggccacgatacatatttaataagggtacaacaggaaatcacacataattaatcactccttggtatgctaaatcatgtcctaaatgtcaattaaaacgaaactggagggagtaataacataaagctgttttggaaactaattttaaatatgctgaactgtatttcaagttgttagctttgatgggtatgctttttattggttgaataggagtgggttggttgcttgaacttgcaccttcctgatctctgcatgaaaactattgattgatttgcttcgttcaataggttcatatggagagatttactgtgctgactggaatggaaccgtaagtagttcattcacccattttagttttttgtatcttgagcttggccatttgttcaagatgttctgtggaagccataaaagaatcagatgagaaaccaaatcatggtcaatgcactgaagttttcatttattttcaggaagtagctgtaaaaaaattcttggatcaagatttttatggcgatgctctggatgagtttaggagtgaagtaggtgaacttttatctgtttctatcttggagttttcctaaataaactattcaattttcatatttactcagttcaattgttgatttattgtttgatata

SEQ ID NO: 153364 - DNA, 2866 bp, Zea Mays
cgagcgaccctctgcgctcgcgcgaatcccgcccgagatcgccgccgatccgaagcaacggcaccgtgcccctccccctcgcgagatccgcgaccgccccatcccggcgccgcgggatccacgcctccgccctcgcccttccccacccccacccgctaatctcgcggtcgatccgcgcccggtcctgaccccgcctccgtcctcagcaccgccactccgtcccccatcttcggcgccgccgtctcccgctcccctggcacgcattcggggtccttgcgggcgacaagcacctccgtcccggaggcatctgccgctgcagcatagaccaccatgtcctcgctcggcagcaccgatgttgacgatggcaacgaggaggaggacggctccgcgagcacccccgagatctactgctgccactcccacgcagttcttgctcacgagatctgtgtgcaggttgatgtcctcgtggtgccacgccgacctcgccgccaccaagcgcgccacccatgtcctcaccgacctcgccaaaattggacggatcgaagcaccataataagtgtttagctttcctccgcgcctcgggcggccgcggcacaggcgccgccgcgcccgctcgccgcgaagcacaaggacgagccggaccccgacgacggcaggcagagggtcactgtcttcttcggcacgcaaaccggcaccgctgagggctttgccaagtgcatgactcgtgcccgcgccaggactcgttgccaatattgcactcttagtgcaaagaatagctgagcttgttacagataatatgggtggacctgtcaaagatgctaacgacatgctcacaaggtggctggagaagagtactgagctgagaacatcgctacaaacaagtttgttgcctattggttgcatcaagatagggttatcacatcaccgtgccctacttttcaagatccttgcctatagtgttgggattccatgcaaacttgtcaaagggagcaattatactggtggtgatgacgacgatgctataaacataattaagatggacaatgaaagggagtttttggttgatctgatggctgctcctggtgctcttattccagcagatatcttaagttggaaaggcaattcgttaaattctaatcgaaaactcggcctgaatcgaacagctggatcatcaagtactgttgatgctaatgtggatcctactgtattgccacttgaacctaaaggtggccaactgcctttgttcagcagtggtgattggatgtcagacattgattctggatatgaggcagcagaaattgcagcttctactcaaacctcttcgggtgtcacaccatatctgtgttctgctggaagtgtttttggcagttcatggatgctggttaatcatgaccaatcagatggaccatcaacttctgctggtacatcatcgcagcagaaagttgtacctcaaagcgagcatcagcggaatttaaaccgccttccagatctgcaggaaattccagagtcaaaaaacctttttgctgaccttgttccttctggggataataagtccaagaaaacttcagtaccattcaaaggaccagatcataggaacaatgagttgcaaaagcgcagagagaacattgtccctaatgctggaagaccacatcagcggttagttatgaagaattggtctccttacaatgatgtttccaacaacaaacagtacaattatgtcgaggattcgtttgctcgtagaaatgttggtaataatgctgcaccatcatcatcccagatgccacgaccagccgcaagatctaaccttaattctagattgcataatgatgcatcatatcataattatgatagcattatggctggtacctctgccatgaacattacatctacagctgagaccgggaaggttcctgaaagggttatgcgtggtgatttggacaaaggccaaacaaattatagattggaggatcaacatgtcatagttcaaccaccacagggaagacttccatggggtattcctgcagaaggaagcgttccaatgaatagagttcagagtcaagcaaaacaacacttggaaaacatggatgcaaagcaagaccataagaaattgctccctgatccaaaaaaatctccccttgacaaattcatggacacatcattgccttcaagaaacatggacatgaggtcacagaggcttgacttcgatgatgtctctgagtgcgaaattccttgggaagatcttgtgattggtgaaaggattggcttaggttcatatggagagatttactgtgctgactggaatggaaccgaagtagctgtaaaaaaattcttggatcaagatttttatggcgatgctctggatgagtttaggagtgaagcggcgaccagaatatgcatcaggcgggaggaatggggcggtcgctggagctgctgctgatccagtttttgatgccggataacgacacacgtcggcaggcggaggagcagatccgacggctggcccgtgacccgcaggtggtccctgcgctcgtccaccatctccgtacggccaagacccccaacgtccgccagctcgccgcggtgctactccgcaagaagatcacctcccactggcccaagcttccccctgactccaaggcatcacttaaacaagcccttatcgattcaatcacactcgaccacaggttctttgctaaatacctatcaccaatccttctacgcatgtctgccttagaatctgcacgctttcaattcactcaaattgtgcatttggccatttgcctaaggaacactttgagtgtattctcaacttattagtttgtgctgatcagaattgaactgagaggtccagctttagtgaaccttc

SEQ ID NO: 153365 - DNA, 3124 bp, Zea Mays
cgagcgaccctctgcgctcgcgcgaatcccgcccgagatcgccgccgatccgaagcaacggcaccgtgcccctccccctcgcgagatccgcgaccgccccatcccggcgccgcgggatccacgcctccgccctcgcccttccccacccccacccgctaatctcgcggtcgatccgcgcccggtcctgaccccgcctccgtcctcagcaccgccactccgtcccccatcttcggcgccgccgtctcccgctcccctggcacgcattcggggtccttgcgggcgacaagcacctccgtcccggaggcatctgccgctgcagcatagaccaccatgtcctcgctcggcagcaccgatgttgacgatggcaacgaggaggaggacggctccgcgagcacccccgagatctactgctgccactcccacgcagttcttgctcacgagatctgtgtgcaggttgatgtcctcgtggtgccacgccgacctcgccgccaccaagcgcgccacccatgtcctcaccgacctcgccaaaattggacggatcgaagcaccataataagtgtttagctttcctccgcgcctcgggcggccgcggcacaggcgccgccgcgcccgctcgccgcgaagcacaaggacgagccggaccccgacgacggcaggcagagggtcactgtcttcttcggcacgcaaaccggcaccgctgagggctttgccaagtgcatgactcgtgcccgcgccaggactcgttgccaatattgcactcttagtgcaaagaatagctgagcttgttacagataatatgggtggacctgtcaaagatgctaacgacatgctcacaaggtggctggagaagagtactgagctgagaacatcgctacaaacaagtttgttgcctattggttgcatcaagatagggttatcacatcaccgtgccctacttttcaagatccttgcctatagtgttgggattccatgcaaacttgtcaaagggagcaattatactggtggtgatgacgacgatgctataaacataattaagatggacaatgaaagggagtttttggttgatctgatggctgctcctggtgctcttattccagcagatatcttaagttggaaaggcaattcgttaaattctaatcgaaaactcggcctgaatcgaacagctggatcatcaagtactgttgatgctaatgtggatcctactgtattgccacttgaacctaaaggtggccaactgcctttgttcagcagtggtgattggatgtcagacattgattctggatatgaggcagcagaaattgcagcttctactcaaacctcttcgggtgtcacaccatatctgtgttctgctggaagtgtttttggcagttcatggatgctggttaatcatgaccaatcagatggaccatcaacttctgctggtacatcatcgcagcagaaagttgtacctcaaagcgagcatcagcggaatttaaaccgccttccagatctgcaggaaattccagagtcaaaaaacctttttgctgaccttgttccttctggggataataagtccaagaaaacttcagtaccattcaaaggaccagatcataggaacaatgagttgcaaaagcgcagagagaacattgtccctaatgctggaagaccacatcagcggttagttatgaagaattggtctccttacaatgatgtttccaacaacaaacagtacaattatgtcgaggattcgtttgctcgtagaaatgttggtaataatgctgcaccatcatcatcccagatgccacgaccagccgcaagatctaaccttaattctagattgcataatgatgcatcatatcataattatgatagcattatggctggtacctctgccatgaacattacatctacagctgagaccgggaaggttcctgaaagggttatgcgtggtgatttggacaaaggccaaacaaattatagattggaggatcaacatgtcatagttcaaccaccacagggaagacttccatggggtattcctgcagaaggaagcgttccaatgaatagagttcagagtcaagcaaaacaacacttggaaaacatggatgcaaagcaagaccataagaaattgctccctgatccaaaaaaatctccccttgacaaattcatggacacatcattgccttcaagaaacatggacatgaggtcacagaggcttgacttcgatgatgtctctgagtgcgaaattccttgggaagatcttgtgattggtgaaaggattggcttaggttcatatggagagatttactgtgctgactggaatggaaccgaagtagctgtaaaaaaattcttggatcaagatttttatggcgatgctctggatgagtttaggagtgaagtaggtgaacttttatctgtttctatcttggagttttcctaaataaactattcaattttcatatttactcagttcaattgttgatttattgtttgatatacggatatactttttgacaagattcgaattatgcgtcggctgcgccatccaaatattgttctctttatgggtgctgttacacgccctccgaacttatctattgtatctgaatatattccaaggcggcgaccagaatatgcatcaggcgggaggaatggggcggtcgctggagctgctgctgatccagtttttgatgccggataacgacacacgtcggcaggcggaggagcagatccgacggctggcccgtgacccgcaggtggtccctgcgctcgtccaccatctccgtacggccaagacccccaacgtccgccagctcgccgcggtgctactccgcaagaagatcacctcccactggcccaagcttccccctgactccaaggcatcacttaaacaagcccttatcgattcaatcacactcgaccacaggttctttgctaaatacctatcaccaatccttctacgcatgtctgccttagaatctgcacgctttcaattcactcaaattgtgcatttggccatttgcctaaggaacactttgagtgtattctcaacttattagtttgtgctgatcagaattgaactgagaggtccagctttagtgaaccttcctgtttgcgccccaaacaacatagaattttgatgctc

SEQ ID NO: 153366 - DNA, 617 bp, Zea Mays
cacacggtcacacacacggcgtcacactcacacagtcagacgctccattcttccagagttccagttccaggcttcatcgccgcgccgccgccgccagcagcagctccacgtccagccaggcaaccagcagccaggtggtagccatcaagattcaagactcaagggctccaacgtcaagccgagccagcagccaggccgcagccgtacagggctccaacgtcaaaaggtggtccaggagggaagctgattccttcggtggtggctgaagttgaatggtgagctgctggagagtggagacgtggagtggtggccgcctggccggtgggcgcatgggcggtggctgctggctggtgcaaaactgcagactgtgcacttgtgccgtggtggctggcgctaatctattcatctattgtgcttgtgtgttgtgtcattgtgtgtggctgtgtgcatttgtgcttccgtgtgagacttagtttgagttgtgttgtgaacttgcgatcgtatgtcactgtctactgtagtcttctttttattttattcatatcttgtttcctgaatagctattagtattgtggctgtattgtgcctgtttttaaaatttggttgcttcgggagta

SEQ ID NO: 153367 - DNA, 1193 bp, Zea Mays
tcccacttcctcttctgcccctccaacctctcctcttcctctggtctctggacaaccaagccagagaggagcagccagcgacaacctcctctcctctcctcccctcttattccgcgcccagcagcgaggcatggtggagaaggcgaggaccatggcgcgcaggctggagatcccccagtggaaggccgacggcctgccgtcgccgacgagcccgctggaccgcgcgtcggcgtcgccccgtgggtggcgccaccgcgacgccgtaggaggaggcgtggggctcgggatcctggcggcgctcgaggccgagggcccgccgcagcccgcgccgagggtgtccatcccgcggcgcgcggcgcggctggaggtgtcggagctcgggtgcagcgggcgctgcgccaccagcctgtgcggcggcgtcggcccggcccccgcccggcccggcggcggcgcggcgttccgcgtcgcggagttcctgtcgtgctgcgacatgtgccggcgggcgctggacgggagggacatcttcatgtaccgcggggagaaagccttctgcagcatggagtgccggtaccacgccatggtgagcgacgagttccagcaggagaaggagcgcaagcgccgcgccgccgtgtcccggacttcggccgcggagatggccgggtcgccgtgcagcggcggcggcggcggcgggcagatcttcttcaccaccggcatcgtcgccgcctgatgggcgggcgggcgggcggatacggatccgtcttctctggtctagtgatacaaaacaaaagaaaaaatatccagctagaggaaccggcggccgctgtaacataaacctgacaagaaaaaaaaaccaagaggagaaataaggacggatgggtgcgtgcgtttgtgtagagcagagaaatgggcgcgggggaattttgctcgtcctctcctcttcttcggtagaggaggaaccgaggcagggagggtttatttcatctgtggattttttttttgtattattattagtaaattatagtagtaccactattatcacgacgatgatgggcgggatgagatgttctgtagcagcagggaagggggaggggggatgatgtgacaagttttccaaggattgttgcttcccttttgtttctcctctagtcctctgctctgcccaagggaataaaactcctcgcttgttcaaatcc

SEQ ID NO: 153368 - DNA, 1455 bp, Zea Mays
cataacaatacatgcatgtacaaagatctgaataataatgggttcgctccgtgatggcaagaccaacagcagcagtggccggcggtggtgcgcggtgaccggcggccggggcttcatggcgaggcacctggtggccgcgctgctgcgctccggcgagtggcttgtgcgggtcaccgacctcgccccggatgtcgtgctcggcctcggcgacaccgaggacgtcctcgatgacgccctccgtgatggccgcgccgtctatgcctcagcggatgtctgcaacctagaccagcttattcaagcttttgaaggggttgaggttgttttccacacagctgctgcggatccaagcaagaacgaccagcaacttcactataaggtcaacgttgaggggacaaagaacgtggttgatgcgtgcatgatttgcaaggtgaaaaggcttatccacaccagctctattgctgttgtgttcgacggagttaatgggcttctcgatgcaaatgaatcattgccatacccagacaagtttcctgatgcgtatggacaaacaaaggcagaagcagaaaagatagtcatgaaggctaatggcattagtggccttctaacttgttgcatacgtcctggtagcatttttggccctggtgacatagttatactaccaactctggaccaatgtggaaaaacacactttgtttttggtgatgggaagaattgtgatgattttgtatatgttgaaaatgtggtacatggccacatttgtgctgaaaaaactctttctacaatggaaggcgcaaaaaccagtggtggaaaagcctactttataaccaatacggaaccaatgaacatgtgggactttctatatctgcttcaagaagaacttggatacaaaaggttgttcaagataagaatacctttgattgtcatccaggcagtaagctatttggtagagtggggatacaaggttctacaccattatggaatgtgccagcctcaagtgctaacaccagcaaggatcaagtatctgacagttcatagaacattcagttgtaacaaagctgctgaagaacttggctacaaaccaattgtgacacttatggatggtatgaagctagcagtcaaatcatatattcggttgagaaatcatgcagatttatcttacaaacatatataaaagattatcattatggcataggatgcctcatgctgacgatatacaacagcttttgagaattgtcataagcgaaggtctgccgtgattatgtttccaataaataaaaaattcggtgtttacaactcgcatcaatgtcctgatcaaaaacccagcatgttgtattctgatttagtagcaaagatagattgtaactccttaacaatgatcaggcatgtatttcagatatgttaattggaacacaaataatattactatctgtatatgtattgatcacctttgtgtgaaat

SEQ ID NO: 153369 - DNA, 1202 bp, Zea Mays
ccaaagcgtcgcttcgtgctagtatgcgaaaacttgtgttatttaactttaattggaaaaccatctctttgtccaacgccgactccctgagccactgacacggtgacgccacactcacgaacggcgaaaccccaccaggccaccacgcacaaccgctccaaccatggacgccggcgccgcgcgtccatcggcaccgtcgaccgccgcagtcgcgggggcctccgtcgcggacgagccccgggacgcgcgggtggtgcgggagctcctgcgctccatgggtctccgcgagggcgagtacgagccccgcgtcgtgcaccagttcctggacctggcctaccgatacgtcggagacgtgctcggggacgcccaggtctacgccgaccacgccgggaaggctcagatcgacgccgacgacgttcgcctcgccatccaggccaaggtcaatttctccttctcccagccgccgccgcgcgaggttctccttgagctggcccgtagccggaacagaatgccgctgcccaaatcaatcgctcctcctggctcgattcccctcccacctgagcaggacacactgttggcccagaactaccaactcctgcctccgttgaagccgccacctcaatatgaggaaatagaggatgagactgaagaaccaaacccaagtaacccggcgaattctaatccatcctattcgcaggatcagagtagtaaggagcagcaacagcagcacactcctcagcatggtcagagggtttccttccaacttaatgctgtggcagctgcagctgcagctgcaaagcgtcctcggatggccattgaccagctgaacatgggctaaccgtttcgtcggttagactgtagtatctttccccccaccctctagtctggtgaatcatgttttgaagagatagtgctgtagtggtatatgctcttactgactaccacccacatatttaaccacgagatgtgcagtccaacagcaccagcagcataagtttctgcctgcaagaacgttgctggagggaaggaaggaaagtgactgttctacagttctagtagtgtattttgtacttgcacactaaaaggttaatatctgctagtgtaattttatccgggtcttctacatgttcttgacaaaaatggcatcaccattcatcagtattgcaagcaatgagttatgatggcaccaaattgcgatgttt

SEQ ID NO: 153370 - DNA, 1458 bp, Zea Mays
ccaaagcgtcgcttcgtgctagtatgcgaaaacttgtgttatttaactttaattggaaaaccatctctttgtccaacgccgactccctgagccactgacacggtgacgccacactcacgaacggcgaaaccccaccaggccaccacgcacaaccgctccaaccatggacgccggcgccgcgcgtccatcggcaccgtcgaccgccgcagtcgcgggggcctccgtcgcggacgagccccgggacgcgcgggtggtgcgggagctcctgcgctccatgggtctccgcgagggcgagtacgagccccgcgtcgtgcaccagttcctggacctggcctaccgatacgtcggagacgtgctcggggacgcccaggtctacgccgaccacgccgggaaggctcagatcgacgccgacgacgttcgcctcgccatccaggccaaggtcaatttctccttctcccagccgccgccgcgcgagtgtttagggtgatgaacagtgacacgctagatctggggggagagagaagagggccgacgcgtagggggcgttgtagggggcaccgttgcggccgtggggtgccccctacagccggcatgcaagtggagggggatggctagcgattaccgctgcgcacagcctaataactggcactgtttaaaaggcatcgcctaggcgtccaggcggtggtccaacgccttgtttcgccataccgctttaaaaaccatgataaccggttctccttgagctggcccgtagccggaacagaatgccgctgcccaaatcaatcgctcctcctggctcgattcccctcccacctgagcaggacacactgttggcccagaactaccaactcctgcctccgttgaagccgccacctcaatatgaggaaatagaggatgagactgaagaaccaaacccaagtaacccggcgaattctaatccatcctattcgcaggatcagagtagtaaggagcagcaacagcagcacactcctcagcatggtcagagggtttccttccaacttaatgctgtggcagctgcagctgcagctgcaaagcgtcctcggatggccattgaccagctgaacatgggctaaccgtttcgtcggttagactgtagtatctttccccccaccctctagtctggtgaatcatgttttgaagagatagtgctgtagtggtatatgctcttactgactaccacccacatatttaaccacgagatgtgcagtccaacagcaccagcagcataagtttctgcctgcaagaacgttgctggagggaaggaaggaaagtgactgttctacagttctagtagtgtattttgtacttgcacactaaaaggttaatatctgctagtgtaattttatccgggtcttctacatgttcttgacaaaaatggcatcaccattcatcagtattgcaagcaatgagttatgatggcaccaaattgcgatgttt

SEQ ID NO: 153371 - DNA, 1492 bp, Zea Mays
ggcatcaaaagtgcatactacctcacagtgacagtactagtagctcatagcaacaagaaaatgggagtaattaattaattgtagcagaggagataatatggatagatatatatatagcgtacgtcgtggacagatgcaattgagaagatgagctcaagtcaaaaatgaaaagggaggtccctggctggtggtggcactactggcatgatatagctactgtactggtacaggtactaagctaagacaagacgaaggggttggttgatctggaagctgcctaattaaacaggtcagtcgaggccggacctgatcctcttgtgtccggcggcgcccgcctggcggacggtgccgacggacccgccctcggacgcgccgtcggatgcggcgaagagcgaggagaggtcggcgtagaggtcgacgacgcggcggatgttgttgttgagctccctgatgaggccgacgttgcgggagaggtcgccgggcaccttggactcgtggttgtggttgatctcgctgatcaggaggcggttctggtccagcagcgtctgcacctgcacgaagctggtctggaacgcgtgcagcaccttggtgtccacgccgccgacgccgaacccggacagcgtcgtctcgccgtcgccgccctccatggaacccggacagctgctgctggtggtcgtcggcgtactagtcttggcaattctgcactctttgtcagcagccgcgcagagtctgcgatgggcggtgaggctgctgaggaaagcaagccactagctggggcatgggaggacagtgtacaacactagtatatgctacaagatcagatgtacttgccgaatctttccagcttgggcccggaaaactcgacacggatcgatctcggaattaacgaccgcgatttgctttcgctttgctcgaactcgaagacggggcacgatgagcgagaggaatgaatgaacgagggagcgaatccagctccaggcaactcaacaccaggacgattcccaacaagagaagagagcaaggtacggtggtggtgcttcttacctcctcctcgccgtcgtcgtcgtagtactcctccgtagcacccaccagcacctccgtagccggggaggggaggagaaggacagggaggaaggagatcaggagatcctcagacacacgaaacaggcagaggcaggctggactgctttcttctgttttttttttcttttcttcctactagtaggagtattttttttattgtcggccgtgagatggagagaatcttttggcttgcgacggcggcgagggagggcgacattttaggaggcacgtttctgcttctgcccgcgtctcagtctcagcgtctgctgtctgtctgtgtctgctatcatcgccctctgcgtgcgccgcccgctggatgcgttgtacgcggctgtctcctgatatttctgcatcgcatttgacgggcatgagtatctatatttgtttatttatgtggtctttgctactc

SEQ ID NO: 153372 - DNA, 915 bp, Zea Mays
atcgcgctctagggttttgacgcgccggcggcttgtgttccctttaaagcttggctgctcgtctgctcctgctgctgtctttcttctgctcttccatcgcgccagtgttttgagaagctggtcggcgctcctagatcccttcgcctctctcgcgttcgaggctaggtagccgccaccatgagccgctcggggcagcctccggatctcaagaagtacatggacaagaagcttcagattaagctgaatgcaaaccgtgttgttattggcacacttcggggattcgaccagttcatgaatctggtgatcgacaacactgtggaggtcaatggaaatgacaagacagatattggaatggtggttatcaggggaaacagtgttgtcatgatcgaggcactggagccagttgccaagtcgcagtgaatccttatttttcagctgatatagtcgcagcatgaaaactgatgtaaatgctatgagtgaaccctgttgtacttcggactcgtgcttttgcacagcaacataactcggctaccagcacccctgtttcaatggtgacttcattactgccttggcgctaacattggcaatgcatcatttcgtctattgttctacatagccggtgccttgtgaggcacatgagatctgtgattcatcgtcaatgctctgtttggatattgatattagagagcatggaattcaattagattcaataccaaattagctatgatattaaaatgagatgtcaccgtaaaattagattcaataccaaattctattgtttggatgtcactgtattggagttcggaattgagtggtctaatttcatgcaatatagttcggaattgagtggtctaattccatgcaatatagagttgatctgtaatgggagaggagtttttagttatagttcaatac

SEQ ID NO: 153373 - DNA, 1004 bp, Zea Mays
gccccattgtatatgcaattacaaaggcttcctttgtattttttttctacgaattttttaaaacactgtaaagtgtattactgagtcaaacagtcaggcataacaggcttggttcatgacagtattatttataatgagatcgaggtttcattttatatgcagtcacaaggttttttttgtattttttccatgggtgagttgattcaataacgttctgttttgtcattttatttttgttatatcctggaggttttgagttagattaatatttcgccattgaaattatgagtggcctgtatgttcactgtttgcctatttcttcagttaagctgaatgcaaaccgtgttgttattggcacacttcggggattcgaccagttcatgaatctggtgatcgacaacactgtggaggtcaatggaaatgacaagacagatattggaatggtggttatcaggggaaacagtgttgtcatgatcgaggcactggagccagttgccaagtcgcagtgaatccttatttttcagctgatatagtcgcagcatgaaaactgatgtaaatgctatgagtgaaccctgttgtacttcggactcgtgcttttgcacagcaacataactcggctaccagcacccctgtttcaatggtgacttcattactgccttggcgctaacattggcaatgcatcatttcgtctattgttctacatagccggtgccttgtgaggcacatgagatctgtgattcatcgtcaatgctctgtttggatattgatattagagagcatggaattcaattagattcaataccaaattagctatgatattaaaatgagatgtcaccgtaaaattagattcaataccaaattctattgtttggatgtcactgtattggagttcggaattgagtggtctaatttcatgcaatatagttcggaattgagtggtctaattccatgcaatatagagttgatctgtaatgggagaggagtttttagttatagttcaatac

SEQ ID NO: 153374 - DNA, 977 bp, Zea Mays
cttttcttggcttttgctagcttgctttcccttttaccgcctcctcagtcgcgcgcgttcgactttaagctccactcatcgctagcacaccaaaccagactccagagtccagagcacacgagagcaagtcactagccatggccacccccattgccaacctctcggccgtcgtcacgggcgcgatcgcagcggcccgggccgttgccaccgagatgctcccggcggccgtgacgaggcacgccgtcgccgaggcgtcgagagcctgggtggcatggctcacgagccacctctgggcctggctcgctgcggcgagggccgtcgccgccgacaacatcccggtgggcgccgcagccgacgcttgggggccctgcctccaaacggcggccaaactctcccacgacctctacggctggctggccgccgcggtggtccagaagctccccgacgtcgccgccgagaagctgctggacgacgcggcggcgtggctcgtgcgcggccgcggcgtcgcggcgtactcgacgctggcgctcgcgctcctggccgtcgccttcctcgggggcgccgtgtgcgcgctcacctgccgctccatgaagggccccgcgctcggcggagcgcgcgtgccccgcgccgtcttcgaggccaaccccaagcgctactacgccaccgtgcgaacggcgcggaaggcgcggcgccgcgccggtggggctggatgcaagctgattccggccggccttctcgtcgcgttcgcggcctacttggctgcaaagatgctctactaatgtgtttactgttacgttacgtacgataggtgcccaagatcttataagcacgaatgctaccatctgttaggagatagtatttctatggtgcatgatgcatccttgattgtaggtgcatcgtaatttcagtgctattttaggaacctcatttttccaagcgatttacattttcctaagatctcgtttgtttcgatggaa

SEQ ID NO: 153375 - DNA, 2689 bp, Zea Mays
ggcttttgctgcgtctttcctttgacgtcagcgagcgaagaactacttctttccctccctctctcatcattctcagatctcccgctccctccttcccttcatctctctgaatcctgctgcccacctcgccgtcctcgcattccgccgctcgctctcgcgatccggcagcttcctcttcgccgtcgttcttgcctcacctcgtccgctatcctgtaagctgctgctgggtcacccgtggctggactcgaccccgccggcgccgcctccgggggctgggttcgccggatgtttatcggctcctgatccatccggatcccggatccgccgcaaaggcaccgcctttgtaggttctccgggcccatgcaggagggtttggcgattcggcggtgaggcagggctctggtttagttcttgcgttggactagcccggagatgcttcgtggaacggggcacggcggcggggatgcgcggaggcgggcactgcgctcgtcgcggcggcgtctgcccgggtggatctggtggcttctcgggatcttcctccttgtcgggctcatgctcttcgtccttcaccacaaccaaaaggagcagttccggccgcccgtcgtggataatggttcagagatggaggaagtccctcgtgagaaagtgaatttctcagaagagcttttgagcagcacatcatttgctcgccaattagcggatcagatgactttagcaaaggcgtatgtcatccttgcaaaagagcatgataatcttcagcttgcatgggagcttagttcgcagataaggaattgtcaaagattgctctctgaaggggcagttagtgggagagcaatcactaaagatgaagcccatcctataataagccggctagcactgttaatatacaaggctcaggactctcactatgatatcagcacaacaatagtgacattgaagaaccatgccctggcactagaggagcgtgcaaaggcagcaattgttcagagtgctgagtttggccagttagcagcagaatccttcccgaagaatctgcactgtctaactgtgaaactgacagaggagtggcttcggaacccgaagcataggagtcgctcagaggagaaccggaattccacacgattggtggataataatctgtatcatttctgtatattctctgataatgtgctggccacttcagttgttgtcaattctacagtctccaatgcaaatcaccctcaacagcttgtgtttcatgtggtcactgacagaatccattttggcgcaatgtcaacattgttcctcataaatgacttcaaaggttgtactgttgaagtccgatgcatagatgagttctcgtggttgaatgcttcttcatctcctcttgtcaggcaactatctgaggttgaaactcagggttactattactcagctggttccaagaatcctgaaagagaaataaaattccataatccaaagtttgtttctctactgaaccatttacggttctacattcctcagatacttcccaacttggagaaggtggtgtttcttgatgacgatgttgtggtgcaaaaggatttgactcagctgttctccatagagctgcatggcaatgtcattggagcagtggaaacttgtttagagtcgtttcatcggtatcacaagtatctaaatttttcgcatcctactatcagctccaagattgatccacatacttgtggatgggcttttggaatgaacatttttgacttgatagcttggaggaaggcaaacgccacatcattgtatcattattggcaagagcaaaattctgacctattgctctggagaacaggaactcttcctgcaggccttttgacattttatggcctgatggagcccctagaccgcagatggcatgtcttgggtctcgggtatgatgtagacatagatgatcgtctgattgagagtgctgctgttgtgcactataatggaaacatgaaaccctggctgaagctggctattcgccgttacaagtatatatgggaacggtatgtgaatatctcacacccgtatgttagagagtgtatgttgcattagaaagtctgcaaatctctgtatgttcttgcatggcactgaagctgcatgcttcagtttcttcacatgaggctgcttttgagcaccttatgtgccggaaagttccagaggtagaatatatactcaagggacagcatcaaagaagtcaactgttaagttttctttttgggttgggagaagattcattttgggatgaaaataattcctttgcagagtttacatacaatttggactggaaaatttagcagtctaaccagatacatctggatagatactgtaaaagagatacagttggatcaatggacattcttttttttagatttaggaaatgcaaattgtgagctcaactgtgcagggccagtggtgttggattcttttagtaatatcttgttttataccggcgaagaaggctctgcctccctcgtataagtagctcctttgtgcttattcgtacactatgaattcagttggatttcatacactatggcatccttcttttcagaggaaaatgcatgtaggtagatccagatctggtcggcaggttttcatgtgtttcgtttttcatgtgccgtctgcaatgcatgcgtgcttcatcatgatctacacatatattacgtgtgaatggaag

SEQ ID NO: 153376 - DNA, 2226 bp, Zea Mays
attcattcatccggcccgagagcagagcgcacaccacaccacctccgtgaggtggagcggagccatcacctccgtcacgcacgcgatttcttttcaaaccgagtagctcgatcgagtcctcgttacgcaactcgaccaaccggcgtcggccagctgatcgagccgcccggccggccgcgcctggtgtgacgtgccatctcgatctcgatggggcatcttgctcctcctcgctctcttcttcttaatttgccgctgcgtgcggccttttattcgccctgcctctagctgctgcttcttccaggatcggggatcggagcttgtgctgctactgctactataccagcgctagctagcagcagccgccggccggctcgcgcaagctaaggaagggtcgacatgacgatggggctccgcgtccgcgactcctccgcgctgctggctctggccgtcgcgctcgcctgctgctccgttgcaggttcggttaccatatttcattcatctgaaaatgtaaacagtgtcgatcggtcgatgggcgacgctcacattctctcctctcctgtcgccatggctggcggctgctgcacacacactggcacttgcgcagtggtggcctacgaccccctggacccgaacggcaacatcaccatcaagtgggacgtgatctcgtggacgcccgacgggtacgtggcgatggtgacgatgagcaactaccagatgtaccggcacatcatggcgcccgggtggacgttggggtggtcgtgggccaagaaggaggtgatctggtccatcgtgggggcgcaggccacggagcagggggactgctccaagttcaagggcggcatcccgcactgctgcaagcgcaccccggccgtggtggacctcctcccgggggtgccctacaaccagcagatcgccaactgctgcaaggccggcgtggtgtcggcgtacgggcaggacccggcggggtccgtctccgcgttccaggtctccgtcggcctggccggtaccaccaacaagacggtgaagctgcccaggaacttcacgctcatggggcccgggctgggctacacctgcgggcccgccgccgtggtgccgtccaccgtgtactggacgcccgaccaccggcgccggacgcaggcgctcatgacgtggacggtgacctgcacctactcgcagcagctggcgtcccggtacccgtcctgctgcgtctccttctcctccttctacaacagcaccatcgtgccgtgcgcccggtgcgcgtgcggctgcggcggccacggcggccacgcgggtccgggcggctgcatcgagggggactccaagcgcgcgctgtcggccggggtgaacacgccgcgcaaggacggccaggcgctgctgcagtgcacgccgcacatgtgccccatccgggtgcactggcacgtcaagctcaactacaaggactactggcgcgccaagatcgccatcaccaactacaactacaggatgaactacacgcagtggacgctggtggcgcagcaccccaacctggacaacgtcaccgaggtcttcagcttccagtacaagccgctgcaaccatacgggagcatcaatgacactggcatgttctacgggctcaagttctacaacgactttctcatggaggccggcccgttcggcaacgtgcagtcggaggtgctcatgcgcaaggacgcaaggaccttcaccttcagcatgggctgggcgttcccgcgcaagatctacttcaacggcgacgagtgcaagatgccgccgccggactcctacccctacctgcccaacgccgcgcccgtcgtcgcctcgcagctggtcctgtccgccgccgcctcggcgttcctactgttgctgctcctggtggcatgaccgtgaccgaaccaagggcaaggcctccgttttgttttcccgtctcgtcccgtgggcagggagcagacttcagtaggcagggcattttatttggtttttttgccaaggattcaacacttgggttttcgtcagaggaaaactgtcgtgtatgtagtgtgagttgcaggtcgtcggatccccacgtacaagacaatctttggatctagaatatgcaaaacgtgaatcagcacgccaggatcatcgtctcctacaagattggcagaaaaaaaatctcatgatgagtgatgtgtcaacagacctatatatatgtgataatcactggtttcaacggttgcctgaacatttgct

SEQ ID NO: 153377 - DNA, 2069 bp, Zea Mays
atccggcccgagagcagagcgcacaccacaccacctccgtgaggtggagcggagccatcacctccgtcacgcacgcgatttcttttcaaaccgagtagctcgatcgagtcctcgttacgcaactcgaccaaccggcgtcggccagctgatcgagccgcccggccggccgcgcctggtgtgacgtgccatctcgatctcgatggggcatcttgctcctcctcgctctcttcttcttaatttgccgctgcgtgcggccttttattcgccctgcctctagctgctgcttcttccaggatcggggatcggagcttgtgctgctactgctactataccagcgctagctagcagcagccgccggccggctcgcgcaagctaaggaagggtcgacatgacgatggggctccgcgtccgcgactcctccgcgctgctggctctggccgtcgcgctcgcctgctgctccgttgcagtggtggcctacgaccccctggacccgaacggcaacatcaccatcaagtgggacgtgatctcgtggacgcccgacgggtacgtggcgatggtgacgatgagcaactaccagatgtaccggcacatcatggcgcccgggtggacgttggggtggtcgtgggccaagaaggaggtgatctggtccatcgtgggggcgcaggccacggagcagggggactgctccaagttcaagggcggcatcccgcactgctgcaagcgcaccccggccgtggtggacctcctcccgggggtgccctacaaccagcagatcgccaactgctgcaaggccggcgtggtgtcggcgtacgggcaggacccggcggggtccgtctccgcgttccaggtctccgtcggcctggccggtaccaccaacaagacggtgaagctgcccaggaacttcacgctcatggggcccgggctgggctacacctgcgggcccgccgccgtggtgccgtccaccgtgtactggacgcccgaccaccggcgccggacgcaggcgctcatgacgtggacggtgacctgcacctactcgcagcagctggcgtcccggtacccgtcctgctgcgtctccttctcctccttctacaacagcaccatcgtgccgtgcgcccggtgcgcgtgcggctgcggcggccacggcggccacgcgggtccgggcggctgcatcgagggggactccaagcgcgcgctgtcggccggggtgaacacgccgcgcaaggacggccaggcgctgctgcagtgcacgccgcacatgtgccccatccgggtgcactggcacgtcaagctcaactacaaggactactggcgcgccaagatcgccatcaccaactacaactacaggatgaactacacgcagtggacgctggtggcgcagcaccccaacctggacaacgtcaccgaggtcttcagcttccagtacaagccgctgcaaccatacgggagcatcaatgacactggcatgttctacgggctcaagttctacaacgactttctcatggaggccggcccgttcggcaacgtgcagtcggaggtgctcatgcgcaaggacgcaaggaccttcaccttcagcatgggctgggcgttcccgcgcaagatctacttcaacggcgacgagtgcaagatgccgccgccggactcctacccctacctgcccaacgccgcgcccgtcgtcgcctcgcagctggtcctgtccgccgccgcctcggcgttcctactgttgctgctcctggtggcatgaccgtgaccgaaccaagggcaaggcctccgttttgttttcccgtctcgtcccgtgggcagggagcagacttcagtaggcagggcattttatttggtttttttgccaaggattcaacacttgggttttcgtcagaggaaaactgtcgtgtatgtagtgtgagttgcaggtcgtcggatccccacgtacaagacaatctttggatctagaatatgcaaaacgtgaatcagcacgccaggatcatcgtctcctacaagattggcagaaaaaaaatctcatgatgagtgatgtgtcaacagacctatatatatgtgataatcactggtttcaa

SEQ ID NO: 153378 - DNA, 2668 bp, Zea Mays
ggtcagcaaccaatccataccatcacggggtgcaaccgaaacaagacgaagggatacgacaacaacttaagatgaaggttcaggcacacgacttgccgtgaaatttagagacagcttacaaccccatgcaggacgggaagtttgccacagagaaatcaaccatgcgcacaaagcattgcacggggtacacacatgaaatgacaacggttgttcacgattcagacatagcacgcagcaggcaggggaggataactttggtgagcgcaccagcacgggcatcagttgccaccgaacaggtagcccagggaagagccaccgccaggagcagcgtggaccttggttgaaggacggtcctgcaatcattcataaacaacaaaaccaacagttaagcaggatcaagaaacaagttttgggttccagggagcgattaggtaagtgagcccaacccttcccctgttatttatttattagtttgcaacattgttccatatatgaatctgtagttttgaggaatcataatttgtgtccttgcattgcccaatcagattctgcagcatgacagaactaaaggaattttggttcaatttggtcaatagtttatggaaagacatggtctgcatattttcttcaggatatttaatttttcggcactaacaatgtgttggcatttagtgttgatgataaaatggtatatggctcatgattggtagtctaaaaggtcagcagcccagcaacaatcaagactcggtacaatttaaaaagcaataaacatgactggaagtctttccatcaacatgattctatcgggttgtaagaataagtacagacattacgtgataatgcagcacaaactaccatgatgttttctcaaaacatgattatacataatataagcaccccacaaaatatgacgtcatttctaagcatatcaatggatgatggcaacacataatatgtaaaaagcctatgtgaaatgaaagaacataaagtagcataccgtaaggaagttgccagtgttctgaccatcagccctgtggtagttattggtttggctggtaaccccagcagcaacctgcttggccgcatcagtctttgcagcagatggtttctcaacaggtggagcacttgcagctggtgccactgctggtttggggggctcaccgcttccaaagagataacccagagaactttgaccaccaccggcactaccaccacggctcatcttgattattgaaaagagaaactgtacaaagatctaatcaggtatcaagcattacttcgacacattgtataaaggtacaagagagacaatgcaaatcaatttaatttcaagtaccacaaataatttttaaaatactaaagtatgtttcgatctgccaccaacacttggtaaggatataattctccaagaacaaagtaaaacagagaagatatagtttgacaggatcaactctattaaactttattaggtactgtaactacaaacagatgaaaacatcaaaacatatctcgatctgtcatggaatcttggtaacgatcttattaaggatgtaacgaaccgatcttccagatatacttttactcagatactcagatagagtgatagacactgatttccttctatgttgcatgtttgtgcagaaaactgatgcaccaacaaatgtaaaactaaacagattgatagaacaatcaaggaaaataaagcatcttcggtttaactctgccaagtaacaaagttcaaaagaacatctgcctagtcatatatgacaggtccttgtacaattctatgaaaccgggaatgtggaaccatgtggggttccatggcccgatcgggaatgggaccatatggaacatcgtatggaaccatggttgggacacagccctcactcgagtaggatgtcggataaaccatcatcctgcacaagcaaggggcatgtaccttcgcggaagcggagcaccacgaggatattggaggagcagaggtcagaggactggcaaagcactaagacaaagggatcgctaaccatgtgctcatattacatgaacaaacagttaatcatgtgctcacgttgcattgaattatttttttctatacaggaatatttactagttggctgtttcaggaacctcgttccacattatagttccaaaattttacggttgacgttccggttatcgaataaaccatacaaggagccagtgatacgcaaccagtgatacgaggttacctaaacaattaggtctaacctagacacaacatgaaacgaaaaaaatcgacggatcaaccaccgaagaccgcaatgcacaacagatcttcatctttctctggagaatctaagccgcaacatactccgaagaatctaatgcgtacagccgcaacagccgcattcacggtccctagggaggggataccctgcggatcgacgacggtgagtcacaaaattcaacagatccgcgtctaccgacaagcagcggacgctcggaagccagaaatggacgcggatctcaaccttgcggctagattcgggcgcttacggcgcaaatcaggacatggaagcgagacaacgaaccgagggttgagcgggcaaaggaaagggccttaccgagaggcagcggcgaggagatggagggcgaccggcggcggggtcggtgggactgcggctgctcc

SEQ ID NO: 153379 - DNA, 2147 bp, Zea Mays
atcaattggtatcattcaatttaatacatgtcaaagtttaaaatatagatgacttgctcctaaatatcacctatgagtaatgctcacactcatgtgatattatcctataagttgtatcctgaaattaaaagttccaagtacatgtctcatacaagtattcaaaacttgtatgcacacttttagagaaaagtcactctgtaagttagtatctttgagactaacactggggagatgcgcatccagtgatacgaggttacctaaacaattaggtctaacctagacacaacatgaaacgaaaaaaatcgacggatcaaccaccgaagaccgcaatgcacaacagatcttcatctttctctggagaatctaagccgcaacatactccgaagaatctaatgcgtacagccgcaacagacgcattcacggtccctagggaggggataccctgcggatcgacgacggtgagtcacaaaattcaacagatccgcgtctaccgacaagcagcggacgctcggaagccagaaatggacgcggatctcaaccttgcggctagattcgggcgcttacggcgcaaatcaggacatggaagcgagacaacgaaccgagggttgagcgggcaaaggaaagggccttaccgagaggcagcggcgaggagatggagggcgaccggcggcgaggtcggtgggactgcggctgctccggatctctctcgcttctgcgctcgaaaatggagaactgcggctggttttgtattgaagagggatcggtggtcccagtacccggggacggatgggcccaacacctccagcaggccgtccgatctcgccactgacggcgggaaccagaaggcgcgggttctgttgggcggccgccaggacttcttctactcggcgctcccttcggtttcccttcccaccgccgcgccactcgctcccgcgggatccagatccggtggacgtagctctggggcctcgacgcagacagcctgggatcgagatgctccaccaatgggggatcgagaggacgaccgctccccactggcgcagcccaagcccaagcactggagatccgtccgctcctctcctgaccgcgggatgggcattatgagcttcgtacctgaggaagcagggcgggcattgagttacaacgaaaggtccatggccaccactgtgagacattggcatggtggagggtgcattggtgcttcttccactggcgcctggtgtgaaccagttcccttttgttcattgcttcttgggtcctatgataatattcatgttagcccatcagaatctgaagctcatgtgggggtgagggatcaaggcgcaaaccgatcaatgagaagtgccggttgcattcttgctgagttgctatcagggaagcctatcatgccaggacgaactgaggctgaccaccctagattaaacttcaaagaccggtaccctgagccatacagagattctcatccacaactgaaaatgggtttcgtcacgaagccagagacgctgaccgatgggatagtgaagctgatgatttggcaccgcaccatccccagcatgcaaggtctaatgccattaaattttgagggtagcgatattgttttcaccctattgaatagggtatatgatgatgttggcaagcgctggagcagattttgttcattgggtctgtgtgggctaccagggattaaggttaatgattcaattatgctctttgtattgtgcttatggttgagtatggcgtttaacactaactacgagacagtctttctgatcataagtgggatgatgcgaactatctggagccccgacggcccaaacaaaattcacccggacgttgacctcaccgcgcctgacgccggtcgccccaacgacgaccccgcatggttctgcctacgagtcggttatggcggcgagaagccccaacgtgaggctacaaaggctatcgacaggaagaaccagaggaaagatgagtgcttaaagaagcaaaaccagagaaaaggcagtcgttcgctgagaataactccatggcagtactcaaggacgcaaacagagaagtggcgaggccttccggcaccaccaccttcccggactgggaaggagaggaacgttgccgtgaagctgtcgaggttccaaacagcagccgcttga

SEQ ID NO: 153380 - DNA, 2710 bp, Zea Mays
cacgtttctttaccctaaccttttcaccgctcgagccaagggacacagccgccgccgtttcttcatctcccatcttcatagtcgcgctaggcacacaggcgtcggcggcggcgctcaggctcgggatctcagctacagcgtcagcggcttcctctcccgcctctcgccagtcgtctcgcgccctcgcttccgatcctccgcacaccggccggtgaccctgcgtgcgtgcctctctctctctcctcccgccaccggtggattatcaacggcgctcggccccggcggttgcgccgcgcgcggtctgagggcagcgggagctagcagccgctgctccaccaaggcggtcgcgccgctttgggagcggttatgccaagcgttacccgtcctcttagcgctgaagcgtgcgcttagtgccgcttttcggaccctggttctttccctcagttgttttttaattccttttttatccttatttgtccacttctacaagatgcatttgtgcttgtggttcttgtgaggaataactattgtgcaacgcattaatttgtttattctccttcagaaatggcagggcaagcagggaacccagtaaaccaccctataagtccccacgtgataagtggcgctttcgttcagcaatattaccacattttacacgaacaaccagatcaagtgcacaagttttaccaagattcaagtattcttggtcgaccagattccaatggaattatggcatatgtaaccactatgcgtgatattaatgaaaaaatcatgtctatggacttcaggaactgcttaacagagatagagactgcagatgcacaattatctcacaaggatggggtgctcattgttgttactggttccttgacttcggatgaaggcgttttccgtaggtttacccagtcattcttcctagcaccacaagaaagtggtggctattttgttctcactgatgtatttagatttatttcggaaaggaaaccagctgagataaatcaagttgctactcaagaaaatgaaatcagtcagaatgttagacctgcatctgaaacatgttcagcactaccagaacctattccagctgatgggagtgtgatctcagaccatgtgacagctgatagtaatgtcacggagaagcaaataagtgatctttctgctaatgggactgccattgaaagtaatgataatacccagccacctgtgcaagtgcccaaagaggatccaaagaaggccctacttgttgctcctccccctccaactcagatggatgttactaagaaatcttatgcatccattgtcaaggtcatgaaggagggcccaccaactccagttgtcaaaacaacatcgtcagtttccaaacagaagccagctcctaaaccagtgtccacggctgtcgaaggcctagagaaaccatctgagaaacctacccaggctattggaaccggtgatgggattgttgcccaaaacaactcttctcgcaatgagcaaggctattcaattttcatcaagaatttgcctttccatgccaatattgaaatggttgaggaggaatttaagaaatttggtactataaagccaggtggtgttcaagtccggcacaataaggttgatcgatttggttttggttttgttgagtacgagtcccagcagtctatgcaagcagcaattgaggcatctccgattcgtatggcggacaaagaagtcggcattgaggcgaaaagagccaattcacgaggtggccgtttccaatctggcaggggagtgtaccatggtgataactttagagggcgaggaagtggctatgtggacaacacaaactacagaagcagcggcagcttcaaccgccagaatgaaggggagatgtacaaccgcaggaatgaaggggagatgtacaaccgcaggaatgaaggggacttctacaaccacaggaatgagggggagttctacaaccgacggaatgatggtggcgagaactacaaccggcgcaacgatggtggcgagaactataaccggcgcaatgatggtggcaagaacttcagccgcaggaatgacagtggtaccgagaacttcaaccgcaggaatgacggtggcggcgagaacttcagccgcaggaacgatggtgttggcgagaacttcaacgtcaggaatgacggcgttggtgagaacttcaacaggaggaacaacttcagaaatcagaatgacttccctggacgaggacggggttcacctacaccagggaacagttactaccagaacgggaatgggaggttcagtcgcgtgaacaatggcgccaagcaagctcctgtggccgcgtagaggcatcaaggcggtaggcttacatcaaactaggaagcataaggctacattcaagtgagctgagtgcaaggattattcttagtaggagcattgctgtcagacagcttggttatttttttttgtgccgtgttgggtcgctaagagattagtagttgcagtcgtccgtggatggtaggtgaattttgttgccgttgatgagcttgtcaactgggtgttggaccatggttcgtaactttgtgtcatctgccaatcaggattggtgggaggttagacactaatcttatgaagcggtgactgcaaaaatcagtgtccatgttaaatgctattattgtcatggtattcgataatgcgaagtatgtccatgtttagtgctattattattgccctggta

SEQ ID NO: 153381 - DNA, 2369 bp, Zea Mays
cacgtttctttaccctaaccttttcaccgctcgagccaagggacacagccgccgccgtttcttcatctcccatcttcatagtcgcgctaggcacacaggcgtcggcggcggcgctcaggctcgggatctcagctacagcgtcagcggcttcctctcccgcctctcgccagtcgtctcgcgccctcgcttccgatcctccgcacaccggccggtgaccctgcaaatggcagggcaagcagggaacccagtaaaccaccctataagtccccacgtgataagtggcgctttcgttcagcaatattaccacattttacacgaacaaccagatcaagtgcacaagttttaccaagattcaagtattcttggtcgaccagattccaatggaattatggcatatgtaaccactatgcgtgatattaatgaaaaaatcatgtctatggacttcaggaactgcttaacagagatagagactgcagatgcacaattatctcacaaggatggggtgctcattgttgttactggttccttgacttcggatgaaggcgttttccgtaggtttacccagtcattcttcctagcaccacaagaaagtggtggctattttgttctcactgatgtatttagatttatttcggaaaggaaaccagctgagataaatcaagttgctactcaagaaaatgaaatcagtcagaatgttagacctgcatctgaaacatgttcagcactaccagaacctattccagctgatgggagtgtgatctcagaccatgtgacagctgatagtaatgtcacggagaagcaaataagtgatctttctgctaatgggactgccattgaaagtaatgataatacccagccacctgtgcaagtgcccaaagaggatccaaagaaggccctacttgttgctcctccccctccaactcagatggatgttactaagaaatcttatgcatccattgtcaaggtcatgaaggagggcccaccaactccagttgtcaaaacaacatcgtcagtttccaaacagaagccagctcctaaaccagtgtccacggctgtcgaaggcctagagaaaccatctgagaaacctacccaggctattggaaccggtgatgggattgttgcccaaaacaactcttctcgcaatgagcaaggctattcaattttcatcaagaatttgcctttccatgccaatattgaaatggttgaggaggaatttaagaaatttggtactataaagccaggtggtgttcaagtccggcacaataaggttgatcgatttggttttggttttgttgagtacgagtcccagcagtctatgcaagcagcaattgaggcatctccgattcgtatggcggacaaagaagtcggcattgaggcgaaaagagccaattcacgaggtggccgtttccaatctggcaggggagtgtaccatggtgataactttagagggcgaggaagtggctatgtggacaacacaaactacagaagcagcggcagcttcaaccgccagaatgaaggggagatgtacaaccgcaggaatgaaggggagatgtacaaccgcaggaatgaaggggacttctacaaccacaggaatgagggggagttctacaaccgacggaatgatggtggcgagaactacaaccggcgcaacgatggtggcgagaactataaccggcgcaatgatggtggcaagaacttcagccgcaggaatgacagtggtaccgagaacttcaaccgcaggaatgacggtggcggcgagaacttcagccgcaggaacgatggtgttggcgagaacttcaacgtcaggaatgacggcgttggtgagaacttcaacaggaggaacaacttcagaaatcagaatgacttccctggacgaggacggggttcacctacaccagggaacagttactaccagaacgggaatgggaggttcagtcgcgtgaacaatggcgccaagcaagctcctgtggccgcgtagaggcatcaaggcggtaggcttacatcaaactaggaagcataaggctacattcaagtgagctgagtgcaaggattattcttagtaggagcattgctgtcagacagcttggttatttttttttgtgccgtgttgggtcgctaagagattagtagttgcagtcgtccgtggatggtaggtgaattttgttgccgttgatgagcttgtcaactgggtgttggaccatggttcgtaactttgtgtcatctgccaatcaggattggtgggaggttagacactaatcttatgaagcggtgactgcaaaaatcagtgtccatgttaaatgctattattgtcatggtattcgataatgcgaagtatgtccatgtttagtgctattattattgccctggta

SEQ ID NO: 153382 - DNA, 2246 bp, Zea Mays
gacacagccgccgccgtttcttcatctcccatcttcatagtcgcgctaggcacacaggcgtcggcggcggcgctcaggctcgggatctcagctacagcaaatggcagggcaagcagggaacccagtaaaccaccctataagtccccacgtgataagtggcgctttcgttcagcaatattaccacattttacacgaacaaccagatcaagtgcacaagttttaccaagattcaagtattcttggtcgaccagattccaatggaattatggcatatgtaaccactatgcgtgatattaatgaaaaaatcatgtctatggacttcaggaactgcttaacagagatagagactgcagatgcacaattatctcacaaggatggggtgctcattgttgttactggttccttgacttcggatgaaggcgttttccgtaggtttacccagtcattcttcctagcaccacaagaaagtggtggctattttgttctcactgatgtatttagatttatttcggaaaggaaaccagctgagataaatcaagttgctactcaagaaaatgaaatcagtcagaatgttagacctgcatctgaaacatgttcagcactaccagaacctattccagctgatgggagtgtgatctcagaccatgtgacagctgatagtaatgtcacggagaagcaaataagtgatctttctgctaatgggactgccattgaaagtaatgataatacccagccacctgtgcaagtgcccaaagaggatccaaagaaggccctacttgttgctcctccccctccaactcagatggatgttactaagaaatcttatgcatccattgtcaaggtcatgaaggagggcccaccaactccagttgtcaaaacaacatcgtcagtttccaaacagaagccagctcctaaaccagtgtccacggctgtcgaaggcctagagaaaccatctgagaaacctacccaggctattggaaccggtgatgggattgttgcccaaaacaactcttctcgcaatgagcaaggctattcaattttcatcaagaatttgcctttccatgccaatattgaaatggttgaggaggaatttaagaaatttggtactataaagccaggtggtgttcaagtccggcacaataaggttgatcgatttggttttggttttgttgagtacgagtcccagcagtctatgcaagcagcaattgaggcatctccgattcgtatggcggacaaagaagtcggcattgaggcgaaaagagccaattcacgaggtggccgtttccaatctggcaggggagtgtaccatggtgataactttagagggcgaggaagtggctatgtggacaacacaaactacagaagcagcggcagcttcaaccgccagaatgaaggggagatgtacaaccgcaggaatgaaggggagatgtacaaccgcaggaatgaaggggacttctacaaccacaggaatgagggggagttctacaaccgacggaatgatggtggcgagaactacaaccggcgcaacgatggtggcgagaactataaccggcgcaatgatggtggcaagaacttcagccgcaggaatgacagtggtaccgagaacttcaaccgcaggaatgacggtggcggcgagaacttcagccgcaggaacgatggtgttggcgagaacttcaacgtcaggaatgacggcgttggtgagaacttcaacaggaggaacaacttcagaaatcagaatgacttccctggacgaggacggggttcacctacaccagggaacagttactaccagaacgggaatgggaggttcagtcgcgtgaacaatggcgccaagcaagctcctgtggccgcgtagaggcatcaaggcggtaggcttacatcaaactaggaagcataaggctacattcaagtgagctgagtgcaaggattattcttagtaggagcattgctgtcagacagcttggttatttttttttgtgccgtgttgggtcgctaagagattagtagttgcagtcgtccgtggatggtaggtgaattttgttgccgttgatgagcttgtcaactgggtgttggaccatggttcgtaactttgtgtcatctgccaatcaggattggtgggaggttagacactaatcttatgaagcggtgactgcaaaaatcagtgtccatgttaaatgctattattgtcatggtattcgataatgcgaagtatgtccatgtttagtgctattattattgccctggta

SEQ ID NO: 153383 - DNA, 1876 bp, Zea Mays
tttttttgaacttttttttttgccaacctaggctcaacgcctcatcgccggacgaaagagcggcttgcacgtcggggcggtggcccacagcccactcaacagcaacacgtgtcggcgcggtccggccagacacgtggtcgcccccctccttgcccgcccaccaaacacccgacccagccagctaggggagccacagcaagaaatgcaggccttcccttttgctgcccaaccccaatcatagagcggaacggacggagtgggtgcaaatcggattagacggccacgtcccccccgagcctcaccaatcgccggccctccgcaggcagggaagggcggttgggcggccggccggccggagatctgattgctcttatcttctcccctcccgttcatccaatctgctgtcaccatatctgatctccctctccccctgattgcccgcggtggccattgcctcgctcgcgtctccttcgccgcgcttctaggaagattcggcggcgtgcccatttgtcggtcgtagccttaaccagttcttccccaactccgagctccttccttgcttgggagcagctgcacacacatccgcccaggatattagttagcgtggaggatggcgtccagggacttcctccgcgtcttcggcgccggtgagggggcgggcccgccgggggacgccggcgccggccagcccgacgacgacgagctcagcctcggcctctccctgggcggccgcttcggcaccgacgccaagcgcccgcgcctggcgcgctcctcctccatcgcctccgtctgctccgtctcctctctccacgccgacccgtcccccgccgcgccgctgccgctgctgcgcaccacctcgctgcccaccgagaccgaggaggagcgctggcgccgacgcgagatgcagagccgccgccgcctcgaggcgcgccggaagcgcgtcgagcgacgcaactccatgggctccgtctccgtggcacccgccgacgccgtcagcgggaggaggtccaacgcctcgcaggggagcaactctgcaagcaccacggagcaaggtattggtggaagcatgtttaaccaatccgcagacgcgaagagtccatctacctctgataatagaaatcaaaacgacatgcttcctccgaccaaagcggccgagaagccactaaacggtactgcgacagagcagcagcctcgcctacggacgcttgggtccctcacgacacggacgggcagcaccagtgacatcagaaagctcatgatggaggacatgccaatggtctcatccaaggtagaagggcccaacgccaggaggatcgacggcttcctgtacaggtacaagaaaggcgaggatgtgaggatagtgtgcgtctgccatggtagcttcctcactcccgcggagtttgttaagcacgcggggggcggtgatgtgccgaatccgcttcggcatattgtcgtcaaccctgcgcccttctcgtgaagagagagggttacgctggtgctgctatctgctgtgctgtaacatgtaggctcctttgtttctgggagttcaacggaaggtctctgtatttttacataaatcgagtgtgacagcaaattcaagagaaaaaaaatcatctgcaaatgttataggcttgtctacaaattgacaaggattcagtagcaatgctttgctagctggttttaacagttccctttccagtgacaagtctctgtatgcttcaagagggttcacatccaagataggaacagggttctagatggcattcaagtttgccatgctcaagctattcgatttcgaaggcattgaggaaacagagatatcattatgcttctctaggaggttgagctcccaaaggaatgaagcgaatgctccact

SEQ ID NO: 153384 - DNA, 684 bp, Zea Mays
gatcaggtggtgtgcaagaagcagaaaaaagagacataattaagtcagggagcaaacttgcacatttatgatcgagaaaactttggcatcagcagtgctacaaattgttctgcccatcagtcaaaaattataacccagatccttttcaagagattacctgggtttggaggccagcggccttgaccatcagttttgaagactacaggatttgcactggttgcatcactgtcggtcacatgcgaatgctccaggtgccctaatgctgctactacacaaaacaagccaaagatctcatgactgctaatttcatcttcaagaggatcctgatgactcctttctggcttactagtatactggacggctacacggtaatcctatctactgcgtgggatcacacaaaaaagaaagacttctgcttccaacccacggaacccgcggctacatttcataatggtccttcctaggaacagcatcaaggtaattcttgagcaacctttgatccatgatcatgttaggaatctgcagagtagttcacagctcagcccatgacttgaggaaccattgagaaaaaaaacagtacatagcaggtccgagtcaataccttttcaccaaagaaaatctttgagttgttggcaattgattcaatgaacctcagctccagatactcaggtgtcagtttgagcc

SEQ ID NO: 153385 - DNA, 553 bp, Zea Mays
acaaattgttctgcccatcagtcaaaaattataacccagatccttttcaagagattacctgggtttggaggccagcggccttgaccatcagttttgaagactacaggatttgcactggttgcatcactgtcggtcacatgcgaatgctccaggtgccctaatgctgctactacacaaaacaagccaaagatctcatgactgctaatttcatcttcaagaggatcctgatgactcctttctggcttactagtatactggacggctacacggtaatcctatctactgcgtgggatcacacaaaaaagaaagacttctgcttccaacccacggaacccgcggctacatttcataatggtccttcctaggaacagcatcaaggtaattcttgagcaacctttgatccatgatcatgttaggaatctgcagagtagttcacagctcagcccatgacttgaggaaccattgagaaaaaaaacagtacatagcaggtccgagtcaataccttttcaccaaagaaaatctttgagttgttggcaattgattcaatgaacct

SEQ ID NO: 153386 - DNA, 246 bp, Zea Mays
aagattgaaagggtcgagactgtttagaaaacaagcaatcatccaacgtggttccgggcatctaacattctacccacaatggttggccatacaatcgcgattcataatggaaaagaacatatacctatttatataacaaatcctatggtaggtcgcaaattgggtggattcgtgcctactcggaatttcatgagttatgagagtacaagaaaggatagacgatctccagacagatggatcttatat

SEQ ID NO: 153387 - DNA, 1968 bp, Zea Mays
atgctgtcgcactacgccgccaagtggctcccagacgtggcgcctccaacgtcgtcgtccgcgtcggggcgcttcctgccgccggagagccccacggtcacgtggctgaagaagcggctgagtatgtccggcagcaagggcacaacgggcacggtggaggtggacgcactgactttttctgcttttcatttgccttgtgcggatctactcgtcgtgctcatctcgcgcagatctgctcgacgtgtgaaccaccgcctcgccgagaaggagatcgtcgtcgtcctctcctctgcctccgcggcctccatcgagagcagtgttgccgtcgtcgaccacctcacctccctcgtctctcacctccatgacctcaagagcaagtggctcccagacgtggcgcctccaacgtcgtcgtccgcgtcggggcgcttcctgccgccggagagccccacggtcacgtggctgaagaagcggctgagtatgtccggcagcaagggcacaacgggcacggtggaggtggacgcgctgactttttctgcttttcatttgccttgtgcggatctactcgtcgtgctcatctcgcgcagatctgctcgacgtgtgaaccaccgcctcgccgagaaggagatcgtcgtcgtcctctcctctgcctccgcggcctccatcgagagcagtgttgccgtcgtcgaccacctcacctccctcgtctctcacctccatgacctcaagagcaagtgcagtgacctgaaaatgagtgagggggatgctactcagcttgcccttgagaaaggatcaccgcaagtgtctaatgatgatggttcgagtagtcctgcaactgtgcacaagttgaaagttgacacagaagatgctcgaagcaaaattgaatcacccactccagagaagcttgaatctagaagcaaatgggttgttatcattcaccttgtctttcctgttcacaatgtcaggcataaggatttactgaatctttttaatagaatggagagttctataaggttgctacgcctacggaagaggatggctacatttaataatattgccacccaggtggaaatactcgcaaaaaggtttgtggactcaagtggtcttatgacaatcgtcagcttgcatccagaggcaatgacaatggacacatatcctctacgcttcttccacggcgtgcccgaggacgacgctgcggagcgggagatggccgtcatgcgcgccaaggccctggccgccacgccgccgacgcagcagcagcagctcatggcgtccgcgtaccccttctcgctgtcgcccaagggaggcgtcagcctcagcttcctgatccagcagcaccagcagcagcagagcgagacccaaagagcagcgcacctcagtaatcctattatggtggatatcagggtacaagcaaaaagattgaaaatccaaatggaaggggaaactattaggtatatccaacttcaatcaggagcaaagattcaagtcacaagagaccatgaagctgaacctggtgcactaacaaggcaagttgagctttctggcaaacctgagcagataagcaaagctgaacagttgatcaaagaagttctggcagaggccgatgctgggtcatccggtgctagatctggaggccggaaatacaatgcaacacagcaaggtgctgagatgtaccagatgaaaattgctaataacaaggtgggactgattattaggaagggtggtgagactataaagtccatgcagaccaaatctggagcccgtattcagtcttcaatcagtgatggtggtctttctcaggatgctaagcaatgcagaaacctgaagttcctccataccgaagggtgcttgtccatcactaaggcgtctctaagagcccttgtgcagtatgccaagagactcgagtctcttactctgggaagctaccctcaaattgagcaacatgccatcttttccttactgatgaactaa

SEQ ID NO: 153388 - DNA, 950 bp, Zea Mays
catcgcaaccgtcggatcccaatccaacgccgaaacgtcgaagcacgttctatataaatattacgctccgctctgtcgccactcctccaaaccctagcccagagcagccgcatcgaactctacctgcctttctctcgtccctggcggcggcggcaggatggcggcttctactgcgaggacggtgaaggatgtgaacccccacgagtttgtcaaggcctactccgcccatctcaaacgctccggcaagatggagcttcctgagtgggttgacattgtgaagactgcgaggttcaaggagctccctccttatgaccctgactggtactacatcagggctgcatctgtagcaaggaagatctacttgagacaaggcattggtgttggtggcttccagaagatttatggtggccgccagaggaatggctcacgcccacctcacttctgcaagagcagtggtgccatttcacgcaacatcctccagcagctgcaggagatgggcatcattgatgtcgatcccaaggggtaattgaactgctatacccctttctcttactaatgacttttcctggcccttgcttattcggtgttgttgcagtggacggcgcatcacctcccagggaaggcgtgatctggaccaggtggctggaagggttgctgttgaagcttgagcaatctcatatttggtttctatgatgtcatgtttgattgttgagatggctacactttatttgcactttggattaggatttttgtgttaagagaactcaaggcattctagctatggttcacactgtattttccctgagtacctatttatcaaaacctattcgtatgtttgggaagtgtctgagctgatattcatgacatgtatttggtataggtctatctatgtgacgtgataatatcattggatagattacgatctagatgaatttctatctcttgagttt

SEQ ID NO: 153389 - DNA, 1936 bp, Zea Mays
catcgcaaccgtcggatcccaatccaacgccgaaacgtcgaagcacgttctatataaatattacgctccgctctgtcgccactcctccaaaccctagcccagagcagccgcatcgaactctacctgcctttctctcgtccctggcggcggcggcaggatggcggcttctactgcgaggacggtgaaggatgtgaacccccacgagtttgtcaaggcctactccgcccatctcaaacgctccggcaaggtaacggtgctcgactcgtcgccttcccatctgattcgacgctacagaatgtgaataagccatttttttcgtggtattgcgaactgtatgatggcatgggatgatcctcagcatatatttgagttctgtgaggcagtggtgcagtaaccgaattcacctttatttcttgtgccttctgggtatctgattggtaggtaggagcgtgatttgctcacatgactaacttcttcgactttgttactttgctaggcttaggcataaacaatgctgttcttctgtcctcttggtcttaggcggtttattttctgctgttacaacagatatgatttaatttattttatttatctagatcatctgtgcagaaaacctgtttgtaaagttgtttttgttgttcatacatggggtttaggcaatttttttactgagcgtgctgaaaacgctctgagcacacatctatgcaaggccctatacgaggtgtgattttaatttattttcggttgatatctatcaagagagtttatggttagcccttaggtctggagtacattgggcgtggagtgaaccttgggtccattcagaatggagactgtttcaggatcaaaatccttttgattctggaggttgaacattgataattctatttctctgaagctgaatagtgtgctgcttattacatttgtctcacgtgctgttattatgaagcttttatttttaggctattagttcacaatcgtagtttaaagtttttttgcttcaataaacctatctgtgctgtttgcgccatcaattagtctggttttgatggtgggcgaatgttctctttattgtattatttgtcgggtatcgataatcactaattttcagtggttgttccaatgactttcatattcctatatgttgctatgtgtaattccttaagtatcctctgtcttttctgttagatggagcttcctgagtgggttgacattgtgaagactgcgaggttcaaggagctccctccttatgaccctgactggtactacatcagggctgcatctgtagcaaggaagatctacttgagacaaggcattggtgttggtggcttccagaagatttatggtggccgccagaggaatggctcacgcccacctcacttctgcaagagcagtggtgccatttcacgcaacatcctccagcagctgcaggagatgggcatcattgatgtcgatcccaagggtggacggcgcatcacctcccagggaaggcgtgatctggaccaggtggctggaagggttgctgttgaagcttgagcaatctcatatttggtttctatgatgtcatgtttgattgttgagatggctacactttatttgcactttggattaggatttttgtgttaagagaactcaaggcattctagctatggttcacactgtattttccctgagtacctatttatcaaaacctattcgtatgtttgggaagtgtctgagctgatattcatgacatgtatttggtataggtctatctatgtgacgtgataatatcattggatagattacgatctagatgaatttctatctcttgagtttcctaaactgtgcttgtttcgcttgcagtcagttagtctgctgtgattgaaccataggttcaacttagactggctgggctcgtcagcaacattattattacaatacgagagaatgctca

SEQ ID NO: 153390 - DNA, 995 bp, Zea Mays
catcgcaaccgtcggatcccaatccaacgccgaaacgtcgaagcacgttctatataaatattacgctccgctctgtcgccactcctccaaaccctagcccagagcagccgcatcgaactctacctgcctttctctcgtccctggcggcggcggcaggatggcggcttctactgcgaggacggtgaaggatgtgaacccccacgagtttgtcaaggcctactccgcccatctcaaacgctccggcaagatggagcttcctgagtgggttgacattgtgaagactgcgaggttcaaggagctccctccttatgaccctgactggtactacatcagggctgcatctgtagcaaggaagatctacttgagacaaggcattggtgttggtggcttccagaagatttatggtggccgccagaggaatggctcacgcccacctcacttctgcaagagcagtggtgccatttcacgcaacatcctccagcagctgcaggagatgggcatcattgatgtcgatcccaagggtggacggcgcatcacctcccagggaaggcgtgatctggaccaggtggctggaagggttgctgttgaagcttgagcaatctcatatttggtttctatgatgtcatgtttgattgttgagatggctacactttatttgcactttggattaggatttttgtgttaagagaactcaaggcattctagctatggttcacactgtattttccctgagtacctatttatcaaaacctattcgtatgtttgggaagtgtctgagctgatattcatgacatgtatttggtataggtctatctatgtgacgtgataatatcattggatagattacgatctagatgaatttctatctcttgagtttcctaaactgtgcttgtttcgcttgcagtcagttagtctgctgtgattgaaccataggttcaacttagactggctgggctcgtcagcaacattattattacaatacgagagaatgctca

SEQ ID NO: 153391 - DNA, 2107 bp, Zea Mays
catcgcaaccgtcggatcccaatccaacgccgaaacgtcgaagcacgttctatataaatattacgctccgctctgtcgccactcctccaaaccctagcccagagcagccgcatcgaactctacctgcctttctctcgtccctggcggcggcggcaggatggcggcttctactgcgaggacggtgaaggatgtgaacccccacgagtttgtcaaggcctactccgcccatctcaaacgctccggcaaggtaacggtgctcgactcgtcgccttcccatctgattcgacgctacagaatgtgaataagccatttttttcgtggtattgcgaactgtatgatggcatgggatgatcctcagcatatatttgagttctgtgaggcagtggtgcagtaaccgaattcacctttatttcttgtgccttctgggtatctgattggtaggtaggagcgtgatttgctcacatgactaacttcttcgactttgttactttgctaggcttaggcataaacaatgctgttcttctgtcctcttggtcttaggcggtttattttctgctgttacaacagatatgatttaatttattttatttatctagatcatctgtgcagaaaacctgtttgtaaagttgtttttgttgttcatacatggggtttaggcaatttttttactgagcgtgctgaaaacgctctgagcacacatctatgcaaggccctatacgaggtgtgattttaatttattttcggttgatatctatcaagagagtttatggttagcccttaggtctggagtacattgggcgtggagtgaaccttgggtccattcagaatggagactgtttcaggatcaaaatccttttgattctggaggttgaacattgataattctatttctctgaagctgaatagtgtgctgcttattacatttgtctcacgtgctgttattatgaagcttttatttttaggctattagttcacaatcgtagtttaaagtttttttgcttcaataaacctatctgtgctgtttgcgccatcaattagtctggttttgatggtgggcgaatgttctctttattgtattatttgtcgggtatcgataatcactaattttcagtggttgttccaatgactttcatattcctatatgttgctatgtgtaattccttaagtatcctctgtcttttctgttagatggagcttcctgagtgggttgacattgtgaagactgcgaggttcaaggagctccctccttatgaccctgactggtactacatcagggctggtaagacatcttgtttgtttaccataatcatttgctagtaaaactttaatgtccggactctgcaattctataatatttttaatattcttctcctgcagcatctgtagcaaggaagatctacttgagacaaggcattggtgttggtggcttccagaagatttatggtggccgccagaggaatggctcacgcccacctcacttctgcaagagcagtggtgccatttcacgcaacatcctccagcagctgcaggagatgggcatcattgatgtcgatcccaaggggtaattgaactgctatacccctttctcttactaatgacttttcctggcccttgcttattcggtgttgttgcagtggacggcgcatcacctcccagggaaggcgtgatctggaccaggtggctggaagggttgctgttgaagcttgagcaatctcatatttggtttctatgatgtcatgtttgattgttgagatggctacactttatttgcactttggattaggatttttgtgttaagagaactcaaggcattctagctatggttcacactgtattttccctgagtacctatttatcaaaacctattcgtatgtttgggaagtgtctgagctgatattcatgacatgtatttggtataggtctatctatgtgacgtgataatatcattggatagattacgatctagatgaatttctatctcttgagtttcctaaactgtgcttgtttcgcttgcagtcagttagtctgctgtgattgaaccataggttcaacttagactggctgggctcgtcagcaacattattattacaatacgagagaatgctca

SEQ ID NO: 153392 - DNA, 1140 bp, Zea Mays
atgggggatgctgtggccgttagtaccagcgccactcgtcacagctgcaaggtgtgccggaagggcttcccctgcggccgctcgcttggcggccacatgcgctcgcattctctcgccgaggtggagacggcactagacgacgacgacgacgacgacggcggagaggagcagcagcaacgacgtgcctttgattgcatgacggccccgggtgccgggggttacgggttgagggagaacccgaagaagacgcggcgcctctcgagcctcgacgactgcaacagcagtggccacggtgagctgttatcgtcatgcgtgtcagaggtggaccacgatcgccatcgccaccgtgcgagaagcggtctcgtcatggatctggaactggagcgggagcaggagcaggaggagtacatcgcgctaactcctacgaagccggcttacggcctgatgccgcagccaaggcgaaaacgacgctccatgcgcgtgccggccgccgtcgacacggagccagaggacgtcgcgctttccctcatgatgctgtcgcgtgacatcatagaacgccggcggtgttccagggccacggcggaggaggacaacgctaggcgagagcgagactaccggtaccatcaacacaccgactgcaatgacgatgccaagatcaacaagaggaagcatgatcacagcctcgtcatcgacgagaagcggggccggtacgagtgccctggctgcaggagggcattccagtcctaccaagctctcggcggccaccgcgccagccacaagcggatcaatagtaactgcagtatcgccaagcctgtggtcgaccaacgaccggagcgaattgtcgagaccaacatctcctcgtttaacatcaactacaccactcacatggctactacagcggtggtggccttgaaggcgaagtcacacaaagcgatcaaattcgagtgtcccatctgttttagagtgtttggctcgggtcaggcgctcggtggacacaagcggtcacactccattgccggtgagctctatgaacgcgcacatgctgacggagacgaagacattgatgactacgatgaccaacctctcatctctaatagatttcttgatctcaatctgccagcaccaggagttgacgaatga

SEQ ID NO: 153393 - DNA, 758 bp, Zea Mays
atgcccgcccgaacgcccttgctcccccgaatgcatctgatctcgcatctgttctcagcgtcgctccccctgatttggaaatatgctagaaattgcagtaccgttcccaacgcacgcgaccaccgatttggcgtcactagggtttgcacttccccctccgatccaccttaccttgccttctgcgctgtcccctaccgtgagaccaatgccccacacccagacggagacgacaatggaggggctcggctcgatggcaggctatgggtccgcgaagacccgctgctgggaggagcggagacgaagggcggcgggtcctcgtcgcggcaggctagcgcctcggtacccaaccccgtggtccacgccgatgacgccgaggaccttgattagctattcgggtcggtgctgcgggggctgctgatgctatgggagcggaacagggggagggactcatcctctgtctccccttgccaccgtgccaggagggctgcttcagcttcttcccccaggaagcattgtagagggcgctgtcgaccaaggacaaggaggtccgccacaggtcctgtgacgtcctcggcatcgacgctgatgagtgggacaacgagaataggaggatgaccatcgagctcagggagcagcaacaccagctcaggaaggcactggaagaccgggtgcaagtcagtagggagaccaccaagatggggtgatgggtcaagctccatcaggtagaatttgctgacaacccatcggctgatatgctt

SEQ ID NO: 153394 - DNA, 1055 bp, Zea Mays
atggaggttgtcttggtctctgattttatttttctatgtttgtgggttgagcatgatcctatggagattatagagactgttaaggtgtgtattaaataggcagttggcagagatgataaacaaatgtcgttactaatttgaaggccattgggatcacaaattatagggaaaccattgttatatggagtaaatccactagctatccactttgtgatgccattgtgtggatggatgctcgcacaagccctgtttgcaggagattggaaaatgagctgtcaggcgatagaacccactttgtggagacatgtgggttgccaatcagtacctatttcagtgctatgaaattattgtggttaatggaaaatgtggtcgccatgcttctgctgttgtacagattgaggaagccatttttttggtaccatattttggtgtatctagggcagctagggattggcctacttgtactgcaaaatcttagtggaatcaacggtgtactgttttatgcaagtagcatcttcaaagctgcaggggttacaaacagcgacttggccacctgttcacttggtgctattgagatttctacctctggcattactctatgccttcttgtcgtttctgtggtattttttctcaaggataacatttcagaggattctaactcgtactacatcttaacaatgatctcccttgttggtattgtgtctttcgtcattaccttctcgtttggtatgggtgccattccatggctcatgatgtctgagtggagacacggagattggaggacagaagggcgcagcacaggactacagcgaggggggaaggccagatcaagcaggaaacaacaagaggatgtgatagatggtgatctctgcgagcagtatccctccctcccagctgatatgcagaggaagattgctgatgagctggacagaactccgacgcctgcagcactgcttggtgaggattgccaaggaggaagactagaacaggcaagagcagcgctaatcagtgacagagcatgttgccatccagatgggacaagatacgattgttag

SEQ ID NO: 153395 - DNA, 390 bp, Zea Mays
cgattgcatgacactttggtacaaaattatggtctgcttccaagtaggggtgtgagtactatggaagctcttggcatattcttgtgggcatgtgggggtccacaatcgtttaggcagatcagaaataaatttggtcactcattggaaacaattagccgcaagtatagtgatgtccttaatgcactttataagatgtcatcggacacaatcaagccaaaagacccacattttgtcgagattcatcatcgtttgcgagaggcgaggttttggccacacttcaaggattgcataggcgcaatagatggtagtcacttcccagcggcagtcccggcttcggaacaagcgaaatatattggccgacacggttacacgtcgcagaatgtaatgtga

SEQ ID NO: 153396 - DNA, 1270 bp, Zea Mays
attcgtccccgacctaaggaagcggaccccggccaacgctcctgacagattcgcccggccgacgctcccttcgattccgtcctctcgcccgcgctccgcagcaggtgtgtaagacatcttcagcataccatctggtccgtccctggaaatgtccggcgtccaggagcagttcgagatcaagttccggctgccggacggcatcgacatcgggcccaggcgcttcccgccggcgtccaccgtcgctacgctcaaggagaccatcatcgcccagtggcccaaagataaggagaaaggtcctaggactgtgaacgatcttaagcttattaacgctgggaagatactggagaacaacaaaaccctgtcagaatgcaaaagtccgatctgtgacttctctgggatgacaacgatgcatgtcgtcgtccgcgcaccgacttcaagcaaacagtctggtaaaagagcagcaacgaaagcgaaaggtttcaggtgcggttgtgccattatgtgacagagaatgccagttttctccctttttccgctcttgctggagtgttgtatcatgtttgaggcgctttctccttttatttccttttcaagtattgtgggtaagcttaggtatacaatcactcattttggtgcaagcgtgcaatcaaactatccagagcatccaatctagatccaacggtttcatatggaagtggttaaaattaaaataggtactatgttttaggtgtaaggggttaaatataaaataacagtcatcattagatctagatcggatgcaccagatcgcttgattgcatgcttgcaccaggataagtgatggcataggatattttcccgcggttaagtgcccattaatcacgagtttgcatcgaacacaaaattggaaggcagcttgctgctaattacccttaatcttaagttatgccaagcacacacaatttgaaggcagtcattagtgtctaaactgcgatcttccatgatttcaggttctcttctatatttatgctaccccgggtgacgtgatgaacttttcggaacggcgttctaactgatcaatttacattacgtaacaccaaaaccaattgtaatctgataactaaggaagctttggaggcagaggagcgggcgttagcaggttggtgcaaggtagtaaatatgttgacgggtcgcacaggaccggccgcgggtgcagaagccgccgaaaaatatgaaactttgtttcgaagctttgcagcttttatcgtttttaataatgagttctgttttc

SEQ ID NO: 153397 - DNA, 983 bp, Zea Mays
attatattccctgaatgctccagcgttgacgccttgacggtgggaacccctattcttagcaggcaggtgtgtaagacatcttcagcataccatctggtccgtccctggaaatgtccggcgtccaggagcagttcgagatcaagttccggctgccggacggcatcgacatcgggcccaggcgcttcccgccggcgtccaccgtcgctacgctcaaggagaccatcatcgcccagtggcccaaagagctgtttccttatcccagagagtaggggtaacaggatgtggcatcttgtcacatggtgcggaagagtgaagtagcgaaagccgaacttacttttgaagtttcatggttctagttgaataatgcataggacaaagggatcacactatcaatctgccaatctggtaaagctcttgagtaagcggtgaacctcagggacaatttcccagtgtcgttctatccttcctacattttcatccttctttcttgctggatttcttcattttcctttaaccgtttcaacttgaatgtagtcaatgtactaaatatagtgcccatgtttgtgcacaccatcaaactgcatctcagtatatcttttgtcttattatgctaaacttgttttagtgtccttactgttcgttctcaacagataaggagaaaggtcctaggactgtgaacgatcttaagcttattaacgctgggaagatactggagaacaacaaaaccctgtcagaatgcaaaagtccgatctgtgacttctctgggatgacaacgatgcatgtcgtcgtccgcgcaccgacttcaagcaaacagtctggtaaaagagcagcaacgaaagcgaaaggtttcaggtgcggttgtgccattatgtgacagagaatgccagttttctccctttttccgctcttgctggagtgttgtatcatgtttgaggcgctttctccttttatttccttttcaagtattgtgggtaagcttaggt

SEQ ID NO: 153398 - DNA, 573 bp, Zea Mays
atattccctgaatgctccagcgttgacgccttgacggtgggaacccctattcttagcaggcaggtgtgtaagacatcttcagcataccatctggtccgtccctggaaatgtccggcgtccaggagcagttcgagatcaagttccggctgccggacggcatcgacatcgggcccaggcgcttcccgccggcgtccaccgtcgctacgctcaaggagaccatcatcgcccagtggcccaaagataaggagaaaggtcctaggactgtgaacgatcttaagcttattaacgctgggaagatactggagaacaacaaaaccctgtcagaatgcaaaagtccgatctgtgacttctctgggatgacaacgatgcatgtcgtcgtccgcgcaccgacttcaagcaaacagtctggtaaaagagcagcaacgaaagcgaaaggtttcaggtgcggttgtgccattatgtgacagagaatgccagttttctccctttttccgctcttgctggagtgttgtatcatgtttgaggcgctttctccttttatttccttttcaagtattgtgggtaagcttaggt

SEQ ID NO: 153399 - DNA, 1392 bp, Zea Mays
ggacatccacatggcgtccgcccaaccctccaaaccaaggcggccaagccccttccatttgccaggcggccacaccatctgatccccaattcgtttccacctatcgagccaaggtgcgacgacggcggtcgcagcgtcccctccctccctccgtaccgctgccgccggtctaccaaacggtgaaatatttacgtaagcgaatcagggtcttgaagatagcttccagatatgtggggttttgcatcaaatgcttgggcatccgggctggggaagaggagtcccccaaattgcacctcttcgagtgctgcttgttccgatgacgaagcatcctcgtgcacgagcagggaagaaggcctggaatgcccaatatgttgggagtctttcaatatagtggagaatgtgccttacgtgctatggtgcggccacaccctttgcaagaactgcgtcctaggacttcaatgggccgtcatcaaagttccaactgtgccgatgcagctacccttcttcgtttgctgtccctggtgcaacctcctgtcgcttcgcatactttacaaagggaacctcacgttcccacggaagaattatttcctcctctggatggttgaggggatgaatggtgagcgggccagatcacgcccagctactcacagcgagcaacatactccatggctctcaagcagcagcagagcaaatggaaatgcaggctgttcaaatcccacaagacgccaccttccgctgccaccgccggttgacactacttcgcccaccaatgcaaatcatgccaaccatggggtccctgtccctctgctgaacgcagagagagtacaagcttcgctgcgcaagtccttgtcgttcctggttcacctgaccgccaagtttcccctggtgttcatcttcctcctcatagtgctctatgcgatccctgccagcgcagcagtcttgctactgtacatccttatcacggtgctgttcgcgctcccctcgttcctgatactgtatttcgcgtatccgagcctggactggcttgttagggaaatctttgcctgagatttccttgttcggtaaaatctcaatactgttgttgagtccttgtataactgaaccttccctagatcttgttgcaagcgtggatgctattgcaaagttttggtttttacaccatgagatgtgtttacctcaagtctacatggaagggtcctctgttgcaatgcaaaacaccagcgtgctctgtgctgctggcatatgttctgttgcacagttgaggtgctcggagactgatcagagataaattatacgttccacacgaaattgtaagtatccctcctagagatggcaatgaaaaattttccgtccgattttagctcctcatctccatttccacgacaaaaaaaa

SEQ ID NO: 153400 - DNA, 241 bp, Zea Mays
atgtacattttattgctcacgatctgcaaaactgcaaccgtactccaatcaaacagccggcaagaacttctcgccttcagcagcaggcttcgattgctcacccactttctgaaaaactagctttcgcagcggaagctggccattggagggcaccgtaacctgggtgtccacgaagatgctgtcctcgtccttgaaatcacctctgaggatgccctttgcgagttcgttctccacatactgt

SEQ ID NO: 153401 - DNA, 80 bp, Zea Mays
attcattcctgcacccatagaaactataataataaatatcttttactaactactttatccctttctcccatcgcagctaa

SEQ ID NO: 153402 - DNA, 3557 bp, Zea Mays
aatcggatggtataccctgtctgcccacaaacccgcaaaccccccaaatcctccatcgagtccgcttgagtctcgacctatcacaacaagcgattccccccaagtcgaagcagcagaaccaacagcgagccgccggccgccaatggcgttctcatcgccggcttccgcgcgtccgcagcgctcgcctgacgaggtggaggacatcatcctccgcaagatccttctcgtctccctcacgccgctggccaaccccgggcccgccgtcgcctacctcgagctcaccgccgccgagctcctctccgagtcgcgccctctcctagctctgcgcgacgccgccgagcgcctccttatagaccgcctctcgctcccggacccgcccgccgggtctccgacccctttcgccttcctcgtctccgctttccgccgcgccgccgacgaggcgcgtaagatctccaccatccgcgacgctgctctccgggcgcgcctcgcggcctccatcgcgcacctccgggccctcattctctcctacgcccgtatcgtcgccgggaaccccgacaccttcccctcccaacccggcgcgcaacaccccgccgccgaactcctcgtattcctcctcgctgaggcagccgacccgctagaccccaccccaggccccggggcgccgccgccgcctggcttcattgatgagttcttcagcggcgctgactatgactccatcgagacggccatgggggagctgtacgagcttcttaggcagagcgtcgataaagtttcggccctcggtgacttccagcgcccactgcgggtgctcaggcggcttgtggggatccccaattgtgccaaggccctggtgaaccatcccaagtggataccaaagaatcagatcatgttcattggggaagggagagtcatggagctctacagtgtccttggagccttcttccatgttagtgctatccgagaccgtgagtttgccagcaagcctgatgtcgggcaacaatgtttctcagaagcatcttcacgtcggccagccgacttgttgtcatcatttacaacaatcaagagtgttatgaatggcttgtatgatggccttaaggatatccttctaaccctcctaaaaaatttggatactcgagaaaaggttcttgagtatatagcagaagtgataaataaaaacgcatccagatctggcatgcaggtagacccattaaaatgtgcaagttcaggtatgtttgtgaatcttagtgctgtgatgctccgtctatgcgagccttttttggataacatggaatcaaagaaggataagattgatgtcaaatacctcttttgcaacaatagaattgatttcaaggatttgacagctataaatgcgtcttcagaagaagtctcatcttggatagagagcataaataacgagcatgctcaaaataatgccagtggagaggctcgttttgtggaatcacaggaagccacaagctctggcaaaaatagtgcatcttcacaacttcggtgctcaaagaagaacttctcatttgtttgcgaatgtttcttcatgacctcaagggtacttaatctcggtttgatgaaagctatatcagacttcaaacatatttctcagcaacttgcaaggtttgaagatgatttggagtcaaacagagcagtcagagatcagggagggggttcaccacagcttgaacaagatataactcgtttggagaagattgtcgagattttatcacaggacaaattatgttatgaagctcagatactacgagatggtgcattccttcaacgagcattatctttctacagattaatgattctgtggtcagttaatctagttggcggttttaagatgcctttgccatcacaatgctccaaggagtttgcttgcattccagaacattttcttgacgatgcaatggatttacttgttctaacctctagaattccaaaggctttggaaagctttgtattggatgacttcctcagcttcataattatgttcatgggaagcacatcttacattaagaatccttacctaagagcaaagatggttgaagttttgaattgctggatgccgcaaagaagtggcttgagttctacagcctcgttgtttgaggggcaccaactgtgtcttgactatcttgttagaaatcttctaaagctttatgtggatattgaattcactggttcccatacacaattttttgacaagtttaacattcgacataatattgctgagcttctggagtatttatgggatgtccccagtcaccgaaacgcatggagacaaatagctaaagaggaggaaaagggtgtatacttaaattttcttaactttctcatcaatgatagcatctatcttcttgatgagagcttgaacaaaattttggaactgaaagaaatagaggctgaaatgactaacactgttgagtgggagcgcagacctgctcaagaaagagaggagcggctccgtgtatttcatcaatgggaaaatattgttcgatttgacatgaggctagccaatgaggatgttgggatgcttgcattcacctcggaacaaattccagcacctttccttctccctgaaatggtggaaagggtcgcgagcatgcttaattacttcctcttgcaacttgctggtccccagaggaaatctttgactgtaaaggatccagagaagtacgagttcaagccgaagcagctgttgaaacagattgccaccatctatgtccatatctcaaggggcgacaaggaatctgtcttcccagctgcaatctcgaaagatggcagagcatacaacgatcagttgtttgctagtgcagctaatattctgtggaagattgggggtgatcccaaaatcatacaggagtttatgcagcttgctggtagggcaaaagctgctgcttctgaagctatggatgctgaggcaatccttggggacattccagacgaattcctggatccaattcagtacactctgatgaaagatcctgtgacactgccatcatcgaaggtcacagtggatcggcccgtaattatcaggcatctgctgagtgattctacggatccatttaaccgctcccacctcactcaagacatgctgataccaaacacggagctcaagttgcagatcgaggaatttgtccagtcccagcagttgagaaagcgaactgctgcggtgtcagagattggccaagcggatggtgctgatgatatggccgaatgaattgtgcgagcagcagggatggacattttcttttgtggtggggaaagacggatgctaatttacgcgaaatttaccagttcatcggtccgtataaaatcggtttgccagcttgtgtcaccatttgtctccattctttgtaaatgttgtaagtgcacggttgtaattttaagtccctgtttgtttacctttgagattatggccctgtttgtccttctaggattatatagtccagcttattataagcatctattgacctgcttatgaattatcataatttaggtgtttagattacataatttatataataatttgtgttgtttgttta

SEQ ID NO: 153403 - DNA, 1981 bp, Zea Mays
atacgtgtcgtcccgctcgccgctcctcgctcgggcagccgaggctccccactacccagaaaaggagggaggaggaagcgcttcacaaagccacagcgcctcgttgcctccccactttccttttcttcccctactccccatggcggcccgcgaggcctccgccccggctccggcttcgccccacgcaggcgacgggccgggccgcccgccgcggcccacgctcgccctgcccccgcgctccgccgtcgagtccctcttcgccaccggcgcctcctcctcggccggcgccgccgagaccagccccggcccgctcaccctcgccgccgcgctcttccccgacgcgtcctccccggccttccacggctccttcacccagctcctcgtcggcgccataggctccccggccgtaccctcgccgccctctccgttcgccgtcccgccggggctcagcccggccacgctcttcggctcaccgggcctattctctcccacggggagttttgagatgtcccatcaacaagccttagcacaagtaacagcacaagcagttcattctcagtacaatatgataaatcacacagattacagtattcctttttcgtcgacaacagcaccagctttgatcacagcacagcatgccaattcttctgccaatgtggcatcagcacaggagaaaccagctctgccgtcacatgcaggtaatagcaacattgaatcaaatgaggtttcacaaggactcaaaacttctgcacccacttttgataaacctgctgacgatggatacaactggcggaagtatggccagaaggcagttaagggtggcgagtatccaaggagttactacaaatgtacccacacgagttgtccagttaagaaaaaagtggagcgctcagcagaaggacacatcactcaaataatttatagaggtcagcacaaccaccagcgtccaccaaaaaggaggtccaaagatggtggtggtccactaaatgaagcagatgttcttcatgagaatgaagacatttcaactagatcagaacctggctctcaagaacactctggaaaacatgaagggtcaaatgatggcatattagggccttctgtgtcaagaaggggaggaggagatgagcaattgtcaggctcaagtgatagtgatgaggaacaagatgatgaacaaagggctggcgacgaagaccctggctatgcaaatgcaaacaaaagacatgtgccaactccagctcaaaggataattgtgcaaacaaacagcgaagttgatcttctggatgatggctatcggtggcgcaagtatggacagaaagtggtaaaagggaatccctacccgaggagctactatagatgcacgtaccaaggatgcgatgtgaagaagcatatcgaaagatcatcccaagacccaaaggccgtcataacgacttacgaagggaagcacagccatgatgttccagcagtcaggaacggtagccatgctgctgccaacgccaatgggtcatcttccaccagcttaccagtaccacacagggtccacagttcagcatccagtagtcgcagagcggcagaattacaaagcgcatcctcagcttcttctatgctactaaaagaggaaaacgaaataacataggagttttggagtgtgtagccagggtaaattatatctgttctctgatccatttcctcctaggtgtgctgcttcacgctctgcgccgcagcaaaaattgggcactgcaagcccccaccattggttttagtcaagagcgagctctttcgtttgtgcccttccaaaagctgcacaccctgtttggctgcgcggtgtatgttatgttgtcattaccatttacgcccattggttgtaaatgccatcagtcgttcccccggagaactatatggatgacagcattcatcggcccaagtgtatatactcgatttaaaaaccttttttttaactgagatatggtttgttgtagataca

SEQ ID NO: 153404 - DNA, 468 bp, Zea Mays
taaaatggagccaaaaaaggcagctgatataatatagacctgaacaaaaggtactgacgcaggtcacttctctgaatgatgaacactaacagcaaattatctagtgctatccatctctgctcagaatatcatatcctcttacagaaacagcaccagattcgccctgtaacctgttacaacaaccgtacagacgtttgtttcattgcccagacaaccagagagtccgaaatcatcttcaggtgcgaaattgacgtgtcattgcttggacttgtcatcgtcatctgagccttcgtcatcgtcagacgactccactctgttaggttcttcaccaccattatcaccagttttagctcgcttctctttcttacgctgtttcttcttttgccgtttcaggcgcttcttggctgtccgctcctcagctgctttcatcctctcctccctccgcagttcgaactcagctatctcttt

SEQ ID NO: 153405 - DNA, 333 bp, Zea Mays
gagctcacaaacaccacggccagactgcccaacaacaccaatgctatgggcctcatccagatatgtgtagaccttgtatttcttggagacagctataatctcagggagtttacacagctccccttccatgctatagataccctcaacaatgacaatgatcttcttccatggtctgtgtgtccgtggttgaccaccagctatctgctctctcaggacctctgccaaatgagcaggggctttatactggaaaaccctaacaattgcactggatcctcttgcgccattgacaattgagttatgatttagagagtcactaattatcagtacaccctg

SEQ ID NO: 153406 - DNA, 543 bp, Zea Mays
atggatatacttctacacttgaggctgttcttgctgaaaggttaccaaatagtgggatatctgcagttccacacattgactctagagttaggaattttagaaaaaaaaattggagcaataaagttaatgctgaaaaatagtggcttcacctgggatgacaataagaagatgatccaatgtgaaaggagtcaatatgaagctcattgcaagaaacatcctgaagctagaggcctatatgacgtcgcattcccatattttgatgcattgtcgaccatatatggaaatgatatagctaccggtgaaggtgcggaagggattgatgaagccgttgggaacttagaacaagagcttgctactgggtatgcatcatcaagtgtgaagaggaggaggacatctgggaaggagaagagtggatcaagtgaccctcttttggacatgttaaatgaagtccaaggtgatctaaagggtgtggctatgaatgttggaaaaatgacagcggttatggagcgcgaggctgaacttcaagaaaaaattaagggataa

SEQ ID NO: 153407 - DNA, 819 bp, Zea Mays
tccgatccgatcatccactcctgtgcagatagtggaccgatctgatgtgcttatcagcatctgtaggcgttcgccagtgagagagtagtactcgagagacctatcgcaacaatggcagagatggtcgggtccgtcgttgtcggcgaggtggtcaaccggaccttctccttcctcatcagcaagcacagcagggagcgcctgagcacgcgggaaggcgtcgagcggctggagatggcgcacatcaagatggaggccgcgctggagctgtccagccgctggcagcaccacgccaccgacgccgacgcgtccctgctccgctggcgccggaagctgaggcgcgccgcggacgagtgcgacgccgcgctgcaccggtggaagctgcgggagctgcaggaggaggacgcccgcgagaggctggcccgggcgccgctcccgcgccgcgtcgcgcacgcggtcctctgcttcctctcggcgctcctgctcctcgcccgcgcccgcggcggcggcggcgacgacgacgcgtgctcccacgcctgtgccgccgtccggaggttcgagaggctggccagcggcgccgccgagttcctcaggtgcgtggagttcggcagcgcgccgcggaggtgcggcggcctgttcggtggcggccccgtcgctgggaggctcgcgagctacgagaggctgcagctgggagctcctcagcagcaccgtttcttgggcgtcgggcccgcaagtccggcggaggtttgggcggacagcaagccctgccgtgcttaccccaatcgtaggccgtcgtcggggaagaaactgctgctggtgtga

SEQ ID NO: 153408 - DNA, 292 bp, Zea Mays
atggccgccaccgacgcctcattctccaaggtgctcgatgaattgcagcagatggagcagcgactgattggcgcaattgaaggccgctgcggtctttttcgagcgcaacttttcgacgattgctgcatcaccctcggccgacatctcaagcagcgctgcgacgacctcgcccaccatgtggaagacacagaacaagacgcgaacgcgcgtctgattgcagtggagatggcacaagttgagttcgagcagtgggacctgtttcatggagtgcgtcaccgatatgtccctagag

SEQ ID NO: 153409 - DNA, 1201 bp, Zea Mays
tgcctctgtctggctccgcgcgcaactaccggcccaacggaatgcagcaccccaacggcacgctacgacgccaccccaccacgtggccgcgtccgtccgtgcggttcccggctgtctcgtcccgtccgcgagcccccaagccgcgctgcacctgcagtcctgcactgcatcgagtctccgcctacttatcctgcgcgtggcactggcacactcgctctccgccccaagcctcccacggttggcactcgcacaggcacagcaccacagagcagagcagcagcagcagcgcgctcacaacgttcgcaatggcggcgcgggccaccgtcgtcctctacgccgcgctcctctgcctgctcttcgccactagctccgtcgcgcagtcccccgcggccgcgccagccaaggcgccgcccaagccctccaaggacacgcccaccgccgcgccgtccgccaccccggctgcgcccgctcccaagtcctcctccaaggccagtagcccatcagcagcgccggccgccgcgccaaccaccccggcccccgcagcggcgccagccaagccgcagcccaaggcccccgcgccccacaccaaggccgccgccccggccccggccgctgccgcgcctgcgcccgtcgccactccccccgcggcgacacctccggccgccgcgcctcccgcgcccgtgcccgaggtgccctccgcggcgccggcgccggagaccaagcccgccgaggcccccgcccccgcgcccgccaagaagaagaagccgtcgtcttcctccaaggacaagacgaagaagaagaagggcgcttctgcccctgctccggcccccgtcgcgaagaagcccaagaccgccgacgcgcccacgtccgcggccgaggcccccggacccagtggcgacgccgccgccgctgccgacaccgcgggcgccgcagggaggacacaggcgggcgtgatggtgtcgtcggccgtcgcggtggcgctgggtgcggcggctctgctcgcctagatctcggatggctctggcgaatgcgtttcttctgtgtaggacccacatcacatcgatcgattcacttgtgcggatgcattctttttagctttatgccagagatgacatgagtgtggttactgtgggacacttgcccctgtaatgttcagatttattgctatttatatattattatactatattgttatgcctcc

SEQ ID NO: 153410 - DNA, 1137 bp, Zea Mays
cctagctataaattggcacccttcacccgacctgctgcctcattacacacggccatctcgcagcattctcaaccaggtgaggctaaatatatagctgtaacacagcagcagtcgccaccaccaatggcccgggagctcgccgcagcttgtgtggctgccgccctggtggccctgtgcgcagccgcgctcggtgtggcagcgcagccacctgcgccgcgcccgctgccgtccaactaccagatgatcaccccgggcaggtacaagagggaccagcagctggcgtgcgacaaccccaaggacaacaaggccaaatgcatggccaagtgcgacaagcgctgccccaaccagtgcatcgtcctctgccccggatgcaagacgttctgcatgtgcgacttctaccccggcgtgtcctgcggcgacccgcgcttcacgggcggcgacggcaacaacttctacttccacggcaagaaggaccaggacttctgcatcctctccgacgccggcctccacatcaacgcgcacttcatcggcaagcgcaacccggccatgagccgcgacttcacgtggatccaggcgctgggcatccgcttcgccggccaccaccgcctgtacctgggcgcccagaggacggccaggtggagcgacgacgtggaccgcgtcgagctggccttcgacggcgcgcccgtcagcgtcccggccgaggccggcgccgcgtgggagtccgcggccgtgcccgggctcaccgtcgcccggaccgccgccgccaacggcgtccgggtgcagctcaggggcgcgttcgacatcgtggccaacgtggtgcccgtcagcgacgaggactcgcgcgtccacggatacggcgtggcggaggacgactgcctcgcgcacttcgacctgggcttcaggttcttcggcctcaccgacgacgtgcacggcgtcctcggccagacctaccgctccgactacgtcaaccagctcaacgtcagctccaagatgcccgtcatgggcggggcgcccagctacgtctcctcggacatcttcgccactgactgcgccgtcgcaaggtttggtgcccgtcgcgccggcatcgccatggttaccggcgctgagtccagttaaagctgcatggccattgcgtct

SEQ ID NO: 153411 - DNA, 505 bp, Zea Mays
atcatttgattccttgaaacagaaataaatacacaatacatgctaatgaaaatttggcaatacatgttttgctttgtaaattttgatgtagtcattgcaaatcatttggcatgtattggacgatatctgtttgcattcctgatcttctcaactaccaggtgaaagcatacctcgatcgcaagtcactgacacattctctgaacgacataaagaccgcagttatgcaacttcacgacctcatcagtgttatagacttatagtcatcattgttacactactattaatgggcattgcgacaaccaagattcttgttgtcatctcgtcccagcttctggttgcgggattcatatttgggaatgcatgcaagactgtatttgaggcccttatatttgtattcatcatgcatccatttgaggttgctaaccgctgtgttatcgacggaacacagatgatcgtcgaggaaattaatatattaaccaatgttctcttcaagaatggcaaccag

SEQ ID NO: 153412 - DNA, 270 bp, Zea Mays
acacattggcaccctacccacactgtaaatctcaaggacatcttggatgtgaacaagattaacatgtctctctcagtccagcacaccatgaactttcaaaacatccgggagaagaacatcaggaggtctgagctcgttatggagttgaagaaaatattcgaggagatgtccatccggtaccaccttctaccccagaaagttgaactcacctacgtcggcttgaacccactgcccatgggtccttctcatacaagatagaagatgggtgaa

SEQ ID NO: 153413 - DNA, 1222 bp, Zea Mays
cgacgacaaagaaatatctcattgtttgtccaagggtgacacaagtacacagcggctactggttaacccctaacgctactaatcgatcatacataatttgggaatggagcacacacaactcgatcacgagctgcagaaagagcaagtgaatgaatggagaagcacacacaactcaatcgatcgcatgtttattggtgctaccacgcacgaacgtacgaatcgaaggacctaagccatacaaacatacaaatcgagtgagggacaggcatggcaggcagagatggttcctgggctggagttgatcagtcagttggtgtagttgttgacgcaggcgtgcggctcggcggccctggcggcgggcgtgggctcgacggtgggggagggcgggacgggcgtgcagagcaggtccctgggcaggtccgggatgccccggaggtagaaggtgtagaagatcttgaaggggaagacgatctggtggagcttgacctggccgtaggcgccctcgaagacgccggagccgcccgtgacggccaggtacgactcctcgtaggtcaggtacgcgccctgcaccgagatgtggccgtagtcgccgaagtagaagctgtagatggcctcgtaccggtcgccgttgcggtcggggacgtgctggatgagcacgcagatgccggcggtgatgcccagccgcttgtccaggctgccgttgtaaacctgggtgcatgggtgggtggggaggaagagcggctaagcggaggcaccgatcaagcaaaagcaaaagcaaaagcaaaagcaaagcaaggaacacaacgacgacggaccttgtttgtgaaggggaccaggtcgcccagcgcgttctccgtctgcttggcgctgaggcgcaggtacgcggggctctcgcggtcccgctcgttcatctcgtacacgtacagctcctgcaccttggtcggccgcgcgtccttggccgccgcgggcttgggcgagaacagcgacgcccgcacggccacggggccgacacggctccgcggatgctgccggaacccgcccaccgcgactctggacgcctggcgcaccttggaggcggcggcggggctcgagaccttggccgaggccggggacctgagcgcggcggccatggagacctagcagaggtggctggctggcctggctctcgatgcgatgggggaagggaatggggaattcgtgagtgaattggtggtggtgtgtt

SEQ ID NO: 153414 - DNA, 990 bp, Zea Mays
ttgcccgggcaagaaaccgaaatgcacaagcaagctcaagcccaccccgtctctggctcccttccccctccaaaccaagacagcaagaaaccatccatggcgtgccggcaaggcgccggcgacgcccgcacccacatcggcgccgaagatcgtctggcgcccgacgacgacttcgagttctgcatactctcgtccggcggtctcgcgccggtcggggacgacgcgcccggcatgtgcgtggccgacgaggtcttctacggcggcaagctcctcccgctccgcctctcctcggccgacgcggccgcactgctgctgctgcgctcggactcgctggacggcgccgcgacggcgtccgcgtccgcgtccacgaccaccagcagcggcttcagctcccgctccgtcagccgcggcagcagcagcagcagctgctgcgtcagccggagcacgtcgtctaacagcgcgcgctcggaccacgccggcccggccggcagcggcagctcgtcgtccggcaagagcgcgtcctccgccgtcccggtcccggtcccgccgcggcgctcgccatcgggcagcgtgttctacgcgcacccgagcccgtcgccgcagcgccgaagccggacggccgcgcccgcgccgccgcgccgcagcacggggtccgcgccgccggtcgcgtggggcgtcatacgcctcggcgtcgtcggcgctcccgaggtgtacgcgccgcgcccgcgcgcgcccgcgtcgaggagcgcgaggttcgagcagcgcaggcccgcggacaagaagcttgccctggggctgctgggagctggcctggtgtgctcgtgctcgcctgacgccgtcgcaccggtgggctcggcggaggtggcggcgacgaggcgccagaggaagaaggcggaagagaagagatcggcgacggagcagagtgggaagggcactgctcggaggagcaggattctcgagtggctcgacgacctctccgtttccaagtag

SEQ ID NO: 153415 - DNA, 1109 bp, Zea Mays
cttcctcgtcgcccttttccttccgcaacacacacacaccggcacgatcgagtgcacgaccgcgggcgcagcagccaccgatccggcggcatctccgccctgctcgcgcccgcgcccgccggagaagaagagccttccatgagattgttgatgtcgcgccggcgcggcgccggcggcgggctgtgcatcaggaagaaggcccgcggattcatgtgcgggtgcggcggcaccaaggccatctccatctccgacggctccgacaagtcaccaacggccacgccgcagaccgccgcgtccaccactccccttaccggcatgtcggtcaccaccaccaccaccaccacgaccaagccgacgagaggaggaggaggaggagggtacaggccggcggcggcaccgtcaaccacggaggctccctccctgttctcgtcctcgtccttgtacgcggacaccaccgacgacggccccagcagcatggagagcacgcccagcctgtcggcgctcctgcgccagctcggcgagctggagcgcagcgtccgcttcctgcactccgcgggggccggagcggaggaggaggccgacgccggcaagctgcagggcagcggcgggcggcggcagcgtcgggccgtgggcgagggcgggtccgggcgggtggaggagagcgtggcggtggtgaaggagtcggcgaacccgctgggcgacttccggcggtccatgctgcagatgatcgtggagaaggagatcgtggacggcgcggggctccgggagctgctgcaccggttcctgtccctgaactcgccgcagcaccaccacctcatcctccgcgccttcgccgagatctgggaggaggtcttcgccgggcacgagcgcacgccggacgacgacttcctcgtctcccaccaccaccaccgcaacaagaagcatcacctggcaacgcgtggtggtgtggtgcttgagtcgtcgggtctgctttcttgatcgatggatccgtgacatcgtccgtccacccccttccgtcgatttcttcatttcttgttcgttgctgggctgggcggacgagactgcagggttttcagtacttgtctttttttgtgtgtcgatttttttga

SEQ ID NO: 153416 - DNA, 1729 bp, Zea Mays
atttttttaaataaaaaaaaacatgaggtgttttcccccaaacaccgctccacctccttcctcctcgttgcgctccggatccatccccattccccagtcgccgcccaagtcaaaaggagggaagcttcttccactacagtccttgaggccgcccatcaacgactagacgctggtcaagctgcaccaaccctagccccataaccctaggtccctcctccacgcccccttccagagaggcgaggaaggaggcgaaaggaaccatggattcctccggcggcggcggtggagcgcagatcaagggtatggcgacgcacgggggccgctacgtgctgtacaacgtgtacggaaacctcttcgaggtctcctccaagtacgccccacccatccgccccatcggtcgcggcgcctacggcattgtctgcgcggctgtcaactcgcagtcaggggaggaggttgcgatcaagaaggttggcaatgcgttcgacaaccacatcgacgccaagcggacgctcagggaaatcaagctgctgcgccacatggaccatgagaacatccttgccttaaaggatgtaattcggcccccaactagagagaactttaatgacgtgtacattgttactgagttaatggatacagatctccatcagatcgtacgctcaaatcagccattgactgatgatcattgccagtacttcttgtatcagttgttacgagggctaaaatatgtgcactcagcaaatatattgcaccgcgatctgaagccgagcaatttgttcctaaatgcaaattgtgacctcaagattgcagactttgggcttgcaaggaccacttcagagacagatctcatgacagagtatgtggtcactcgttggtaccgggcaccagagctgctgttgaactgttcacagtatactgctgccattgatgtctggtcagttggatgcatactaggtgaaatcgttactcgtcaacccctgtttcctggacgggattacatccagcaattaaaattgatcactgagctcataggctctccagatgatgcaagcctgggatttcttcgaagtgataatgcaaaaagatacatgaaacaactaccacagtttccaagacaggacttccgcctgcgtttccgcaacatgtctcctggcgcagtcgatttgttggaaaggatgcttgtgtttgatccaagcagacggattacagttgatgaggctctgcatcatccatacttggcttcacttcatgagatcaatgatgaacctacctgccctgcacctttcagctttgattttgagcaaccatcctttacagaagcgcatataaaagaactcatctggagggaatctttagcatttaacccagagcctccctactaatatcaaaaggatgatgagttatctgctagaggcatatgaagatctctaggtccagcggacgcaagaacttatgtctgtgtcagtgtgcgttgattatttacgtgcggtttgttgggcatacgggcatgggttggtgctgcaattgcaactctattatggcttgtgagagcaaacaaacgtctgtattcattttcagatgcctgaacccaggcttgtattataccgcttgactccataaattattcttgtgtatctatgcttgtaattttgcagacaattacttgaacgccccttgtatatctgagttgacatctcttttccaatgaaaaagcaaaactggaaaaaaaaca

SEQ ID NO: 153417 - DNA, 1761 bp, Zea Mays
aataaaaaaaaacatgaggtgttttcccccaaacaccgctccacctccttcctcctcgttgcgctccggatccatccccattccccagtcgccgcccaagtcaaaaggagggaagcttcttccactacagtccttgaggccgcccatcaacgactagacgctggtcaagctgcaccaaccctagccccataaccctaggtccctcctccacgcccccttccagagaggcgaggaaggaggcgaaaggaaccatggattcctccggcggcggcggtggagcgcagatcaagggtatggcgacgcacgggggccgctacgtgctgtacaacgtgtacggaaacctcttcgaggtctcctccaagtacgccccacccatccgccccatcggtcgcggcgcctacggcattgtctgcgcggctgtcaactcgcagtcaggggaggaggttgcgatcaagaaggttggcaatgcgttcgacaaccacatcgacgccaagcggacgctcagggaaatcaagctgctgcgccacatggaccatgagaacatccttgccttaaaggatgtaattcggcccccaactagagagaactttaatgacgtgtacattgttactgagttaatggatacagatctccatcagatcgtacgctcaaatcagccattgactgatgatcattgccagtacttcttgtatcagttgttacgagggctaaaatatgtgcactcagcaaatatattgcaccgcgatctgaagccgagcaatttgttcctaaatgcaaattgtgacctcaagattgcagactttgggcttgcaaggaccacttcagagacagatctcatgacagagtatgtggtcactcgttggtaccgggcaccagagctgctgttgaactgttcacagtatactgctgccattgatgtctggtcagttggatgcatactaggtgaaatcgttactcgtcaacccctgtttcctggacgggattacatccagcaattaaaattgatcactgagctcataggctctccagatgatgcaagcctgggatttcttcgaagtgataatgcaaaaagatacatgaaacaactaccacagtttccaagacaggacttccgcctgcgtttccgcaacatgtctcctggcgcagtcgatttgttggaaaggatgcttgtgtttgatccaagcagacggattacagttgatgaggctctgcatcatccatacttggcttcacttcatgagatcaatgatgaacctacctgccctgcacctttcagctttgattttgagcaaccatcctttacagaagcgcatataaaagaactcatctggagggaatctttagcatttaacccagagcctccctactaatatcaaaaggatgatgagttatctgctagaggcatatgaagatctctaggtccagcggacgcaagaacttatgtctgtgtcagtgtgcgttgattatttacgtgcggtttgttgggcatacgggcatgggttggtgctgcaattgcaactctattatggcttgtgagagcaaacaaacgtctgtattcattttcagatgcctgaacccaggcttgtattataccgcttgactccataaattattcttgtgtatctatgcttgtaattttgcagacaattacttgaacgccccttgtatatctgagttgacatctcttttctattgtaacatctcaaacataatttattgtgatgttactaagggtcggattggaagcacccagcttttaag

SEQ ID NO: 153418 - DNA, 1114 bp, Zea Mays
gactaaacagtgtctcattggctttctcctccccctctctgctatcctccattgcaagttgtttggagcttaagcgaacagcatatcccggtgagtttggggcagatcctggcgaccgagcatcgattttcgatgagaacccgacgaatctcatcggtcgcagccgctgcgcgctaggtgggaactcgagcaaggcgagatcgaggcgggatccagaggctaagctacggtttccgacgcggatccggcggttctcggtcgctgcgcgccagatgagaatcgccgttgttgctcggtaaccgtcgtgttgtgtgtagaatctggttgtttgtcgacgagaacctctaccgcagtgaagagagaaaggttgttttaggcattgttgtgtgatgtaatagcatatttataagtttattttgtgtgctatatattttagttagatgcttttttgacagcactgtttagtgaagaaggtttgttatgttagtgaggcatgcatggtttattccgtgtgcatatatgattacacagtatcgtacgagtaatctagtgtatgataaatggtttattgtgtcagtgaactaggcatggatggttaagcaacgagtagatcgagcaaggttatatgttttttttgttagttacaagtttctggttgatatatttctttgctggtacttcttggttgttagttcaaagcttgaaactaattgttacatgaccgagaaacttaatagttggtattattgtcgtaggtgctatcgttacattacatggacaattgatactttttagttgatatttttaatgtagtttataattatttgcattgttgtaggtaaaatgtcgggcctaatgtgggagcatgggagaagatgctataactattttatggtgtcacaaacttcgattcatgtgcttctgcagccttcccgttgtgttccatttgcttcatcattaaatatttatttattgctcatattatctagttaattttattttataactgtataggaatatgtatatggaatggacccacaccacatctagatgcttcgaacttgtctggatattatgactccggctgaatatatggtacatacatgatttccgg

SEQ ID NO: 153419 - DNA, 558 bp, Zea Mays
agtgtctcattggctttctcctccccctctctgctatcctccattgcaagttgtttggagcttaagcgaacagcatatcccggtgagtttggggcagatcctggcgaccgagcatcgattttcgatgagaacccgacgaatctcatcggtcgcagccgctgcgcgctaggtgggaactcgagcaaggcgagatcgaggcgggatccagaggctaagctacggtttccgacgcggatccggcggttctcggtcgctgcgcgccagatgagaatcgccgttgttgctcggtaaaatgtcgggcctaatgtgggagcatgggagaagatgctataactattttatggtgtcacaaacttcgattcatgtgcttctgcagccttcccgttgtgttccatttgcttcatcattaaatatttatttattgctcatattatctagttaattttattttataactgtataggaatatgtatatggaatggacccacaccacatctagatgcttcgaacttgtctggatattatgactccggctgaatatatggtacatacatgatt

SEQ ID NO: 153420 - DNA, 1320 bp, Zea Mays
gccgctgccacgactccatagacggcagtattattagtgtccggcacttgaagcgacaaccactacgaccagatcaaagtcctgaggatttgcaacgttggaagccggctcccggacgcgcaactgcgcggacttttcctgcaagcttcttctgcaaccgaagcaactcttcaatccagaagtggctgctccagggcggcatggcgccaaaagtctccagcccgttcctcctcggcctaccctgggtcgtcgcgcacgttggatccatcaaatcttccaatgcacgctgcgccggcccgggtcgtcacgcaagaggtaatgcgacgccgacgcgcacccattaaaagcaacccgtcacttagcgtctgagcgtgcgtgccagagcagagctcccttcttgctagcgagtagcgactagcgagaggtcgccggcgcggcaaaaatccgaaaggcgagccgagatggcggggtcgcagtcgcaggcgatgctggagaagatggagctgcggcagagctaccgcaacgtctggcacaccgacctcaccaacgccgtcgccgcggacctcccgtggtgctgcctgtctctgtggtgcggcccgtgcgtgtcctacatgctgcgcagacgcgcgctctacaatgacatgtcaaggtacgtgtgctgcgccgggtacatgccgtgcagcggcaagtgcggcgagagccagtgcccggaagtatgccttgcaaccgaggtgttctgctgcttcggcaactcggtagcttcaacccggttcctgctgcaggacgagttcaacatccagacaacgcagtgcgacaactgcatcatcgccttcatgttcttcctgcagcagctggcctgcatctgctccctggtcgcctgcatcgtcggcaacagcgagctctcggaggccgcgcacgtcatctcctgcatgtcgaatctggtctactggacggtttgctcgtgcatgcagacgcagcacaaggtggagatggacaagagggacggcacgttgaacaccatgtctgcgcctccgatgcagcagatgtcgcgttggtaggtgcgagtgagattatgtgccgacctcgatacggaggagggtagctgctggagctggaggctatcagcaatctcctactctggttaggacggtccatttttcagatttgggtgagataccatggctagtgtgtaaaccatgtcccgtttgtttgggcaaattttcgtgtttaatgagttgtgcatttttcacaacttctgttatacctcttacggctagatgccgaaattagatatcctaataatttattttaattgactac

SEQ ID NO: 153421 - DNA, 1049 bp, Zea Mays
tgcagagctcaactcagtcagctgcctccacgaccacgagcggaaacagaccgagtaatggcttctccctccacggccttcttggcccttgccatcgctttgctgtgtgcggccaccacggcgaacgcgaggttcacggcgatgcagtggactccggcgcacgccacgttctacggcgacgagacagcagcggagaccatgggtggggcgtgtgggtacggcaacctgtacgcgaccgggtacggcacggacacggcggcgctgagcacgacgctgttcaaggacgggtacgggtgcgggacgtgctaccagatccggtgcacgggctccccctggtgctacagcggctcgccggtgatcacggtgacggccaccaatctgtgcccgcccaactgggcgcaggactccaacaacggcgggtggtgcaacccgccgcgcacccacttcgacctctccaagccggcgttcatgaggatggcgcagtggcgcgcgggcatcgtgcccgtcatgtaccgccgcgtgccgtgcgtccggaggggcggcctgcggttcgcgctccaggggaacccctactggctgctggcgtacgtcatgaacgtgggcggcgccggcgacgtcgtggagatgtgggtcaggagcggcggcgccggcgcgtggacgcggatgagccataactggggcgccgcgtaccaggcgttcgcgcagctcggcggccgagcgctcagcttcaaggtcacctcctacaccacccgccagaccatcgtcgccaccaacgtcgcgccggccaactggtgcctggggctcacgtaccaggcccgcgtgaacttttcctgaggtagcccaacacgcaaccgatcacgccgttttgcgcacacaagctgcaggggctgtcaacgctcagctctgctttcgtagttttatttcaaacatacacctaggaggctagggcgtgctttcgttgttccatttcaaccgaagagttagcactggttgttgcgcgttgcccctctccccccatccacgaggagcagagggtttgacgcgagcat

SEQ ID NO: 153422 - DNA, 598 bp, Zea Mays
ggtggcctgtgagtggtcgacgaagccggcatgttccagcatccagtcctctgcgtgaaggtcgcctgagaagttgaactgccctcccagcagcagcagagctctccgagtgctgggcacggcagtgtcctctgacaggcagcatctcagagaatgtgtgatggtcttgatcgcctcttctctgtacgtgttgtttctgtttggctccacctgcaatgcgtttcagttagagttctctgcagactattaaattccaggcgatgtctgaggcggctagcaaacgaaatacgatttcgtggaagtggaaatgtaagcgtacaacaagaagagattcagggtttaaagttgtataccaatgcatccaaacacatcagtagaacggcgattggggcttgttcttctgcgggcaagctccggaggtacttcagcagcacatccattgcctccacgatcaactctgctctcgatccatgcaggagcaattcaaccatttctctcctgttcgaaatcagagtgttggtggtgatcgacagttaagatggcagcacaaatacatatgctttgtcataattttttaagaaaaaaaactctgaatgaa

SEQ ID NO: 153423 - DNA, 77 bp, Zea Mays
atggtctcaagccaacaaggattacaaaatcgctcggtttaccgaaatcgtcactcgactatattcgtttaccaccg

SEQ ID NO: 153424 - DNA, 1233 bp, Zea Mays
gacgaaacggcaagcgtcgccctctccaccgccaccagtccacctcctcgtcctcctccggtcacgcacgcagctagcttacccgccccgccactataaaaatccacctccaccccaccgcgcgtctacagttccacacacgcgtgcacgggcgggcaagcaccagaaaggaaaggcggaggccgcgcggcgggcgccagctgcagccaagagcccactagtagtagtagtagctagttcaccaccgcctgcttgcctcctttactttgccatatttgctagcgtttcctggattggggacgcttccgtttcgggaagccgtgaagggatcggccacgacgatggtgcgggggaagacggagctgaagcggatagagaacgcgacgagccggcaggtgaccttctcgaagcgccgcaacgggctgctcaagaaggccttcgagctctccgtgctctgcgatgctgaggtcgggctcgtcgtcttctccccgcgcggcaagctctacgagttcgccagcgccgccagcctccagaaaacaattgaccgctacaggacatacacaagggaaaatgtcaataacaagactgttcaacaagatatacagcaagtcaaagcagatgccgtaagcttggcaagtagactcgaagccctagaaaagaccaaacgaatgtttctgggtgaaaatttagaagaatgctccattgaagaactgcataatctggaggttaaactggcgaagagccttcacgtcatcagagggaagaagacacaactgctggagcagcagatatccaagctgaaggagaaggagaggaccctgctccaagacaacaaagagttgcgggataagcagcgcaacctccagtctccaccggaggcgccaccggacctgaaccgctgtgtccctccttggccgcgtagcctgccggcaccgagcaatgacatggacgtggagacggagctgtacataggattacccggcagggagcgctcctccaaccgggactctgattgaaccacggattttcagttcgatcggctaaaaggaataagctccctgaaattaaagcatcgaagggcacacgtcaatggttttatttgcaacttttgtatgcaaacttgtacttgaaaagtaaaaaaaataaaaataaatctgtagtatgtggatgcaagaaacggctggttagctagctgcaagccttctggggcctgaaaatgaaatccacccatgg

SEQ ID NO: 153425 - DNA, 997 bp, Zea Mays
cacttttgctgctgctggttggttggtttgcgtttgttcgggcagctagcgtttcctggattggggacgcttccgtttcgggaagccgtgaagggatcggccacgacgatggtgcgggggaagacggagctgaagcggatagagaacgcgacgagccggcaggtgaccttctcgaagcgccgcaacgggctgctcaagaaggccttcgagctctccgtgctctgcgatgctgaggtcgggctcgtcgtcttctccccgcgcggcaagctctacgagttcgccagcgccgccagcctccagaaaacaattgaccgctacaggacatacacaagggaaaatgtcaataacaagactgttcaacaagatatacagcaagtcaaagcagatgccgtaagcttggcaagtagactcgaagccctagaaaagaccaaacgaatgtttctgggtgaaaatttagaagaatgctccattgaagaactgcataatctggaggttaaactggcgaagagccttcacgtcatcagagggaagaagacacaactgctggagcagcagatatccaagctgaaggagaaggagaggaccctgctccaagacaacaaagagttgcgggataagcgcaacctccagtctccaccggaggcgccaccggacctgaaccgctgtgtccctccttggccgcgtagcctgccggcaccgagcaatgacatggacgtggagacggagctgtacataggattacccggcagggagcgctcctccaaccgggactctgattgaaccacggattttcagttcgatcggctaaaaggaataagctccctgaaattaaagcatcgaagggcacacgtcaatggttttatttgcaacttttgtatgcaaacttgtacttgaaaagtaaaaaaaataaaaataaatctgtagtatgtggatgcaagaaacggctggttagctagctgcaagccttctggggcctgaaaatgaaatccacccatgg

SEQ ID NO: 153426 - DNA, 1058 bp, Zea Mays
cgctaatttgcattgctaaccgttgcaccggccatctccatctctcatagcctcacagtcacaagggtgaggagtggagagacgtcggtgagtttcaccatatggcggtggggaagggaggagggctgctggtcctcgtcgttgtaggtctgctcctgcacggcacccgtgtcgccgacgcgcagtctctccgggttgggtactacagccagacgtgcggcagcgccgagtccatcgtcgccgacgaggtccagaaggcgtcgtacagggataggggcgtcctggccagcctcatccggctgcacttccacgactgcttcgtcaatggctgcgacgggtcggtgctgttggaggccagtgaccggcaggcggagaagaacgccaagcccaacctgagcctgcgagggttcgacgtcatcgagaggatcaagcagaggctggaggccgcgtgcgcgctgacggtctcgtgcgcggacattgtggccttcgccgccagggacagcgttaagctgagcggtggcctttggtacgccgttcccggcgggcggcaggacggcacggtgtcgcgggcgagcatgaccggcgacctcccgcctccgaaccagcgcaacgtggacctgctcgcgcagtacttctaccgcaagggcctgacgctggacgaaatggtcctcctctcagccgcgcacacggtgggcatcgcgcactgcagctcgttcgactaccggctgacgagcgaccaggacaagggcatggacccggccttccgcaacagcctacggagccagtgccagtacaaccccagcaactacgtgcccttggacgccggcagccagtacgcgttcgacaccggctacttctccaacgtgctggccaaccgcaccgtgctcgactccgacgccgccctcgcctcgccgcgcacagcagacaaggtcaagcagtggaagaacaacccggactggttcaagaacagcttcgcggccgccatggtcaagatgggcagcatccgcggcagctaccccggcaaggtccgactcaattgcaccagggtcaggatgtga

SEQ ID NO: 153427 - DNA, 113 bp, Zea Mays
cgataatttagcaaataaacgacaatatattgtaaggggaattaagaatgaaattctattttgcataatttgctcctgtataaaatatgcttatcattttaggactaaggaag

SEQ ID NO: 153428 - DNA, 117 bp, Zea Mays
accaaactttttctactatgttcctacactatatggacccaaatgttccattttggcacaattatcgaagtgtttgctataactattagatttagtttgtttaattgaatttttcgg

SEQ ID NO: 153429 - DNA, 837 bp, Zea Mays
gagagcaagacccgctacaacagaaacagagagaggacacggctggcggaggtgccgccatgggggatttctgtacgacggcgtcaggtcctcggtggtcagtcgcgggggatcgccaggtcgtgtgggagcttcaggggtcattgatacggtgtgggaggccttgaccctatggcgatttcacgccggagtcgccacaacctcgcggatccgtaacctagcgtcgagggcttccctaccgagataatctgaggtgagcatgatactaaaccattcatcgtacccgtagctacgtgtatcatcttgcggaccggaatttttggcaacggggctgcggattggattgctgtccatggcgccaccgcgggctgttcaccgccgtgctgggaatcggctgtgggatgaagacgattttcgtgccgtcggatctctatgtacggtgaagattagataatggacgtaccgcttcgggtagtggatagggaccgtagatctaggggtagacggccgagattagttcatgaaggtatccttcagcactgtagaatacgggacgccgatctcgatctggacgacggagctttagggtaggcgtgggatctctagagcccttgatcggctgttggatggctctggttgatcccgccgtgtgccagcatggcgtttgcaacgcatggcgtttttgcaatcgcgccctcgtttttcttcagaatcaacccgccatcctgcgcggggtgaatatgagtctcagagattcttgctttgtaacccctggtttttctgttatttggcgcacagtccaaacagttaataaaacaggaaaatcaatttagaaaa

SEQ ID NO: 153430 - DNA, 1344 bp, Zea Mays
ccggtcactgcccgatgggcgtcacccccggcgctccaccccgcgtcgcggacccccgacccgccccccgcctcgtcctgttcgcgtccccctttccccgcgtgtgcgttggccggctggttccggatgagggggttgctgtcggtggaggccgctggcgcggcgtcgtcgtcggcctcggcctcggtgctcaacggcgccgtggactggtggcgcgacgtcaacgagtcgccgctgtggcaggaccgcatcttccacgcgctcgccgtgctctacggcatcgtctccgccgtcgcgctggtccaattgatcagaatcgagtgcagggtgccagagtatgggtggacgacgcagaaagtgttccatttcctaaacttcctcgtgaacggcgtgaggtctgccgtgttcgtgctgcggcggaatgtgcaactcgtagagcctgagataatacagcatgtgcttctagatatgcctgggcttgcattcttcacaacatatgcacttctagtgctcttctgggcagagatttattatcaggcacgtgcaatgtccactgatgggcttagaccaactttctattggatcaatagcgtggtttatgcaattcagataatcctatggttggttttgtggtggaaaccagttcgaattatggtcatcttgtcaaagatgttctttgcaggtgtatcactatttgcagccctcgggtttgttctctatggaggaaggttgttcatgatgttgcagcgttttcctgtagaatcaaaaggaagacgaaagaaattgcaggaggttgggtatgtgactaccatatgcttttcttgtttcttgatcagatgcgtcatgatgtgccttaatgcgtttgataaagcagcagatcttgatgttctgaaccatccaatcctgaacttcttctattacctgctggttgagatagtgccttcagctctggtgctcttcattctacggaaactgcctccaaagcgtgggatcacacaataccacccgatccattagagagcaggccttgggaacaggcaaaggttttctggtggatagtgttacacaacgtggtaaatacagaagggagagtgaaaagtaccactcgagctttgcccagctttttatacggaagtctttagaatcccaggttgaaattgtgtgtaaaattgcgatctctttcactaagatttagaaaatgtaacttatataactttgttattctcagtgcgtatcatctgttcacattgcattaattgtttgcatgtttcttttgggtctctgcctcaactttgctgaacaagagcagctaatgctcctggagtgcatggatgatgtgattcg

SEQ ID NO: 153431 - DNA, 1475 bp, Zea Mays
acaccacgcacgcacgcaactcgaagcccaggggcctggccaaggctcgaaccttctctccttctctggcttgtcttctccttccttcctcttcctcctcccctccacgcgatcgaaaccgaagcacgaattaatcatcccggttcagccctctccaggcgctccaccccgcgtcgcggacccccgacccgccccccgcctcgtcctgttcgcgtccccctttccccgcgtgtgcgttggccggctggttccggatgagggggttgctgtcggtggaggccgctggcgcggcgtcgtcgtcggcctcggcctcggtgctcaacggcgccgtggactggtggcgcgacgtcaacgagtcgccgctgtggcaggaccgcatcttccacgcgctcgccgtgctctacggcatcgtctccgccgtcgcgctggtccaattgatcagaatcgagtgcagggtgccagagtatgggtggacgacgcagaaagtgttccatttcctaaacttcctcgtgaacggcgtgaggtctgccgtgttcgtgctgcggcggaatgtgcaactcgtagagcctgagataatacagcatgtgcttctagatatgcctgggcttgcattcttcacaacatatgcacttctagtgctcttctgggcagagatttattatcaggcacgtgcaatgtccactgatgggcttagaccaactttctattggatcaatagcgtggtttatgcaattcagataatcctatggttggttttgtggtggaaaccagttcgaattatggtcatcttgtcaaagatgttctttgcaggtgtatcactatttgcagccctcgggtttgttctctatggaggaaggttgttcatgatgttgcagcgttttcctgtagaatcaaaaggaagacgaaagaaattgcaggaggttgggtatgtgactaccatatgcttttcttgtttcttgatcagatgcgtcatgatgtgccttaatgcgtttgataaagcagcagatcttgatgttctgaaccatccaatcctgaacttcttctattacctgctggttgagatagtgccttcagctctggtgctcttcattctacggaaactgcctccaaagcgtgggatcacacaataccacccgatccattagagagcaggccttgggaacaggcaaaggttttctggtggatagtgttacacaacgtggtaaatacagaagggagagtgaaaagtaccactcgagctttgcccagctttttatacggaagtctttagaatcccaggttgaaattgtgtgtaaaattgcgatctctttcactaagatttagaaaatgtaacttatataactttgttattctcagtgcgtatcatctgttcacattgcattaattgtttgcatgtttcttttgggtctctgcctcaactttgctgaacaagagcagctaatgctcctggagtgcatggatgatgtgattcgctc

SEQ ID NO: 153432 - DNA, 900 bp, Zea Mays
aggggcctggccaaggctcgaaccttctctccttctctggcttgtcttctccttccttcctcttcctcctcccctccacgcgatcgaaaccgaagcacgaattaatcatcccggttcagccctctccaggcgctccaccccgcgtcgcggacccccgacccgccccccgcctcgtcctgttcgcgtccccctttccccgcgtgtgcgttggccggctggttccggatgagggggttgctgtcggtggaggccgctggcgcggcgtcgtcgtcggcctcggcctcggtgctcaacggcgccgtggactggtggcgcgacgtcaacgagtcgccgctgtggcaggaccgcatcttccacgcgctcgccgtgctctacggcatcgtctccgccgtcgcgctggtccaattgatcagaatcgagtgcagggtgccagagtatgggtggacgacgcagaaagtgttccatttcctaaacttcctcgtgaacggcgtgaggtctgccgtgttcgtgctgcggcggaatgtgcaactcgtagagcctgagataatacagcatgtgcttctagatatgcctgggcttgcattcttcacaacatatgcacttctagtgctcttctgggcagagatttattatcaggcacgtgcaatgtccactgatgggcttagaccaactttctattggatcaatagcgtggtttatgcaattcagataatcctatggttggttttgtggtggaaaccagttcgaattatggtcatcttgtcaaagatgttctttgcaggtgtatcactatttgcagccctcgggtttgttctctatggaggaagtgggtcttactatacactgtcctgatagagcatatcaaatgccttcttttgcttagatggtagtagagttctg

SEQ ID NO: 153433 - DNA, 892 bp, Zea Mays
ccaatttccactaaaagatccagagcaagacttgcattctgtaaccgccattttacaagcagaatcaggatacgtagaagtggttttctacacttatcatgactcataaatatccattgctatactaggatgcgagtgagatctccccagcgcataacttatacccttgcttcttggtttgtaggcatattttatcatcctagctatgcatgtagtacagtttaaccctttcatttattgagatgacttttgatgttctgtctgtttctgtaggttgttcatgatgttgcagcgttttcctgtagaatcaaaaggaagacgaaagaaattgcaggaggttgggtatgtgactaccatatgcttttcttgtttcttgatcagatgcgtcatgatgtgccttaatgcgtttgataaagcagcagatcttgatgttctgaaccatccaatcctgaacttcttctattacctgctggttgagatagtgccttcagctctggtgctcttcattctacggaaactgcctccaaagcgtgggatcacacaataccacccgatccattagagagcaggccttgggaacaggcaaaggttttctggtggatagtgttacacaacgtggtaaatacagaagggagagtgaaaagtaccactcgagctttgcccagctttttatacggaagtctttagaatcccaggttgaaattgtgtgtaaaattgcgatctctttcactaagatttagaaaatgtaacttatataactttgttattctcagtgcgtatcatctgttcacattgcattaattgtttgcatgtttcttttgggtctctgcctcaactttgctgaacaagagcagctaatgctcctggagtgcatggatgatgtgattcgctc

SEQ ID NO: 153434 - DNA, 450 bp, Zea Mays
atggcgctgctgatggcctcgaccctggcggagaaggggaggtcggccctggccccggcacctgtcccgacctcggcggtggagcaggggcatgttccaccatgcgcacaccttgccctgcacaccggcggacacaccctgcggctgcccacacaaggatgtcatgtgatttactccctccccaaagtctcgcgtcgcacccgatcggcctcgcctgcgcaatccacgcgtcctaaccttcaatcaaggctccggggcaaggtttgcatcgacggcatcattgaggcgataaaatgtcatgcgttggtgaggcaccaactcccatccttctcggcgctctcccaggaagactacagccagttttggattgttggcagggtccaattttgtgaaaggaatgcttttgctccccttgccttttcggatcgaaatcttggtgttgactgctaa

SEQ ID NO: 153435 - DNA, 1437 bp, Zea Mays
atgcactctttctacagtgatgttgtgcgcctacagtgttcatttttttctgaatcctttgttttagggtctaagggaaaggttttcacattgcaactcaaacatggacgcggaccaggggcgtcgcgcgatcgggatcgcctcagcaagaagcagcagaaggacgccaggaaggcggagaaggctgagacggtggcgcagccccagcagcagcatctgttcaacaccgaagacctattcgcggccaactatggtgatgtcaccgtcgagctaaatcataatccaacagggcaacaagatagcctgctcactgtctggctggtacatagctctgttttgactccatacaccaaggtattcatccctcctcgaacaacctacctgcaccacatgactctgagagaatttctaaccaaggtagtgcagcagcaccagggaggttgcaggatgtctgttgcatatgttgctccaacaaagtcgtcttatgctatgtctcatcctgaaggataccagtataccacacattctgtggaggattctggaattattttagcttgcacgataccgtacaaacaaggtatatcctcgttccaatatccgtctctaagcaacataaacaaaaacagcatcctaggccttccatcgttcaccaagcactcagaaagcagggctgaagtcttctcgctggaacggtccacagacaaggaggtgagctcgatagaaagtgatactgactattgcacccaatgctcgcaagtggccagcggcgcagtagagccggcagcggggcctagacctggcagggtcggtccggggccgcgaggaagggaggtggcctgcggtgaggggctgtcgcgccgtggccggggaagcgcgctagcgccgaggagggtcggggccggccgcagcggacagagggagggctacaaggacggcggctgtcggatggtgccggagagcaccgtcgccaccgcgctgagcttctccggcatgttgcgcgagcttggcgagctggagcggagcgtcgcgtcgtggggcgctgcgacacaagcagcagaggagggccaagggcgagcccagggactcgaaagagaatcgcttcatcgatgcgggcgcgggggcgtgtggtggtcgtcggcaaggagcgcggacagccccatgctgccggtggggaagtggcaggacgacacggaaatcggcctcccgaggctggcggtcagggacggcgaggaggccgcggaggtcgaggacgaggaggtcgcgttggaggaccagacgacgtcgcgctcgtcgagctccaactccgggatgccgtgggactgggtgttggcgtcgtcgggttgcttgagcaggctgaggaagcaaagcgacggggaggcagtggccatgcggcgactgaagagaggagaggaggatagaaagtatctagctgattaa

SEQ ID NO: 153436 - DNA, 390 bp, Zea Mays
ttaatttctctcttgagccaaaacaacctaacattgtggttttttgaactcataaacacttctctgttgaacccagattcaaagacttccattgcatatgatctatcctcatctgtcagcccatcaattgtatccaactcctctagacactttttaatagagaaatcttcatcatgcttcttcttttcttcaagagcttcgagcgttttggctgcggtgctcctcttgaattccacgaaactttcaatagctgctccagtttcgctttgctcttcagagaggaatgaaagtatagcagggagaagaagaaagaaaaactcttcatcgtcttcttcctcatccaacaaaagctgcctagcttggccctcccaagaacccatatctagagaa

SEQ ID NO: 153437 - DNA, 1434 bp, Zea Mays
ctctcggccgccatcatggaaggtccgaccccgccatcgctgtccccacgcggttgctccaaggaaggaaactctgatcccgctatccccgcccccgctctctctcgccatctccgtgcggctgctccaaggaaggaaggtccgaccccgccatcgccatccccgcgtggctgccttcccctctcgccatccccgcgcggctgctccaaggaaggaaggtccgaccccgccatcgccatccccgcgcgcccggtcgagcgccaccagccgcataagtctgggctagcgccgccggccaccattggctcggtcgagcacctcatgcccacgacggtcagtcgccgccttcatggctcagagtcgtcggtccctgcccaccaaggtcaccatgggctcgacgacgatggcaacaaggtcaaggtcgtcatcacaacccaaggtagtagctcttcagttcccccgccattccccaccacccctccaccgtctccaccgcacacagcatgcccgactctattctcctccccgaaatccccgtggcgcgcagatctagccccggctcctcgccggcacaaaccacgtgcgcgccctcgacccatggcatccccaaatcccgcccccggttcctctcccttcccgttcgcggacgacgcttccgcgcgttgacgtacgcgtccccaaatccccggttcccctcccttcctgttcgcggatggcgcttccgagccctcgacccatggcgtccccaaatcccaggttcctctcccttcccgttcgcggacggcgcttccgcgcgtcgacgttcgtgtccccaattcctgccccggttcggcgcttccccacatcgaggcaccacaccatcgccatggggtatcgacaacgtcgacagcgtgtggccccatcgttcgcagaccaacccggccacggttgccctgctgctgacggataaggacctggagtcggaggagagcatgtacgagcggtggagcagcgtgcacaccgtgtcgcgggacctcacggagaagcagagcaggttcgaggcgttcaaggcgaactctaggcacatcggcgagttcaacaagatgaaagacgttccctacaagctcggcctcaacaagaacaaaaggaaagttgagaagattgaaaatgactatgccaaatgcaagttcgttgcccaatgttttatatatggtgatagtttcagctctggaatttagctgaagttgaatgcttcatatgtttagactgaaattttggtactaaactggtagattattgttatttaaatatataaaaaaaatcatcttctacgattcagagaaattatgtgaagcttcaatttgactccatgcaacaggtttagctattgacaacctcgattacattttcacagtgggagctccttcgattattaaccacaggtcgtatgctaaa

SEQ ID NO: 153438 - DNA, 564 bp, Zea Mays
tctctcgccatctccgtgcggctgctccaaggaaggaaggtccgaccccgccatcgccatccccgcgtggctgccttcccctctcgccatccccgcgcggctgctccaaggaaggaaggtccgaccccgccatcgccatccccgcgcgcccggtcgagcgccaccagccgcataagtctgggctagcgccgccggccaccattggctcggtcgagcacctcatgcccacgacggtcagtcgccgccttcatggctcagagtcgtcggtccctgcccaccaaggtcaccatgggctcgacgacgatggcaacaaggtcaaggtcgtcatcacaacccaaggttcgaggcgttcaaggcgaactctaggcacatcggcgagttcaacaagatgaaagacgttccctacaagctcggcctcaacaagaaaaaatcatcttctacgattcagagaaattatgtgaagcttcaatttgactccatgcaacaggtttagctattgacaacctcgattacattttcacagtgggagctccttcgattattaaccacaggtcgtatgctaaa

SEQ ID NO: 153439 - DNA, 920 bp, Zea Mays
accgtctccaccgcacacagcatgcccgactctattctcctccccgaaatccccgtggcgcgcagatctagccccggctcctcgccggcacaaaccacgtgcgcgccctcgacccatggcatccccaaatcccgcccccggttcctctcccttcccgttcgcggacgacgcttccgcgcgttgacgtacgcgtccccaaatccccggttcccctcccttcctgttcgcggatggcgcttccgagccctcgacccatggcgtccccaaatcccaggttcctctcccttcccgttcgcggacggcgcttccgcgcgtcgacgttcgtgtccccaattcctgccccggttcggcgcttccccacatcgaggcaccacaccatcgccatggggtatcgacaacgtcgacagcgtgtggccccatcgttcgcagaccaacccggccacggttgccctgctgctgacggataaggacctggagtcggaggagagcatgtacgagcggtggagcagcgtgcacaccgtgtcgcgggacctcacggagaagcagagcaggttcgaggcgttcaaggcgaactctaggcacatcggcgagttcaacaagatgaaagacgttccctacaagctcggcctcaacaagaacaaaaggaaagttgagaagattgaaaatgactatgccaaatgcaagttcgttgcccaatgttttatatatggtaatatttgtgattctttgttggctatatcaccatcagttatggcctagggtgttctaattatcttgtttcggtcgcaggtgatagtttcagctctggaatttagctgaagttgaatgcttcatatgtttagactgaaattttggtactaaactggtagattattgttatttaaatatataagtaagggagatgccaatgtgctaattgt

SEQ ID NO: 153440 - DNA, 936 bp, Zea Mays
atggggcggcggcaggacgggcaggaggagttggagcgcagccaggtgtcgacgcacgcgacgtggaacccgtgcccgcactgcggcatcacgcgcacctcctcccgctcgccgaactccgccaggcagatggcgcactccgccagcagctcctcctcctcctcgccctccgccgccggcgccgcgccccgcgccgccgcggccgccgccaccgcgtccgcgtacgccagcttcggcagcgccttcagctccttcttcttcagccccttgctggcggcggtcgcggtcgcggtcgtggccgtggccgtggtggccacgcccgctccggcgccctggtgcgcgtggtggtggtggtgcccgccgccgtcgcccgggttgctcgagggcgacgccggggcgccgtcggcccccgcgcccctgctgcgccgggaccgggcgcagcgggcgacggcggcgagccccacgacgcagatgagcgcgcagagcagggcggcgatgatcaccacgacatcggagttcacggccgcgggcgggtcggcggccgggatgcccgggatgcggttcgggttcgggatggcgccgccgccgctgtcgctgctgctctggagaaggcgccgcgaattcgacggccggagcatcgccggcgtcggtcgcgcgccggtgggtgaggggcgtttccgtaaaaacggagccgcgagaggacggaaagggaggtcccggtcttggaggttgggttggttaatgacggagggggcaagcgtccgggtgaagctttcgggtagggagtgggctgccggactgcctctgagctgtgggcggaaggcgcatttgacgattatgcccttcgtgttccccgcggtgcaagcttcctacagtacactgtttagctattggaggatggagggtggaaaaatccaactacatttttggtcgtag

SEQ ID NO: 153441 - DNA, 528 bp, Zea Mays
cgtttttcacccaaaatccacgagcacctcccccatcgtcctcacggacctcacgcgccctgcccctctcgctctccgcctccccgccccacacccatcgccacccaccagcacctccggcggcccccacccccgcctcctccccgcgtgtccgcggtctgcacccggcgtccctcgcggcgttgacgcgcgaacgtcccgtcgcccggtggtgagctcccttctctgatctaatctcgtccacacgactctgcatctgtcgttcggttggatttcgtctctgtcgctggagaaactggatcttcttcggcagggtcagcggaggacgggttctcctcccgttcgggctgccgcataggtcttcgaacatcggaaatggcgtcgtttggtcatctcttttgctcccaaccaaaacatcagaataacgttttcccgtttctctcctgtcgttgatgtttcggatgcccctcctgtttctttaatttcattccactaatgctcgagacctcataatggatgctggattga

SEQ ID NO: 153442 - DNA, 2055 bp, Zea Mays
cgtttttcacccaaaatccacgagcacctcccccatcgtcctcacggacctcacgcgccctgcccctctcgctctccgcctccccgccccacacccatcgccacccaccagcacctccggcggcccccacccccgcctcctccccgcgtgtccgcggtctgcacccggcgtccctcgcggcgttgacgcgcgaacgtcccgtcgcccggtgagtaacggagagaccgaaccatgagcggaggggtggaaccggagaccccgccgggtagcagcagcaggagcgggggcagcaggagcgtcggtggcaagccgccacgccaccacctcacgtctatccgccactgcgccagcatcgcccgcatcgccgccgcctccgccggattcgggctggattcggggacgctcagcttgatctcacctaccgcagacatccatccgggcttcttgcctgtgttcaggtcggggagtttcgctgatattggacccaaaacgtacatggaggacgaacatgtctgtgtggacaacctggttgagcacctcgggttctatggcccgggcatccctgcaccgggtgctttctatggggtgagttggaattgcatctgtcatcatacctaagtgaggactaactgcttttgttaaatagtatttaacaatgcctagtttttatagatctatgatttgttcttttgtgagtggcaataatgttgctatgatagcttctaggcttactagtttaatatgcctggagatgaatgaatagtcatctagtgtattcatgaatcatggtggtagaaatgattgaactcaagaggaatcggttccacatggtcaatgataaatgcctttgatcgaaaaagaagaaaacccagatgataaatgtttttcttcctattctggacctttaagtactgcacactacagatgggaattttgcgtgagaaataaatgtcttgctcttttgccatctcactttgcagatttttactgttttgtttatgaaaaaactaggtgtttgatggccatggtggcactgatgctgcctgttttgtccggaaaaatatactgaagttcataaccgaagattgccacttccccaacagcatcgagaaggcaatcagaagcgcttttgtaaaggccgacaatgcaattgcggattcccattctcttgaccggaattctgggaccacagcattgacggtccttatatttggcaggacactgcttgttgcgaatgccggtgactgtcgagctgtattaggaaagcgaggccgagctgttgaactctctagagaccacaaacccagctgcatagttgaaaggctcagaatcgaaaacctgggtggtaccgtctttgatggctacctcaacggtcagctggctgtagcaagggcaatcggtgattggcacatgaaaggctccaagggctctgtatgccctcttacaccagaacctgagtttagggaggttaggcttactgaggaagatgagttcttgataataggctgtgatggcctttgggatgtgatgagcagccagtttgctgtttccatggtcaggaaagagctgatggaacacaatgatccacaacggtgctcgcgagagcttgtccacgaagcgcttaggcgcgactgctgtgataacctaaccgtagttgttgtgtgcttctcagcggacccaccccctcaaatcgagatcccaagattccgagtacgaagaagcatctcaatggaagggcttcataggctgaggggtgctcttgacagtaatatctgaagcttaaaagtgtcccttcggctgtaacttctgtcgtcgttggtatgttgaagttttgctccacccattggtgttttgagatagtctcagaataagttttgtagaattattttggaagaaattttgttgaggtgtaggctaattaatcttttttttgttgaggcagtgatttatatgtaccggtcaccatttgattgttggatgctcacgatgtaatcgagcaattaaccgacattgttctggtacgaatgagagttataggagttgatcatttttttc

SEQ ID NO: 153443 - DNA, 1641 bp, Zea Mays
cgtttttcacccaaaatccacgagcacctcccccatcgtcctcacggacctcacgcgccctgcccctctcgctctccgcctccccgccccacacccatcgccacccaccagcacctccggcggcccccacccccgcctcctccccgcgtgtccgcggtctgcacccggcgtccctcgcggcgttgacgcgcgaacgtcccgtcgcccggtgagtaacggagagaccgaaccatgagcggaggggtggaaccggagaccccgccgggtagcagcagcaggagcgggggcagcaggagcgtcggtggcaagccgccacgccaccacctcacgtctatccgccactgcgccagcatcgcccgcatcgccgccgcctccgccggattcgggctggattcggggacgctcagcttgatctcacctaccgcagacatccatccgggcttcttgcctgtgttcaggtcggggagtttcgctgatattggacccaaaacgtacatggaggacgaacatgtctgtgtggacaacctggttgagcacctcgggttctatggcccgggcatccctgcaccgggtgctttctatggggtgtttgatggccatggtggcactgatgctgcctgttttgtccggaaaaatatactgaagttcataaccgaagattgccacttccccaacagcatcgagaaggcaatcagaagcgcttttgtaaaggccgacaatgcaattgcggattcccattctcttgaccggaattctgggaccacagcattgacggtccttatatttggcaggacactgcttgttgcgaatgccggtgactgtcgagctgtattaggaaagcgaggccgagctgttgaactctctagagaccacaaacccagctgcatagttgaaaggctcagaatcgaaaacctgggtggtaccgtctttgatggctacctcaacggtcagctggctgtagcaagggcaatcggtgattggcacatgaaaggctccaagggctctgtatgccctcttacaccagaacctgagtttagggaggttaggcttactgaggaagatgagttcttgataataggctgtgatggcctttgggatgtgatgagcagccagtttgctgtttccatggtcaggaaagagctgatggaacacaatgatccacaacggtgctcgcgagagcttgtccacgaagcgcttaggcgcgactgctgtgataacctaaccgtagttgttgtgtgcttctcagcggacccaccccctcaaatcgagatcccaagattccgagtacgaagaagcatctcaatggaagggcttcataggctgaggggtgctcttgacagtaatatctgaagcttaaaagtgtcccttcggctgtaacttctgtcgtcgttggtatgttgaagttttgctccacccattggtgttttgagatagtctcagaataagttttgtagaattattttggaagaaattttgttgaggtgtaggctaattaatcttttttttgttgaggcagtgatttatatgtaccggtcaccatttgattgttggatgctcacgatgtaatcgagcaattaaccgacattgttctggtacgaatgagagttataggagttgatcatttttttctctggttcagaa

SEQ ID NO: 153444 - DNA, 1542 bp, Zea Mays
cacgcgccctgcccctctcgctctccgcctccccgccccacacccatcgccacccaccagcacctccggcggcccccacccccgcctcctccccgcgtgtccgcggtctgcacccggcgtccctcgcggcgttgacgcgcgaacgtcccgtcgcccggtgagtaacggagagaccgaaccatgagcggaggggtggaaccggagaccccgccgggtagcagcagcaggagcgggggcagcaggagcgtcggtggcaagccgccacgccaccacctcacgtctatccgccactgcgccagcatcgcccgcatcgccgccgcctccgccggattcgggctggattcggggacgctcagcttgatctcacctaccgcagacatccatccgggcttcttgcctgtgttcaggtcggggagtttcgctgatattggacccaaaacgtacatggaggacgaacatgtctgtgtggacaacctggttgagcacctcgggttctatggcccgggcatccctgcaccgggtgctttctatggggtgtttgatggccatggtggcactgatgctgcctgttttgtccggaaaaatatactgaagttcataaccgaagattgccacttccccaacagcatcgagaaggcaatcagaagcgcttttgtaaaggccgacaatgcaattgcggattcccattctcttgaccggaattctgggaccacagcattgacggtccttatatttggcaggacactgcttgttgcgaatgccggtgactgtcgagctgtattaggaaagcgaggccgagctgttgaactctctagagaccacaaacccagctgcatagttgaaaggctcagaatcgaaaacctgggtggtaccgtctttgatggctacctcaacggtcagctggctgtagcaagggcaatcggtgattggcacatgaaaggctccaagggctctgtatgccctcttacaccagaacctgagtttagggaggttaggcttactgaggaagatgagttcttgataataggctgtgatggcctttgggatgtgatgagcagccagtttgctgtttccatggtcaggaaagagctgatggaacacaatgatccacaacggtgctcgcgagagcttgtccacgaagcgcttaggcgcgactgctgtgataacctaaccgtagttgttgtgtgcttctcagcggacccaccccctcaaatcgagatcccaagattccgagtacgaagaagcatctcaatggaagggcttcataggctgaggggtgctcttgacagtaatatctgaagcttaaaagtgtcccttcggctgtaacttctgtcgtcgttgtgatttatatgtaccggtcaccatttgattgttggatgctcacgatgtaatcgagcaattaaccgacattgttctggtacgaatgagagttataggagttgatcatttttttctctggttcagaattccacttgtatgattggatgagctccctgtttattatgaaaactaaaagataatgatgtcattatgggatgaatc

SEQ ID NO: 153445 - DNA, 1421 bp, Zea Mays
gccgcataggtcttcgaacatcggaaatggcgtcgtttgagtaacggagagaccgaaccatgagcggaggggtggaaccggagaccccgccgggtagcagcagcaggagcgggggcagcaggagcgtcggtggcaagccgccacgccaccacctcacgtctatccgccactgcgccagcatcgcccgcatcgccgccgcctccgccggattcgggctggattcggggacgctcagcttgatctcacctaccgcagacatccatccgggcttcttgcctgtgttcaggtcggggagtttcgctgatattggacccaaaacgtacatggaggacgaacatgtctgtgtggacaacctggttgagcacctcgggttctatggcccgggcatccctgcaccgggtgctttctatggggtgtttgatggccatggtggcactgatgctgcctgttttgtccggaaaaatatactgaagttcataaccgaagattgccacttccccaacagcatcgagaaggcaatcagaagcgcttttgtaaaggccgacaatgcaattgcggattcccattctcttgaccggaattctgggaccacagcattgacggtccttatatttggcaggacactgcttgttgcgaatgccggtgactgtcgagctgtattaggaaagcgaggccgagctgttgaactctctagagaccacaaacccagctgcatagttgaaaggctcagaatcgaaaacctgggtggtaccgtctttgatggctacctcaacggtcagctggctgtagcaagggcaatcggtgattggcacatgaaaggctccaagggctctgtatgccctcttacaccagaacctgagtttagggaggttaggcttactgaggaagatgagttcttgataataggctgtgatggcctttgggatgtgatgagcagccagtttgctgtttccatggtcaggaaagagctgatggaacacaatgatccacaacggtgctcgcgagagcttgtccacgaagcgcttaggcgcgactgctgtgataacctaaccgtagttgttgtgtgcttctcagcggacccaccccctcaaatcgagatcccaagattccgagtacgaagaagcatctcaatggaagggcttcataggctgaggggtgctcttgacagtaatatctgaagcttaaaagtgtcccttcggctgtaacttctgtcgtcgttgtgatttatatgtaccggtcaccatttgattgttggatgctcacgatgtaatcgagcaattaaccgacattgttctggtacgaatgagagttataggagttgatcatttttttctctggttcagaattccacttgtatgattggatgagctccctgtttattatgaaaactaaaagataatgatgtcattatgggatgaatc

SEQ ID NO: 153446 - DNA, 245 bp, Zea Mays
tcgcgccgcaacatgttattggttattgatctactggtcatgtactcatgtcatttagatgtaaggtcagatttgttcatttgtacgtattatttaggtgccgtgaatgtgaagcgaatgtctctgtatgcgtgtgagttgggtgccgtagttctgatgagcgcatgtggatatatactatgtatatatgacacgacacaaaacttcagtacagcgatggattatatttataccggtttggaatc

SEQ ID NO: 153447 - DNA, 769 bp, Zea Mays
ctcgtcagactttcagttcttccaatctcttgcaagcacaactgcacaagggaacaggaggaaaaaagagcgagaactcgcagctgacgcgcacacggcaagccccaatcggagccgcggaccggatcagaactaggtctcgaggcgatggcaagcggaggcgagggcgcagggagcggcgaatcccctcccgccgcctcagtggaggcggcagcggtcgaggcgacgctgcacatccggtgcgcgaacggctccaagttcacggtgcagacggacctgggcgccacggtgggcgcgttcaaggaggtcttatccggtagctgcggcgtgccagcaccgcagcagcgcctgatctacaagggccgcatcctcaaggacgagcaaaccctagacagctatggtacgtgccacgccgaaacgctggttgtagtgtagagtaaagtaccttcagatttggtgtcgtagcgtgggattgtccgattctgttcatcaattcggcggtgggccagtgccgttgtgaattgtgctaggtttgtgctgtcggtgacatgcctgtttgtgtgtctgtagtgtattgaaggtggctagattctgcatttgttttttctttcatgtgcatgctagctagtagtaatttaccacatattgtgctatgtcattacctgatgcacgtgtgattcgactaacgtatgctgttaacttataccatgtaacgtttgtatcatgacattaccgatggcattaattacagtctagaagtagttgaagt

SEQ ID NO: 153448 - DNA, 2363 bp, Zea Mays
ctcgtcagactttcagttcttccaatctcttgcaagcacaactgcacaagggaacaggaggaaaaaagagcgagaactcgcagctgacgcgcacacggcaagccccaatcggagccgcggaccggatcagaactaggtctcgaggcgatggcaagcggaggcgagggcgcagggagcggcgaatcccctcccgccgcctcagtggaggcggcagcggtcgaggcgacgctgcacatccggtgcgcgaacggctccaagttcacggtgcagacggacctgggcgccacggtgggcgcgttcaaggaggtcttatccggtagctgcggcgtgccagcaccgcagcagcgcctgatctacaagggccgcatcctcaaggacgagcaaaccctagacagctatggcgttgagacggatcacacaattcacttggtgcgaggtgtcgccacaccagctgcatccagtgcacctgctgctgccaacccccttgcttcatttactcctagtagtggccctgcaggtggcctgggaggcctatttccaggtgttgatgctccaggaaatgacaggccatcaggtatatttaggccaggatttccagaattagagcaagttgagcaacatttaagccagaatcccaacttgatgagggagataatgaatatgccggcaatgcaaaatctcatgaataaccctgatttaatacgtaatatgatcatgaacaacccacaaatgcgcgagatcatggatcggaatcctgatcttgcccatgtgctcaatgacccaagcgtcctccgccaaacactcgaagctgctaggaaccctgaaatcatgagagagatgatgcggaacacagacagagctatgagcaacattgagtcttctcctgaaggttttaatatgctccgccgcatgtacgaaactgtccaggagccatttctaaatgcaacaacaatgggtggggaaggaagcacagcctcaaatccattttcagctcttctcgggaatcaggggtctagccaacctggtcaaggtcaacctgcaacaaatgctccaactactggttcagaatcgacaactggaaccccagctccaaatactaatccacttccaaatccctggagcaccaatgctgggagtgcacaaggtgcaacacggactcctagtggcaatgcaagaactggtggtgttgggggcactggtgccaccggtggactgggaggattgggttcaccagaattgagtagtttgcttggtggtcttgctggcagtccaagaactggttctgctggtggtttaggaggttcgggttcaccagatttggggagtatgcttggtggttcacctgatgtttctccgttcagtcagatgttgcaaaaccctgcaatgatacagatgatgcagaacattatgtctgacccacagaccatgaaccagttgcttaacctcaacccaaatgcacgcaacctgatggaatcaaacactcatatgagggaaatgtttcaaaatccagaatttcttcgccagctgacatcgcctgagactttgcagcaattactctcatttcagcagactttattaggacagcttggtcaacatcaacctagccagtgagtgtctatggttcaacagtacctggatttcattaatcttattatagtttattacttacatttgtttgtaactcgaaatggtacattgtaattattatgtttctaggggttccttttaattgtttgatttgattcaggggcgggaacaatgcaggcagtgccacaggtacacggggaaaccctagccttgacaccttgatgagcatgctcagcgggcttggttcgggaggtggtctaggtgttccaaatacctccagcgtgccaccggaggagctctatgccacacagcttactcaactccaagaaatggggtttattgacaccgcggagaacattcaagcactggtcgctactgctgggaatgtacatgctgcggtggaacgccttcttgggaaccttggacagtagctaacccgagcgagccagacactattcgtaaatcttaaaattgtcgcgcatatgcaggagtgttcggcttaatgttcctcaagccccagaatttgaaggcggcggcgtccatagtcccgaaaacaaaataatgaaagagtcaggcagccgtttacttttgtcatacatggtggtcttgtcttttttttttacagcgatgtattttgcaatgttgattggtgtacatacgtatcggtcggatgttacctccctgtagtctgtcttttccaactatcgattcttgatttccaatatactatcaaatcaaattattatctattctaatccaacgggtggtttcctctg

SEQ ID NO: 153449 - DNA, 2223 bp, Zea Mays
ctcgtcagactttcagttcttccaatctcttgcaagcacaactgcacaagggaacaggaggaaaaaagagcgagaactcgcagctgacgcgcacacggcaagccccaatcggagccgcggaccggatcagaactaggtctcgaggcgatggcaagcggaggcgagggcgcagggagcggcgaatcccctcccgccgcctcagtggaggcggcagcggtcgaggcgacgctgcacatccggtgcgcgaacggctccaagttcacggtgcagacggacctgggcgccacggtgggcgcgttcaaggaggtcttatccggtagctgcggcgtgccagcaccgcagcagcgcctgatctacaagggccgcatcctcaaggacgagcaaaccctagacagctatggcgttgagacggatcacacaattcacttggtgcgaggtgtcgccacaccagctgcatccagtgcacctgctgctgccaacccccttgcttcatttactcctagtagtggccctgcaggtggcctgggaggcctatttccaggtgttgatgctccaggaaatgacaggccatcaggtatatttaggccaggatttccagaattagagcaagttgagcaacatttaagccagaatcccaacttgatgagggagataatgaatatgccggcaatgcaaaatctcatgaataaccctgatttaatacgtaatatgatcatgaacaacccacaaatgcgcgagatcatggatcggaatcctgatcttgcccatgtgctcaatgacccaagcgtcctccgccaaacactcgaagctgctaggaaccctgaaatcatgagagagatgatgcggaacacagacagagctatgagcaacattgagtcttctcctgaaggttttaatatgctccgccgcatgtacgaaactgtccaggagccatttctaaatgcaacaacaatgggtggggaaggaagcacagcctcaaatccattttcagctcttctcgggaatcaggggtctagccaacctggtcaaggtcaacctgcaacaaatgctccaactactggttcagaatcgacaactggaaccccagctccaaatactaatccacttccaaatccctggagcaccaatgctgggagtgcacaaggtgcaacacggactcctagtggcaatgcaagaactggtggtgttgggggcactggtgccaccggtggactgggaggattgggttcaccagaattgagtagtttgcttggtggtcttgctggcagtccaagaactggttctgctggtggtttaggaggttcgggttcaccagatttggggagtatgcttggtggttcacctgatgtttctccgttcagtcagatgttgcaaaaccctgcaatgatacagatgatgcagaacattatgtctgacccacagaccatgaaccagttgcttaacctcaacccaaatgcacgcaacctgatggaatcaaacactcatatgagggaaatgtttcaaaatccagaatttcttcgccagctgacatcgcctgagactttgcagcaattactctcatttcagcagactttattaggacagcttggtcaacatcaacctagccagggcgggaacaatgcaggcagtgccacaggtacacggggaaaccctagccttgacaccttgatgagcatgctcagcgggcttggttcgggaggtggtctaggtgttccaaatacctccagcgtgccaccggaggagctctatgccacacagcttactcaactccaagaaatggggtttattgacaccgcggagaacattcaagcactggtcgctactgctgggaatgtacatgctgcggtggaacgccttcttgggaaccttggacagtagctaacccgagcgagccagacactattcgtaaatcttaaaattgtcgcgcatatgcaggagtgttcggcttaatgttcctcaagccccagaatttgaaggcggcggcgtccatagtcccgaaaacaaaataatgaaagagtcaggcagccgtttacttttgtcatacatggtggtcttgtcttttttttttacagcgatgtattttgcaatgttgattggtgtacatacgtatcggtcggatgttacctccctgtagtctgtcttttccaactatcgattcttgatttccaatatactatcaaatcaaattattatctattctaatccaacgggtggtttcctctg

SEQ ID NO: 153450 - DNA, 1740 bp, Zea Mays
aattcaccctcaccccttcggctattcctcgcccccttcccttctcgaggattcgcgtaatcgtcaccatgcgccgcccgtggaggcactcgggcccagggtccgccgtcgcggcgcgccacggcgccgcggacctctgcctccgcgaggtcggggacctcctgccgcgacgcttcgcccgccgcgcggccggttccgaggaccttgtaatgcggctccagattcaccggaagcttgacaggcacacgggctgcgtcaacacagtgggcttcaatgaggtcggtgacaccctcatatcggggtctgatgatcagaaggtgatgctgtgggactgggacactggcaccgtcaaattagagtttcattcaggacatggcggcaatgtgttccaggcacggttcatgccctgctcagacgatcggaccattgtcacttgtgctgctgatggcgaggtgaggcttgccaagatacaggatgctggagacgtgtccacaacattgcttggtgaacatgagggaagggctcacaatttggctatagagcctggtagtccttacattttctacagctgtggtgaggaaggctttgttcaacattttgatctcagaacaaacacagcctcaaaactatttctttgcagaaactccactaaatcagtatactcatctcttgttcacctaaatgcgcttgcaatagatccgaggaacccaaatctttttgttgttggaggaagcgatgcatatgctcgtgtgtatgacattcgcaagtgcaagtgggatggatcatctgattttagtcacgcatctgactgctattgcccaccacatcttgttgacaataagagtgttggaataacagggattgcattctctcacctgagtgagttgcttgtatcttacaatgaagagaatatttacctattctctaaggatggagggctgggacctgaccccaaaaaatctgttaggattggagcaattgaagggtgcaaatcaacaatgctagcatctggacatgatgtttctcaacctgcacctcagacatacgtcggtcatgttaatcgtgaaacggtgaagcgtgtgtctttcattgggccaaatgatgaatatgttgccagtgggtcagactgtggccggatctttatttggagaaagggagatgggaagtttctacgagccatggagggtgatgagtgcattgtgaattgcattgagcctcatcctcatgctatggcaatcgcgagctgtggaattgataatgatgtaaaagtttggactccctctgcgattgagcgggcacctatgatacatgttgatgagttgagacctcgcaagagaagagccaagctctggcgctttggcatacgagacctgttgatccaacagatactggtatcggaaaataggcaacagtcagctgaagaaggctcatcagaggaccatgaggacaacatagaattacttgatctagtgctacaggctgcagttgaaggtgtatcatcatcatcagacgaggaggaggaggacgacgacgacggcgataatgaggaggcggcggcctctgatggctctgaatagtagtcaaccgatctttcagggttgtttcaaattgtaaatatacaataataagccatcactcttctcatgtattatataatagaactatgatttattagcttgtcatttctatgttataaatctgcttttagtatgctactttaatgaaaaaattgggctaacc

SEQ ID NO: 153451 - DNA, 1836 bp, Zea Mays
aattcaccctcaccccttcggctattcctcgcccccttcccttctcgaggattcgcgtaatcgtcaccatgcgccgcccgtggaggcactcgggcccagggtccgccgtcgcggcgcgccacggcgccgcggacctctgcctccgcgaggtcggggacctcctgccgcgacgcttcgcccgccgcgcggccggttccgaggaccttgtaatgcggctccagattcaccggaagcttgacaggcacacgggctgcgtcaacacagtgggcttcaatgaggtcggtgacaccctcatatcggggtctgatgatcagaaggtgatgctgtgggactgggacactggcaccgtcaaattagagtttcattcaggacatggcggcaatgtgttccaggcacggttcatgccctgctcagacgatcggaccattgtcacttgtgctgctgatggcgaggtgaggcttgccaagatacaggatgctggagacgtgtccacaacattgcttggtgaacatgagggaagggctcacaatttggctatagagcctggtagtccttacattttctacagctgtggtgaggaaggctttgttcaacattttgatctcagaacaaacacagcctcaaaactatttctttgcagaaactccactaaatcagtatactcatctcttgttcacctaaatgcgcttgcaatagatccgaggaacccaaatctttttgttgttggaggaagcgatgcatatgctcgtgtgtatgacattcgcaagtgcaagtgggatggatcatctgattttagtcacgcatctgactgctattgcccaccacatcttgttgacaataagagtgttggaataacagggattgcattctctcacctgagtgagttgcttgtatcttacaatgaagagaatatttacctattctctaaggatggagggctgggacctgaccccaaaaaatctgttaggattggagcaattgaagggtgcaaatcaacaatgctagcatctggacatgatgtttctcaacctgcacctcagacatacgtcggtcatgttaatcgtgaaacggtgaagcgtgtgtctttcattgggccaaatgatgaatatgttgccagtgggtcagactgtggccggatctttatttggagaaagggagatgggaagtttctacgagccatggagggtgatgagtgcattgtgaattgcattgagcctcatcctcatgctatggcaatcgcgagctgtggaattgataatgatgtaaaagtttggactccctctgcgattgagcgggcacctatgatacatgttgatgagctccagttgagacctcgcaagagaagagccaagctctggcgctttggcatacgagacctgttgatccaacagatactggtatcggaaaataggcaacagtcagctgaagaaggctcatcagaggaccatgaggacaacatagaattacttgatctagtgctacaggctgcagttgaaggtgtatcatcatcatcagacgaggaggaggaggacgacgacgacggcgataatgaggaggcggcggcctctgatggctctgaatagtagtcaaccgatctttcagggttgtttcaaattgtaaatatacaataataagccatcactcttctcatgtattatataatagaactatgatttattagcttgtcatttctatgttataaatctgcttttagtatgctactttaatgaaaaaattgggctaaccaaattgtgtgctatgttatgaaaatctgaaatggtgttgcgtcatatatttaattgtctgaccaaaaaaactttgtggttcatccctggg

SEQ ID NO: 153452 - DNA, 717 bp, Zea Mays
atcggtacggtctcctcctcctcctccatggcctcctcggcgatgctgcaggtgttcggccagccggcgtcgacggacgtggcgcgggtcatggcgtgcctcctggagcggcagctggagttcgagctagtccgcaccgacaccttcaagcgcgggcgcaataataagctccccgagctcgtcaagatgagggcaccggccatcaggtgacgctcaagcacggcgacatcaccctcggcgattccagggacatatgccggtacgtgtgcacggagttcccgcggtggtgcaccagggacctgtacggcgcgggcgcgcatcgagcagtggctgcaggcggaggcgcacagcttcgacgcgccgagctcggcgctggtgctccacctcgccttgtcgccggccaccgccgccgagagcgagcggcagctgctgcgcgtgctggacgtgtacgacggcgcgctgggccggagcgcgtacctcgcgggagacggcttcaccctggcggacctgtcccacctccccaacgcgcactgcctccaaatttctcccaggggccgcgcgctgctggcgtccaggcccaacgtggcgcgctggtacgcggccatctcgtcgcgcccgtcgtggaggcaggtcgtcgcggcgcaggcccggaccgcgcactactaccccgccgcgttcgacccgccagcgtcaggccacgccgccgtttgaccgtcc

SEQ ID NO: 153453 - DNA, 1037 bp, Zea Mays
aaaatttggaaggggaatggtcggagagagaaagcttcctccctcttccctggtctggtcgcttctcctgtagctgtaatttttgagagtccctctcaaactttgcttgcttgcgctctccatatatcctgtggatcggagaggatgctctgatctacctgtctgttcttcgatcgagtctgagagatttgggaggaggagggaaacaaagcgaaagagcccatcttttttgtctttttggttcggtttcgtggttgcttcttttggaccccgcggaggagcccaccgtttctacaaaaacccaatctttgctgccttctcagcggtcgagatcgataggtttccagatctgaggctccgtgttctggctgtgagatcggaggcgcagcaatccgagcacgcagctagtagggaaagtatccgagaaaagttgcagattttgctgggggcaacggagcgagaacaagttactgcagaaggaaagggcaaaggtgggggaggcgccggagatgagggatgctatcagctctgatggattatttgaaatcttgctggggtccggcatcaccggctgggcgtccccgcaaaggatcggatgccaccggccgccaggacgggctcctgtggtacaaggacggcgggcaggtcgtcgatggtgagttctccatggccgtggtccaggccaataacctattggaggaccatagccaggttgaatccgggccgcttagcacatcggagcctggactgcaaggcaccttcgtcggggtctacgatgggcacggtggcccggagacagcgcgttacatcaatgaccatctcttcaaccacttgaggagtaaggcctctaccgctgttgaagttcatgctttagatcaaacagtagcaatcaagctatgctatcggatttacaatcgatacatctgatattcagatatgcaagctgtgcatatgagttaacgttgattgctctcaagtaaagatgtttgccatttcagtggtacttgaatgtatgtgtgcattgcatagaacgttgt

SEQ ID NO: 153454 - DNA, 2042 bp, Zea Mays
aaaatttggaaggggaatggtcggagagagaaagcttcctccctcttccctggtctggtcgcttctcctgtagctgtaatttttgagagtccctctcaaactttgcttgcttgcgctctccatatatcctgtggatcggagaggatgctctgatctacctgtctgttcttcgatcgagtctgagagatttgggaggaggagggaaacaaagcgaaagagcccatcttttttgtctttttggttcggtttcgtggttgcttcttttggaccccgcggaggagcccaccgtttctacaaaaacccaatctttgctgccttctcagcggtcgagatcgataggtttccagatctgaggctccgtgttctggctgtgagatcggaggcgcagcaatccgagcacgcagctagtagggaaagtatccgagaaaagttgcagattttgctgggggcaacggagcgagaacaagttactgcagaaggaaagggcaaaggtgggggaggcgccggagatgagggatgctatcagctctgatggattatttgaaatcttgctggggtccggcatcaccggctgggcgtccccgcaaaggatcggatgccaccggccgccaggacgggctcctgtggtacaaggacggcgggcaggtcgtcgatggtgagttctccatggccgtggtccaggccaataacctattggaggaccatagccaggttgaatccgggccgcttagcacatcggagcctggactgcaaggcaccttcgtcggggtctacgatgggcacggtggcccggagacagcgcgttacatcaatgaccatctcttcaaccacttgaggagattcgcatctgagcacaagtgcatgtcagcggatgtgattcggaaggcattccgagcgactgaggagggtttcatttctgtggttagtaaccaatggtcattgagacctcaattagcagctgtaggctcttgctgtctagttggtgtggtttgcagcggaactctatatgttgcaaaccttggggactcccgtgctgttctggggagacttgtcaagggaactggggaggttttggcaatgcagctctcagcagaacacaatgcatcctatgaggaggttagacgagagctgcaggcatcacatcctgatgatccccatattgtggtcctaaaacacaatgtttggcgtgtaaagggtattatccagataacaaggtcaattggagatgtgtatctgaagaaaccagaatttaatagagaacctttgcacagcaagtttcgtcttcaggaaacttttaggagaccacttcttagttctgatccagcaattactgtccaccaaatacagccaactgataagttcatcatttttgcatctgatggactctgggaacatcttagtaatcaggaagtggttgacatggtccaaagtagcccgcgtaatggaatcgcacgaaagttagtaaagtctgcagtgcaggaagcagcgaagaagagggagatgcggtattcagacctcaagaaagttgatcggggggtgaggcggcacttccacgacgatataactgtcattgtggtatttttcgattcaaacgccatgacaactgctgcctggagcagaccctcggtctctctccgagggggtgggtttccaatccattcaaacacccttgctccattctcggttcctacagagctaaacaactcctactgaaaccacgcggtatgtgaaggagccaggcaagaggataaaaaaaaagtaaaggaaaacggagaaggaaaaacagctgttgtgatcagttgtagtgtatttcaccgttcatgttcatttaaaacattttttagattctcaagtctcaacctggtgaccagtgcactgatagcaaggtataagattagattattcttagcttttttatcctcttttttttttctcgtccttaccctttagattcactcatgggatatccgatatcaggtgcttgtacattctttggttcaacttgtgataatagttcatcgcccccctcttttcgccataca

SEQ ID NO: 153455 - DNA, 1129 bp, Zea Mays
atgcttgagatgatgtctgatgctattgatgaaacacttgacaaagatgaggcggaggaggaaacagaagagcttacaaaccaggcattgttatacaggctatctggggattacaatcctttgcattcagacccagatattgcacagcttgctgggtatgtctcatcagaatgctattctatcattgtatttatagtcatatttgacatcgaggaagtcaaagggtcgttggggctggattttgccatcgcaacactgaactactgggtgcacaagggcattgccttcatctgcgagatcagtgatcgtgttccaacttgcaccatggaatatacacttaataatgttaacttcacgtatcagatatttcagcttaagaagggtaggcctggtgaggtgttgcactatgatcacatggtactcgttgattatctcatatctagggatgttggtgtgctttgtgctcagtatctattaaggtgtttaagcttggtttcccagtcttggcatgcttttgttgatgatttagtttactcaacgaaaatagaaaagcttaactgtaaaaggcagaggatttttggggataaagatagcaacagagccaattcaagtaaccagtataagaatggttctggttgtgataaagaagtcgaggattcacggaagcttttcctcaatgctaaaaaatgtctttatttattaaagagaacgttggaagatctgcaaaagaaggatttgttcccttacaaccccaagcctcttcttagaagcttggcccggttccaggagctgtgtgagcaggggtgaaattcgagttacacctggtgaggaagctactatctgtagaagttgaagaatgacccttgggcagatagttgtgttgatatagttggtaaaagggagctgtgaatatatatctcttctaattcatgatctggtctaggactttgagtcgtctgaatcatacagagaaattccagatgatggtaccttttttttgcaagtaggctgctactctgatgcattgggccatgcgagtccacctatcatgcaaggcaccattgttcactatacattaagtagcatcatatcatggtggcacttcaattatacatcaatcattttgtcc

SEQ ID NO: 153456 - DNA, 242 bp, Zea Mays
cacggcctctgcaccctaggatttgctgctcgcgccgtcataaaatctttctgcaatgacgaaccgacaacggtgaagagcatcttcgcccgtttccttctgcacgtctaccccggggaaacgttgtccactgagatgtggcttgacggccagaaggtgcactaccaaatgaatcttgtggttggagaagcttgtgccacaaaccaaacatgttcatatcgtggccgttttggccatatgtt

SEQ ID NO: 153457 - DNA, 414 bp, Zea Mays
tctttccccgttctcgccgccggcgccgatggatgcaacacccgctgctgccgccggtgcctccacttacccccatcgtgcgcgggtgccgcggggtcctcctactgaggaaacaatggtgccagtggcgcggccggcggcccgctccgatcgctgccccccgaaggagctccggccgagctgaaagaggactccaagtttgtgctgttgaacgcggacgatcccgtgcacggcccaccggtgacggtgagtgctcgcagctgttctacatcgttgcatgcatgtcatgcgagtacatggaaacgctgaaaattacagcatatcaactcctatatatgtgaatttcaggcgctattgctcatccgagaggtgaaactgtcactgtaatcagtaatgtcaatttgcagagtacta

SEQ ID NO: 153458 - DNA, 175 bp, Zea Mays
ctcctcctcctcatcgctcccttcctcactcgagccggacgagctcacttgtacagccgtgggagcagccacctctggggccggccgcggccgcctgccccgggagcccgaccgtgacggcattggggtggccgtctggccgagcttcgccgcgaccggattggactattggaga

SEQ ID NO: 153459 - DNA, 519 bp, Zea Mays
acatacttacctggacggggtcgactggctatcaagaaggcccgtggcctagatcaatggcccacattgcacttggtggatgcgttggcttaccatctccccaagtgggagagtggacgtcataatttgtggtagatggggtacgcgacgcagttcaggtctcggtttgctgcttcttgatcagttcagatctcggtttgctgcttcttgatccagatcagggtttctgatccatatagtctgtactttgttacaaaaatcatgtaattttaaaactttttcccatatctgggttcctgatttatgaagtctacagttccggcgcctggcccctgccaattctgatttgggttcttttgggccagatctgggttctgaaccatgtagactttgtttcatgagccgttcatgagccgtttatgcgctgcagtctcatccacgtctgcaagaaatgatgaacagaccgtcggaaaaaaaagtcaagcaaaaaaaatagaaaaatagggaggctgatggctg

SEQ ID NO: 153460 - DNA, 1374 bp, Zea Mays
cggcgtgcgccgtgccgtgcgcaacaagccgaccgtcgcgcccggcccacgcctttccccttccgcctccggtccttccgcagtctttagcctctagatcccaccagaccccgaccggacccgatcccatggctttctcgcggctcctcccctcccgcagccgcctcctctccaccctcctccacacaccgggacccatccccaccccgcgcgcggcagccgccgccaccaccaccccgctcggccccttcctccgcagcttcgcctcgggcgcgcggcgggcggggccctcctcccgcccccgcgccgcggacatcggcgcccgcgcgcgacagctgcagacgcgccgcctctggtcttacgggctcgccttcgcctgcacggccgggttcgtggtcaccgtgctcgccacgttccaggaccagctcgtcttctacgtcacgcccaccgacgcgctcgccaaattcaccgccgatccctccaagccccgcgtccgcctcggcggtctcgtcctcgagggctccgtcgtgcacccctcgccatcctctcccgagatcgagttcgtcgtcacggacctcatcaccgacgtgctggtccggtacgagggcgcgctgcctgacctcttccgcgagggacactccgtcgtcgttgaggggctcctcaagcccctcaccgacgacctccgccgcgacgacgggaggaaggtggccgagaaggcccgggagtgctcgtgcttcttgcgcggcaccgaggtgctcgccaagcacgacgagaagtacatgcccaaagaggtcggcgaggcgctcgagcgaaacaagaagcgcctcgaggccgaggcagaggcggccgccgctcaagtgtcgactgtggcggcggcggcggagggagcaaagccaagctcgtaagattttgtccgccttctgattcgagatgtactggatgtctggatcttgagtatgaggcatcaggcctatgtagatttggatttgatttcactatggcgctggggaatatctgcagcgtgattgaattttgattctaagctgatgtgattttagtatttgtgagctggggatcagcaatttttgttaggagaataatgacaaatgttcattgaacacagtatacaatttggtatactccatccactgagtgatactataggtttactagatcataagcgtgagctataggtggatttgaacttgatttcacaccagaactctgaggttacctgtggcattattcggtttaagctattgtgattgtagtacttttggccaggggataaagcaattttttgttgtgggctgattcggcatggctctatgtattgtttctcaagcattattaccaatataatggtatttcaac

SEQ ID NO: 153461 - DNA, 471 bp, Zea Mays
atcacggggacgcccgagacgcccagcgcgcgcatcgcggcgtacgcgcggccgaccctggcgtcgctggcttcttccgacgggcgcgacgacgacttgaggagcagcggcgagccggccgactcgaggaaccgcaggacgtggcccacgacgccggaccacgccggcgcggacagcgcctcgccggacatcgcgctggacaccttgacgcggccgccgaggcccgcggcgacgagcgccgaccggaggttgagcatcgccgggaccaggaagtgggcgctgccgggggagttcgccggcacgtcgtcgcccgccacgacgtgcgtgatcctggtcgacgggaggaaccgcgcgacgttggcggcgacccagaggtcggcctcctcctggaactcggccacgtgctccagctgctcgttggggatggtgaccatgacctccgcgtcgctgcccgccagggagctcagtagc

SEQ ID NO: 153462 - DNA, 947 bp, Zea Mays
gggtttcagcggcggcggctgccgagccccattcctgatctgaagcacctcaaaccaccgctctgccccagatccagatccacccagctactgcggcgagcccgtggggacggtggcggcggaggacccgagtgcacggagatgctcaactacgaccaggtcttcatcagggacttcgtgccctccgtgctcgccttcctcatgcacggcaagaccgagatcgtccgcaacttcctccttcacaccctccagcttcagcagcagccatagtcgcctgggggctcaggtgtgaccgtcgtcgcggggcccgtccccagccacgggctcggtcgcgagccgcggacgctctgccaccagccgcgggtccgaccgcctacgggtgcgcatccggccgccgccgtcgagtccatcttggaggcaaggagtgagcaaggcatcgagcttccccaccaaattattctctgacggtgcacgggaatggccagggaaatccatggtcgccagatctgcgcctacttattcctctccagtccccaacgagagattcaggtgaaacgtgaagagctgcttgagtatgcccaaagtatcatttcaggattgaagagaaatgatgaaattgtgaggtggtattaatggagaaagatcagaaatagctgaaattgaagcagcatcaacaggtgaagctgatcggcttagagctgctctccggcgtgctccacccggcgctattcggcaacatcaccagatttatacaggcttacacagacctgttttgataagagccgagcagcgattcttccattttggaccacgacctagctaaagggctaatggttccaaatgttcgaagtaccgaagacagggctagctcctcgttttttgtcatgtcaaataaatcgtgtatgattgcaacaatattggcaaaatatcgttgtgctttatatttt

SEQ ID NO: 153463 - DNA, 1198 bp, Zea Mays
acccttctttcacacacccgtcgcgctttcgggcctcggaagcttccggagacaggagacaaccagccgctccccccccccccctcccccgtgccctagacaaagaggaaaggtacgcctccggttccagagcggagaggattgcgccgcctgattggcgattgctgatagtctgccgccagtgccctcgcccgatttgctccgccgagaacaacatggggagaagctataatcacagtccatcgccaccaagaggctacaggagaagaactcgcagcccaagtcctcgtggtcggtatggaggccgtgatactgatagggacctcccaactagtcttttggtgaggaatcttcgtcgggattgtaggcctgatgaccttcgtagaccatttggaaaatttggccccgttaaagacatatatctgccaaaggattactacactcgggaacctagaggatttgggttcatccaatactttgatcctgaggatgcttctgatgcaaagtactatatggatgggaagatgctgcttggaagggaaattgctgttgtttttgcagaggaaaacaggaagaagccttctgacatgagggccagggaaaaaataagtggcagaggccgttcttatgatgggaggttgcgctcaaggtcacctgggttgaacggttctcctaggggtagatcacggtcccaaagccgaagctactcgccagcacctaagcgaaagcactattcaaggtccccggctcctcgacctcgggagagatctttgtcgcgttccccagctgtcaacagatcaaggagtgcaagccccattgttagcaggtctcctcataggcaggggtctctttctgttagcgagtgaggtatctcagggctctgtatgactatcttgtcgctgttatgctgaaccatatatgtttcagattatttttgttagcaccctcgtgtgtactctaggatatctgaacgtctactatgtattgggtatttccaaaatctctgatgagtgaagtgagttgtgaaccaatgaaccttgaatccttgatgttcgacgtgctgaccagtgcgcaggtgcttatgtggtatgaactatgaagttttttttcttcctctgcagctgatatggcagcgttcaggcattcatgggccatccaatcgcctgtctcattggagcaggtgagcttctccaataat

SEQ ID NO: 153464 - DNA, 1311 bp, Zea Mays
acccttctttcacacacccgtcgcgctttcgggcctcggaagcttccggagacaggagacaaccagccgctccccccccccccctcccccgtgccctagacaaagaggaaaggtacgcctccggttccagagcggagaggattgcgccgcctgattggcgattgctgatagtctgccgccagtgccctcgcccgatttgctccgccgagaacaacatggggagaagctataatcacagtccatcgccaccaagaggctacaggagaagaactcgcagcccaagtcctcgtggtcggtatggaggccgtgatactgatagggacctcccaactagtcttttggtgaggaatcttcgtcgggattgtaggcctgatgaccttcgtagaccatttggaaaatttggccccgttaaagacatatatctgccaaaggattactacactcggtaagacgcaagtcttaagagtactattgaagaaaaggaagaaatagaggtttaaagagatatgcaagttatgaagagtttcaagtgtatctctaaacactgatgactgcaagggaacctagaggatttgggttcatccaatactttgatcctgaggatgcttctgatgcaaagtactatatggatgggaagatgctgcttggaagggaaattgctgttgtttttgcagaggaaaacaggaagaagccttctgacatgagggccagggaaaaaataagtggcagaggccgttcttatgatgggaggttgcgctcaaggtcacctgggttgaacggttctcctaggggtagatcacggtcccaaagccgaagctactcgccagcacctaagcgaaagcactattcaaggtccccggctcctcgacctcgggagagatctttgtcgcgttccccagctgtcaacagatcaaggagtgcaagccccattgttagcaggtctcctcataggcaggggtctctttctgttagcgagtgaggtatctcagggctctgtatgactatcttgtcgctgttatgctgaaccatatatgtttcagattatttttgttagcaccctcgtgtgtactctaggatatctgaacgtctactatgtattgggtatttccaaaatctctgatgagtgaagtgagttgtgaaccaatgaaccttgaatccttgatgttcgacgtgctgaccagtgcgcaggtgcttatgtggtatgaactatgaagttttttttcttcctctgcagctgatatggcagcgttcaggcattcatgggccatccaatcgcctgtctcattggagcaggtgagcttctccaataat

SEQ ID NO: 153465 - DNA, 1561 bp, Zea Mays
ctttcacacacccgtcgcgctttcgggcctcggaagcttccggagacaggagacaaccagccgctccccccccccccctcccccgtgccctagacaaagaggaaaggtacgcctccggttccagagcggagaggattgcgccgcctgattggcgattgctgatagtctgccgccagtgccctcgcccgatttgctccgccgagaacaacatggggagaagctataatcacagtccatcgccaccaagaggctacaggagaagaactcgcagcccaagtcctcgtggtcggtatggaggccgtgatactgatagggacctcccaactagtcttttggtgaggaatcttcgtcgggattgtaggcctgatgaccttcgtagaccatttggaaaatttggccccgttaaagacatatatctgccaaaggattactacactcggtaaggtaccttgacttaattattgtgagtgggtgtttgcccatggacacctatgtgcaacttggagatctctccctgaactttatagtacactaaagtatatttgctccagaacaggattatgattgttgttgcttgtttttaacatattataagcatgttctttacagatttttaattattattctctgtatcgtatggtttacactgggttgctttacgcaccccctgagattaacagtgaaagtaacttttttgaagacgcaagtcttaagagtactattgaagaaaaggaagaaatagaggtttaaagagatatgcaagttatgaagagtttcaagtgtatctctaaacactgatgactgcaagggaacctagaggatttgggttcatccaatactttgatcctgaggatgcttctgatgcaaagtactatatggatgggaagatgctgcttggaagggaaattgctgttgtttttgcagaggaaaacaggaagaagccttctgacatgagggccagggaaaaaataagtggcagaggccgttcttatgatgggaggttgcgctcaaggtcacctgggttgaacggttctcctaggggtagatcacggtcccaaagccgaagctactcgccagcacctaagcgaaagcactattcaaggtccccggctcctcgacctcgggagagatctttgtcgcgttccccagctgtcaacagatcaaggagtgcaagccccattgttagcaggtctcctcataggcaggggtctctttctgttagcgagtgaggtatctcagggctctgtatgactatcttgtcgctgttatgctgaaccatatatgtttcagattatttttgttagcaccctcgtgtgtactctaggatatctgaacgtctactatgtattgggtatttccaaaatctctgatgagtgaagtgagttgtgaaccaatgaaccttgaatccttgatgttcgacgtgctgaccagtgcgcaggtgcttatgtggtatgaactatgaagttttttttcttcctctgcagctgatatggcagcgttcaggcattcatgggccatccaatcgcctgtctcattggagcaggtgagcttctccaataat

SEQ ID NO: 153466 - DNA, 1300 bp, Zea Mays
ctttcacacacccgtcgcgctttcgggcctcggaagcttccggagacaggagacaaccagccgctccccccccccccctcccccgtgccctagacaaagaggaaaggtacgcctccggttccagagcggagaggattgcgccgcctgattggcgattgctgatagtctgccgccagtgccctcgcccgatttgctccgccgagaacaacatggggagaagctataatcacagtccatcgccaccaagaggctacaggagaagaactcgcagcccaagtcctcgtggtcggtatggaggccgtgatactgatagggacctcccaactagtcttttggtgaggaatcttcgtcgggattgtaggcctgatgaccttcgtagaccatttggaaaatttggccccgttaaagacatatatctgccaaaggattactacactcgacgcaagtcttaagagtactattgaagaaaaggaagaaatagaggtttaaagagatatgcaagttatgaagagtttcaagtgtatctctaaacactgatgactgcaagggaacctagaggatttgggttcatccaatactttgatcctgaggatgcttctgatgcaaagtactatatggatgggaagatgctgcttggaagggaaattgctgttgtttttgcagaggaaaacaggaagaagccttctgacatgagggccagggaaaaaataagtggcagaggccgttcttatgatgggaggttgcgctcaaggtcacctgggttgaacggttctcctaggggtagatcacggtcccaaagccgaagctactcgccagcacctaagcgaaagcactattcaaggtccccggctcctcgacctcgggagagatctttgtcgcgttccccagctgtcaacagatcaaggagtgcaagccccattgttagcaggtctcctcataggcaggggtctctttctgttagcgagtgaggtatctcagggctctgtatgactatcttgtcgctgttatgctgaaccatatatgtttcagattatttttgttagcaccctcgtgtgtactctaggatatctgaacgtctactatgtattgggtatttccaaaatctctgatgagtgaagtgagttgtgaaccaatgaaccttgaatccttgatgttcgacgtgctgaccagtgcgcaggtgcttatgtggtatgaactatgaagttttttttcttcctctgcagctgatatggcagcgttcaggcattcatgggccatccaatcgcctgtctcattggagcaggtgagcttctccaataat

SEQ ID NO: 153467 - DNA, 864 bp, Zea Mays
gaaggaagagttcgcaacatcttgatttgattgtctctgcaggggtcttctccttaatggttctgaagcattgttgcttttagtgaaacactaatttgctttctgtttcagggaacctagaggatttgggttcatccaatactttgatcctgaggatgcttctgatgcaaagtactatatggatgggaagatgctgcttggaagggaaattgctgttgtttttgcagaggaaaacaggaagaagccttctgacatgagggccagggaaaaaataagtggcagaggccgttcttatgatgggaggttgcgctcaaggtcacctgggttgaacggttctcctaggggtagatcacggtcccaaagccgaagctactcgccagcacctaagcgaaagcactattcaaggtccccggctcctcgacctcgggagagatctttgtcgcgttccccagctgtcaacagatcaaggagtgcaagccccattgttagcaggtctcctcataggcaggggtctctttctgttagcgagtgaggtatctcagggctctgtatgactatcttgtcgctgttatgctgaaccatatatgtttcagattatttttgttagcaccctcgtgtgtactctaggatatctgaacgtctactatgtattgggtatttccaaaatctctgatgagtgaagtgagttgtgaaccaatgaaccttgaatccttgatgttcgacgtgctgaccagtgcgcaggtgcttatgtggtatgaactatgaagttttttttcttcctctgcagctgatatggcagcgttcaggcattcatgggccatccaatcgcctgtctcattggagcaggtgagcttctccaataat

SEQ ID NO: 153468 - DNA, 152 bp, Zea Mays
gcgcacggaacggggagggcagaacagcagactactcttaccttcttaataagtagtatagacaaacatcgtataactataaagttagaatactatattaatatattaaataaattaatccaatagacatagattaacccaattaacatagg

SEQ ID NO: 153469 - DNA, 1788 bp, Zea Mays
ataattagccaccgccaccagttagccctctgtcctgtttgacgaggaggagaaggaagcaaggaacaaggcgccggagggggaagaggaactcaagctccggcaaacagcaagcccatatacgtacattgtgatagccgctacaacaaggccgtcgccgtcgccgttgccatgggagtcctcttctcgtgccccgccgacgactacgacccgctgcacctggtggaggaggaggcggcgccgccgtccgccggcggcgcaggggaggagccggccgtcttcacggcggcgctgggctccggcaagctgcgcatcgaggggtcgctgagcttcaagcgggcgcaggccgcgctgcaggtggagaccgagatctccatccggaccgccgccatgcccgcgccgggaccgggacccctgcccaggggagctaggttcgccgggccggcggccgcggacagccccaagcacgaggcggcggcgctcaggctgcagaaggtgtacaagagcttccgcacgcggcgccagctcgccgactgcgccgtgctcgtggagcagagctggtggaagctgctggacttcgcgctgctaaagcgcagctccgtttccttcttcgacatcgagaagcaggagaccgccgtgtccaagtggtcaagggcaagaacgcgagtcgccaaggttggaaaggggttgctgaaggacgagaatgctcagaagcttgcgttgcagcactggctggaagcgattgacccgcggcaccggtacggccacaaccttcactgctactacgactgctggctccactccgaaagcaagcagcctttcttctactggcttgacgtcggagaaggcagagagatgaatctcgaaggcaagtgctcaagatcgaagcttctgagccagtgcatcaagtaccttggcccaaaagagagagaggactatgaagtcgtgatcgaggacggcaggttcttgcacaagaaaagccggcggatccttgacacttcgtccgggccgcgagacgccaagtggatctttgttcttagtacgtctaagaacctgtacgttggccagaagaaaaagggaacatttcagcactctagcttcctcgctggaggggccacttctgccgctgggcgactggtcgttgagaatggaactttgaaggctatttggcctcacagcgggcactaccgcccgacggaggagaacttccaggagttcaagagcttcctcaaggacaactcggttgacctaaccgacgtcaagatgagcccagaggaggaggacgaggagttctggggcagagggggatcagcggcaggaggccgagacccatcggaagacgtcgaccaggatgcggcggcggcggcggccggggagcagcagcagcaggcggccgaggccgaggaggaagaggaggagcggcaagcgcccgtgccgcgggagaagatcctgcagcggatcaactccaagaagggggccaagtcgtaccagctgggcaagcagctgtccttcaagtggaccacgggggcggggccccgcatcggctgcgtgcgcgactacccgtccgagctccagctgcaggcgctggagcaggtcaacctctctccgaggtgcgccgccgccgccgcctcccgggtcgcctcgccactcgcgcgaagcttcaacaaccacccagcgcccgcgacaacagcagcaagggggtgcgaggcgtccacgccgaaggaggcgctccggtcgcctctgcagcacggagcactggccgtggcagccgcagttgagtctgagtga

SEQ ID NO: 153470 - DNA, 306 bp, Zea Mays
gaaaagagagaagcccggaaagcaaagaaagagctcaaaggcctgtataaatcagaaacgcagaaggctcagaaagttgccgctgttactggaccttcttccattcgactaatgtgatggttgatctgtggcacgtttactgatgagcgacgactatgacagtcttgaatccaaaagatcgcctggacaaatgcatcaaagctacgaacgatgtatgataccagttcatattttgtgctatactcatggattttgtcgacaggatacccaatgcttgcttactatatatttagttagttgaaggag

SEQ ID NO: 153471 - DNA, 1178 bp, Zea Mays
gtacccgacactacatcatccgctctaaaaattgctttggatggtatgttttctttctatgggttgtcaatggatagattacgaggacaaggttatgatggggcatcaaacatgaggggtgaatttcatgggttgcaaagaagaatattagatgagagtccatatgctttttacatacattgctttgcacaccaattgcaattagtggttgtttcagttgctaagtgttgcgcttctgtatttgatttcttccaaacgtgcaacttgattgtgaatagtgttaatgcttcttgtaagagaagggatcaattggctcaacaacaccatgagaaacttgtgaacatgttggaaaggggggaaattttttcaagtagagggaaaaatcaagaaaccagcctagcacgacctggggatactcgatggggttcacatcataaaactttatgtcgtattgttctcatgtgggatgctattttagaggtactagagattgtggctgatgatggctctagtggggataagaaatatatggcttctggtttgttgaaacaaatggagagctttgaatttgtgcttattttgcatatcatatgaggttattaggcaagactaatgatttgtcacaatgtttacaaagaaaagatcagaatattgtccttgctgttggattgattggagccacattgcggaatattagtgaagtacgtgataatggatgggaggaattgtttgatgaggtaaaaaccttttgtacccaacataacattattgtaccaaagatggatgatacaattactgttcgaggtcgctcaaggggacgtggaggtcagttagtgacttactttcatcatttcaaaaacgagatctttattgttgtgtatgatcaagttattgtggaattaaacaatcgtttcactgaaagatctactcaattattgagatgcatttcttgtctagatccaagaaattcatttgccagctatgacaaagctcagctaatagaattggctaagatttattctgcagacttctctcaatatgacctcttgatccttagagaccaactcgatatatttattgttgatgtgaggggtaattctgattttgcaaattgtgaagaccttggtaatctggctattaagatggtgcaaactgagagacacctagtttttgcattg

SEQ ID NO: 153472 - DNA, 367 bp, Zea Mays
atgtcgtggagaagcgggagcgagtcgccgatggcaggaacgcagcagcagggcagggtgccggtcttgaggttgaggtcgtcgagggtgacggtgcgtgaggtatcggacgtacggggaggagaggcactggcggaggatgtgctcaaagaggacgtcgactcgcaggggagcgcggtgattgactcgagactcgagagcactggcggggaatggccgagcggtgggagagaggcggcgactgagaagtgtgatgtgaaggacaggggtctcgaagcgtcgcggcgtcggaccgtggcttcgtgataaggaagcgttaaacggttttaggtcatcggattgtgatcgaatggctggagaaaaaaaa

SEQ ID NO: 153473 - DNA, 457 bp, Zea Mays
caaggatgtcaaagggaaccctacagagttttcaggcgtgttggtcatggatcttcatatggtgttggtatcaaagcttcggttggtaaggggagagtacattgttgatcacaatgctgatattggaactgttttcttcagatttggtgagagattttgagtttgcaacattccgccactgcggaaggcacttttgaggcactctgtttagcgatgcttgtggagtgtgatatgactcaatcggcactagagctctgctgaaataatgaagctattttctggagaagagttatagctactgcgagattagcttttcttcatgtaggatgtaagatctgttctttcagagcttggagctcataaatagatgaatattcacagaggttggcccaaattttactgtcagttgtgttgctgtccaattgtcaagtcgttttgcccttcaccatatgccaat

SEQ ID NO: 153474 - DNA, 1723 bp, Zea Mays
cagctttgtccgtgcgtgcctcagccctcctcgacccttggttcctccacacacacgccacgcccagcacaaggatctccggcgccgactgcggcgacctcctcctccgatccatagcaccagtagcaggcagagatggcagacaacatggtgacgctcgtccgcctcgtcctcgccatcatcctcccgccgctcggcgtcttcctcaagcacggcctcaagatagagttctggatctgcctcctcctgtgcttcttcggctacctgccgggcgtcatctacgccgtctgggtgatcatcaggaaggaagacgactaggactgatgcgattgatcagcgacacatgagcggaccacgcaccacgccaaggcattgacgtcattccggcttgcattggaaacaacatttcactttcctcttctttttttttcttttttgtaattgtaagtgtaagtatagggaggagatgtgtgtggtgagggtgactatcaaaggagtcgtccgccgcagtttcagataggaattgtgtgtttgaggatgcatgcattgcagtcgggaagaatatacacagattaattattacagacctgattccgtaagttaatgaaagcccgaatgaacaagcagagacgacgtacaaagacggcacccccacaccaccaagcaaatgaatgaatcagacagacagacaatcaaagacacacgcgcagtacagtactctgcaacgacgacgaaccggctggctagtatttgtgctggaagtcctcggtggcgggcgtgggctggtacccgacgccgtgccggttgttggggaacaccatgaagacgtagcccgcgacggcgccgacgacgggcgggagcacggccatcatggtgggctcggcgagctccagcgccgggtagaggcaggcgacggtgtcggcgtcgaggagcgcgagggtggcgaagacgagcagcgagagcgcggcgtgcgcgaagtcgccggcgcggaggcggtacgccgacaggtcccgggcggcggcgtccgggtcgggcgtgaaggtgcgcaggccccgccgcgtcaccacgccgtagtacacgcgcccgtccgcgcccacgtagctgtcggtgaagcaggagaaggcgcaggaggcgccgcacagcgccaccagcgccccgctcagcgccttgttcagcgtggcgcagtgcccgttgttgctcgccagcgggctcaggaactggaacaggaacaccgtgccgctcgggagcagctttatcaggtccgccacgccgcgcagcgcgcggtccgccaggctccgtggcgccgccatgtcgtcctctcttgcttgctcttgctgtttgtcgtcgtcgatgcctacttggcgttgcaacgcgatttatatatagggcccggccgatacgtgcttgcctacttgctgcccgtccgtggcagcagcagagtagcgcatgcatcgtgtcgtgtgatcgtgtcgtctggacgggcgagccgcgagcgcgcgaaggataggaatggacgaaggcatggtggttgcttccaaggatcatcgatgtgttcccgtggggtgcggacgtttgcttggtttgcttgcactcctagtgccggcctcggcgacatggacgggtcggtcggtggctttttttcttttctgcatgctctatttaccactgatacagcttcttgcccaccgatctatcctcactctcttacttgcacacaatcgac

SEQ ID NO: 153475 - DNA, 1561 bp, Zea Mays
gctactcggcgtaggctaaccaaaccaaaccccaccaggccacccaagcgcaaagcgctagcgatcgaactcgagcccaatccagcggaaacccccaaccctagctcccgactcgagccgatcgaccccgatccgatctaatgttccccaccgtcgacgagccctccgccgccggcgccatggtctcgtcctccttccctgacgccgacgcctacggcaacggcgactccgacggcctcgacttccccgtcgaccccaaccccaaccccgtcttctcctccccggccgctgccgcggcccccgggtccgctggcgcggctggggagcggcgccagctgttccagcgcctgtggacggacgaggacgagatcgtgatcctgcgcgccttcgcggagttcacggcgcagcgtggcacctccttcgcgtcgcaccagtacgacaccacccccttctacgaggacatgcgccgccgcctcaacaccggcttcaccaagaaccagctcgccgagaagatccgccgcctcaagcgcaagtaccgtaactgcgtcgagcgcctccgcgtcgccggctccggcttcaccttccgctccccgcacgagcaggccatctttgagatcgcccgcaccatctggcgccccgcctccgacaagcacggccgcgactccgacgacgagggcggcggcggcaacgtccacgacgccaccttcgcccccttcgccatcgacgccgccgccaacggtgagtccgccaagtcttccaggccacgccgtggccggcgccgccgcacgggcgacttccccgccgacgcggtcgcgctgccgccggcgcccatgccgatgcaggtgatgaccgaggacgcgctcccgtcgttcccgcaggcgactgcggcggcggtcatgaacgggggctgcggcctcatcgtggacccagcctctggtctgccaaccgcgctgtcatcagctgcggcggcggcaacggccgtgtccggcggcagcaccacggagaaccccatcctcacggcgctgttcaaggagatggtacgcgcgatgctgagcgtcgtcggcagcggcggtggcaccacggcacttcaggggctggagccaccgccccctatcgcgggggtgccgatggaaggggagaagtggcggcagcagcggatccgggagctggaggtgtacctgcgtcggatggacctgctgcaggaccaggccagggcggcgctggaggaactcaggtccgcgccgcacgccgggggcatgaacacttgattgtcttgggttcagcagctcctccagcgtcgcgtcttcttgcagatagcgcatcgtccataaccattagaaagaaagggtcatcttactggtaggtttctctaggctcgagcagcagtagaacaaggtgttttcgtctgtaatcctgattttctgtctgcgctgcagactagccgcgcgtcgtcgttcttatttatatagagcaactggtataaagagcttcctatcgtgccctatttatcctatttaaaatttatatacaaaagaatgtgagatgaggtattgcactttgc

SEQ ID NO: 153476 - DNA, 874 bp, Zea Mays
gtataaagtttgcatgtacggcaggacatgttcacagcaggcacggacacatcgtcgatcatcgtggagtgggcgatggccgaaatgctcaagaacccggccgtcatggcgcgcgcgcaggaggagctggaccacgtgttgggccgcggccggcgcctggaggagtcggacctgcccagcctcccctacctgcaggctgtgtgcaaggaggccctgcggctgcacccgtccacgccgctcagcctcccgcacttctccttcgacgcctgcgacgacgtcgacggctaccgcgtcccggccaacacccggctgctcgtcaacgtctgggccatcggccgggacccggccacgtgggaggcgcccctcgagttccggcccgagcggttcctgccgggggccgcggcggagaaggtcgacccgctcggcaactacttcgagctcatccccttcggcgccggccggaggatctgcgccgggaagctggcgggcatggtgttcgtgcagtacttcctgggcactctgctgcacgcgttcgactggcgccttcccgacggcgaggagctggacatgcgcgagacgtttgggctcacggtgcctaaggccgtaccgctccgcgccatcgtcacgccgcggctcctgccagaagcctacgcctgaaggtttgtgcccatgatcatgacggaaggatgattgcctgaaggtttgtgcttgtcaacctgtatgcgtattctgtttctgttttttttatagaaacatggtattcacattcctatgcttaattgccaggcatttgatatgtcggattaaaaagtttgtcaacaagctactgaacaaatgattattcggattatcaaaatgaatttttacagacagt

SEQ ID NO: 153477 - DNA, 1039 bp, Zea Mays
gcttgggcatgtcctcctccagactccagttcctgcacagtagcacgccaccatgcagctcgcggcgttgtgcattgaccctgtcgtgctctccagcgccttcctatgcctcctcctccacctcgcgctccgctccctgctgcacccttcttctgcttcttcgtcgtcctccggccgccgcggccacctcccgccgggaccaaggggcctacctatcctcggcgcgctgccactcgtcgggccggcgcctcacgccggcctggccgcgctggcgcgtaagtacgggcccatcatgtacgtgaagatgggcacggccggcgtggtggtggcgtcatccccgggcgcggcgcggacgttcctcaaggcgctggacgcgcggtacgccaaccggccggcggtggcgagcacggcggacatcacgtacgggtgccagaacatggtgttcgcgaactacgggcccaagtggaagctgatgcggaagctcgccagcgtgcacctgctcggggcgcgcgcggtcgcggactgggcgcacgtgcggcgcgacgaggccggccacctgctgcgcggcgtggcggaggcggccgcggccggcaggcccgtcgttgtgccggaggtgctcgtgtgcgccctcgccaacatcgtcgggcagatcaccgtgagcaagcgggtgttcgacgcgcagggggacgactcgaacaggtacaaggacatgatcgtgtcgctgatgaccggcacgggcctgttcaacatcagcgacttcgtgccggcgctggcgcgtctggacttgcagggcgtgcaggcgaagctgcggcgggtccaccaccagttcgacggcctcatcaccaagatgctggccgagcacgccgcgacggccgcggaccgcgcgcgccagggccgccaggacttcgtcgaccggctccgcgacgccatggacgccggcgccgacgacgagagcggcgagactatcaccgaggtcaacatcaagggcctcatcttctttcgtgggggcggctccgactccgatccctgcaatgagtga

SEQ ID NO: 153478 - DNA, 835 bp, Zea Mays
ccggcgctgcgtccgcgtgctgcgtcttcaccaagctcccggtcgccaccgcgcctctcgtgcgcgcggcggtccggcgtcgatgctaagcccttcccgctccatcgcttccgcctctcgtgtaattctgaaatggaccaacctctccatctcgtgcacgtcaagattctcgccgcggaccttctctccttaaccgtacggcacacctctccgacgacgttcctccgctgcggccgtagggttgcgcgtgcggagctcgtcggagtcgtcgtctcgcgtgaccgcagggagaagttcctccgcttcctggtcgacgacggcactgggtgtgtgccgtgcatcctgtggctgaaccaccagtacttgaatgctaggacgtcctctgggccatcgtcagaccatgatcctactgcagagatggcgctgaaaatgtcagaggaggtgcgtctaggcaccctcttgagggtgcgagggaagatcgcctcgtatcgtggtgcgatccagattactgttagagatgtggttccggagaaggacccgaattcggaggtgctgcattggttgcagtgtgtccgcctggccaaggagtgctatgatctgccaccacgttctgctcaaggtcgcacttgaatggggtttaccatgtgtagtttgtacgagtttatctatctctgcacttgctggagacaatctcttctaaggggggctcttaattctttgccatctttacgaaaaccacttaatcacatgttattgatatggtattttatatgccactcacccctgtaaaagtggcaaaatgtatttagtgtctcttcttttcctactaaaaaaa

SEQ ID NO: 153479 - DNA, 806 bp, Zea Mays
aacgataagccttcatctggagtcgaatttgttcagcagaagctgggtagcccgtcaatctctgactatgaaaagctcaaggcagagaagttggacttgcaattgaaatatgataagcttttagaaacccacaaggaaacatgcagacaggtatgcgatgttactgtgttggcactgtacactgctctgtctatttacacggcacacttaatgttcagtagcatttggaagagatgatcgcagtgactgttcaacaaggactgtatgtgccttttgtttaccttttactcctccgcttgcttttttcttctttttttccgaccctcttgatgattactactactcttgcataaggctcgtgtgaagggtatgatcagcacacagcagaattggtttagccaaggccactgtatgtctgtattgacctcactctgcaaaacattcctgctctataaatagtgttgtaaagtcgcttattaaaatgttgcccaggtatactttttcggtgagggctgatttgataaatagagaattggagaggtatgaggaagaaatctccttactattctatagattccctcttaattcacttgtcaccaaattaaaccagccatgatatgtaagacttagtactcgcacatacgatgaagtgatgaacttgacagctcatcctttcgtgccagtaaagcttccatcttggcattcagataaaattctctagatgctttactctggcctaataatgtaacataatctccatgatgatcttttcagaatatctcgttttttcttcctggaaaccgaac

SEQ ID NO: 153480 - DNA, 2384 bp, Zea Mays
atggtcctgccttgtgaagcagggaacaagaaagaaagaaagatgcacgttgtgcagtgtgaccctagcaaaggagagatgcgatacccccggccggaccagcgatcgccattcaaagctgccagtgccacccgccatcccctgctcccactgccactgccagcacataagccctaccagtaccagaggctaccagcagagagagaaggcgagcgcgcgggcagaacccgcgcagaaaagcaaccacctccctccgcctcccccgcagggctgggccgcaccgcatcaccctcgccctcgcgagatccccaattcgccgcaggttcctcgccggagcgagcggcccccattgtggcgtggggctgccggttccgcggccaacagtccccctcctccctgctgctggagctgccttgagtcccgcgactcgactcgagctctgctgccgtggaggcggccaaggccaaggcgcgcgcattgcgagggtttttgctacctctcggattcaagggtattttatagatgacgaaggcagcaactatttatgggagcaagacacagagcgatgccttgcggccagggccattgcgtccagcaaatattatcagaaataaatttcccacatacaagaatggttcaaatggtatagtaatcaagctggctgatggtcccgaaataccacctctcaaggagatagttgcaaaggagactgcagatctacttgatcgtcgtcagcgtctctctgtccgtgaacttgcgatgaagtttgagaagggtctcagcactgccacattgttgtcgaatgaggttaaatggagacaagtagctttgatggagcgggatatccttttgaagaatctaaagagtgtattagagtcactgagaggtcaggtgacaggcaaaactaaggatgaaatcgaggagtctatatctatggtggagatcctcacggttcagctctccaaaagagaagctgagttggttcaacaaaaagaagaggtcacaaaattagcaaaatcattaaagcaggcttctgaagatgcaaagagaattgttgaagaagaaagagctaatgctcatacagaaatagaaactgctaagggtgctgtccaaagagttcagcaagcagttcaggagcatgagaagatgtcccaaaatactgggaagcaaaagcaagacatggaagaactaaagaaagaagttagggaagctcggaggatcaaaatgttgcatcagccaagcaaggcaatggatctggaaaatgaaatacgaattttacgtaacacatttgctgagaagtctaaggattgtgttagtcttttgaaagagttggaaacgcataaaaggttaaaagaaaatggtaccatcccttcattcgatctggagggtctccaatgcttaggatcaatgctacgtatagttggtctgagtggtactcacatggatctgtcaaatatttcaatccagtggttccgtatacatccaaaagaaagcaacaaagagattatttcaggtgccacaagaccagtatatgctctagagccacatgacgtaggacgctatttgcaagctgaaatcgacgtaggcggcgaaatcgcagtagcaaagactgctgggccagtagaccctgatgctgggttggttgattatgtggagacgctcgtaaggaaacctgaaactgaattcaatgttgttgtgcttcaatccaatggcgtcgatcagccaaaagagtcggttcatgtactaaatgtcgggaggctgcggatgaggcttactaaagggaagtcggtagtcgccaaggaattctattcctcatcgatgcagttatgtggtgtgagaggcggaggcgaagcagcctcgcaggcgatgttttggcgacccagaaacgacctcagcttggtgctagccttcgagagcactcgagaacgcaacgcagccatcatgctcgctcggcgtttcgctgtagattgcaacgtatgcgccttcaccaagcgctatgtacgcgtctcagaccgctgcagcattttttttttgccttaccttaatgaaatgtggttgcagatcatccttgctgggccaggcgacaaaactccctggtgaacgaagatggcacctgtgctctgccgataccagataccacccagcacccaccactcctgactgtcctgctcttcctcgcgtcgtaggttcctgaaagaaggcgccgtccgcaccattttaaccgcctgggcgccgcctttctatgtcactgtgctatgttttcccagtccgcgagggttgtaatctgttgttgctgggagatgcgacagcaatgtaagctacaagtctaactgtgtttgacatatgtttaggcctcgttcggttggcctggaacggccctattc

SEQ ID NO: 153481 - DNA, 2394 bp, Zea Mays
atggtcctgccttgtgaagcagggaacaagaaagaaagaaagatgcacgttgtgcagtgtgaccctagcaaaggagagatgcgatacccccggccggaccagcgatcgccattcaaagctgccagtgccacccgccatcccctgctcccactgccactgccagcacataagccctaccagtaccagaggctaccagcagagagagaaggcgagcgcgcgggcagaacccgcgcagaaaagcaaccacctccctccgcctcccccgcagggctgggccgcaccgcatcaccctcgccctcgcgagatccccaattcgccgcaggttcctcgccggagcgagcggcccccattgtggcgtggggctgccggttccgcggccaacagtccccctcctccctgctgctggagctgccttgagtcccgcgactcgactcgagctctgctgccgtggaggcggccaaggccaaggcgcgcgcattgcgagggtttttgctacctctcggattcaagggtattttatagatgacgaaggcagcaactatttatgggagcaagacacagagcgatgccttgcggccagggccattgcgtccagcaaatattatcagaaataaatttcccacatacaagaatggttcaaatggtatagtaatcaagctggctgatggtcccgaaataccacctctcaaggagatagttgcaaaggagactgcagatctacttgatcgtcgtcagcgtctctctgtccgtgaacttgcgatgaagtttgagaagggtctcagcactgccacattgttgtcgaatgaggttaaatggagacaagtagctttgatggagcgggatatccttttgaagaatctaaagagtgtattagagtcactgagaggtcaggtgacaggcaaaactaaggatgaaatcgaggagtctatatctatggtggagatcctcacggttcagctctccaaaagagaagctgagttggttcaacaaaaagaagaggtcacaaaattagcaaaatcattaaagcaggcttctgaagatgcaaagagaattgttgaagaagaaagagctaatgctcatacagaaatagaaactgctaagggtgctgtccaaagagttcagcaagcagttcaggagcatgagaagatgtcccaaaatactgggaagcaaaagcaagacatggaagaactaaagaaagaagttagggaagctcggaggatcaaaatgttgcatcagccaagcaaggcaatggatctggaaaatgaaatacgaattttacgtaacacatttgctgagaagtctaaggattgtgttagtcttttgaaagagttggaaacgcataaaaggttaaaagaaaatggtaccatcccttcattcgatctggagggtctccaatgcttaggatcaatgctacgtatagttggtctgagtggtactcacatggatctgtcaaatatttcaatccagtggttccgtatacatccaaaagaaagcaacaaagagattatttcaggtgccacaagaccagtatatgctctagagccacatgacgtaggacgctatttgcaagctgaaatcgacgtaggcggcgaaatcgcagtagcaaagactgctgggccagtagaccctgatgctgggttggttgattatgtggagacgctcgtaaggaaacctgaaactgaattcaatgttgttgtgcttcaatccaatggcgtcgatcagccaaaagagtcggttcatgtactaaatgtcgggaggctgcggatgaggcttactaaagggaagtcggtagtcgccaaggaattctattcctcatcgatgcagttatgtggtgtgagaggcggaggcgaagcagcctcgcaggcgatgttttggcgacccagaaacgacctcagcttggtgctagccttcgagagcactcgagaacgcaacgcagccatcatgctcgctcggcgtttcgctgtagattgcaacatcatccttgctgggccaggcgacaaaactccctggtgaacgaagatggcacctgtgctctgccgataccagataccacccagcacccaccactcctgactgtcctgctcttcctcgcgtcgtaggttcctgaaagaaggcgccgtccgcaccattttaaccgcctgggcgccgcctttctatgtcactgtgctatgttttcccagtccgcgagggttgtaatctgttgttgctgggagatgcgacagcaatgtaagctacaagtctaactgtgtttgacatatgtttaggcctcgttcggttggcctggaacggccctattccatccggatatatttggtcaggattgaaaccggaaacaactaataatggttgttcggttatgtctaactcataataaaaccagattgaaaacaggtc

SEQ ID NO: 153482 - DNA, 841 bp, Zea Mays
actggacacgttcggtgagcgttattcacatgtgctgcgtattgcatgactgacgtgtgtttcattattgttagcagatgctgggttggttgattatgtggagacgctcgtaaggaaacctgaaactgaattcaatgttgttgtgcttcaatccaatggcgtcgatcagccaaaagagtcggttcatgtactaaatgtcgggaggctgcggatgaggcttactaaagggaagtcggtagtcgccaaggaattctattcctcatcgatgcagttatgtggtgtgagaggcggaggcgaagcagcctcgcaggcgatgttttggcgacccagaaacgacctcagcttggtgctagccttcgagagcactcgagaacgcaacgcagccatcatgctcgctcggcgtttcgctgtagattgcaacatcatccttgctgggccaggcgacaaaactccctggtgaacgaagatggcacctgtgctctgccgataccagataccacccagcacccaccactcctgactgtcctgctcttcctcgcgtcgtaggttcctgaaagaaggcgccgtccgcaccattttaaccgcctgggcgccgcctttctatgtcactgtgctatgttttcccagtccgcgagggttgtaatctgttgttgctgggagatgcgacagcaatgtaagctacaagtctaactgtgtttgacatatgtttaggcctcgttcggttggcctggaacggccctattccatccggatatatttggtcaggattgaaaccggaaacaactaataatggttgttcggttatgtctaactcataataaaaccagattgaaaacaggtc

SEQ ID NO: 153483 - DNA, 666 bp, Zea Mays
tgtacacctatagtgcatctactacggcaagaaaaacttgcgtgcctgtctttgacaagtgagaagattctccctgccactaaagaccttgctgttgttgttacagttatgtggtgtgagaggcggaggcgaagcagcctcgcaggcgatgttttggcgacccagaaacgacctcagcttggtgctagccttcgagagcactcgagaacgcaacgcagccatcatgctcgctcggcgtttcgctgtagattgcaacgtatgcgccttcaccaagcgctatgtacgcgtctcagaccgctgcagcattttttttttgccttaccttaatgaaatgtggttgcagatcatccttgctgggccaggcgacaaaactccctggtgaacgaagatggcacctgtgctctgccgataccagataccacccagcacccaccactcctgactgtcctgctcttcctcgcgtcgtaggttcctgaaagaaggcgccgtccgcaccattttaaccgcctgggcgccgcctttctatgtcactgtgctatgttttcccagtccgcgagggttgtaatctgttgttgctgggagatgcgacagcaatgtaagctacaagtctaactgtgtttgacatatgtttaggcctcgttcggttggcctggaacggccctattc

SEQ ID NO: 153484 - DNA, 100 bp, Zea Mays
cgagctggtcggggcagaaagaacctgatatcaatgttgtattttacctgtttgaattaatgagttatgttccgatatgcgtccatagactattaggagc

SEQ ID NO: 153485 - DNA, 1719 bp, Zea Mays
attataagcaagcaaagcgcagacttgcataagcaaaccccagccgtcgcagacttgcataagcaagcaaagcgcaggcctcgctcggcctctcgccagttcttcctctcttcttcccgcgacgtacgtcacactgcagcctgcttgctactcttgatttatcatccctcttggtgccgagcaggcagacgtagctgctgcatctcctagctgcctgcctccgttgattatccgatcgacctgttcgacaacaacaagtgaggacgaaccaggcgatccaggtggggcccggccggcaatcaggtgaaaagttgagctgtgttgtcaagacagactgacagagacatcagtttctcgctcgcatcacatgcgtgcattctacgcgggcaagaagggcgatgagagcagtccgtcagctgatgtattagcaaccacaagagagagagggaagagaagagaacaatgagtatttattatccagcaaagagtccaaagggcccagtagcagcgttccctctacggtctgctctcgtcttcttcgtcacatcgttcggcttctacgtctgctacttctcctcacgtcagataatagccctggaaaccgaagcagaaacgacggccagcggaggcggagcagaacccacagagacccgttgcacaaataggcccgcgatcattccacatgggccacagacgcggtacgtgcacttcccgaggcccgccacctacgacaggggcgaatgcgtttgtaacccggtgcgcttcttcgtgatcgtgtcgacgcagaggtcggggagcgggtgggtggaggccttgctcaacagccaccccaacgtcagctccaacggcgaggtgttctccatgagggagaggagacagaacctctcctctgttctggggactcttgacaggctgtacggcatggactggctcaccagcgcggccaagaacgagtgcacggcggcgttcgggttcaagtggatgctcaaccagggactgatggaaaaccatcgcgacatcgtgaactatttgaacaggaagggtgcgatggtggtgttcctcttcaggaggaacacgctgcggaggctcatctctgtggtggccaacaactacgacaggagagcgaggcagctcaacggcgtccacaaatcacacgttcattccaaagaggaggctgaggtcctcgcaaggttcaggccggagctggacgcgccggctctgattccgagcatcagaaccgcccagcgcgccgtgagagcctgcctgcgccgcttcggcagcacgcgccacatggtcctctactacgaggacgtggtccgggacagcaggaaggcgttgtcccgggtgcaggagttcctcggggttccggcgagggagctgtccagcaagcatgtcaagatccacaccaggcccctcccggacctcgtcggcaactgggaggaggtgaggcggacgctgcgcgggacagagtacagccgattcctagatgatgatgcagagtaggtcaagtgtcgagtttctatggaggtaatacaagacaaacagtcaagcggagagatggagaaagcgatgggagttttatctccgccttttagattcctgtgtaggtatactggtttaaactcatcattgctgcttgggtagtggggtgccgcgtgggatagcaaaaggtaatgtattggttcaagtgcattacataaaccaaagtcttgaaacaaa

SEQ ID NO: 153486 - DNA, 1683 bp, Zea Mays
attataagcaagcaaagcgcagacttgcataagcaaaccccagccgtcgcagacttgcataagcaagcaaagcgcaggcctcgctcggcctctcgccagttcttcctctcttcttcccgcgacgtacgtcacactgcagcctgcttgctactcttgatttatcatccctcttggtgccgagcaggcagacgtagctgctgcatctcctagctgcctgcctccgttgattatccgatcgacctgttcgacaacaacaagtgaggacgaaccaggcgatccaggtggggcccggccggcaatcaggtgaaaagttgagctgtgttgtcaagacagactgacagagacatcagtttctcgctcgcatcacatgcgtgcattctacgcgggcaagaagggcgatgagagcagtccgtcagctgatgtattagcaaccacaagagagagagggaagagaagagaacaatgagtatttattatccagcaaagagtccaaagggcccagtagcagcgttccctctacggtctgctctcgtcttcttcgtcacatcgttcggcttctacgtctgctacttctcctcacgtcagataatagccctggaaaccgaagcagaaacgacggccagcggaggcggagcagaacccacagagacccgttgcacaaataggcccgcgatcattccacatgggccacagacgcggggcgaatgcgtttgtaacccggtgcgcttcttcgtgatcgtgtcgacgcagaggtcggggagcgggtgggtggaggccttgctcaacagccaccccaacgtcagctccaacggcgaggtgttctccatgagggagaggagacagaacctctcctctgttctggggactcttgacaggctgtacggcatggactggctcaccagcgcggccaagaacgagtgcacggcggcgttcgggttcaagtggatgctcaaccagggactgatggaaaaccatcgcgacatcgtgaactatttgaacaggaagggtgcgatggtggtgttcctcttcaggaggaacacgctgcggaggctcatctctgtggtggccaacaactacgacaggagagcgaggcagctcaacggcgtccacaaatcacacgttcattccaaagaggaggctgaggtcctcgcaaggttcaggccggagctggacgcgccggctctgattccgagcatcagaaccgcccagcgcgccgtgagagcctgcctgcgccgcttcggcagcacgcgccacatggtcctctactacgaggacgtggtccgggacagcaggaaggcgttgtcccgggtgcaggagttcctcggggttccggcgagggagctgtccagcaagcatgtcaagatccacaccaggcccctcccggacctcgtcggcaactgggaggaggtgaggcggacgctgcgcgggacagagtacagccgattcctagatgatgatgcagagtaggtcaagtgtcgagtttctatggaggtaatacaagacaaacagtcaagcggagagatggagaaagcgatgggagttttatctccgccttttagattcctgtgtaggtatactggtttaaactcatcattgctgcttgggtagtggggtgccgcgtgggatagcaaaaggtaatgtattggttcaagtgcattacataaaccaaagtcttgaaacaaa

SEQ ID NO: 153487 - DNA, 584 bp, Zea Mays
ctcttgctgccgatatactcctcgcatggggattataaatcgaacaccgagctcctcccagaaccccccttggcatcttgtccaagctatttccgctatcgggagggcttggccgccaggatcacaacaatggcgtgtggagggaccgtgggtcgcctcacgctaggtttggtcacaccgtcgtcaagctctcaatgtttggctggggacatccgtcggtggtggccgaaggttatggtgccctcaccgtgcggattgcggtcggagcagcgggaattcctccctggagtcacaccgccaccacgaaatcgcgtgcggtcatggccagtggtcttcgtcgtgtcagccgtaggtatgtaacctctctaatgttcactaaagtatctgcatcgtgcaacattggttggggagggaagaagcacaccgtcgtagcagaggcgctgcacaccggtagagctctaccttgggctcacacgcgcatcgccaccgcgactagcatcgcgctggaggaagaagacgcgcttgggaccgtcgtctctaatggagtggccaagattagatcctagtatagcctttcgtttcat

SEQ ID NO: 153488 - DNA, 833 bp, Zea Mays
gcgccggagagcagggtgtactcgagacagacaggcaggacggccacatccgccatattcaggcatggaagcaccggctgcgaagcgcgtcctccgcgtggccgccatcagcggctccattcgcaaggcctcctggcacagcgggctcatccgcgccgccgcggaggtgtgcgaggactgcatcccggggctgcgcgtcgaccacctcgacgtcgccgacctgccgatgctcaacaccgacctcgagacgaacggtggtacgggcttcccgcccgccgtcgaggcgttccgcgccaaggtccgccatgccgactgcttcctcttcgcctcgcccgaatacaactactccatcaccagcccactgaagaacgcgcttgactgggcttctagaggagtgaactgctgggcagacaagccggccgccatcgtcagcgcgggaggcaacttcggcggcggcaggtccagctaccatctgcgccaggtcggggtgttcttggacatccatttcatcaacaagccggaactgttcgtattcgccttcttcgagccggccaagtttttcgacagcgacgggaacctcatcgacgccgacaccagggagcgcctcaagcaggtgctcctgtcccttgaggccttcacgcgcaggctccagaacaacaaggactgaagcagcagctcccgggatcgccgtgctaataataataatctctacttccttccttcagcaattagtaattcgtggtcgtcttattacaaaccaaagtatatgtgctcgaacctataataaaatacatggagaacttcgctatccgatccctgcctccatattggtc

SEQ ID NO: 153489 - DNA, 725 bp, Zea Mays
aaacaccatatatatataggaatgggtacactagcttggcaattatccagccgcggaggtgtgcgaggactgcatcccggggctgcgcgtcgaccacctcgacgtcgccgacctgccgatgctcaacaccgacctcgagacgaacggtggtacgggcttcccgcccgccgtcgaggcgttccgcgccaaggtccgccatgccgactgcttcctcttcgcctcgcccgaatacaactactccatcaccagcccactgaagaacgcgcttgactgggcttctagaggagtgaactgctgggcagacaagccggccgccatcgtcagcgcgggaggcaacttcggcggcggcaggtccagctaccatctgcgccaggtcggggtgttcttggacatccatttcatcaacaagccggaactgttcgtattcgccttcttcgagccggccaagtttttcgacagcgacgggaacctcatcgacgccgacaccagggagcgcctcaagcaggtgctcctgtcccttgaggccttcacgcgcaggctccagaacaacaaggactgaagcagcagctcccgggatcgccgtgctaataataataatctctacttccttccttcagcaattagtaattcgtggtcgtcttattacaaaccaaagtatatgtgctcgaacctataataaaatacatggagaacttcgctatccgatccctgcctccatattggtc

SEQ ID NO: 153490 - DNA, 931 bp, Zea Mays
acattacaatattgaggacctatccataaaactcacggccctactggttcgaggctgactagcactcgtcaccgttccgagaccagcgccagacgcagacggccccgaacgccggcggcggagcatcaggtcgtcgacctccgagcatcgacccgccgcgatggagaagggaaagggcctcgctcgccgctgggcggtggagctccccgacgcctcctcctcctcccccgccgtccccgacccgcccggcttcaccagatccgcgcccgacgcggacgacgccgctggagcgcgccagcgcaaggactccgaggctgcatggaaggcgcagaaagcttgggaagttgcgcaggctccgttcaagaacctgatgatgatgggatttatgatgtggatggcagggagcactgtccacctcttcagcatcggaattaccttctctgctctgtggcaacccctcaacgctctccgatctgttgggaaagtttttgaaccatttaaggacccaagggtggatactattgctcctaagttgctctttattgccctcaatttggctgccatgggattgggtatatggaagcttaatacattgggccttcttccaacaaatccatcagattgggtgtcttctctggctcctgctcgggaggttgaatatgccggaggagggctccccttaatttaatgtccatttccatttgaacttattttactagttgtaatattaataccgagtgacatttttaccatacacccctgaatacacgaagttccgggttttttcccctgtctggatttgtactactattttctagatgcgtttgtttgtatcgaatttgcgaccctgaagtatagtcgtgtctggatggaaaaggattaaattatcttctattcaattttgactaggaatgaatttaattaccttcaa

SEQ ID NO: 153491 - DNA, 1608 bp, Zea Mays
cgcacccgtccacctccctcgccgcataaaaccccggccgcgctcgccactgcccaccggcgacggaggaggctctccactactcactccatttctgtgagatcctcgccgcgcaagaagcgcaacatcgcgtcttcctgcaggctgcacccgcgtgccgcgcttccttccgagtcccgacacccgaggcccgagcgcctgccggctgccgccaacttctgtttctgacgagtgtctgtgacctcggctcgggttcgaccttcgacggggaacggagtgaggtcagctgccgacgcaatgagcgcctccgcagccccggcccccgcagcgggagggcgattcttcacgggcttcacaagactgtgcaagggcctcgccgtcgtcctcttactcgcccacattttggtccacctcttcccttcagccgccacatatctcacgctgataccagccaggacaatcccttttgcttggaacctggttaccgctggttacattgagcaaacaattccaggggtgattgtgagcatagttggtcttcttctatttgggaaggtgttggagcctttatggggagctaaggaactgctcaagtttatttttattgttaatctctcaatttcagcgtgtgtcttcgtaactatgattgtgctatactacataacacaggaggagagctacctctacacacctgtttctgggttttatggagttctttcaggactactggtgggcatcaagcaaattttacctgatcaggagcttaacctttttgtgttcaagattagtgcaaagtggattccatctattgttgcatttatctcggttgctgtaagcttcttcatgaaggaagtgatgtcataccttcccatcatattatttggcatctacatgagctggatttacctgcgttacttccaaaggagattagaagtaggccttaaaggggacccaagtgatgaattctcgttttcaagcttcttccctggatttttaaggccaattttggaccctattgcttctgtattccacaaacttttctgtgggcgatctgcaagacctgaaggcacaggccagacattggatgggtcacagttccctggttcaggctccactgaggcaaacaggaggagagaaaggggccagaaggcactggagcagagactggcagagaagctggctgcggtcaggaaggcggagggcacgcctccgccgaagcagcagcaggaggaggaggaggacgcggagaatgatgcttctgataaagtctgagcgactgagcccctcttgttttcagctggtggaattcgctgccaggagatcctatccttgtgtcaattttttccttatatttgcgcgtgccgccgcgtgagcgagacccgcagtatagtggagttgagtagcctcatggcatggcgattgtgagttgtgacaaaagaatgcagccgtgcaagaaggcaaatgcgacacgcatgttcgaacaaattcttgcagggtagcgagtagttttttcttttctttttatttttaagtttgcaagagcactgcatatcatttaaggagagggggaaacaagttcaatacatggttaaattatacatatgtcct

SEQ ID NO: 153492 - DNA, 1644 bp, Zea Mays
cgccgcataaaaccccggccgcgctcgccactgcccaccggcgacggaggaggctctccactactcactccatttctgtgagatcctcgccgcgcaagaagcgcaacatcgcgtcttcctgcaggctgcacccgcgtgccgcgcttccttccgagtcccgacacccgaggcccgagcgcctgccggctgccgccaacttctgtttctgacgagtgtctgtgacctcggctcgggttcgaccttcgacggggaacggagtgaggtcagctgccgacgcaatgagcgcctccgcagccccggcccccgcagcgggagggcgattcttcacgggcttcacaagactgtgcaagggcctcgccgtcgtcctcttactcgcccacattttggtccacctcttcccttcagccgccacatatctcacgctgataccagccaggacaatcccttttgcttggaacctggttaccgctggttacattgagcaaacaattccaggggtgattgtgagcatagttggtcttcttctatttgggaaggtgttggagcctttatggggagctaaggaactgctcaagtttatttttattgttaatctctcaatttcagcgtgtgtcttcgtaactatgattgtgctatactacataacacaggaggagagctacctctacacacctgtttctgggttttatggagttctttcaggactactggtgggcatcaagcaaattttacctgatcaggagcttaacctttttgtgttcaagattagtgcaaagtggattccatctattgttgcatttatctcggttgctgtaagcttcttcatgaaggaagtgatgtcataccttcccatcatattatttggcatctacatgagctggatttacctgcgttacttccaaaggagattagaagtaggccttaaaggggacccaagtgatgaattctcgttttcaagcttcttccctggatttttaaggccaattttggaccctattgcttctgtattccacaaacttttctgtgggcgatctgcaagacctgaaggcacaggccagacattggatgggtcacagttccctggttcaggctccactgaggcaaacaggaggaggtgcggattccctttttctctcatcgttgtagccatccatcactgagaccatctgcatagtggagcacatgatgttgtttcctacccagaaaggggccagaaggcactggagcagagactggcagagaagctggctgcggtcaggaaggcggagggcacgcctccgccgaagcagcagcaggaggaggaggaggacgcggagaatgatgcttctgataaagtctgagcgactgagcccctcttgttttcagctggtggaattcgctgccaggagatcctatccttgtgtcaattttttccttatatttgcgcgtgccgccgcgtgagcgagacccgcagtatagtggagttgagtagcctcatggcatggcgattgtgagttgtgacaaaagaatgcagccgtgcaagaaggcaaatgcgacacgcatgttcgaacaaattcttgcagggtagcgagtagttttttcttttctttttatttttaagtttgcaagagcactgcatatcatttaaggagagggggaaacaag

SEQ ID NO: 153493 - DNA, 4614 bp, Zea Mays
atggcgccggcgaagaggaagcgcgcagcagctgccgccgcggccgcggccgcggccaagtggaaggtgggcgacctcgtgctcgccaagatgaagggcttcccggcctggccggctatgattagtgaaccagagcagtggaagatgccttctactaaaaagaaaccgctggtttatttctatggtactaaacagattgctttctgcaattatgctgatctcgaggcattcaccgaagagaaaaaaagatccctacttgctaaaagacatggtaaaggggctgatttcctgagagcagttgatgagataattgaagtttatgattctctaaaggatataggtagcaacaaggttgacttgcctgccgaagaagtaaagccaggtgtagaaaagtttgctgaaaataatagccgcatggatactgaagatctggtcagtagctcctatatgcacaatgatagaaagatagaagatcattatgtcactaccaggagtcatgacatggtcaattctgacaggccttcagttgacgagcgatgtgttgtaaattctgctcctgatgagcctattgaaaatgtatccatccttgatgaaatgagggatatttctttgcgtactaattcattttcaaataagcaaagggatgcacagccacaaaattgctacacacgtactagggttccatctctgcggaagtcaagaagttcattaagtctggaatcaagaaaggctcaaggttctggtaatttttttgatcataccaatttggcttctattaatttggttcctggtgaacataaggaaccttctcatcataggcatgaagatgacaaagctaactcaagttctgtttctacatcagataatgtctggttgcattctggtgaaggcacttccaaccaacctgtaactttgggggctagtaacggcaacagaatgttgaatactcctgctgaagtggatagtactagtaaccgtgaagcatctgaaaatggaactacagagacagaactgaaatcaaatggcacatcagatcttcccatgaacacagcagtaaatttcaagagaaaaagaaaatcagatagaaaacctggacctcattatagagattgtacaacaccaaataaagatgaccaattatgtgctgagtacagtgaaatccttccagattctccgaattcaaagaatgaagtaagcaagtcagatggagatgagcacttgccattggtcaaaagggcaagggtccgaatgggaaggtctcagttggaggattcaccagttgatgaaattgatgtttctaataagaagccagagcttgcaacagccttggaccaatgtgataggaatggtaaacctgcaagtcccgccaatgattactcagctgatcaggtgtctgcagtcgtaagttctgctcctaatctgtcctgcaaattggacacaactatcttgtcaaaggaaggtcatcttccttggaagaataaagaataccatccaaaaattttagcattagatgtggaagctgctttgcctccttcaaaacgcctgcatcgcgccttagaagcgatgtctgctaatgttgctgagaataccaagaatatacctgaagtgacaggaccaaatgaaatgactctaaatggctctttgttgacagcaagcagcctttctaataaatctgcagatgcagtggtcacagtatctaatagacctgtaatagttcaaagccctgaaccttctttagacacacagtttgtgcataacccatcaggcaaatgtacctcagaatcaattctacaaaataacagcattcctgattctgcttcagttccttcaaaagaaaatgatcatatcgtgttaaaaggtgatatttgtgaagaaaccctcatggatactaaaactgctaatggttcttgggattgtagtgaactaaataatgattcctgtgggaaaacttcagccctttgcatgaaattgaatcggcctgcacttaatgttacacaagccacatctgtacctgaccgattatcttcgtctttggagaaagccagtgaaaatgtggccgcaagtggtgtcaaagagacaaaaacatttggctcagctgtttgtgatgttgacagaagtgcagaaccaattgaccgttcaaacaacaatgtgacgagcaacacaatgcgacatagtgagactattgtagcggattcagtgaacaatgtgggggatacagcaagcaactcttcactggctactaaatcatccagtatacaatctgatgcagacacccggacgtctgaattgcatacattctcatctttggcattgaaagaactgaaccatagaaaaattaaagacaggagcacttctccagattcaatgccaatgaaagaacttatagctgttgcacaagctagaaggttttctcgatcaacttcctttccagataacttcctaaatgccaagtatattcctgaaacatcaataaatataccttctaaggaaggcccacacaggcagttgtcaccctcaaatcggataatcaggtctacttctggaaatgataatgttaattctaggagtccgtttgataatattcagcagaagaaattagcagcacatggagccaatgcagcgcgaaggtctttcaaagatttcctcagtacattgacaagaaccaaagaaagtatatcgcgcgcgacacgtcttgctatggaatgtgctaaatttggcattgctggtgaggcaattgacattatcgttgaacatctggaaaaggaatcaaatttgtataagagggtggatctcttctttcttgtagattcaataacacaatgctcccgcaatcagaaaggcggagctggagatgtatatccctctctcattcaggcagttctacctcgaatactctatgctgctgcacctcctggaaactcagcttgggagaatcgaaagcaatgtctcaaggttttgaaactttggcttgaaaggaaaacactttcagaatatatcatccgtcaccatattagagaaattgagactatcaacgaggcatcatttggaagttctcgccgtccttcaagaacagagagagctctaaatgaccctttgcgtgacaatgaaggaatgcttgttgatgagtatgggagtaatgctggttttcagctacccaacttaatttgcacaaaagtacttgaagaagaggaagaaaactcttctgaaggcaggagcttgagctttgaagctgttacacctgaacaggatgccccatataatgatgacaatgaagaatctcaaatgcctgttgagaagcatcaccatattctggaagaggttgatggtgagcttgagatggaggatgtagctccaccatctgatattggggcaaccaccaagtgccaaccagagcaaagtgacaccaatcgtgcaccatctgaccaacgcccttcagatgctggccctccacttcctgtggaccggcctccatctcctccgccattgccatcatctcctccacctgtccccgttcctcagagtgcacagatgcagcctaaattacaaatggcatctgatcccatggcgccacatcctcaaagagctacatatagtgttcaaagtcaacaacagcattctattgcagagcacccaggtaacatgaattcttctgttgcaccattgccacccccaccgtttaacagttcaggatatggagggcaacaaaatcagataccacctcccccaccaatggcaccactcaatcctcctggtccccatggcagtttccctgctcccccagcaccttaccatgggaacaactatcatcggcctccaaccacatccatgcctaacgagggatatcatcagcaaccaccaccccctccaccgcctccaaatcaattcccttctgtgccaccagaacaccaacataggccacatcactggggtaataactgtccaccgtatcccgagagatatcggtacaatggacatgatcgaggtaatcacagacatgatagaaggcatcatggacatgacagacaacaccattatgatgatagaggataccactacgatgatagaggatatcactatgatgatagaggccattactttgatgatagaagacatcattttgacgatagaggacatcactttgatgagagagctattagggggccaatgcacaatgatgccgctgaccagggaagatattcttttcctccaggtcctcctcggattcctgaccattttgaagctccaccagccccaatgcactatgggcgaccatcagatcctccgccaaggccttgtgcaggctggtctaggccgcctaggatatctgataactattctccctcgagacattctgtggagcctccagtttcacatacagctggaggtcatggtggatggagacctagataacctttttcggtatcgaagcggtgctctgatgctttccttggtctgtgggggcttaacctgtgggagagtctgtctggtgtctctgcttcaggttgaaggcacccacggaggtggagcactccaggaaagtgggagctggtacctgcctccttgtacagatgtatctcatggattctacggcggtcgggctgcctgaactgctgt

SEQ ID NO: 153494 - DNA, 360 bp, Zea Mays
ggtacaaaactcatcccatacccatccccattcgggttttgggtccccaatgggtcctcatccccaattaagggataactaggtactaacatgtagcacaaacaatctagatttcagacatcactatatcggcaaacactcatccatgaaccatgatccatgttgcctttgttgggctaggacctgggcctggtgcgctgccgtgctgggcttggtgtccggctcggcctcaactcattcatacagacacgacaggtgtacacgtatgaaatacccatgggtaatcgggttcggattattgcttcccaaacccatacccgtttacccaatggttggagattttgtcccatatccataccc

SEQ ID NO: 153495 - DNA, 3762 bp, Zea Mays
cggacgatcgcctttcacgatggctcgccgacgccgccgtgtcttccgcggcagggtgcccccggacctccaccgggcctacggcgcacttgcacgcactctcggccacgccgtcctctcactcatcccgccgccgacgcaggcgggcacaccctgctctgcctgccgcggacgcggaggcgccggttgcctcgcgtgccgccgctgggagtacctcctccgcgatggtgacccggtcgcgtaccgcagcctcatcacccgcgctgtctgcgccgtcgcgccgtccgggtctgcaaccccgccgccgctgtacacgccggggaatggcgggcactcacaggccaagctcgttggggtggcgatcaagttgatgatgatggatcgggcgtgtacaacaacgaacgtcctctccagcggttgccgtgcgggtggccaaactacttgtgttattgagcttgtttcttcttcatcttgggacattctcttgcataggattggggatttactcatgtgctatattctaaggcattcatcaatatttttgcctgttaagaagaatgttttttttcaagtaactggcctcccgctcaatgatttcctgcaaaagcctatgtttgcgagtgcggcaaagaatcaacaaccccaatccacgaaaggaaaatacttgtgctatctgtgccagaacccagagaggtcacaaatcatttatggaggctatgccaataattccaaagttgcatgttcagaacttcctttgactaatggaccaataaagtgttccaatttagacaatcaaaattctaggaaaagaaaaaggctgtacaaatggcaacgcctcaaaaaacagaagcagatttttcctagttccgaggacaaatcattaactagtcagagtgaaataagcaccaatgggtttggtgtccatgatgttttattggaggacttatgtgctacagtgaaggataaatcacagtttttggaaccgacagtagataatgattccttagcaatgaatattagaacttcccagtgtaacagtacatcaagaattcaatctacatccccgcaagttggacttcccaatttcatgcatctcaataatggtctcatctgcttcaattgcttaatgttgaattcctccaaacgtgtctcagtagatttgcttatatcaagacatactatcttctacaatagaaagacttcctataacgtcttccatggcaaccacatattaaacaaaaggaaaataccagatgcattatcacttataatacatatatttggattcaagggatgctgcgcaaagttattgaaatgcaactgccatgtgtctactacaacaaattctaattgcatgtgtctttcgctgcctaaactaatgaataagctcatcagaaattctaagcgctgccagtataggaaactatttctgaagcattgtcctgtcaattccaagtgtgcagctgatgttgccaagaaccataataacaaggcacactttttaattggaggaaaatcggcatactatgatcagtcttatgttcaattggaggcttacagtacacatcaacaagtagtttcattcatctgggcagtgttgacacgaattatacctgagccgttgcttggaaactctagcagcaagagatctttaaggataaacatttggaaatttataaagttgcgtaggtttgaatcattttgcttgagcgattgtattggtgagctgaaagtatcacattattcttggttatcaaatattggattttctgattgcttttgctctgctctaatggagaaagaaatttggtcatcaaatggttccgaggaggagaaacttcaaaatcttctgcgttgttggattagttggatgttttctgatatagtgataccattagtccagtcatatttttatgttacagaaagggaatctaggcgatatgatgttttatattatccaaagacagtttggagaaacttgactagtacagctattgcttccctaaacagacaaaacttcaggattttgcgtggtacatccaggaaagaagcaatccagtcatgctatttttcaacagtgaggttcattccaaaagcaaaagatatgagaccattagtaaatctcagagctcaatcaaaaaatgccctcctcaataattgtcacctgattataaacaaagtaaaggatgagaatccagacaagtttggttcttctgtttttgattacaataatgtgcatcaaaatatctggcattttatttcttcagtaagaagtcacctgaaggaaaaaataaagatatatatagttgttgccgatgtatcgaaggcattcgattgcattactcatgatatgttactgaaagttgtggatgatgcattgaaatgtgatgactatgttctgaggaaatgcaaaaaagtagtttgcaactggtctaagaatgccatctaccgtttcgattcaaatgtttctatcagcaacggtgataatgtatgtgattttttgattcagttatcatcaaggggtggcattttagtcgaccagggaaaaagttgcaagatacggaagaaagagattcaatgtttcctttccaagcaagtgaagtgcaacattttgaagattgggcaaaacttctactcacaacgagtaggcatcattcaaggaaacaagttatctcccaacctttgttccctgtactttggtcaccttgaaaattctgagctattgaaatctcttcatgataacaagattgattcagaaaaggatgttttaacacctagaagtttattaatgaggttcattgacgatttcatattcatatctttctccaaggagcaagctctaaatttcttcaataggatgagaagagggtttgtcaactacaactgctacatgaatgacagcaaatatggtttcaacttcgaggttgcaaacagtgaacattgtagtaataggatctacaagggtgatgatggattctctttcataccatggagtggcttgcttataaattgtgaaactttggaaattcaagctgattatacaaggtatctggacatccatatttcctccaccatcactgctaagatgcattcttcagcgaagtaccttgagagcaagctgtgtcattacatgcgtccgaagtgtcatcccattttctttgattctgtgatcaactcaccaggcacagtaagactgaacatatatcaaaatttcctcttatgcgcaatgaagtttcactgttatttccggagcatgcctgatcccggtatcatgaaaccggagctactgcatataattaagagaacgttcagatatatgcatagcctcgtcgccaaacggatgcacgaagcggaactgcaatacgacgtgcgcccagttctgaagcttaggcgaaaggaaaccatgtggcttggcctgtcagcgtaccttcgagtgcttcagaaaaagcaatcacgttacagtgaattgttggcgtcgctgagagaagaaattgggagatgtggtcatctggaccgtcacaacgatgctttgcgctacgctgtagatgactctcactcgtcagtgttctggaagtttaagttctagaaggaaactgggagagtagaagattgctggagctagtgtcttttgtgaacaggaacctttggtgtccaagtgacagacgagtggggtcaaacatggtcgagacttttgttttgatatatactcccgccatttcgtaatgggcattcatggccttggatctatccgtttcacaatgc

SEQ ID NO: 153496 - DNA, 1874 bp, Zea Mays
cagagtccaaccacgcctcgaaatataaccccccgccacaccgtacgagacgagggcagatatggaagctgatgctgctgctgccagtggcggcctggccctgctgcccgccgtgctgctcctcgtggcgctctccaccctcgtcttctccacatggagcaaccgcaacagcaggctgcccccgagcccgatggccctcccgctgatcggacacctgcacctcatccgcccgccgccgcacagggccttcgaccgcatcctggcacgctacgggccgctcgtctacctccgcctcgggccctccacgcactgcgtcgtcgcgggcaccgcggacgccgcgcgggacctcctcaagcacgaggccagcatcccggagcggccgctcacggccgtcacgcgccacctcgcctacgacgacgccggcttcgccttcgcgccctacggcccgcactggcgcttcatgaagcgcctctgcatgtcggagctgctgggcccgcggaccgtggaccagctgcgccccgtgcgggaggccgagctggcggccgtgctggaggcggcgcgccaggcggccgccgctcgggagcccatcgacgtcagccgccacctcatcagcatgtccaacaacgccatcatgcgcatggtggccagcgcgctgccgggccacatgacggaggcggccagggactgcgccaagcacgtcgccgagctcgtgggggccttcaacgtcgaggactacgtcggcctctgccgcggctgggacctgcaggggctcacgcggaggacgcgcgaggtgcgtgacaagttcgacgcgctgctggagatcatgatcacgggcaaggaggagagtcgccgtcgtcgccacgccaccaccgacaccggcggcggcaccaaggacctgctggacatcctcatggacgcggcggaggacgccaacgccgaggtcaggctcaccagggagaacatcaaggcgttcgtcctcgacatcttcacggccggctccgacaccaccgccaccagcgtggagtggatgctggcgctgctcatcaaccacccggcctgcatggacaagctgcgcgcggagctggacgccgtggtgggcgcgtcgcgcctggtcggggagcaggacgtcccgcgccttccctacctgcaggccgtcttcaaggagacgctgcggctgcagccccccgcggtgttcgctcagcgggagaccatcgagccggtccacgtccgcggctacgtcatcccgcccaagacctccgtcttcttcaacatcttctccatcggccgcgacccgggctgctgggaggacccgctccagttccggcccgagcgcttcatgcccggcggcgccggcgccggcgtggaccccaaggggcagcacatgcagctcatgccgtttggaagcggccgccgcgcctgccccggcatgggcctagccatgcaggccgtgccggccttcctcgccgcgctggtgcagtgcttccactgggaggtgcccatcccgccgggccaatccactgcgccgcccttggacatggaggaggcagcggggctcgtcaccgcccggaagaaccatctcctcctcatccccacaccgcgcctcaatccgctaccggcaagagcggctacgtagttagtacctgcgaatccagtctcagttcatcggtccatccaaattcagacgtgtcctccattattgcaagccgcgcactaagatcatatttctgtttgtttatatttctcggtcacacatacgtttgcaatcaccttcaggaaaagtgacctttgtacccgttcgatgttggtacatccagatccgtgtgctcaggaattacgtattactactatatatatactggtccgtttgagtccta

SEQ ID NO: 153497 - DNA, 112 bp, Zea Mays
gaaattgggtatgggggtttcattgtagtagtttgttgctaaaacttcatgataaatggagaaccttcataaataaactcagatctaaatttatacaactcatatcattttg

SEQ ID NO: 153498 - DNA, 2897 bp, Zea Mays
atgctcccgataacaacaacaactccgttcggcaggcggtccaaatcgccgccgctccgatccatcatccacgctcgcattatctatcccttctgattaaaattaatctccgtgacgatatcgcactgattccttcttcctcgttcccgctgagcggtcagcggctgcagagtgcagactgagtgatcgctacttctacgcgcgccgcgagcaccaccgaacaagtagcaaccggggtggattgagcgtggtcccaacacgggccagaattccgccatgatgaggccatcgccgccgcggcgcctatccctcgccgcccccttcctcatcctcctgctgctcacgctcctctcgccgcctcgagcggcggcggcgggcggctcatccgcgtgggtggcgctccgcggggcggcgggcagccgaaaggcgtctccggcggagcaggaaggggcggccgcggggctgctgcgccggctgctccctttccactctggcagcttcagcttccagatcgactccaagggcggcgtctgcggtcaatcaagctgcttcaggataagcaacgtcgttgacggctcgggcaaaggtggagcggagattctgatccagggaaccacagctgttgagcttgcatctggcctacattggtatttgaaatactggtgtggcgcacatatctcctgggacaagactgggggtgcccagctggcttcgattccttctcctggatctctgccacgggtgcagggcaagggagtcaagattgagcgtcctgttccgtggaattactatcagaatgtcgtcacttctagttactcttttgtgtggtgggactggaaaagatgggagaaagaaattgactggatggcgcttcaaggaattaacttgcctttagcatttactggacaggaatctatctggcagaaggtttttaagagttttaatgttaccgacagagatttagatgatttttttggtggaccagctttccttgcttgggctagaatggggaacttgcatgggtggggtggaccactgtcacaaaactggttggatcaacaattggcattgcagaagaaaattctatcccggatgattgagcttgggatggtccctgttcttccatcgttctcaggaaatgtcccagctattttcgcaaaattatttccgtcagccaacattacgcgacttggtgattggaatacagttgatgctaatcctaagtggtgttgcacttatcttcttgatccttctgattcattgtttatagatgtggggcaggcttttatcaggcaacagataaaagagtacggcgatgtaaccaacatctataactgtgacacattcaatgagaatactccaccaacagatgaaccggcatatatttcatcacttggttctgctatctatgaagcaatgtcccgaggtaacaagaatgcagtatggttaatgcagggttggttattctactcagatgctgcattctggaaggagccacaaatgaaagcactacttcactctgttccaattggtaagatgatagttctcgatttatttgctgatgtcaagcccatttggaaagtgtcctctcagttttacggcgtaccatacatctggtgcatgttacacaactttggtgggaacattgaaatgtatggcatacttgattcaatttcatctggccccattgatgcccgtacaagttacaattcaacaatgattggcgttggcatgtgcatggagggaatagagcacaatccagttgtttatgaacttatgtctgaaatggcatttcataataagaaggttgaggttgaggattggctaaaaacatactcctgtaggagatatggtcaagcaaatgctgacatagagaaagcttggagatatttgtatcatacaatatacaattgcactgatgggattgcggaccataataaagactatatagttgaatttccagacataagtcccagctcagttacttatcaggtttctaaacgaaggggcatgtcaattacgagaaaccataggaggtttttcttaagcgaggtgtctggaatcctaccgcagccgcatctgtggtactctacgaaggaggccgtcaaagcccttgaactatttcttgatgcaggaagcacattttcagaaagtctcacgtataggtatgaccttgtcgacctaactaggcagtgcctatccaaactagcgaatgaagtttaccttgacgcgataagtttgtaccaaaagaaagattcacatggcctgaatgctcacgcgaggaaatttcttgagatcatcgtggatatcgatacgttactagctgctgatgataactttctgctgggcccctggctggaaagtgcaaaaagccttgctataactgaaaaggaacgccagcagtacgagtggaacgccagaacacaggtgacgatgtggtatgacaacacggagaccgagcagagtaaactgcatgactacgccaataagttttggagcgggctgctgaagagctactaccttccaagggcgtcaaagtacttcgcctacttaacgaggagcctgcaagagaaccggagcttccagctggaggagtggaggaaggactggatctcgtattccaacgagtggcagtccggaaaggaggtgtacgccgtgaaggccacgggtgatgctttggcgattgccaggtcactgtacagaaaatacttgaggccttgagctagtgctagtcaatgcacggatgtgaccattagaataagtggattccacatctctctccatcaatttaagtttaattgatacatataatttaatatatggtgtcagtcagatatctttgagttttaaatcttgattagcacaattaaataaaatagatattgctcgttcctatt

SEQ ID NO: 153499 - DNA, 1190 bp, Zea Mays
aaggtgaaagtcgatgccagtagtagctacagcagttaatgcgaaaaactgaagcatgccacgcctgaccgacccccttctcgcctaatgtccgtgccccgactgcgtctccgccccgactcacccgcagcctgtctctgctcggcggcggccgtctcgactgcgggagaggggagcgccccttcgccgatctgatcgggagctgcaggccaaacggcgaggcgagcccatcaggaaccaccatggcagcggcagccgccgactccgatcccgccgcagctgtggccgacatgtccacctgcgcccattgtcaacgagagatcccttcttcgaacatcgacttgcattctgtacattgtgcccgtaacctccaaaagtgccagcactgtggagaaatgattcctaggaaacttatggatgaacactatgatgcaaaccatgccccgatcagttgctctctttgcaaagaaacaatagaacgtgtgaggtgggatcttcataaaggcgaaaagtgcccacaaagaatcgtcgcttgtgaatattgcgagtttgaattgcctgcagttgatctccatgagcatcaggatgtatgtggaaaccgaacagaactttgccaaacatgcaggaagtatattagattgtgtgaatggatagggcacgaaatacagtgccatacaagctcaaatggttctgcagacacatccagtgccagagcaattccagagagagagctacgaccgccgccgccggtgcggccggcacgaccagcacgtcctgctcatgcttcaccacacaagcggctcctcttcacaatcgctgtcactggaatagcagttatggttggctccatactgttccaaagggacgagagtttctagctccagtggccatggacttactctgtatgtcatgttgtttcttgaccgggagagtcatgccacaggaggtgtatttatgtataataactcctcgaatcagtgcataaatcgagtttgtttgagagcatagccccaggcgtgggtttgtggaaaatgcaaagtaaccgtggataaatgcgttcgcccttggcagttctggaacttctgtttgttctgacatcggacttgcatttgttcgtctgtaaagtcgagatgagttatacaatcggggtatcatatctggaaagcgacacgatgcagcagttgttaata

SEQ ID NO: 153500 - DNA, 1054 bp, Zea Mays
aaggtgaaagtcgatgccagtagtagctacagcagttaatgcgaaaaactgaagcatgccacgcctgaccgacccccttctcgcctaatgtccgtgccccgactgcgtctccgccccgactcacccgcagcctgtctctgctcggcggcggccgtctcgactgcgggagaggggagcgccccttcgccgatctgatcgggagctgcaggccaaacggcgaggcgagcccatcaggaaccaccatggcagcggcagccgccgactccgatcccgccgcagctgtggccgacatgtccacctgcgcccattgatcagttgctctctttgcaaagaaacaatagaacgtgtgaggtgggatcttcataaaggcgaaaagtgcccacaaagaatcgtcgcttgtgaatattgcgagtttgaattgcctgcagttgatctccatgagcatcaggatgtatgtggaaaccgaacagaactttgccaaacatgcaggaagtatattagattgtgtgaatggatagggcacgaaatacagtgccatacaagctcaaatggttctgcagacacatccagtgccagagcaattccagagagagagctacgaccgccgccgccggtgcggccggcacgaccagcacgtcctgctcatgcttcaccacacaagcggctcctcttcacaatcgctgtcactggaatagcagttatggttggctccatactgttccaaagggacgagagtttctagctccagtggccatggacttactctgtatgtcatgttgtttcttgaccgggagagtcatgccacaggaggtgtatttatgtataataactcctcgaatcagtgcataaatcgagtttgtttgagagcatagccccaggcgtgggtttgtggaaaatgcaaagtaaccgtggataaatgcgttcgcccttggcagttctggaacttctgtttgttctgacatcggacttgcatttgttcgtctgtaaagtcgagatgagttatacaatcggggtatcatatctggaaagcgacacgatgcagcagttgttaata

SEQ ID NO: 153501 - DNA, 1142 bp, Zea Mays
gaaaaactgaagcatgccacgcctgaccgacccccttctcgcctaatgtccgtgccccgactgcgtctccgccccgactcacccgcagcctgtctctgctcggcggcggccgtctcgactgcgggagaggggagcgccccttcgccgatctgatcgggagctgcaggccaaacggcgaggcgagcccatcaggaaccaccatggcagcggcagccgccgactccgatcccgccgcagctgtggccgacatgtccacctgcgcccattgtcaacgagagatcccttcttcgaacatcgacttgcattctgtacattgtgcccgtaacctccaaaagtgccagcactgtggagaaatgattcctaggaaacttatggatgaacactatgatgcaaaccatgccccgatcagttgctctctttgcaaagaaacaatagaacgtgtgaggtgggatcttcataaaggcgaaaagtgcccacaaagaatcgtcgcttgtgaatattgcgagtttgaattgcctgcagttgatctccatgagcatcaggatgtatgtggaaaccgaacagaactttgccaaacatgcaggaagtatattagattgtgtgaatggatagggcacgaaatacagtgccatacaagctcaaatggttctgcagacacatccagagcaattccagagagagagctacgaccgccgccgccggtgcggccggcacgaccagcacgtcctgctcatgcttcaccacacaagcggctcctcttcacaatcgctgtcactggaatagcagttatggttggctccatactgttccaaagggacgagagtttctagctccagtggccatggacttactctgtatgtcatgttgtttcttgaccgggagagtcatgccacaggaggtgtatttatgtataataactcctcgaatcagtgcataaatcgagtttgtttgagagcatagccccaggcgtgggtttgtggaaaatgcaaagtaaccgtggataaatgcgttcgcccttggcagttctggaacttctgtttgttctgacatcggacttgcatttgttcgtctgtaaagtcgagatgagttatacaatcggggtatcatatctggaaagcgacacgatgcagcagttgttaata

SEQ ID NO: 153502 - DNA, 723 bp, Zea Mays
atgggcaataatggctgcctcctgctcgcgccgcgctgcttcctgctgtcgtgtcggcggcggaaggcgcggctggtgctgtggggcggggagacccgggcggcccggcacggcaagctggcggggcaggtgatgatggacgtggcgggcaccgtggtgtgccgcgccgacgccttctacctggggcgcccggcgcccgtgctggccatcgaggacaggctcctgggcggcgccacctacctggtgctccccgtggaccgcctcccgcagggctacgacgcgctgaccgccgcgtccctggccgcgctctcctacggcagcaggcggcccggaggcgggtccggctcggcgtcgtcgccgtccatcgcgggaggcgcccggagccccttcgagtacgtcaagggcgacgacgggcgcaccgtcatcaaggtcacgcccgagttcctcgtcggggccatcacggcggcggacaccaaggaagccggcgaggcgtgcgccggcggggcgctgtgcagcacgcccgagctgcggaagcactacgagcagctggtgggcgccgccaggggccgcgcgtggtcgccgcgcctcgacaccatcaaggagcgcaagggcaggagggccctcgccctcgccgcggtcgtcagccccggcaggctgtcgccggtggccgtcaccaggctcctcggcctggacgccgccaaagcagaaaccaccaccagatag

SEQ ID NO: 153503 - DNA, 1069 bp, Zea Mays
aatccaacccatccatctactagcctctcataggttctggcacgccgaaaactccgtataaaacacacaccgccctcctacggatcaaaccacccctcggaaaaccccaaaaaagcgtcagaaaaagaagagagagctgggggatggacacgcacgtcggcaaattaatcgactcggtgggctccatcttccgcggcagcgacgtcctgccctggtgcgatcccgacatcatcgccggtttcgagagtgaggttgctgaggctgcaaatgaagaacagaaaaccgagagcctgatgaggctctcctgggcgcttgttcactctagacagcctgaagatgtcaaccggggcatcggaatgcttgaagcttcattggacaggtctagcagcccagaggaaacaagggagaagctctacttgttagctgttggtcgttacagaactggggattatacaagaagccgacagcttttggaaagatgcttagagatccaacatgactggagacaagccataactttgcaaaggctcgttgaagaaaaaaccaaaagagatggtatgattggcatggctatcatcacaggcgcctttggagttgtgggtcttgttgctggtggtataattgctgcggcttcttcgtcatccaggaagagatgaggatatcttctctgttgaagtgaataagaaaaaggcgggcaaaagcttggtggtgggtgacagtgctcatcattttttgctccgtgtgaaggggtgctcacttgtcttttttcgcgtgagagaccaactttgtattgcgtccaaacgagagatatatgtattgttaaacagtagaggtcgaggctgccgaacattctgtttttactaccaaccttgtattgcgttcaaatgagatatatgtgttgtataacatgtttttttcaatgcacggaggagttccttggatactctcaagaagaggtcgggcagcctgagcacccagccagctcggttccctgcagacacaacatgctgtgagctttgtcatccgctagttcgtgtttatgaactaaaacacgacaaataaaaaagaa

SEQ ID NO: 153504 - DNA, 1651 bp, Zea Mays
aatccaacccatccatctactagcctctcataggttctggcacgccgaaaactccgtataaaacacacaccgccctcctacggatcaaaccacccctcggaaaaccccaaaaaagcgtcagaaaaagaagagagagctgggggatggacacgcacgtcggcaaattaatcgactcggtgggctccatcttccgcggcagcgacgtcctgccctggtgcgatcccgacatcatcgccgtaagcctctccttcccctcctcttctcgccgagataactgcggcctccgctgccggctgcctcccagggaggcctgttgatgaatgccgccaatccgaccgtttccttcttccgccttcttgtcgctctggtgggatgcgcacgagaggcccacgaatcggcacggggttcgctgagtcgttgctgcgctgggaattgtgtcgcaggttccttgtagtcacggggaattcactagctcaccttgccggtcggttgaaccaacaatggatcacctcccattccaccgtggcgctactgcggtcattaagcaaaacaaaccaattatccgattgcatcccgttatctggtcaaaccgtgtttgatcacgctcacgcacgcctaatcgtaatcgttgccacacgttctttatgatcaattcctttttatcagggtttcgagagtgaggttgctgaggctgcaaatgaagaacagaaaaccgagagcctgatgaggctctcctgggcgcttgttcactctagacagcctgaagatgtcaaccggggcatcggaatgcttgaagcttcattggacaggtctagcagcccagaggaaacaagggagaagctctacttgttagctgttggtcgttacagaactggggattatacaagaagccgacagcttttggaaagatgcttagaggtttgatcaggaaatgtgttatctgttgttattcctctgatgtgaccttccggttttgttttagtctcaggccttagtcctgtactgtcaagcaaggcacccctgaatttgattgcctgcatgttgaacaaaacatttcatgttttcttcagatccaacatgactggagacaagccataactttgcaaaggctcgttgaagaaaaaaccaaaagagatggtatgattggcatggctatcatcacaggcgcctttggagttgtgggtcttgttgctggtggtataattgctgcggcttcttcgtcatccaggaagagatgaggatatcttctctgttgaagtgaataagaaaaaggcgggcaaaagcttggtggtgggtgacagtgctcatcattttttgctccgtgtgaaggggtgctcacttgtcttttttcgcgtgagagaccaactttgtattgcgtccaaacgagagatatatgtattgttaaacagtagaggtcgaggctgccgaacattctgtttttactaccaaccttgtattgcgttcaaatgagatatatgtgttgtataacatgtttttttcaatgcacggaggagttccttggatactctcaagaagaggtcgggcagcctgagcacccagccagctcggttccctgcagacacaacatgctgtgagctttgtcatccgctagttcgtgtttatgaactaaaacacgacaaataaaaaagaa

SEQ ID NO: 153505 - DNA, 1496 bp, Zea Mays
ccaacccatccatctactagcctctcataggttctggcacgccgaaaactccgtataaaacacacaccgccctcctacggatcaaaccacccctcggaaaaccccaaaaaagcgtcagaaaaagaagagagagctgggggatggacacgcacgtcggcaaattaatcgactcggtgggctccatcttccgcggcagcgacgtcctgccctggtgcgatcccgacatcatcgccgtaagcctctccttcccctcctcttctcgccgagataactgcggcctccgctgccggctgcctcccagggaggcctgttgatgaatgccgccaatccgaccgtttccttcttccgccttcttgtcgctctggtgggatgcgcacgagaggcccacgaatcggcacggggttcgctgagtcgttgctgcgctgggaattgtgtcgcaggttccttgtagtcacggggaattcactagctcaccttgccggtcggttgaaccaacaatggatcacctcccattccaccgtggcgctactgcggtcattaagcaaaacaaaccaattatccgattgcatcccgttatctggtcaaaccgtgtttgatcacgctcacgcacgcctaatcgtaatcgttgccacacgttctttatgatcaattcctttttatcagggtttcgagagtgaggttgctgaggctgcaaatgaagaacagaaaaccgagagcctgatgaggctctcctgggcgcttgttcactctagacagcctgaagatgtcaaccggggcatcggaatgcttgaagcttcattggacaggtctagcagcccagaggaaacaagggagaagctctacttgttagctgttggtcgttacagaactggggattatacaagaagccgacagcttttggaaagatgcttagagatccaacatgactggagacaagccataactttgcaaaggctcgttgaagaaaaaaccaaaagagatggtatgattggcatggctatcatcacaggcgcctttggagttgtgggtcttgttgctggtggtataattgctgcggcttcttcgtcatccaggaagagatgaggatatcttctctgttgaagtgaataagaaaaaggcgggcaaaagcttggtggtgggtgacagtgctcatcattttttgctccgtgtgaaggggtgctcacttgtcttttttcgcgtgagagaccaactttgtattgcgtccaaacgagagatatatgtattgttaaacagtagaggtcgaggctgccgaacattctgtttttactaccaaccttgtattgcgttcaaatgagatatatgtgttgtataacatgtttttttcaatgcacggaggagttccttggatactctcaagaagaggtcgggcagcctgagcacccagccagctcggttccctgcagacacaacatgctgtgagctttgtcatccgctagttcgtgtttatgaactaaaacacgacaaataaaaaagaa

SEQ ID NO: 153506 - DNA, 1089 bp, Zea Mays
cttgactccttgagcccagtgcccagacggcttgcgcttggcctcacctcctcttctcgtcgagcggataacagaaccgatgtgcaagctccggccggagcgtcaggataagaaccgcgcgccggcaggcagctgctcctgcgactgcgagcgcccgtccaatggcgtccctctccccttccctccacctcccttgcaattcaagaactggcttccttggaaagacacgtgggattcgtccttgtgttttccctgctggaagagttggatttgtcagaacagtagtggaatgcaaggaatctagaattggaaagcagcccatcgaagttccatcaaatgttactctcacattagaagagcagtttgtcaaagctaagggtccgctgggggagttatctctgagctttccaggtgacttgaagatcgtgaaagaagaatccggtaacctgagagtttataagactgcagagaccaagagggcgaaccagatgcacggacttttcagaacgttgacagacaacatcatcgtcggtgtgtcaaaaggattcgacaagaagcttcagttagtaggtgtcgggtaccgtgcggcggtggagggcaacgatctcgtgatgaacctgggattctcccaccctgttcggatggccattcccgaaggcctggcggtcaaggtggaagagaacacaaggatcatcgtgagcggctacgacaagagcgcgatcggtcagttcgctgctaccataaagaagtggaggccacctgagccatacaaggggaagggtatcagatacatggatgaagttgtcagaaggaaggaaggaaaagctgggaagaagaaatagaagtgtttgttttttgtttgtcctttccatgcttcatttcattttcccgctgtaacggtcctcgtctgctatgaccgaacccgagaaaaaaagtattgttctgtggctgtgctgatcatgccatatttatgtgcaccttgagcatcccagtatcccactgtaatggtttccatgtacaccaagcggagccgtttgacccccgtttggttggtgaagacgcaaaactgctcgatgagcgctaccgcta

SEQ ID NO: 153507 - DNA, 1541 bp, Zea Mays
acccgcactggccccaccgggcggcagacgcctggctgggctgcggccaagtggccacctcctcgcgtccggcctggcgtccccatgcacgcccggcctcgccttcccttccccgatatctcttcgtctcgccgccgccgcgcgcgcactctcgtgtgacgtgtcccagcagtccgtccagtccctggcttctctcccccttgttgttcttggctccgcgatggcggtgggttgcttcaaccccgtgctctcgccgcttgttccttcgccgccgggtaggcgcgtccgagcggcgctgcggtgccggtggcatcgtcacccgctgaccgcggtctccctccggcggctcccgtgcggcgcggcagctggtcgtggcacgcggcggctcgcggcggcggcagagtcgcaggccgtgcaggagcagccggcgcgggcggaagaggccggcggggcgggtgccgctgaggcgtcctccaagctggttctggtcgttggcggaaccggcggcgtggggcagttggttgtagcatcattgctgagcaggaacatcaagtcaaggttgctcctaagagatccagaaaaggcgtcgtccctgtttggcaagcaggatgagagtgtactacaggtttacaaagcggacacaagaaaccctaatgatttggatccacagatgtttgagggagttacgcatgtgatatgttgtactggaactacagcatttccgtctaagcgctgggatggagataacactccagaacgtgtagattgggatggcatcagaaatcttgtcagtgccttgccacagacagtcaagagactggttcttgtgtcatccattggtgttacaaaatacaatgagataccatggagcatcatgaatctctttggtgtgcttaagtacaagaagatgggagaagactttgtctgcaattcagggataccattcacgattattagggctggaagattgacagacgggccctacacttcgtatgatcttaatacacttcttaaagctacagctggagagcgacgagcagtagtcataggcaaaggtgacaagcttgtgggggaagttagcagacttgtggtagcagaagcttgtatccaagctttagatattgaatccactgaaggacaaatatatgagattaactcagttaagggtgaagggcccggaactgacccagagaaatgggaggagctattcagatctgctcggtcagactagtggcattctgcaaagcgtagtaacgtaatgtaggaatatgcatcgtaatacaatgtaatccatagagtgcagccctaattcaatagtcactgaacagtagcgatcatgtagagaatatttggtttgtgtacatagtatgagcattcatatatgacgattatacctcctaaaagtgatagtttttgttggaaagtaaaatgttcagtgttatccttatccactttcagacttgattttattttctttttctcggaatgcaatcataatttgattgttcatttcaatatatatccttatttttcaaatatgt

SEQ ID NO: 153508 - DNA, 402 bp, Zea Mays
acaccggccagagttacatatcaagatggaactcctcagacgtgcatttttgtttttttatctggttatctaactgaaatctgtgtatattctactgatatgcacacaatgttaaattcagggtgaagggcccggaactgacccagagaaatgggaggagctattcagatctgctcggtcagactagtggcattctgcaaagcgtagtaacgtaatgtaggaatatgcatcgtaatacaatgtaatccatagagtgcagccctaattcaatagtcactgaacagtagcgatcatgtagagaatatttggtttgtgtacatagtatgagcattcatatatgacgattatacctcctaaaagtgatagtttttgttggaaagtaaaatgttcagtgttatcctt

SEQ ID NO: 153509 - DNA, 639 bp, Zea Mays
cgatccctctctcgttctctcaacaaatcgacgaagtccctgaactcatttccagcctctccgcgccccaaccaccgccaccgcgtgcgagatcacaagcctccacaccgtgaccaccggcgccgctgcggcgtcctgagcaggcggcgagcctcgtgcacagggcaggctcggctcgccggggcggacgagatgagcgggcacgactccaagtacttctctaccaccaagaagggggagatccccgagctgaaggaggagctcaactcccagtacaaggacaagagaaaagatgctgtcaagaaagtgattgctgctatgactgtaggaaaagatgtctcatcattgttcactgatgttgtgaactgcatgcagactgagaacttggagctcaagaaactagtatatttgtatctcatcaactatgctaaaagtcaacctgatcttgccattcttgctgtgaacacatttgttaaggttagaaattctttttcgtaaacgcgtaggagaactgcgcaccaatatattaagaagaatatagaaaaggtcaaaaatagaccacaacaagaaaaaccaccttacggtggcaaaaaaacccggaaatatacaaaagggtccatctaaaaaagaaaagaaaga

SEQ ID NO: 153510 - DNA, 3204 bp, Zea Mays
cgatccctctctcgttctctcaacaaatcgacgaagtccctgaactcatttccagcctctccgcgccccaaccaccgccaccgcgtgcgagatcacaagcctccacaccgtgaccaccggcgccgctgcggcgtcctgagcaggcggcgagcctcgtgcacagggcaggctcggctcgccggggcggacgagatgagcgggcacgactccaagtacttctctaccaccaagaagggggagatccccgagctgaaggaggagctcaactcccagtacaaggacaagagaaaagatgctgtcaagaaagtgattgctgctatgactgtaggaaaagatgtctcatcattgttcactgatgttgtgaactgcatgcagactgagaacttggagctcaagaaactagtatatttgtatctcatcaactatgctaaaagtcaacctgatcttgccattcttgctgtgaacacatttgttaaggattcacaagacccaaacccattgattcgtgctttggctgttaggacaatgggttgtatccgtgtggacaaaatcacagagtatctctgtgatccacttcaaagatgtctcaaggatgatgatccctatgtacggaagactgcagctatttgtgttgctaaactttatgatataaatgctgagctagtagaggatagaggatttctggaggcccttaaggatttaatatctgacaataatcctatggttgttgcaaatgctgttgctgctctggcagagattcaagatagtagtgttcgtccaatctttgaaatcaccagccatacactgtcaaagcttctgacagctctgaatgaatgcacagagtggggtcaagttttcattttggattctttgtcaagatacaaagcagcagatgccagggaagctgaaaacatagtggaacgagttacaccccgtctccaacatgcaaattgtgcggttgttctttctgctgtcaagataatccttctacaaatggagctcattacgagcacggatgtagtcaggaatctctgtaagaaaatggctccccctcttgttactcttttgtcagcagagcctgaaattcagtatgtagccttgaggaacattaatctgatagttcaaaagaggcctacaatactcgctcatgagattaaggttttcttttgcaagtacaatgaccctatatatgttaagatggaaaaactggagattatgataaagcttgcctcggatcgaaatatagatcaggtgctcttggaattcaaagaatatgccacagaggttgatgttgactttgtgcggaaagccgttcgtgcgattgggagatgtgcaattaaattggagagagctgctgaaaggtgcatcagcgttttgcttgagctgattaagataaaagttaattatgttgttcaggaagctataattgttatcaaagacatcttcagacgctaccctaacacgtatgagtctatcatcgctacactttgtgaaagtctggacactttagatgaaccagaggctaaggcatccatgatttggataattggagaatatgccgaaagaattgacaatgctgatgaacttcttgagagtttcttggaaacatttcctgaagaaccagcattagttcaactgcagctgctaaccgctactgttaaattgtttcttaagaagccaactgaggggccacaacagatgatacaggctgttctcaataatgccacagttgaaacagataatcctgatttgagggacagagcttatatatactggcgacttctgtctactgatcctgaggctgcgaaagatgtagttttggcagagaaacctgtgatcagtgatgactccaaccagcttgactcatcacttcttgatgagctgctagcaaacatttctaccctttcatcagtttatcataagcccccagaatcatttgtcagccgtgtcaaggcagctcctagggctgatgatgatgagtttgctgatacagctgaaacagggtattcggagtccccatcccagggagttgatggggcgtcgccttcctctagtgctggtacttcttctaatgtacccgtgaaacagccggcggcagcatccccacctggtccagtggtaatgccagaccttttaggtgatttaatgggtatggataatgctattgtccctgttgatgaacctgcagcaccttctggccctccgctacctgtcttactgccttcgaatacaggtcaagggctgcagattagtgcacaactaacacggcgtgatggccagatatactatgatatatctttcgagaatggcacccagggtgtcctagatggatttatgattcagtttaacaagaacacatttggtcttgctgctggtgaagcacttcaggttactccactgcaaccaggccaatcaacaaggacacttttacaaatgaacacgttccagaatatcagccctggtgcaccaaactcgctattacaagttgctgtgaaaaataatcagcagccagtgtggtacttcaatgacaaaattccactgcatgttttctttggtgaagatggaaaaatggaacgagctagttttcttgaggcctggaaatctttacctgatgacaatgaatttacaaaagaattcccgggctctgtaatcagcagtatagatgctacagttgagcgccttgcagcatcaaatgtgttctttatagccaagcggaaaaatgcaaacatggatgttctgtatctgtccgcgaagatgccccgcggaatcccctttcttatagaggttacagctgcggttggtgttcctggtgtgaaatgtgcagtcaaaactccaaatagagagatggttcctctcttctttgaagctatggaggctctcaccaagtgacgccaaagttaatggatatgtggttctacaaaaatttatcagtcgatgagctgctataggtgtttggatgcggcattttttttttcacggaagcttgtgtgaattgtagtttttgtattagattacagtatttaaactgatagttcctggttccaaagtttttcgccagaaatactggagatgttcttgcctcacataatctgtacatcttaccctgttggacctggaaattttcatcttgttatgcatagcatatgaaatatgactagttttctacacggctaatgtaaactgatactacctccgttgacaaat

SEQ ID NO: 153511 - DNA, 1986 bp, Zea Mays
tggctttaccctatgatgctaatccatgttggtgcaggtgggtagacaagaacacagatggatcaatcagcgtctggagcgacgcggctgtgcgcctggccctccgtcgcggtctgttacctatatctccgcaaaggcacatggataaattttttcaaggctgaagcagttattagttgcaatctccagcataacaaattcgcgaatccgactctcgagcgtacctaccatggatccaaaaatcttagggatacccatggcctaaacttgttgctgaatccccgctgcctccacggcgtccatgccctagctatttgatgcttgcttcagcccagggttttcctccgaatcccccttctccagcctcagctcccctctccaatcgcagttgcagttgcggctgggctaggctttcgtcagcagcactttcctcccctcggctcttgacagatcgaactgcttccatcagcaattcaatcgggagatggccaccactcagttcgccatggttgaggagctggcctcgctcatcaaggacaacctgcacagcaagcatctcatcctctccaccgaggagtccctcgtcgcagccctccaggagctgcactgccgtgaagaggacgacggcgcggcggatacgatagagctccagcctgccggggcctaccaccgccttctcttgcatcgccttgctgaaatttatgggttcgcgcatgaatcggccggtgaaggcgaggatcgacatttggtcctccagcgctgccccgaaacagccatcccatctgttcttgttagtgatatgatatggaagtttgataacagcgatgatttcatgtctgttgtgctaacccgaaatgatacagattttcaaaaacctcagaaggcagatattgtccaaaaagacatttctgttaaaagctcgcgtctgaaagacaatacagactcgaaacctctgaggcagccagcagtacatcctgcagcatcattaaaggagagggaagctgcttatcgagctgctcgtgagcggatcttctctgtggatgatgccaagggaaacgataggtcatacgtgaaatgtcggcaggttcctgttgttgctcaacggatgattgcccatgcactcggtcaaaaggttcaaaataccacagaggcagttgcctccacagaaagcagaggaaaacataaacagctgccaaatgggaaaagtattccgacacatagcaggaacaacttctgcccagttacaccagataacaaagaagcggttcgaaatggtaggccaaactcagctggttgtaactcgtatcaaactccatcaagccaaagacgccacacaactaatactagagctgttactgctgaaggcttgaagaaagaacagactggagcagctaaaagaatgtttgcacatgcactgggtctgtctgcagctcgaggaagtaatggtgcgctgcccaaaccgaagtaaagatgtggatttgagaacgggtaagtggagaaggttgcccagtgcaagctcaagctcctgccgtgggatgaacctgcaacggttggtgctcttctgtgccatctactactgtggagcgatttttgtggtgctgtaggagatgaaagcggttattggttggatgttaattgttggacttggacccagagaggatatgtggcccggcgctggttcgaaaattcaagctcagatggggaaagatgttgctggatacgcattacatgccaagccaagtggaagagaaacgcccctcctgtcactcgtatggtaatatcgctctaaggttgctgcaatttgtttactctagtacgttatttagagaggcacatcctgtgccgttacttttttcctttgactatacttatataaggacgacttgctggatttgtggtcttgatttaatttgtactcttagggcttgtttagcagcaagtgtaatggacgaaattgagaagtttaaaatctcttactatttaatt

SEQ ID NO: 153512 - DNA, 889 bp, Zea Mays
agttgcaatctccagcataacaaattcgcgaatccgactctcgagcgtacctaccatggatccaaaaatcttagggatacccatggcctaaacttgttgctgaatccccgctgcctccacggcgtccatgccctagctatttgatgcttgcttcagcccagggttttcctccgaatcccccttctccagcctcagctcccctctccaatcgcagttgcagttgcggctgggctaggctttcgtcagcagcactttcctcccctcggctcttgacagatcgaactgcttccatcagcaattcaatcgggagatggccaccactcagttcgccatggttgaggagctggcctcgctcatcaaggacaacctgcacagcaagcatctcatcctctccaccgaggagtccctcgtcgcagccctccaggagctgcactgccgtgaagaggacgacggcgcggcggatacgatagagctccagcctgccggggcctaccaccgccttctcttgcatcgccttgctgaaatttatgggttcgcgcatgaatcggccggtgaaggcgaggatcgacatttggtcctccagcgctgccccgaaacagccatgtaggttgccaagcttgcttcaaataaaatctctcaccatgtcatgtcttctcgacttgtttgttgcccatcgtctttattatgcatttgcttttctattttatagaccacatattctgagtttctgacattagatcagaacccccattgtaccacgatattagtatgtttcaagtatcgttcaaccagggtttgatgcttggaccaatgcaggataaatcgaattacagccaattcatctacaaactcagacacaactttccagttgtgtatcgatatatataat

SEQ ID NO: 153513 - DNA, 115 bp, Zea Mays
ttttatatttttattagtgaatctagctcacagaaaggtgaaccaaaaaagatccttaagggtttgttcggttagctctcaatccatgtggattgagtggggttggatgggtttt

SEQ ID NO: 153514 - DNA, 2596 bp, Zea Mays
ggcccacatcttagggtgtgaatgaaaaaaaggtaactccgccggcccacaagagcccagcctgagcccataaatcttgcccccgctgccgcgcgccaacaccgtcactcttgttgatcctaaaaccctaacccctagccagcgctccgccgccatccgccggcgagatggcgttgtacctgctgttcgagtcggcctccggctacggcctattccatgcgtacggtatcgatgagatcgggcagagcgttgaggccgtgcgctcctccgtgctggacctcgaccgcttcggcaaggccgtcaagctcactgccttcaatcctttctcctctgccgtcgacgcgctcaaccagtgcaacgctatctctgaaggaatcatgaccgatgagttgaggagcttcctggagctgaacctgccgaagcctaaggaggggaagaaggccaaatacagcctcggcgttgtcgagcccaaggtcggctcccacatctccgaggtcaccggcatcccctgtcagagcaacgagttcgtccaggagctgctccgcggtgtccgcctccacttcgaccgtttcatcaacgagcttaaggattctgacttggagaaggcccaacttggcctggggcatagctacagcagggctaaggtgaagttcaatgtgaatcgtgttgataacatggtgatccaagcaatatttctgctggatacacttgacaaggacatcaattccttctccatgagagtcagggaatggttctcatggcacttccctgagcttgtcaagattgtgaatgacaattacctttatgccaagcttgctaagtttattgtgaacaaatctgatttggcggaaaaagatatcccagctttggctgatatagttggtgatgaggacaaggctaaagaaattgttgaagcagcaaaggcttcaatgggccaggatctgtcaccagttgatttgatcaatgtccagcaatttgcccaaagggttatgaatctctctgagtatcgcaaaaacctttatgaatatctcgtgactaagatgaatgatattgcgcccaacctgacatcattgattggtgaagtagttggagctcgcctaatctctcatgctggcagtctttcaaaccttgccaagtgtgcagcttccacccttcaaatacttggtgctgagaaggccctattcagagcactgaaaactcgagggaatactccaaagtatgggcttatattccactcctcctttattggccgtgcttcaaccaagaacaagggcagaatggctcgttacctggcaaacaaatgctcgattgcttcacgcattgactgctactcggaggctagtacctctgtctttgggcaaaagttgcgcgagcaagtcgaggagagactggaattctatgacaagggtgttgcgcctcgtaaaaatcttgatgtgatgaaagctgctattgacagtatggtcaatgacaccttaatggatgatgatggtaaggcagataatgagaaggcggacacatctgccaagaaaagcaagaaaaagaagaccaaaaccgagactgatggtgatgcaatggatgtggataagccctccaacgtggctgatggagaagctgagcttggaaccgagaagaagaaaaagaaaaagaagcacaagctagaggaggcacaggaggagaacggtgcagcacatgctaatggcgacgctgaagagacccagactcccaagaagaagaaaaagaagagccgtgaaatttcggaggaagctgaacctaagacagccactgaggggaagaagaagaaaaatgaagaagctgaacctaagacagccaccgaggggaagaagaagaaaaagaaggcagtcaaggctgatgaatgacaagctatttgttgtatgtcagtacaaatcctagtatttgttgaaaaccgagataagcacctagcttctagttcatgaggtgtacgatgcaattcaattcaactatgaagttctgcaatccaactcaactacgaagttctatcgtctctagcttgattgtaatttttttatgagggtgcggttggataagcaaatagcttggtgagttggcgttcgattgttatattgagtgagaactgagatttgaaggcatcttcgagacacttttttgaaggcagtcaaggctgatgaatgacaagctatttgttgtatgtcagtacaaatcctagtatttgttgaaaaccgagataagcacctagcttctagttcatgaggtgtacgatgcaattcaattcaactatgaagttctgcaatccaactcaactacgaagttctatcgtctctagcttgattgtaatttttttatgagggtgcggttggataggcaaatagcttggtgagttggcgttcgattgttatattgagtgagaactgagatttgaaggcatcttcgagacacttttttgttagtagcatgaaacgtgggcgtccacacggctccgcccgacatcacagcggcgcgcccttggcaagcgctccccctccccctcccccgcggcaatcttggtgtcccccgcggcaagctcgccctcccccgcgaggcaatctcggcgtcctcg

SEQ ID NO: 153515 - DNA, 2493 bp, Zea Mays
caccgtcactcttgttgatcctaaaaccctaacccctagccagcgctccgccgccatccgccggcgagatggcgttgtacctgctgttcgagtcggcctccggctacggcctattccatgcgtacggtatcgatgagatcgggcagagcgttgaggccgtgcgctcctccgtgctggacctcgaccgcttcggcaaggccgtcaagctcactgccttcaatcctttctcctctgccgtcgacgcgctcaaccagtgcaacgctatctctgaaggaatcatgaccgatgagttgaggagcttcctggagctgaacctgccgaagcctaaggaggggaagaaggccaaatacagcctcggcgttgtcgagcccaaggtcggctcccacatctccgaggtcaccggcatcccctgtcagagcaacgagttcgtccaggagctgctccgcggtgtccgcctccacttcgaccgtttcatcaacgagcttaaggattctgacttggagaaggcccaacttggcctggggcatagctacagcagggctaaggtgaagttcaatgtgaatcgtgttgataacatggtgatccaagcaatatttctgctggatacacttgacaaggacatcaattccttctccatgagagtcagggaatggttctcatggcacttccctgagcttgtcaagattgtgaatgacaattacctttatgccaagcttgctaagtttattgtgaacaaatctgatttggcggaaaaagatatcccagctttggctgatatagttggtgatgaggacaaggctaaagaaattgttgaagcagcaaaggcttcaatgggccaggatctgtcaccagttgatttgatcaatgtccagcaatttgcccaaagggttatgaatctctctgagtatcgcaaaaacctttatgaatatctcgtgactaagatgaatgatattgcgcccaacctgacatcattgattggtgaagtagttggagctcgcctaatctctcatgctggcagtctttcaaaccttgccaagtgtgcagcttccacccttcaaatacttggtgctgagaaggccctattcagagcactgaaaactcgagggaatactccaaagtatgggcttatattccactcctcctttattggccgtgcttcaaccaagaacaagggcagaatggctcgttacctggcaaacaaatgctcgattgcttcacgcattgactgctactcggaggctagtacctctgtctttgggcaaaagttgcgcgagcaagtcgaggagagactggaattctatgacaagggtgttgcgcctcgtaaaaatcttgatgtgatgaaagctgctattgacagtatggtcaatgacaccttaatggatgatgatggtaagataatgagaaggcggacacatctgccaagaaaagcaagaaaaagaagaccaaaaccgagactgatggtgatgcaatggatgtggataagccctccaacgtggctgatggagaagctgagcttggaaccgagaagaagaaaaagaaaaagaagcacaagctagaggaggcacaggaggagaacggtgcagcacatgctaatggcgacgctgaagagacccagactcccaagaagaagaaaaagaagagccgtgaaatttcggaggaagctgaacctaagacagccactgaggggaagaagaagaaaaatgaagaagctgaacctaagacagccaccgaggggaagaagaagaaaaagaaggcagtcaaggctgatgaatgacaagctatttgttgtatgtcagtacaaatcctagtatttgttgaaaaccgagataagcacctagcttctagttcatgaggtgtacgatgcaattcaattcaactatgaagttctgcaatccaactcaactacgaagttctatcgtctctagcttgattgtaatttttttatgagggtgcggttggataagcaaatagcttggtgagttggcgttcgattgttatattgagtgagaactgagatttgaaggcatcttcgagacacttttttgaaggcagtcaaggctgatgaatgacaagctatttgttgtatgtcagtacaaatcctagtatttgttgaaaaccgagataagcacctagcttctagttcatgaggtgtacgatgcaattcaattcaactatgaagttctgcaatccaactcaactacgaagttctatcgtctctagcttgattgtaatttttttatgagggtgcggttggataggcaaatagcttggtgagttggcgttcgattgttatattgagtgagaactgagatttgaaggcatcttcgagacacttttttgttagtagcatgaaacgtgggcgtccacacggctccgcccgacatcacagcggcgcgcccttggcaagcgctccccctccccctcccccgcggcaatcttggtgtcccccgcggcaagctcgccctcccccgcgaggcaatctcggcgtcctcg

SEQ ID NO: 153516 - DNA, 2488 bp, Zea Mays
caccgtcactcttgttgatcctaaaaccctaacccctagccagcgctccgccgccatccgccggcgagatggcgttgtacctgctgttcgagtcggcctccggctacggcctattccatgcgtacggtatcgatgagatcgggcagagcgttgaggccgtgcgctcctccgtgctggacctcgaccgcttcggcaaggccgtcaagctcactgccttcaatcctttctcctctgccgtcgacgcgctcaaccagtgcaacgctatctctgaaggaatcatgaccgatgagttgaggagcttcctggagctgaacctgccgaagcctaaggaggggaagaaggccaaatacagcctcggcgttgtcgagcccaaggtcggctcccacatctccgaggtcaccggcatcccctgtcagagcaacgagttcgtccaggagctgctccgcggtgtccgcctccacttcgaccgtttcatcaacgagcttaaggattctgacttggagaaggcccaacttggcctggggcatagctacagcagggctaaggtgaagttcaatgtgaatcgtgttgataacatggtgatccaagcaatatttctgctggatacacttgacaaggacatcaattccttctccatgagagtcagggaatggttctcatggcacttccctgagcttgtcaagattgtgaatgacaattacctttatgccaagcttgctaagtttattgtgaacaaatctgatttggcggaaaaagatatcccagctttggctgatatagttggtgatgaggacaaggctaaagaaattgttgaagcagcaaaggcttcaatgggccaggatctgtcaccagttgatttgatcaatgtccagcaatttgcccaaagggttatgaatctctctgagtatcgcaaaaacctttatgaatatctcgtgactaagatgaatgatattgcgcccaacctgacatcattgattggtgaagtagttggagctcgcctaatctctcatgctggcagtctttcaaaccttgccaagtgtgcagcttccacccttcaaatacttggtgctgagaaggccctattcagagcactgaaaactcgagggaatactccaaagtatgggcttatattccactcctcctttattggccgtgcttcaaccaagaacaagggcagaatggctcgttacctggcaaacaaatgctcgattgcttcacgcattgactgctactcggaggctagtacctctgtctttgggcaaaagttgcgcgagcaagtcgaggagagactggaattctatgacaagggtgttgcgcctcgtaaaaatcttgatgtgatgaaagctgctattgacagtatggtcaatgacaccttaatggatgatgatgataatgagaaggcggacacatctgccaagaaaagcaagaaaaagaagaccaaaaccgagactgatggtgatgcaatggatgtggataagccctccaacgtggctgatggagaagctgagcttggaaccgagaagaagaaaaagaaaaagaagcacaagctagaggaggcacaggaggagaacggtgcagcacatgctaatggcgacgctgaagagacccagactcccaagaagaagaaaaagaagagccgtgaaatttcggaggaagctgaacctaagacagccactgaggggaagaagaagaaaaatgaagaagctgaacctaagacagccaccgaggggaagaagaagaaaaagaaggcagtcaaggctgatgaatgacaagctatttgttgtatgtcagtacaaatcctagtatttgttgaaaaccgagataagcacctagcttctagttcatgaggtgtacgatgcaattcaattcaactatgaagttctgcaatccaactcaactacgaagttctatcgtctctagcttgattgtaatttttttatgagggtgcggttggataagcaaatagcttggtgagttggcgttcgattgttatattgagtgagaactgagatttgaaggcatcttcgagacacttttttgaaggcagtcaaggctgatgaatgacaagctatttgttgtatgtcagtacaaatcctagtatttgttgaaaaccgagataagcacctagcttctagttcatgaggtgtacgatgcaattcaattcaactatgaagttctgcaatccaactcaactacgaagttctatcgtctctagcttgattgtaatttttttatgagggtgcggttggataggcaaatagcttggtgagttggcgttcgattgttatattgagtgagaactgagatttgaaggcatcttcgagacacttttttgttagtagcatgaaacgtgggcgtccacacggctccgcccgacatcacagcggcgcgcccttggcaagcgctccccctccccctcccccgcggcaatcttggtgtcccccgcggcaagctcgccctcccccgcgaggcaatctcggcgtcctcg

SEQ ID NO: 153517 - DNA, 1593 bp, Zea Mays
gtcccgcgccctcccgggcccggccactagtggaagcatctcgctgaaagcaagggggcgcgcgcccccgggctcgggacacgagggggcatcccatcgatgccttgctgggacggcctgccgctgccgtgtggacccacgcgagggggacagcgactgtgtagcaccgtgggcggggtgggccccagcggagtcaagcgggtgtaaattgcagcctctgctctggcggcccccgtgctttcatcattccgctccccacacccctgttcgtggcggcctccgcccctccctctcaggctctcaccaccgtctgctggtggttgccgcggcgccgctcctccctcgtggtggcggtggaggactacggtcggggatcgacggcttcttcgtccgttggttggcaggcgaggcgatacatcaaccaaccaaaagaaatgtcagctggcaggcaagcatactggtgttaccagtgccgacagagggtgaggccacggggccgggagatggtttgtccctactgcgattctgggtttgtggctgaaatggatgatgtagatgctctcatgagccacttcgttgggacggatcctgatttccatcgcgacccacggttcgggatcatggaggcgatctccgccgtgatgcggcatggtatggcagggatgaaccgggaggttgatgtcagagggaggccgaacttcttttcagacctggagatggagttcggttcagggccatggctgctcttccgtggccagctccccggccacctcaccgaggacaacggtttcgatgttttcgtcaatggacgacgtggcggcggcggcggcggcggcggcatgaggagggccaacatcgcggactacttcgttggccctggactggatgatcttatcgagcagttgacccagaatgatcgccgaggaccaccacctgctgcacagtcctcgatcgacgctatgcccacagtgaagatcacccagaggcatctcagtggggactcgcactgccctatctgcaaggagaagttcgagatgggatccgaagaagcaagagagatgccatgcaagcacctgtaccactccgactgcatagttccttggttagagcagcacaattcctgccccgtttgccgttacgagctcccgccacagggctctgccaccggtgctagctgctcgcgcgcgagatcaaccgaccagagccagagctcaagtagttcaagcagcagcgggagaaccagtgggcgtcaaaggagaaggaacccgttctcgttcctgtggcctttccgctcatcaagtagttctcgctagattagcctctggtaatctttgctcaggttcgaaatactgtttgtttttttgggtcaaatacgctggtctaatgggctttaatgtggtgggatctcaatctgtactgtatggtttgttaatgatcgccacacgatgcttctccttgcaagtatattattattaccacggtatcatcacaggcacttggttttgtttacttgtttgtgagcttgcaaacaattagtataagcctgattaatggatgttcggcttctttttaaaagaggctaaagttatgatc

SEQ ID NO: 153518 - DNA, 1901 bp, Zea Mays
ccgtgttccgagccgcagctttggtccccactcggatccaaacatttcttcccccgttcattcagtttgttgtggcctgtggggtttcgcttgccacgtggtgccccacgaatccaacccgagccgtgattgcgtctgcggttagtttaggtttttcgtagcgctgttcttcagtgcgcgagatcgatctaagatgttggtaggcgcacccgcgcggtattaacctgttggtgcccaattaaggtggaggactagaaggctatcctcgtatggatcctcttgcctctcccgtcttctttcgctgccttcctattgaagaaactaattctgggaagaaaggcatgggtgggagaaaagctttagcagtttctgttgtctgaggcaaagtttaacgatttcgatcgttcaagttcacatcttggtcctctaggactaggaacagcttcgcagaaattcgcatagttatgtatgaataatcttttcactgcaaagagaagtattataggtacttatctggaaagtttttggcactcaattaagtcttcttggtttagattttatatagttctgatcatatggcttcttatcagcatacttgtcttgggtggtctagttggatcatgtaagttgtgtttcaaattttatatggctatctgtctagtggagctctgtgctcagatcttggaaacgttgccggttttgcagttggcaggcgaggcgatacatcaaccaaccaaaagaaatgtcagctggcaggcaagcatactggtgttaccagtgccgacagagggtgaggccacggggccgggagatggtttgtccctactgcgattctgggtttgtggctgaaatggatgatgtagatgctctcatgagccacttcgttgggacggatcctgatttccatcgcgacccacggttcgggatcatggaggcgatctccgccgtgatgcggcatggtatggcagggatgaaccgggaggttgatgtcagagggaggccgaacttcttttcagacctggagatggagttcggttcagggccatggctgctcttccgtggccagctccccggccacctcaccgaggacaacggtttcgatgttttcgtcaatggacgacgtggcggcggcggcggcggcggcggcatgaggagggccaacatcgcggactacttcgttggccctggactggatgatcttatcgagcagttgacccagaatgatcgccgaggaccaccacctgctgcacagtcctcgatcgacgctatgcccacagtgaagatcacccagaggcatctcagtggggactcgcactgccctatctgcaaggagaagttcgagatgggatccgaagaagcaagagagatgccatgcaagcacctgtaccactccgactgcatagttccttggttagagcagcacaattcctgccccgtttgccgttacgagctcccgccacagggctctgccaccggtgctagctgctcgcgcgcgagatcaaccgaccagagccagagctcaagtagttcaagcagcagcgggagaaccagtgggcgtcaaaggagaaggaacccgttctcgttcctgtggcctttccgctcatcaagtagttctcgctagattagcctctggtaatctttgctcaggttcgaaatactgtttgtttttttgggtcaaatacgctggtctaatgggctttaatgtggtgggatctcaatctgtactgtatggtttgttaatgatcgccacacgatgcttctccttgcaagtatattattattaccacggtatcatcacaggcacttggttttgtttacttgtttgtgagcttgcaaacaattagtataagcctgattaatggatgttcggcttctttttaaaagaggctaaagttatgatc

SEQ ID NO: 153519 - DNA, 504 bp, Zea Mays
ttttattcttttttaggaagaaacggggttggcacacctggtgggtgctcgtcgccagtaaagtgcccagttaagacctggcgaagggcctaacaaagacatgggcacctggcgtagatagatagagagaaagagagagagaggggagggggggagggaggggggagattaaagccaagcgaagaaaaggcaaagatgaacggaaacatcctgagcacagcacagtcaacagcagggggagggaggtcaccactgctgcgccgccgccattgcgttgcatggtccatcgatccatcaggagtgacgaatgagggcagccctagcagaccaaacccgactcgtaagccgcgtcaggcaccaccgcacggttcccatcccttaccgccaccaatgccaggcaatggaacggcggcgaggcggcaccgtagtgacggcggtgtgaaacgatggccgaaacgaagaatggtccgtgcacaccctcgattcgatctagggtttgggttc

SEQ ID NO: 153520 - DNA, 396 bp, Zea Mays
ctttgtgctctccgatatattagtccagccccaagccctagaagagctaaaacccttgcggcggctaccttttccccagctccctctcgtctcgcggccgccgcaggcgaaaccccctcatcgcttcgcgctgtccaccgacgaatcttccccagagcgtgtgtatctgttgtttcagctgagttaatcggggactggtcgtgtgcggagatgttggtgctcttcgagacccccgcggggttcgccctattcaaggtgctcgacgaggggaagctcgacaaggtcgaggatctatggaaggagttcacgacgtcggactcagcgagaaaggtctgtataggatcagccacattatgacattatgtgtttgtcgttttgaacagatggcaccgactt

SEQ ID NO: 153521 - DNA, 2153 bp, Zea Mays
ctttgtgctctccgatatattagtccagccccaagccctagaagagctaaaacccttgcggcggctaccttttccccagctccctctcgtctcgcggccgccgcaggcgaaaccccctcatcgcttcgcgctgtccaccgacgaatcttccccaggttcgagggattttaccgtctcaacagctcgattctttaatcggggactggtcgtgtgcggagatgttggtgctcttcgagacccccgcggggttcgccctattcaaggtgctcgacgaggggaagctcgacaaggtcgaggatctatggaaggagttcacgacgtcggactcagcgagaaaggtggtcgagctgaaggctttcaacaagtttgagaacacatctgatgccctatccgcggcaaccctgattattgatagcaagcctagcaagggtctgcgcaagttcttgcagaaacattgtgagggtgaaacattagcagtagctgattctaagcttggaaatgctataaaagaaaagctgaaaattgactgccttcacaatagtgctgtgatggagctgatgagaggactgagaaatcagcttaccgagcttataactgggttgggtgcacaagaccttggtccaatgagcttgggattgtcccacagcttgtctaggtataagctgaagttcagccctgagaaggttgatacaatgatcattcaagccattggattattggatgatcttgacaaggagcttaacacttatgccatgagagttcgtgaatggtatggctggcactttccagagctcaccaaaatagttacagataatatacagtatgccaaagttgtgaagatgatgggcaacagagttaatgcagtcaaccttgacttctctgagatattgtcagatgaagagctagaaacacagctaaaggaggcagcagtaatatccatgggaacagaagttagtgaccttgacttatcgaatatcagagagctatgtgatcaagtgctggccctttctgagtacagagcccagctgtatgactatttaagaagcaggatgaacactattgcaccaaatttgacagcactggtgggtgaattagttggtgctcgccttattgcacatggtggaagtttgttaaatttggccaagcagcctggtagcacaattcagatacttggtgcagagaaggctttattcagagctctaaagacaaagcattctacacctaagtatggcctcatctaccatgcatccttaattggcaaggcttctcaaaagcacaagggaaaaatctctcgttctcttgctgcaaaaacagctcttgctatccggtatgatgcccttggtgatggtgaggacaactccattggcactgagagtcgacttaagcttgagacacggcttcaagttcttgagggtagagaacttgggaaatctgctggttccacaaaggggaagcccaagatagaagtgtatgaaaaggaccggaagaagggtactggggctttaacaactcctgctaagacatataaccctgcagctgatctggtactcacggaagaaacaccaaagaagtcagaattggcttcaaagaagaggaaacataatgaggtggaaactgaaccattagcagagcctgcagaggaagcaatccaggaggatggtgaccaggaggatcggaagaagaagaagaaaaagaacaaggaaagcaaggaggctcctgctggtgaaggtgatggtgagaagaaaaagaaaaagaagtctaaggaggtcgaggaagagcctgttgtggctgctgcttcagaagttaagaagaagaaaaagaagtctgacgctgatggtgaggatgtcgcaatgcaaaccgaagaatcaggtaagaaagagaagaaaaagaagaaaaaggcgtgctgatgatgagtgagacattcacactggaagagaatttgcgggtaccaaactaccaaaggctgggactcagctgttctgtaaaatggatttgcgggtagaaacgatatcgacatcagtttttttggacccggcttgtattcaagtacttgctcgatcctggtgatgatggaatttaagttttgctgttgcaacctgatatattagtacgatgattgtcatggtaacgcggcagctgagagatcttccatg

SEQ ID NO: 153522 - DNA, 2092 bp, Zea Mays
aaaacccttgcggcggctaccttttccccagctccctctcgtctcgcggccgccgcaggcgaaaccccctcatcgcttcgcgctgtccaccgacgaatcttccccagctgagttaatcggggactggtcgtgtgcggagatgttggtgctcttcgagacccccgcggggttcgccctattcaaggtgctcgacgaggggaagctcgacaaggtcgaggatctatggaaggagttcacgacgtcggactcagcgagaaagagaacttccctgtaggtggtcgagctgaaggctttcaacaagtttgagaacacatctgatgccctatccgcggcaaccctgattattgatagcaagcctagcaagggtctgcgcaagttcttgcagaaacattgtgagggtgaaacattagcagtagctgattctaagcttggaaatgctataaaagaaaagctgaaaattgactgccttcacaatagtgctgtgatggagctgatgagaggactgagaaatcagcttaccgagcttataactgggttgggtgcacaagaccttggtccaatgagcttgggattgtcccacagcttgtctaggtataagctgaagttcagccctgagaaggttgatacaatgatcattcaagccattggattattggatgatcttgacaaggagcttaacacttatgccatgagagttcgtgaatggtatggctggcactttccagagctcaccaaaatagttacagataatatacagtatgccaaagttgtgaagatgatgggcaacagagttaatgcagtcaaccttgacttctctgagatattgtcagatgaagagctagaaacacagctaaaggaggcagcagtaatatccatgggaacagaagttagtgaccttgacttatcgaatatcagagagctatgtgatcaagtgctggccctttctgagtacagagcccagctgtatgactatttaagaagcaggatgaacactattgcaccaaatttgacagcactggtgggtgaattagttggtgctcgccttattgcacatggtggaagtttgttaaatttggccaagcagcctggtagcacaattcagatacttggtgcagagaaggctttattcagagctctaaagacaaagcattctacacctaagtatggcctcatctaccatgcatccttaattggcaaggcttctcaaaagcacaagggaaaaatctctcgttctcttgctgcaaaaacagctcttgctatccggtatgatgcccttggtgatggtgaggacaactccattggcactgagagtcgacttaagcttgagacacggcttcaagttcttgagggtagagaacttgggaaatctgctggttccacaaaggggaagcccaagatagaagtgtatgaaaaggaccggaagaagggtactggggctttaacaactcctgctaagacatataaccctgcagctgatctggtactcacggaagaaacaccaaagaagtcagaattggcttcaaagaagaggaaacataatgaggtggaaactgaaccattagcagagcctgcagaggaagcaatccaggaggatggtgaccaggaggatcggaagaagaagaagaaaaagaacaaggaaagcaaggaggctcctgctggtgaaggtgatggtgagaagaaaaagaaaaagaagtctaaggaggtcgaggaagagcctgttgtggctgctgcttcagaagttaagaagaagaaaaagaagtctgacgctgatggtgaggatgtcgcaatgcaaaccgaagaatcaggtaagaaagagaagaaaaagaagaaaaaggcgtgctgatgatgagtgagacattcacactggaagagaatttgcgggtaccaaactaccaaaggctgggactcagctgttctgtaaaatggatttgcgggtagaaacgatatcgacatcagtttttttggacccggcttgtattcaagtacttgctcgatcctggtgatgatggaatttaagttttgctgttgcaacctgatatattagtacgatgattgtcatggtaacgcggcagctgagagatcttccatgctc

SEQ ID NO: 153523 - DNA, 2077 bp, Zea Mays
aaaacccttgcggcggctaccttttccccagctccctctcgtctcgcggccgccgcaggcgaaaccccctcatcgcttcgcgctgtccaccgacgaatcttccccagctgagttaatcggggactggtcgtgtgcggagatgttggtgctcttcgagacccccgcggggttcgccctattcaaggtgctcgacgaggggaagctcgacaaggtcgaggatctatggaaggagttcacgacgtcggactcagcgagaaaggtggtcgagctgaaggctttcaacaagtttgagaacacatctgatgccctatccgcggcaaccctgattattgatagcaagcctagcaagggtctgcgcaagttcttgcagaaacattgtgagggtgaaacattagcagtagctgattctaagcttggaaatgctataaaagaaaagctgaaaattgactgccttcacaatagtgctgtgatggagctgatgagaggactgagaaatcagcttaccgagcttataactgggttgggtgcacaagaccttggtccaatgagcttgggattgtcccacagcttgtctaggtataagctgaagttcagccctgagaaggttgatacaatgatcattcaagccattggattattggatgatcttgacaaggagcttaacacttatgccatgagagttcgtgaatggtatggctggcactttccagagctcaccaaaatagttacagataatatacagtatgccaaagttgtgaagatgatgggcaacagagttaatgcagtcaaccttgacttctctgagatattgtcagatgaagagctagaaacacagctaaaggaggcagcagtaatatccatgggaacagaagttagtgaccttgacttatcgaatatcagagagctatgtgatcaagtgctggccctttctgagtacagagcccagctgtatgactatttaagaagcaggatgaacactattgcaccaaatttgacagcactggtgggtgaattagttggtgctcgccttattgcacatggtggaagtttgttaaatttggccaagcagcctggtagcacaattcagatacttggtgcagagaaggctttattcagagctctaaagacaaagcattctacacctaagtatggcctcatctaccatgcatccttaattggcaaggcttctcaaaagcacaagggaaaaatctctcgttctcttgctgcaaaaacagctcttgctatccggtatgatgcccttggtgatggtgaggacaactccattggcactgagagtcgacttaagcttgagacacggcttcaagttcttgagggtagagaacttgggaaatctgctggttccacaaaggggaagcccaagatagaagtgtatgaaaaggaccggaagaagggtactggggctttaacaactcctgctaagacatataaccctgcagctgatctggtactcacggaagaaacaccaaagaagtcagaattggcttcaaagaagaggaaacataatgaggtggaaactgaaccattagcagagcctgcagaggaagcaatccaggaggatggtgaccaggaggatcggaagaagaagaagaaaaagaacaaggaaagcaaggaggctcctgctggtgaaggtgatggtgagaagaaaaagaaaaagaagtctaaggaggtcgaggaagagcctgttgtggctgctgcttcagaagttaagaagaagaaaaagaagtctgacgctgatggtgaggatgtcgcaatgcaaaccgaagaatcaggtaagaaagagaagaaaaagaagaaaaaggcgtgctgatgatgagtgagacattcacactggaagagaatttgcgggtaccaaactaccaaaggctgggactcagctgttctgtaaaatggatttgcgggtagaaacgatatcgacatcagtttttttggacccggcttgtattcaagtacttgctcgatcctggtgatgatggaatttaagttttgctgttgcaacctgatatattagtacgatgattgtcatggtaacgcggcagctgagagatcttccatgctc

SEQ ID NO: 153524 - DNA, 2191 bp, Zea Mays
gcacaaccacctctcctctgggtctcgtactctcgtcggtcccctctccggtccacactccctcgcgcccgctccactccactttcccttccccagtcggccagtccccatccccacccccagccccatgagccgccgccggtgaccagcaacatcccatgggctgcgtgcacggccgcccccccgcgtccagccccgaccacccaccgcagctgcccgagccgccggctcccgcggcgacgcaggaggccgccgggaaggccgagcagccggcggcgccagctgagaagccggcttggcgggagaggcgctcccgctcgtcgcgcaatgcccccgcccctagcttcgccaacagggcgcgcggggagcaggtcgccgccggctggcccgcctggctctccgccgtcgccggcgaggccattgacggatggaccccgcgccgcgccgactccttcgagaagattgacaagatcggccagggcacgtacagcaacgtgtacaaggcgcgcgacacggtgagcggcaagatcgtggcgctcaagaaggtgcgcttcgacaacctcgagcccgagagcgtccgcttcatggcccgcgagatcctcatcctccgacgcctcgaccaccctaacgtcgtcaaactcgacggccttgtcacctcccgcatgtcctgcagcctctacctcgtcttcgagtacatggagcacgacctcgctggcctcgccgccagtcccgaaattaagttcaccgaaccacaggttaagtgctatatgcatcagctgctgtcgggtctggagcactgccacgaccggggggtgctgcaccgcgacatcaagggctcgaatctgctcctggacaacaatggcatgctgaagattgcagattttggtctcgcgtcgttcttcgacccagaccgtaaacagccgatgacgagccgggtggtgaccctatggtaccgcccacccgaactgcttctcggcgcaacggattacggggtgggtgtggacctgtggagtgcagggtgtatcctggccgagttgctcgctgggaggccaattatgccaggacgaacagaggtggaacagctacataaaatttttaagttgtgtggctccccaacagaagaatattggaaaaagtcgaagctacctcatgctacaatatttaagcctcagcagccgtacagaaagcgaataagagagacgtttaaggattttccacaatcagcactgcagttgatcgagacactacttgcaattgatccagcagatcgcttaacagcgtcttctgcattaagaagtgatttctttacaaccgaaccttttgcatgcgaaccgtcaagtcttccaaaatatcctccaagcaaagagatagatgtgaaacgaagagacgaagaagccagacgtttaagagctgctggtggtagagctaatggtgatggagccaagaagacgagaacacgtgatcgacctaaggcagttccagctccagaggcaaatgctgaacttcaagtaaatattgataaaagaaggtttattactcatgcaaatgctaagagcaagagcgaaaagttccctcccccacatcaagatggtgcggttggtgtccccttggatgcttcaaatcatatggatccactatacgaacctccggacccatcttccttcagcactgtgttcacttacgagaaaggcgctgtgcctacttggtctggaccattggttgatcctgctgcagtggtgaaccaaaagggcaagcacaagtccgggcgctcatcgaaacagccggccactgcccgtgctcggtaagatcctaaggatcgatatttacaggtaaaaaataaggagacttcaacatggtgggaaaatactccatggcggcacctgcacgctgttttgcaaacgaggcatgcaatgataaagtagtttgttggttacctgttgtcatgtgagtgatttttttttctagacttcgtgtataggctggggagggagttgaagtagttacttctgtacattaggttttctttcctgctctttaagcagctggtgatgttagattcatttgaatggaagcttagatctctagtgttcccgccactacacccccttccattgtaacagtgtgttccctgcataatcagttcttatcaattcaattgaaatcgtaagttttggtgaagatttgatggatt

SEQ ID NO: 153525 - DNA, 2327 bp, Zea Mays
agagagagagagagagagagagagagagagagagagagagagaaaatgggcgtggcgacggtgacagagctgaagcagagcatctccgggaagaggacattccggccgagcctcatcagccgccacgccaatgagtggtaactcactcgcgttcctgcttcgttcctcggatcctgtgctcctctcctgaactcgactctgcgttctgccaggcctccgaccgacgtctccagcgacctcaccgtcgaggtcggcacctccagcttcgcactccacaagttcccgctggtctcccggagcggcaagatccggcgcctcgtcgcggaggccaaggacgccaagctggcgcggctcagcctgcacggcaccccggggggcgcgccggcgttcgagctcgccgccaagttctgctacggcgtccacgtggacgtcacggtcgccaacgtcgccatgctgcgctgcgccgcgcactacctgcagatcaccgacgacttctccgacaagagcctggagctccgcgccgaggccttcctccgcgacgcggtgctccccagcatcgccagctccgtcgccgtgctccgcagctgcgaggcgctgctcccggccgccgaggacgtcggcctcgtgccccgcctcatcgccgccgtcgccaccaacgtgtgcaaggagcagctcacctcggggctgtccaagctggaccagtgcgcgcagctcaagcccgcggcggcgttcgccgacctcgacccgccggccgactggtggggcaagtccgtggccgcgctcggcctcgacttcttccagcggctgctctccgcggtcaaggccaaggggctcaagcaggagacggtcaccaggatcctcatcaactacgcgcagaacgcgctgcacgggctcatggccagggacgtgcacagatgcggcggcgcggacgccgacgccgtcaagaagcagcgcgccgtcgtggaggccatcgtgggccttctcccggcgcagtccaggaagagccccgtgcccatggccttcctctcggggctcctcaagacgtcgatggcggtgtccgcgtccagcatctgcagggccgacctggagaagcggatcggcatgcagatggaccaggccatcctggaggacatcctcatcgccgcgggcgccgccgtgggcgcgccggccggtcagcagcacgcgctgtacgacacggacgtggtggcgcgcatcttctcggtgttcctcaacctcgacgacgaccataacgaggaggacgacgggttcgactacgacagcccgcgctcgccgaagcagagcctcctggtgaaggccgccaagctgctggacagctacctcgcggaggtggcgctcgactctaacatcctcccgtccaagttcatctccctcgccgagctgctcccggaccacgctcgcgtcgtcaccgatggcctctaccgcgccgtcgacatcttcctcaaggtgcaccccaacatcaaggaggcggagcggtaccggctgtgcaaggcgatcgactgccagcggctgacgccggacgcgtgcagccacgcggcgcagaacgagcggctcccggtgcagatggcggtgcaggtgctctacttcgagcagctgcggctgcggagcgcgatccaggccgggggtggcagcagcatgggcgggcacgacggggcggtcttcttcgggtgcgccgcggccgccgcgtcggtgcagggcagcgtgaacatgcgctccggcagcggcgtgggcagcggcgccatgtcgccgcgggacaactacgcgtcggtgcggcgggagaaccgggagctgaagctggaggtggcgcggatgcggatgcggctcacggacctggagaaggaccacgtgagcatgaagcgggagctggtgcgcgtcggccccgccaaccgcctgctccggggcttggcgcgcagcctcggcaggctcttccgcatgcgccccgccgccgagccggggctgcagcagctcggggccaaggctaccgccgacgccaaggtgctcttccagcgccgccgccgccactccatctcatgatctcggttcctcgaatcggagaggcgaccggcgggcacgctgccgatcgagcgtgctcgcgaggatgagtggccacgctactgtacgtgcgtacagcaaagtttcgcgtgtgcaattgtgcatagcatacaagaaaggaagacatggtttgagtgagtgcacactgcaggtttatttcttcccggatttcgtgcggtgcgggcatcgcgtggtcttctgctcatgaaagtcatggcgttcgacacagcatgcgatgcgattcatgtatatggatg

SEQ ID NO: 153526 - DNA, 2252 bp, Zea Mays
agagagagagagagagagagagagagagagagagagagagagaaaatgggcgtggcgacggtgacagagctgaagcagagcatctccgggaagaggacattccggccgagcctcatcagccgccacgccaatgagtggcctccgaccgacgtctccagcgacctcaccgtcgaggtcggcacctccagcttcgcactccacaagttcccgctggtctcccggagcggcaagatccggcgcctcgtcgcggaggccaaggacgccaagctggcgcggctcagcctgcacggcaccccggggggcgcgccggcgttcgagctcgccgccaagttctgctacggcgtccacgtggacgtcacggtcgccaacgtcgccatgctgcgctgcgccgcgcactacctgcagatcaccgacgacttctccgacaagagcctggagctccgcgccgaggccttcctccgcgacgcggtgctccccagcatcgccagctccgtcgccgtgctccgcagctgcgaggcgctgctcccggccgccgaggacgtcggcctcgtgccccgcctcatcgccgccgtcgccaccaacgtgtgcaaggagcagctcacctcggggctgtccaagctggaccagtgcgcgcagctcaagcccgcggcggcgttcgccgacctcgacccgccggccgactggtggggcaagtccgtggccgcgctcggcctcgacttcttccagcggctgctctccgcggtcaaggccaaggggctcaagcaggagacggtcaccaggatcctcatcaactacgcgcagaacgcgctgcacgggctcatggccagggacgtgcacagatgcggcggcgcggacgccgacgccgtcaagaagcagcgcgccgtcgtggaggccatcgtgggccttctcccggcgcagtccaggaagagccccgtgcccatggccttcctctcggggctcctcaagacgtcgatggcggtgtccgcgtccagcatctgcagggccgacctggagaagcggatcggcatgcagatggaccaggccatcctggaggacatcctcatcgccgcgggcgccgccgtgggcgcgccggccggtcagcagcacgcgctgtacgacacggacgtggtggcgcgcatcttctcggtgttcctcaacctcgacgacgaccataacgaggaggacgacgggttcgactacgacagcccgcgctcgccgaagcagagcctcctggtgaaggccgccaagctgctggacagctacctcgcggaggtggcgctcgactctaacatcctcccgtccaagttcatctccctcgccgagctgctcccggaccacgctcgcgtcgtcaccgatggcctctaccgcgccgtcgacatcttcctcaaggtgcaccccaacatcaaggaggcggagcggtaccggctgtgcaaggcgatcgactgccagcggctgacgccggacgcgtgcagccacgcggcgcagaacgagcggctcccggtgcagatggcggtgcaggtgctctacttcgagcagctgcggctgcggagcgcgatccaggccgggggtggcagcagcatgggcgggcacgacggggcggtcttcttcgggtgcgccgcggccgccgcgtcggtgcagggcagcgtgaacatgcgctccggcagcggcgtgggcagcggcgccatgtcgccgcgggacaactacgcgtcggtgcggcgggagaaccgggagctgaagctggaggtggcgcggatgcggatgcggctcacggacctggagaaggaccacgtgagcatgaagcgggagctggtgcgcgtcggccccgccaaccgcctgctccggggcttggcgcgcagcctcggcaggctcttccgcatgcgccccgccgccgagccggggctgcagcagctcggggccaaggctaccgccgacgccaaggtgctcttccagcgccgccgccgccactccatctcatgatctcggttcctcgaatcggagaggcgaccggcgggcacgctgccgatcgagcgtgctcgcgaggatgagtggccacgctactgtacgtgcgtacagcaaagtttcgcgtgtgcaattgtgcatagcatacaagaaaggaagacatggtttgagtgagtgcacactgcaggtttatttcttcccggatttcgtgcggtgcgggcatcgcgtggtcttctgctcatgaaagtcatggcgttcgacacagcatgcgatgcgattcatgtatatggatg

SEQ ID NO: 153527 - DNA, 1596 bp, Zea Mays
gaaagaagattaaaacgatgtgctaacgccggcggcatagctgttcgcgcagttcccgctggtctcccggagcggcaagatccggcgcctcgtcgcggaggccaaggacgccaagctggcgcggctcagcctgcacggcaccccggggggcgcgccggcgttcgagctcgccgccaagttctgctacggcgtccacgtggacgtcacggtcgccaacgtcgccatgctgcgctgcgccgcgcactacctgcagatcaccgacgacttctccgacaagagcctggagctccgcgccgaggccttcctccgcgacgcggtgctccccagcatcgccagctccgtcgccgtgctccgcagctgcgaggcgctgctcccggccgccgaggacgtcggcctcgtgccccgcctcatcgccgccgtcgccaccaacgtgtgcaaggagcagctcacctcggggctgtccaagctggaccagtgcgcgcagctcaagcccgcggcggcgttcgccgacctcgacccgccggccgactggtggggcaagtccgtggccgcgctcggcctcgacttcttccagcggctgctctccgcggtcaaggccaaggggctcaagcaggagacggtcaccaggatcctcatcaactacgcgcagaacgcgctgcacgggctcatggccagggacgtgcacagatgcggcggcgcggacgccgacgccgtcaagaagcagcgcgccgtcgtggaggccatcgtgggccttctcccggcgcagtccaggaagagccccgtgcccatggccttcctctcggggctcctcaagacgtcgatggcggtgtccgcgtccagcatctgcagggccgacctggagaagcggatcggcatgcagatggaccaggccatcctggaggacatcctcatcgccgcgggcgccgccgtgggcgcgccggccggtcagcagcacgcgctgtacgacacggacgtggtggcgcgcatcttctcggtgttcctcaacctcgacgacgaccataacgaggaggacgacgggttcgactacgacagcccgcgctcgccgaagcagagcctcctggtgaaggccgccaagctgctggacagctacctcgcggaggtggcgctcgactctaacatcctcccgtccaagttcatctccctcgccgagctgctcccggaccacgctcgcgtcgtcaccgatggcctctaccgcgccgtcgacatcttcctcaaggtcaagacacgcgacatctaccgcaccgcaccaattcagcctgttctaatttgcttggctagccagaaccaaaagccacctagcttaacgtgcttgccgatcgatctgtatatctgtctgcgtgcatgcaggtgcaccccaacatcaaggaggcggagcggtaccggctgtgcaaggcgatcgactgccagcggctgacgccggacgcgtgcagccacgcggcgcagaacgagcggctcccggtgcagatggcggtgcaggtgctctacttcgagcagctgcggctgcggagcgcgatccaggccgggggtggcagcagcatgggcgggcacgacggggcggtcttcttcgggtgcgcc

SEQ ID NO: 153528 - DNA, 1020 bp, Zea Mays
atgatcactgttgggcacccggtggcctttgctgtggggatcctaggaaacatcctgtcattcctggtcatccttgcaccagtgccgacgttctaccgcgtgtacgcgaagaagtcgacggagtcgttccagtcggtgccgtacgtggtggcgctgctgagcgcgacgctgtggctctactacgcgctgctgagcacggacctcctcctcctctccatcaacaccgtcgcctgcgtcgccgagtccgtctacctcgccgtctacctcgcctacgcgcccgggcccgcgaaggcgttcacgctcaagctgctgtgcgccatcaacatggggctcttcggcgccatggtcgccttcctgcagttctacgtcgtcgacacgcagcgccgcgtctccatcgccggcggcgtcggcgccgccttcgcgctcgccgtcttcgtcgctcctctcgccatcatccggcgagtgatgagaaccaagagcgtggagttcatgcccttctggctgtccttcttcctcaccgtcagcgccgttgtctggttcttctacggcctcctcatcaaagatttcttcgtcgcgatgccgaacgtgctgggcctgctgttcggcctggcccagatggttctcttcttcgtgtaccggaaccggaaccccaagaagaacggcgccgtgtcggagatgcagcaggcggcggtgcaggccgacgccgagaaggagcggcggtcccacgccaacgccgacggggaggccgacgtgagaaccgtcatcgtcgacatcatgccgccgcctcccgcgatgatgagacacgctgacagagaggcgcgcggcggcgcggggacagggagacgcgcggcggcgcgagaacagggaggcgctcggcggcgcgaggacagggaggcgctcggcggcggtgggatttaggggaggagcatcgaggaggcggcggcggcgcggggaaagggatgcgcgcggcggcggcggggggctaggaggcgcgcgaaaacgcctgggtgctcggcggcg

SEQ ID NO: 153529 - DNA, 3229 bp, Zea Mays
tccccgcctcctctctccctctctacactccaacggtccaacccaccaccgtcctcggccggtcctcggcctcgccgtactctccactctccataccctgcggcgcgctgctcgtactcttccctgccgcaaaccatcagtcaatctcgccgctcctagcgtccggttcagagattctctctcgctaccggccggggccgtctgtttctcgtccgagaggtcggagggctcctcgtggccggagcctggggcaggacctgccagagcggcgtgcatgaagactaagatggagccagaatcactcgattttgaagacaatggtgaacaccaatcttcatcagaagcttctcttgcttcagatgtgatatatggtgactcgcctgtatgtccacgcatcggaagtgagcaccaggcagaaatccccaatctggctacagaagatgaacgtcgtgagctcatggctagttcacataatgattccatattgcatgggtatggttatcctgttgtggttgggttaactttaccaattatatgggcatcaccaagagaagccagtaagacagaacaggtattacaaatgcaaaattattcagaatctggaacaaaaggcagcactggagatgtgcaaagtcaggtgacctcaacttgtgcaaccagcaatgacactggcagatgtgatccgacattccaggatctacatgcagtagttcctgtagttcaaattaaatctgacattaatcaagcatataatgaaaaaatggccccttgcccctctcaagaaggccagaatgtcaccaataattcaataatgcagcagagagaaaccaaacaattaaatccgctgccttattcacccattgctctttggagtgatcttgaggcagagatctttctccttgggctctacattttcggcaagaatctcaacctgctgagcaggtttttgggtacaaagactgttggtgatgtgcttgcatactactatgggaagttctatagaagagatgcgtacaaaagatggtctgactgtagaaaggcgaaaactaggaaatgcattcttggggaacgcatttttcaaggatggcgacagcaagagctaatatcacgtctgaaatctaaaatccctaaagaagctcatgattcgttgattgaggttttcaaatctttcagtgatagccaaacatctttgaaggaatttgtcttcagtctgaaatccactgttggagcagaaacttttgtggaggcggttggggttggtaaagggaagcacgatttgactggattcattatggaccaatctaaacccaatcaagctctctctgttcacagtgacttgcctacaggcaaagactattcttcacttgcttcagaagatataatcaagttcttaaatggtgatttcagaagaagtaagactagatcaaattatattttctgggaagctgtatggccccgtttgcttgcaaatggttggcactcagagcagccaaaggatgttagcacaactaagaattgccttgtatttcttgtgccgggtataaagaagttctcgagatgtaaactcactaaaggtactcattattttgattctgtcagtgatgtcctcaaaagagtggcagcggatcctgttcttcttgagttggagattgatgtgataaacaatggtttaactgctgaggaaaatggcagtatcacagatgtgaaactgaaccagtatagtccattagatggatatcaggagcttcctaagttcacaataattgatactagcttagtcgagggggaagtgccattcaatgtcagggaactgaggaacttacctgcagattcaaatattagttttctcctttcacaacatccatctaatatggtgagttacagctcctctgaagaggaaggtgccaatgatagattatcagatgagcaggaagactatggacgagttaaagctgttgtcgatgaaattgaaatggtttcagctgcttcactacaaaacatggtgactgctaatggcaatgatgacaaactagatttgacaggcatcaaaacaaaacctgaaaagcgcaaatatttgtccccagtgtcaaaaggcagaatgctaaatagctgtagtaatgaacaggccagccggcgcagtttttctttctcaaaaggtggtgatttggagaaagagaaaagcaagccaccattgacttcatccaaaccagctgctcttgaagttggcgacacttttcagagctattctacaaaggataatctatctgagcagaaaaacaatgcattgaactctcttaccaattatgggcaaaatgagagaatggttatggagaacttaattaacaagtcatcagagcgtaaggttgatgcagtggctgaagttcactcaaagatcaatgccgatcagccaaaatttattaaagaaagagctgaggttgttggtccaattgacttgaataatctgggaacgctacacggtgataaggcaagccgaagcattcacatcacatcatttgaaaatcttggtagcgtgaaggttgttgaagcttcctccagttcagacaagaacatggcctgtgatccttcagggacagcaggaatgcctgttagcgaggtacctgatcctgctttgcaggtgaatgctcggaggcacggaaccagaaacaggcctcccaccgtaaaagctttagaagctgttgcgtttggacttcttggaagcgggaagcgtaagggtgacatgaagaacagggcgacaagccggccttctcagcgagctcgcaaggctgcaaaagactcagttcccgtggcttcttgtggtgatgcgaaggtgagatgagcagatttctgtgcgttgattggcacatgctgacaatcaacggtaccatgacaatgtgcggatgatgaatatcaagcaactgcatgaggcctggagctaagctgtccaaagctggtggttaccttaccattgtctaatgcggtgcctaccattcaggaaatcttccaggtgacgatggttttacagggtgcatggtcaccattcgagccaggaacccatccttagtttttttttttagtcaatagaagccctgtgcctgtcaagccttggctaattcagttttgcgtttataccgggattaatgttttggtacatcgctctatcgacttttgatgggtgcattcgtctctgagcttcttttgcagggaatagagcattcgtcagcttcataaa

SEQ ID NO: 153530 - DNA, 327 bp, Zea Mays
tgatccgacgcgggccactgcgcgatccggcgcggcgtccttgccggtgcccacggtggcgggcttcctgggctcctcatcctacgccgccgacccgaagcagatgaagcatatcatcaccggcgatggagacgcctcccggagagaccggcggcgaggaagcggccgacgaggcgggagcggggagctcctctcccgatctgcggcacgggagcgaagcttcttcccctaccgacgccgcgactggaagcggagcgggctattggcccaattggggaggggaggaggatttggggaaggaggggagggaggcgcggtgctgtggag

SEQ ID NO: 153531 - DNA, 1943 bp, Zea Mays
ccttcccctttacatttgagcacttaattgttatttgtggccttcactattctttctatggttgctattcggtgatcaatcttaaatttggagtaaccaaactcattcacagtactataggcccaaagtgttgactacctgggcggcagcccggcggctaaccgtagctccgctgtacagctgctagtcctaaactcctagcagctagcattgcagttgaacccattttatttgaaaaaaaagaatagaactaatttgaaccgattggcccaggtgtcagagagcccatgtataccttttggcccattccttcctcattcggctataagatgagcacctcggctgccgttaccgccttcctcccataacaaagccacgttagccgagagctcctctgctcctctcgtgtctggccgaacaggcagagcgaccagtctccagagcgctccccatggcgtcaggagctgcggcggcccctgtcgttcagactgtggtgctgaaggttgccatccactgccatggctgcaagaagaaggtccggaaggtgctcaggggcatcgaaggcgtgcaggacgtgacggtggacgcctcgcagcacaaggtgactgtgacgggcaccgtggacgccgacacgctcatcaagaggctgtacaagtccggcaagaagggagtgccctggcagtgtcacccgcccgccaagaacagcgagcccgcgccggaggccccgccggctccgcagcctgccggcgacggcggcaaggatgctgctgctgctgctgctgtggccgcggcggacaagaagtcggaggaggcggtgaaggagccgcagggcgagagctccgaggaggagaagaagaagccggagcaggaggacggggccgcagagaagaagcagcccgaagcagagtcgtcaaaggaggtggagaaagtggaggcgaagacggacggcggtgacagcgagggagctgagacgaagcaggccaagggcgcagcagagccggcaaaggaagcccctgccgctgccggcgctgccaatgacgaggacgaggcaaagaagagcgacaaggccaaggacgccggcacggcggagcctgccgccgtgacgacggagaggtcccttcctttggcgccggcgccaaagcacgcgtacgagcatgagtaccggccgccctactacgtcgcgcccgcgcagccggtgctgagctaccacgcggcgcagcgcagctcgagcgtgtcgcacttcgcgccgcaggcgcagccggcgtactccacgcaacaggcgcacccgcatcaagcgtactactccgcgcagccgcagccggggaagcagtggtcgccgtcgtacctgtacatgccgtacccgcacgccgcggcgccggagccttactaccagcaggactactacggcccgcccgggatgcacgcgtcgcctatgcacgactcgtcgtaccgcatcttcgacgacgagaaccccaactcctgcagcgtcatgtgagaggagagcggatcggcgcggcccgggccgccgtggccagcagcagcagcagcagcaggtagttggggggaggcggcgccgctagctaccgcaatagagaaccctctctctctctgtggttgtaagtagagtagcctgttgctggcctcttccacttagtatagaggtcaaacctctctccatgcacgacagagctttttcttcgtttccttttaatatcttttttactgtttctaatgataatgagatacgcacgcgcgtttacctgtagtgatgttcaccgcgtctacgcccgccggctacttcaagaaattttgtactatgggctaggacaaatagatatacgtatatggctagctagtagttttctctgtctagagaaaggcaaatgcgtattttgtatctccttattagtatatattactcctgcctgaccgaatatccttcc

SEQ ID NO: 153532 - DNA, 550 bp, Zea Mays
ggtttcctttggagaggtcgcaaaaatgctagaggtggacactgcctggtggcatggggcaaagtttgccgtcccctgcagctgggtggcttgggaatctctagcctccctgagctctgttgggctctccgcatgcgatggatttggctacaaaaaaactgactcaaacgaccttgggcagatctcccaatccaggtaccaggcaaggctcgagctttttttttgcagttctgatctctggaaagatagattgttgcatggagaaaaaattgcagatcttgttcctagactttttggtgcaatcccaaagcgattggtcaataccaggacggttcaggatgtcattctaagtaggagatgggtctctgatattaagggagctctctcagttgctgtgctcatggaatatcttcatctctgggagctgctatcaagttttgaactgcagcctagcattgaagataaacatcttttcagcctagcttcagatggcaaatattcggccaaatctgcttactgaggcctcttccttggctcaagctcttttgca

SEQ ID NO: 153533 - DNA, 1470 bp, Zea Mays
ctcgccggttgccaccgctcagcttcagaaatatcccgccgtcgttcggtggtatttatctccccagctcgctcgctcctggccttcccctgccggcgcgcctattccctggccgaagccacctagtctcaggtccggtcagccggctcagttttttttttccagtaccgcgcgtcgtgcttccccttccagccgaccgaagctcccagctccagtcatggcgcgtccggttccctctcccatggctccctgtccgaccggccgagatccctccatggccgcgagctcagcccctgctctgctctcgctgccgagttcctctgcgcgtcttctctccctgctggcgcactcaaattcctgtgctcgccggagctctccctgccgtgcggctacagctcctgcgcccggccaagtttccctgcgcgccgcagttcgcccagcccctctgctcgccgagctctatccgctccccatggctgagcttcctgcgcgtgctgccatatccctgcaccagcgccgtagctccctctgtccagcagcttctctctcctggagtttctttgtgttctgctcagaccttgctccattccctcgccggccggtcgcgcgccctggtcggattccctgcgcgccgcgtgagctcgccggcgtgctccccatccggccatggtgccctgcgccggtcgagtttctctctgccgcgcgcagctcgcccaatcctctctgctcgttccgtcgtcgaagcttttggatgcgcgcgcccagctgaccttcctgtgtcgcgcgcgcgaatttttatcgcttggtcttaattcccgtcgcgtcgtcgacctcgccaaatgctttcgtcgtttggccctgtgtcgttaggctcgttgaccgtgttcgctaccgcgtgcacttattcctaatgcgcatcgcacagtagttgggtctcatgctcgtgtggttttgtcgatattctctaccggcagacctcgtcatcgaccatgttcaagtaattgtttggctcctcgtatcccgcttattcgataaaacactcaaatctatagactgtcaacgtactgctgccatacgcggctgtctctgtcacttgcgtcagctcgccaaacctacagctttatatatgttactctctcgtatcgtcgtcgagcttgccgaacctcgttcttccctgctcgatctcgtcgaaccccaaatcccggacgttaggcaaaaataagcgaggtccctgtgcatcgcttatcaagtgctcgatcggagacttcaatcgaaggttgtcgttgatccatgcgtcatcaagaatcccaagagtcgggtgaagacggagtccaatatcgtgatattctccaagtgctcgacaccagagctgaatcagaatccttgccgtgttcgcggatagcgcgtcagatttagaatggtaagccgattcaaaatttccgttagcttgattattaaagtagttcgatg

SEQ ID NO: 153534 - DNA, 775 bp, Zea Mays
tactactgatatagccatctccacgtcgcctcctcaaaaaccctatcgtccctcccgcgcagccaccagcgaagcagcggggcacgcggacgagccgagcgaggcggaggcggaggaggggagatggcgcgcggcgtggtggctggggcgaagggtggtgcggccgccggcggcggcaagaagaagggctccgtcacgttcacgatcgactgcaccaagcccgtcgaggacaagatcatggagatcgccacgctcgagaagttcctgcaggagcgcatcaaggtcgctggaggcaaggccggccagctcggcgagggcgtcaccgtcacccgcgataagtccaaggtcaccgtcacctccgacgggcctttctctaagaggtacctgaagtacttgaccaagaagtacctgaagaagcacaatgtgcgtgactggctccgagttgtagcggcaagcaaggaccgcagtgtatatgagctacggtacttcaacattgctgagaacgaggaggaataggaggcttagaccttatagacgcaccgccttatctctgtcatatgaactctggatgtgttgagacactcatactgtagccttttaagggatgagttttgatgtttaaattggtcttctgaatgtttttaagcgtgctgggacttctcatgtgatgcttacataatcgagtccaagaattgatggttcttgcttccgtcgccgcgtatgagcggctgtcgaactgaatttcaaagtttgcatctaaaatgttggagttagt

SEQ ID NO: 153535 - DNA, 2389 bp, Zea Mays
tgtgggctgggcctcatgtctccaaccttgtgaatcgatccgatcttctcggttcctcctccaaatccaccggcatctccaagccctagccccaaccccgaccgcccatgtccgccatcgcggcctcctcggccgccgccgccgcggcgtcgaactccgatgaggaagaaaactatgaggagtacatcccagtcgccaagcgccgggccatggaggccgagcgcctccgccagctccgcctctccaagtcggcgccggcctctgccgtctcatcactcccgatgccacctcccccgcctcttttgccagcgcagacctccgttcccgacgccgccgcgaagcccagccttctcgtcaaggccacgcagcttaagcgcgcggccccggaggtgaccgccacggagcagcgcatccagcaggagaaggaagtgattgaaaatctctcagacaacaaatcgctcaggtcagtccgcgagatcgccaagggcatcatctacacggaaccgatccagaccgggtggaagccgcccctccgcctccgccgcatgccgctcgccaaagccaacgagttccggcgcaagtggcacatcatcgtcgacggtgacgatataccgccgcctgcgcgtgatttccgggatctccgcctcccggagcccatgctccggaagctgcgcgagaggggtatcgttcagcccacgccgattcaggtgcaggggctgcccgttgtgctctctgggcgtgacatgataggcatcgctttcacggggtcggggaagactctggtgttcgtgctgccgcttatcatggtggcgctgcaggaggaatcattgatgccgatcgtgcctggcgagggcccgtttgggatgatcatatgcccgtcgcgggaactggccaagcagacatatgatgtgattgagcagtttctcattccacttaaggaggccggttatccggagataaggcatttgctttgtattgggggtgtggatatgaggacacagctcgatgtgttgaagaagggcgtgcacattgtggtggcaacgcctggtcggctcaaggatttgcttgccaagaagaagatgaaccttgacaactgcaggtacttaaccttagatgaagcggataggctggttgacctaggatttgaagatgacatcaaggaggttttcgaccatttcaaggatcaaaggcaaactcttctcttttctgctactatgcctcagaagattcaaaattttgcgaagaacgcccttgtgaaaccagttactgtcaatgtgggaagagctggagcagcaaatctagacgtcattcaagaagtcgaatatgtaaaggaagatgctagaattatatacctccttgaatgcctccaaaagactccacctcctgttctcattttctgtgaaaacaaggctgatgtcgactacatccatgagtaccttcttctaaagggagtggaggctgttgctatccatggaggaaaagatcaagaggagagacagaacgcaattgactccttcaagactggtaggaaggatgttctggtggctactgatgttgcatcgaagggtcttgattttcctgacattcagcatgtcattaactatgacatgcccgccgaaatagagaactatgtccaccgaatcggtcgaactggtcgatgtgggaagactggcatagcaactaccttcatcaacaagaaccaaactgagaccacgcttctcgatctcaagcacctgctgaaggaggcaaagcagaggattccaccggtgttggcggagctcaacgatccattggatgatgaggaaataattgccaaggagagtggtgtcaaaggttgtgcgtattgtggtgggcttggccatcgtgtcagtgactgtccgaagttggagcatcaaaagtccatggcaattgctggctcgagaaaagactactttggcggcgggggttaccgaggagaaatatgattgctctaggttgatgcttgcgtgtggttatcagaagctaagatgctgcaatttcaggtcatacatgtcacatgtatcagccaccagaacatccttcctcccccatcgttgaagggagacggtctgcgttaacgaacttgtgatatgctgctgggtatgacactgcttgctactgacctaccatatatcttgtttgaaggacgcaagttgattatcctgccctgttgtaaaatgtaaccagaacaattgctggcgtatttcttaagcaccagttttagcccctttctgtaagcagtcgacatttcagttcaactcatgtatgtatattttgatcttgtatacagtactatatttccatcttacgtctgcttcggcatataagagcaactccagtagttggctaaagaattctctaaacaagaaat

SEQ ID NO: 153536 - DNA, 1123 bp, Zea Mays
ctgatttataaataagcgctgcctgcttggcttcatatcttctcgcccagatccacaagtttcgtgggtagaggaggcactagatactgtgccagatcggggtctggtagtggcagttgggtgattacgacggagtgggatgggcctcctcgacaagctgtgggacgacaccgtcgcgggcccgcgcccggacaccggcctcggccgcctccgcaagcagcccgcgcgccccgccgccgttaagatcagtgatccggccggggacgctgcagcgctcgtgccgccctcgccggcttcgggtagcgaggagacgccggtgaaggtgacgcgcagcatcatgatcaagcgtcccgcggggtacccgtcttcgccgaggagcgcggcaagcacgccgccggcctctccactagggactaccccgcccatctcgccgtttgccggcgctggtggtcgcttcagaaggaaatcatcatccgacgcatatgagagggcaacccctccagggacgaccagccaccctcctcccttcgaagtgtgaaccggctgcaccctcacacttgttttgctccttgacaagcatctcttcacctataataaggtagaggcagggaggagagaagacgacatcaagaggggaacggggatgagttgcgggtttacctctgctgtgatatattgtaggtgccactatgtgtattgttcccccctatctactacgtggcataggttgtattctagtatgttgaaagctcatggtgccgtgctgtatcaataaggtgttatgcgcatagagtggctcaggaccagggctgcgtttgcgctttgccactggctgtgttgtatgtttcttctgctgctatgccattagggtttagggatggtgtgtggatggcgtcgtgcttgtagtgttagctgggtttgaagcggactacatgtaggtttgttcaatgtctggtatctattagctgaaggtgtttgcctgtaagttgtaactctctgtgaactgtgatgcgggataatgctaagaatagatgatcgttctaagtgaccaagtaattgagtgggagtcggtctaagtggtgagtaattgagcggattaacaatgagtgactgaattatcgaa

SEQ ID NO: 153537 - DNA, 928 bp, Zea Mays
ctgatttataaataagcgctgcctgcttggcttcatatcttctcgcccagatccacaagtttcgtgggtagaggaggcactagatactgtgccagatcggggtctggtagtggcagttgggtgattacgacggagtgggatgggcctcctcgacaagctgtgggacgacaccgtcgcgggcccgcgcccggacaccggcctcggccgcctccgcaagcagcccgcgcgccccgccgccgttaagatcagtggtggtcgcttcagaaggaaatcatcatccgacgcatatgagagggcaacccctccagggacgaccagccaccctcctcccttcgaagtgtgaaccggctgcaccctcacacttgttttgctccttgacaagcatctcttcacctataataaggtagaggcagggaggagagaagacgacatcaagaggggaacggggatgagttgcgggtttacctctgctgtgatatattgtaggtgccactatgtgtattgttcccccctatctactacgtggcataggttgtattctagtatgttgaaagctcatggtgccgtgctgtatcaataaggtgttatgcgcatagagtggctcaggaccagggctgcgtttgcgctttgccactggctgtgttgtatgtttcttctgctgctatgccattagggtttagggatggtgtgtggatggcgtcgtgcttgtagtgttagctgggtttgaagcggactacatgtaggtttgttcaatgtctggtatctattagctgaaggtgtttgcctgtaagttgtaactctctgtgaactgtgatgcgggataatgctaagaatagatgatcgttctaagtgaccaagtaattgagtgggagtcggtctaagtggtgagtaattgagcggattaacaatgagtgactgaattatcgaa

SEQ ID NO: 153538 - DNA, 637 bp, Zea Mays
agtcgcgctacttcaggatgctccccccaaaaccttgatgatcgatgtttacctcaacggatgacgacactgatacgacttgtttttggaggccccgctctatccataggaatcgagacaaggatctagttgtagtagaagaagtgaagggtttgtgcaagagaagacaaatggatgatacgattgaatgttgggatcagccacacgtaagtctagggtatcgacctagtcgccgccggccggaacgagaagaccgagcgcactgcatacctcaagctcctcctcaagctgtaccgcttcaacgccgtgatcctcaagcggtacttcattagcaagaccaaccgcctgtcacaacccagggacggtggaacgcaagccaccgtcgtgagctgttgccaggcggaagaacaacttccagatgcgtttcaacaggaaacgtgactgacgacaagagggtctacgaagtatctgcagtgaaggtggctgcgtgggcacggattctgagcgcgggtgacgagtgcctcgcctttgaccattgtccattgtccattgtcaggttgatggtcatctattgatgtacgctctattttttgtatctgaatgtgcagaattaatagttttatgaaaaaggcaaaca

SEQ ID NO: 153539 - DNA, 453 bp, Zea Mays
accaaaccctagaacccgggccgccgccgccgcaggtcctcactggcactgctcgccgcgcgttgtagtggagacgtctaacctcctcgcaagcttctcgtctccggtaaccatggaccgttgtccgtatttgatacatagcccactttcctcgtgccaagcagggtatcgacctagtcgccgccggccggaacgagaagaccgagcgcactgcatacctcaagctcctcctcaagctgtaccgcttcaacgccgtgatcctcaagcggtacttcattagcaagaccaaccgcctgtcacaacccagggacggtggaacgcaagccaccgtcgtgagctgttgccaggcggaagaacaacttccagatgcgtttcaacagttgattacccagtaatcaagtagcactcctgacaccgccctgcctctctcgctccaccgtctcatcagcttca

SEQ ID NO: 153540 - DNA, 950 bp, Zea Mays
cttctctgtttcctccatcttttggcccatctgcaccctctcggtcgccgcgcgctccgccatcgaagcagccaactccgaccgaaccatcaactgttgttgggcgcgttccacttccttgagccgagcgcaaaccgcctccagagtctccatcatccgcccccaactctcctgcgttcctcgatcgtgatccgccatggcgttcaggatgaagcgggtctggacggatggctttgcagcgggcgccgtgatgaagcagtccgaacgccgggaagacgactccgccctgcgctcaccggaagccgcgcttgccgttgaagaccccaccgccgaggaccttgaatccgataccactgtcacaacccagggacggtggaacgcaagccaccgtcgtgagctgttgccaggcggaagaacaacttccagatgcgtttcaacaggtatggtggaatactttctatatttcttttctgtccattctctagtatttgtccagtatttatagtgcaacactaggctaatacagcccactagaaatatggccacaataggcccaattcacagattacatcttcattacagttgattacccagtaatcaagtagcactcctgacaccgccctgcctctctcgctccaccgtctcatcagcttcatggaaggggggaggtctcgcttcgatttccattcagattttgtttgttgaatgtgttttccagttatgtgtcaaattgctgtgatcgtaggaaacgtgactgacgacaagagggtctacgaagtatctgcagtgaaggtggctgcgtgggcacggattctgagcgcgggtgacgagtgcctcgcctttgaccattgtccattgtccattgtcaggttgatggtcatctattgatgtacgctctattttttgtatctgaatgtgcagaattaatagttttatgaaaaaggcaaaca

SEQ ID NO: 153541 - DNA, 972 bp, Zea Mays
gctgatgtgataatttaatacattcttcaagcattgtttactgtactctttctttctttctttcttttgtttcactgctatgtgataatagaatggcagatgatggataatcttatcctacacactgaatctaatgtgttgaccaatactccgcttattgtctgatgccatcaattaacaagatctctgttcattgcttcttgggcatttgaaggaactttgtggactaaaagggagcaaattgaggtttgattgttctgcatttttttcttgtaacatttattaaatcatcagggtgtttactgttaaaatacttgcatacattcccatctgtttgctacatgaatatcattatggtataatgggttgtaaaagtttagggtgggaagcggtgtttgggtggctactctcttgtttattctttcggttatttggatgagaaatagattttgttgtcccattaacttatgtaacatctgaatctcactactaagaatgctagggaaaccgtgaaggactttggctctgcgtttggtgtgccacataaccacacgggcgcaagggaaggaagcttgagaaggcaagggggaggaggaaaacctctgcttccacctcggaagagaagcaacgaaacaacgaagagatgaaagagaatagcatcaaagaggggtgactgggctgtggcaccgaggtaacacggctcggcgtcatagatcttggcgttgaggtgcgtccttcgctggcaacaacagactgacgtggcgtcgacgtggccgagctcaagtcatgattcatggcactgaggtccagtcaaaatcggcacctgggcatgcatgttacgacgttacgtatgtagcgagcatgcatttggacttttggagcctcgtcgttttcgtactctagccatgcacctactaatgttgtctttgttgcttcaaccccaaccggtatggatgatggatcgcttcctca

SEQ ID NO: 153542 - DNA, 316 bp, Zea Mays
ccccccttccacgaggcggacctgcacgagctcacgcactcgggcacggtgggcggcggggtctgcatggcgcggggcggcgcaatctcatcggcggcgctgaggccctcgtgcggtcgccgccgtctccagtggacgcgaatcgagcgcgcagctgcagggagcggcgagtcgcgtcgagaccgggagagagggcgggctttgccgaggggggagggaggaaggaaggaatgaagggaggggcggggaggcggaagaactcgaagaagggataacacgagacggaggccacacaaaggccgcggccgtggtgaaa

SEQ ID NO: 153543 - DNA, 1476 bp, Zea Mays
atagatatggggatcgagagcttcgttcttggtcctccattcaagctctccacacccatacttctctatctctcttgcttccattgggcaatctgttcgtcaggacttaggaggccgcgcgtcgggcgtgacttggtagagtgagaaactcggggagagaagagaagatgatgtcaagggagcgcaagaaggcggctgcggctctccaggagaagctgaagatcctccgctccatcactcattcccacgctctgagcaacacatcgataatcatggacgcgtcggcgtacatcaagcagctgcagcagaaggtggtgaggctgaaccaggagattgcctgcgcgcaggacgccctgagacacaagtcctcctcctatccgacggtgaccgtggaaaccctaggagtgcaggggttcctcgtcaacgtgttctccgacaagagctgcccggggctgctcgtctccgtcctggaagccttcgacgagctggggctcagcgtcctccaggccaccgcgtcctgcgcggccgactccttccgcctcgaggctgtgggcggggagaacgtggtggacaacgtggacgagcacgtcgtgaagcaggccgtcctgcaggccgtcaggagctgccccgagagcggctgcggcggcgagcacgacgacgaagagtcgctaggctgagcgcgcgcgtaagcaggcacacacgcacacgcctctacttgcattgcattggtcgtcctctcatgtgtcagcgtgcccagctggaccgcgtgtagctagtcgatcgccgtctgaactctcaggagaccccttgttttgctagctaatagcatctcggtttccctctcttccatttgatttttttcttatttatttatgcttctatttcatctacctatcggtggcatgcaatgcaagctgaaacatatatatagccgatgatccggtgagttcgttcgttcgtagcatgcagcaccaccactccctagctgtgtaatgatagtattagggtgtgtttggtttggcttttgccccctaatataaaagccaaaagccaaccaaagggctggatccaggaagcagctttttctaaaagccgactttctcgtagtgcaaaactgaaagcacccctagacctgcttttagtggcttttggatggaactgtgaaaacatatatcgaagaaattttaacgacttttagtggtttccaccaaacgatttttagctttttaacagcacacagcctacaacagcttttttcacagctcacagcccacagcaactttttccacagccacagcccaaccaaacagacccttagaatgatgatgcaatttacatgtataacgtacgatcatgcatgtatgtaagaatgatgatggagtgggaggttgcaacaagcaaagcggaatagagctctggcatgcagctagcttattattacccttcatgcatgtatattgatgcaggtttctatat

SEQ ID NO: 153544 - DNA, 1869 bp, Zea Mays
atagatatggggatcgagagcttcgttcttggtcctccattcaagctctccacacccatacttctctatctctcttgcttccattgggcaatctgttcgtcaggacttaggaggccgcgcgtcgggcgtgacttggtagagtgagaaactcggggagagaagagaagatgatgtcaagggagcgcaagaaggcggctgcggctctccaggagaagctgaagatcctccgctccatcactcattcccacgctgtataacataatctcctctccttagcttgttcgatccttgcttcttcttctgcttcttgattgcttgcttgattccttcatggtatagttttctaattaattcttttcactgatatttagaattgaacaactatatggttgatgttgtttgctgtggctggattaaaactgttcggactgctgcacctagctgtgatccatagagaagtcacagcgaacaggctgcatccatcatttaagaatttatcatttctgcaaccttcttgtcgtcagttgctgcattagctattactttctcctgctctttgaacgtcgtcgtcgcatccagatattaaatatgattcttgttcaattacatgccatggataatacaatatacacgcacgcgcgcagctgagcaacacatcgataatcatggacgcgtcggcgtacatcaagcagctgcagcagaaggtggtgaggctgaaccaggagattgcctgcgcgcaggacgccctgagacacaagtcctcctcctatccgacggtgaccgtggaaaccctaggagtgcaggggttcctcgtcaacgtgttctccgacaagagctgcccggggctgctcgtctccgtcctggaagccttcgacgagctggggctcagcgtcctccaggccaccgcgtcctgcgcggccgactccttccgcctcgaggctgtgggcggggagaacgtggtggacaacgtggacgagcacgtcgtgaagcaggccgtcctgcaggccgtcaggagctgccccgagagcggctgcggcggcgagcacgacgacgaagagtcgctaggctgagcgcgcgcgtaagcaggcacacacgcacacgcctctacttgcattgcattggtcgtcctctcatgtgtcagcgtgcccagctggaccgcgtgtagctagtcgatcgccgtctgaactctcaggagaccccttgttttgctagctaatagcatctcggtttccctctcttccatttgatttttttcttatttatttatgcttctatttcatctacctatcggtggcatgcaatgcaagctgaaacatatatatagccgatgatccggtgagttcgttcgttcgtagcatgcagcaccaccactccctagctgtgtaatgatagtattagggtgtgtttggtttggcttttgccccctaatataaaagccaaaagccaaccaaagggctggatccaggaagcagctttttctaaaagccgactttctcgtagtgcaaaactgaaagcacccctagacctgcttttagtggcttttggatggaactgtgaaaacatatatcgaagaaattttaacgacttttagtggtttccaccaaacgatttttagctttttaacagcacacagcctacaacagcttttttcacagctcacagcccacagcaactttttccacagccacagcccaaccaaacagacccttagaatgatgatgcaatttacatgtataacgtacgatcatgcatgtatgtaagaatgatgatggagtgggaggttgcaacaagcaaagcggaatagagctctggcatgcagctagcttattattacccttcatgcatgtatattgatgcaggtttctatat

SEQ ID NO: 153545 - DNA, 2636 bp, Zea Mays
atagatatggggatcgagagcttcgttcttggtcctccattcaagctctccacacccatacttctctatctctcttgcttccattgggcaatctgttcgtcaggacttaggaggccgcgcgtcgggcgtgacttggtagagtgagaaactcggggagagaagagaagatgatgtcaagggagcgcaagaaggcggctgcggctctccaggagaagctgaagatcctccgctccatcactcattcccacgctgtataacataatctcctctccttagcttgttcgatccttgcttcttcttctgcttcttgattgcttgcttgattccttcatggtatagttttctaattaattcttttcactgatatttagaattgaacaactatatggttgatgttgtttgctgtggctggattaaaactgttcggactgctgcacctagctgtgatccatagagaagtcacagcgaacaggctgcatccatcatttaagaatttatcatttctgcaaccttcttgtcgtcagttgctgcattagctattactttctcctgctctttgaacgtcgtcgtcgcatccagatattaaatatgattcttgttcaattacatgccatggataatacaatatacacgcacgcgcgcagctgagcaacacatcgataatcatggacgcgtcggcgtacatcaagcagctgcagcagaaggtggtgaggctgaaccaggagattgcctgcgcgcaggacgccctgagacacaagtcctcctcctatccgacggtgaccgtggaaaccctaggagtgcaggggttcctcgtcaacgtgttctccgacaagagctgcccggggctgctcgtctccgtcctggaagccttcgacgagctggggctcagcgtcctccaggccaccgcgtcctgcgcggccgactccttccgcctcgaggctgtgggcggggagaacgtggtggacaacgtggacgagcacgtcgtgaagcaggccgtcctgcaggccgtcaggagctgccccgagagcggctgcggcggcgagcacgacgacgaagagtcgctaggctgagcgcgcgcgtaagcaggcacacacgcacacgcctctacttgcattgcattggtcgtcctctcatgtgtcagcgtgcccagctggaccgcgtgtagctagtcgatcgccgtctgaactctcaggagaccccttgttttgctagctaatagcatctcggtttccctctcttccatttgatttttttcttatttatttatgcttctatttcatctacctatcggtggcatgcaatgcaagctgaaacatatatatagccgatgatccggtgagttcgttcgttcgtagcatgcagcaccaccactccctagctgtgtaatgatagtattagggtgtgtttggtttggcttttgccccctaatataaaagccaaaagccaaccaaagggctggatccaggaagcagctttttctaaaagccgactttctcgtagtgcaaaactgaaagcacccctagacctgcttttagtggcttttggatggaactgtgaaaacatatatcgaagaaattttaacgacttttagtggtttccaccaaacgatttttagctttttaacagcacacagcctacaacagcttttttcacagctcacagcccacagcaactttttccacagccacagcccaaccaaacagacccttagaatgatgatgcaatttacatgtataacgtacgatcatgcatgtatgtaagaatgatgatggagtgggaggttgcaacaagcaaagcggaatagagctctggcatgcagctagcttattattacccttcatgcatgtatattgatgcaggtttctatatatatcatatttttcataatgttctataggatcagagagtgtcgtaccctccgctgactcaaatactcaatccatcatgagatgaaatcgaaatgaatatgagctccttccaataaaagactggacatgaacaaaatcagcagctagcagtccctaacaaactgctcctattccatggacgtacgtacgcggtggatacttgctagctcccggacggtaattactagtcggcagctcgacctgaaacatgtacgtacggcgcctgaagaacgaagggcatcgatcatatcgatgagatgcattactacagtgaacgtagagttgattgatctgcccagacaaaacaccagtcacgggctccaagaacacaggaaggcagccaatgggatggagctagtccccacatggaccggacatcggaggcgtggtcattcggctctccctcccaagactcccaacaaacaccgcgtgccgatacactgccccggccgcccgtcgctctcaccgtgaccgtggcccgtgggatcgacggggagacaggtttaggtcacgtatttctatattttatataataaacaagtacattttatgataagtaagtaatatatatccattctaaaatagtagtcgttttaaggaattagtgggttcgtacaattgttgatacatgtgttttatatatgtgtctacatttatcattatccatttgaatatagacataaaaactagaatttaaaacgactactattttagaacggagggaaaaat

SEQ ID NO: 153546 - DNA, 204 bp, Zea Mays
tgtttgtttgtcatcttgagggaaggagacctcagctagttccttgattcctacatgaaacccggaacagatcaaacctgcaaaaccttaaggtattattttgtattttttattcaggcagggaaaatggtgataaacacaacatattggttgaaattcataccataaatatccatttgatcaccctttgcttgatatctttac

SEQ ID NO: 153547 - DNA, 2257 bp, Zea Mays
ttttctcttttttttagtttttaaattaggaggggctgtgctctcaacggccaacggctccttggtgcggcgggcggtcaacgtctctctcgccggggcgctctccatgactccatcttaaaacccacagctttcttcccgtcttggcgtcttcccacatatgagtatatgacatatccccactctagccaagtagccagtcctctctccactctcctctcgcaccaccaaaaaaaccggccccaccgttcgccatgagctccgaagcagaatgcgcagctccagccgccgccgcgccggatggggcgggcggcggcagggtggagatcgacacgtccgcgccgttcgagtccgtgcgggaggccgtcgaccggttcggtggcagcgccgtctggagctccgacctcgtcaggcgcatgttcgcgccctccaagaaacatgaacagtctgaccaagctgcagaggccatcaacgccgaggagcaggctgcacagctagagaacgagctggcagttaaagaaagggagactcttgatgtgctcaaggagctggaggcaaccaagaagatcatagcagacctgaaactgaagatacggaaggaagccactgaaacatcccctgaagaggctgctgaccaggtttctgaggcgggagctcaacagcagaaacctgaaaacaccaacattgatgtggtggtggacatggaaggtgtagaggagaaccattcaggttcggttccggtggatctcgagcaggcgaaggcaaacctgaacagagctacatgtgatctggctgcggtgcgggctgcagtcgagctactgcgaaacagcatagcgaaagagaaagtgttgcttgaaagagcccgagagaagctctcctctgatacttcgtcggtttcttctttggaggatgacctggatcagacagcgcaaaagatggaaacgctgaaggatctgcagaggagacgcaaagacccctcagatatttttgtagagatcaagaaaatgaccaccgaggtgcagcagctcaggagcatggcagacgattcgaaatctgaggcaatggtgttggctgcagaaatcgagcaggtaaaggccagcatttgcacggctgaggtcaggtgcattgcagccaggaagatggaagacgccgctagagcagcagaggccctcgcgctggccgagatcaaagcgctagtgagcagcggaagttctttcgaaggagacaccgcttccgatggaggaggggtaactctctcgatggaggagtatttcaagctgtgctcccgagctctggaagctgacgaaagctccaggaggaaagtggagaacgcaatgctgcaggtagacgcagctgacgattcagagtccgagtctgtcaagaggctcgaggatgccagagtggaggtcgaggagtgcaagaaggcgctgcaagaggccctgaggagggtagaggctgcaaaccatgggaagtttgcggtggaagagattcttcgtagatggaaatctgagagcgggcacaagaggcggtctcttggtggctccccaagattcaaaagggcggcagctcaccgtcgcgaagattcgcacgccacggatatgatctctgatgcttcagacagaccacccaaaccaacattgtcgatcgggcagatactgagcatgaagctaatgggacctgatgggtacgacaagagtgtttgggatgacaaaacaggcgagataccggagatctcgctcggtcagattataaacaggagtggtgttctgtgcagagaggatgtggctgctcgcagaagaatttcggggaagaggaagaagtttgcattgactgggctttctgttctcctggccaagcaatcgaagaacaagaagaagagagaatccttttaagctggtacaagtcgtcccacaaatatcagtgctgtactttatagtcttgtgatatgcagttgtagttcaaccttgtcattagtagctggttatatcgagatattttgtatgaggaatgaggtagtatattttagttcctcatgttaaatgtaccggtagcgattatttgctgctaattagagtagcgactggcagttctctgctatgtatgctgttgaggtctacgtaattggacccaaaatttacatttctgcgtttgaggtctatggtctaaaatttgccttttttttgtacaacatctgaagcacaagcaccattatccttggtggtcgtcaattatacaagagataaaaaaacaaaaaata

SEQ ID NO: 153548 - DNA, 1211 bp, Zea Mays
agaatggcggcgcactcgtgctgacctcgttcggcttcggtcctaccgccgccgcgtcgtgggaggataatcgaactgcttcccttctcgtcttccctaacctttccgtccttcccggattatttccatcaccagagcgtatcgcgtcgtctcctctctatccgattccgcccgcggacccaggctcccgcatggacgctgccggcggggtggaggccgccgccaacggcgggatcgagggctccgccgacccctgcagctcaggcggtgccggcgggtacaggcgctccgtccaccagatcgccggcggcgggaaagctgctgatatcatcttatggaggcgagcgcgtgttacatttggtgttatatttggtgctactctggcatggtggttgtttgagaagtctggactatcattattaactatctgctctgatatacttctcatcttgatagttctgcagttcataagggttaaaatagctggactgctagataggcagcctaggccactacctgagttagttttatcagaggagatggttagcaatgctgcggcttcattccgtgtgaaagtgaacagcatgctgatgatagcgcatgacattactcttggcaaggacttcaggctatttttccaggtcgtgattgtcttgtggctgttatctgtcattggaaatttctgctcgtctatcactcttgcttacataggaaccgttgctttggtcacaatgcctgcattgtacaacaagtaccagaggcctgttgataggtatgctgggatggtctaccggaacatttcgaggcattacaagatagttgatgagaatgtgatcagtagactaccgagaaggtttatcagagataaagaggactgatactctgaaaaatgaactcgctaagctagtcaggtaatcttttacctacattgtcagaccttacatggtgtgaaactatagagctacgaaaacagagaacggcatggaacctacagtagataccgttgcagtgtactcttgggcaaaggtttgagacgaaattaaaatgtatagctttctgtgttagctctttgcaacgaactggctaaatgttgttaaaaataacaaaagcaattgtcatgggaagttgaaaatgaagtggttgtaacttgtgaaagcgagtgctgtagcaggtaccagcaatggcaacagactgaatctactgcagggtac

SEQ ID NO: 153549 - DNA, 1296 bp, Zea Mays
agaatggcggcgcactcgtgctgacctcgttcggcttcggtcctaccgccgccgcgtcgtgggaggataatcgaactgcttcccttctcgtcttccctaacctttccgtccttcccggattatttccatcaccagagcgtatcgcgtcgtctcctctctatccgattccgcccgcggacccaggctcccgcatggacgctgccggcggggtggaggccgccgccaacggcgggatcgagggctccgccgacccctgcagctcaggcggtgccggcgggtacaggcgctccgtccaccagatcgccggcggcgggaaagctgctgatatcatcttatggaggcgagcgcgtgttacatttggtgttatatttggtgctactctggcatggtggttgtttgagaagtctggactatcattattaactatctgctctgatatacttctcatcttgatagttctgcagttcataagggttaaaatagctggactgctagataggtaagcaacccggatcctccttccattgtatctcaaatttggatgaattgcctatatgttatcatactggtttaactatttgcaggcagcctaggccactacctgagttagttttatcagaggagatggttagcaatgctgcggcttcattccgtgtgaaagtgaacagcatgctgatgatagcgcatgacattactcttggcaaggacttcaggctatttttccaggtcgtgattgtcttgtggctgttatctgtcattggaaatttctgctcgtctatcactcttgcttacataggaaccgttgctttggtcacaatgcctgcattgtacaacaagtaccagaggcctgttgataggtatgctgggatggtctaccggaacatttcgaggcattacaagatagttgatgagaatgtgatcagtagactaccgagaaggtttatcagagataaagaggactgatactctgaaaaatgaactcgctaagctagtcaggtaatcttttacctacattgtcagaccttacatggtgtgaaactatagagctacgaaaacagagaacggcatggaacctacagtagataccgttgcagtgtactcttgggcaaaggtttgagacgaaattaaaatgtatagctttctgtgttagctctttgcaacgaactggctaaatgttgttaaaaataacaaaagcaattgtcatgggaagttgaaaatgaagtggttgtaacttgtgaaagcgagtgctgtagcaggtaccagcaatggcaacagactgaatctactgcagggtac

SEQ ID NO: 153550 - DNA, 692 bp, Zea Mays
gtgctgacctcgttcggcttcggtcctaccgccgccgcgtcgtgggaggataatcgaactgcttcccttctcgtcttccctaacctttccgtccttcccggattatttccatcaccagagcgtatcgcgtcgtctcctctctatccgattccgcccgcggacccaggctcccgcatggacgctgccggcggggtggaggccgccgccaacggcgggatcgagggctccgccgacccctgcagctcaggcggtgccggcgggtacaggcgctccgtccaccagatcgccggcggcgggaaagctgctgatatcatcttatggaggcgagcgcgtgttacatttggtgttatatttggtgctactctggcatggtggttgtttgagaagtctggactatcattattaactatctgctctgatatacttctcatcttgatagttctgcagttcataagggttaaaatagctggactgctagataggcagcctaggccactacctgagttagttttatcagaggagatggttagcaatgctgcggcttcattccgtgtgaaagtgaacagcatgctgatgatagcgcatgacattactcttggcaaggacttcaggctatttttccaggttcactgttatgcatgtactttgtgttgatttttttggtattcctgtcattgctgagacattttctc

SEQ ID NO: 153551 - DNA, 1211 bp, Zea Mays
gtgctgacctcgttcggcttcggtcctaccgccgccgcgtcgtgggaggataatcgaactgcttcccttctcgtcttccctaacctttccgtccttcccggattatttccatcaccagagcgtatcgcgtcgtctcctctctatccgattccgcccgcggacccaggctcccgcatggacgctgccggcggggtggaggccgccgccaacggcgggatcgagggctccgccgacccctgcagctcaggcggtgccggcgggtacaggcgctccgtccaccagatcgccggcggcgggaaagctgctgatatcatcttatggaggcgagcgcgtgttacatttggtgttatatttggtgctactctggcatggtggttgtttgagaagtctggactatcattattaactatctgctctgatatacttctcatcttgatagttctgcagttcataagggttaaaatagctggactgctagataggcagcctaggccactacctgagttagttttatcagaggagatggttagcaatgctgcggcttcattccgtgtgaaagtgaacagcatgctgatgatagcgcatgacattactcttggcaaggacttcaggctatttttccaggtcgtgattgtcttgtggctgttatctgtcattggaaatttctgctcgtctatcactcttgcttacataggaaccgttgctttggtcacaatgcctgcattgtacaacaagtaccagaggcctgttgataggtatgctgggatggtctaccggaacatttcgaggcattacaagatagttgatgagaatgtgatcagtagactaccgagaaggtttatcagagataaagaggactgatactctgaaaaatgaactcgctaagctagtcaggatgcttgtccatatcatatataggcccaacagtgtgaatcactcgagaaacaggaagctcgatgtgacagctggtattgaggagcgcgaagggattactgagtcgatgtctgaagaggctgcatcagcaaggatgagtctggtcatctggtgccggacggtgaccaggagtaggaaagaggaaagggccgtgtgggtggtgtttatggccatgttggccgtttgtggtgtggggcatctgtggcagtgagccgacccattcacgagtatattccgaaccctacagtaagcaatgagaataacgtgaaccaatttcc

SEQ ID NO: 153552 - DNA, 639 bp, Zea Mays
atggcggcgagctcggccagctgctcgggagtcatggccttcttggcctccatgacctcggccagcgacgccgcagcatccttgcccgcgccgccgccaatgccgggcgagaagaagagacccgagccgtcgacggagctgctgtggcggtgcttggggcgcgggggagacgacgtctcggcggcgcggtcgcggtcggagggcccggaggatgagatcttctcgatgtccatgaaggtggagaagaggtcgtcctccgagccgatatcatcgaaggtgtcgccgtcagggccaccgccgccgccgaggccgaggtcgtccgggaggcggaaggccacctcagatctagcccggcggtggtgcgccgcgcgcgcggcgacaggcgccggcgccggcgccggcaccgccggtggcggtaaggcccggcccggcggatcggcaggctccggctgctgctgcattgagaggccggcgcagccccgcctccgtcgctgccgctctcggctctgtccgcacgagggcgagcgcaggtgtccgagccagaggccggaggaggaagggtggataggcaggcaggcacgcaggccgctgctgctgccgtgtttcgtggtgctttcggggtttggttttggattttaa

SEQ ID NO: 153553 - DNA, 574 bp, Zea Mays
aaaaaagaagcggtttttgataaatatgtgaagtcctaaaccagtatgcggaacaaatgttatacggtaccaggatggcgatgtacagagtggaacggacacaactgtcaacgacataacttttttaggtcccaactcgggcaattactatggtgttggatcaaagatgctttgaagtttgaagcgcatccaaaacaaatacagtgagacgaattttctagggcctgcgagtgccaagagaaaagatgggaccctttgggtaccatgcctgacaagaaatgattggttttcttcgtaatctgattagtctctctggcagttgacgattttttacagcaacaaaggttgattgtgcaaagggagaggtcatcagggtggaaaattttctactgtgattgcaaggaggccagaggcaactccgattgaataatcttcaaatcattgtatcctctgtaatagtggtacttagtttgtgatgtgcactgttactgtatttggatttgctcatggtttctgtggagctggttgagctgaaccttgtgttttgctatctgtgtcccttggatttcctaaa

SEQ ID NO: 153554 - DNA, 929 bp, Zea Mays
gcggccgggcgaactttattacgcggactgctttgcggtcaggacggctaacagagagtttcgcgcgcggtcaacagatagcttgcgcagggacttcgcggtcaacagatagcttgcgcagggacttcacggcgtgcggtggagctgagcgccggcaagcgtcccaggcgcgcgacgagctgagggggtgagctgcgcgtgtacagaggacagggaaggcgcgggccaggatcggccatcggcgcggcaatccgaagcttcggccagcaggacaccgagcagaagttcgacacacgcagggagatggacgtcgagagcttgaagcagactggagcaccactacgcgcaggggagagccactgcttggagacgcgccgcgaggtgcgtggccagagaggacattcgagctgggaagatgccggggctgggcagaggatgggctcgagctggagacgagctcggtcgggacctaggcaccgggcacgcgagatccagcgagcgcaggggcgcggcacagggagtcgggcgagcagggagcttcgcgcggcccgcgatgaaggagaaggggcgcgcggcgatggggcagagggaagctcgacggcggccgagcgaaggggcgagcgcagggatagactcagcggggaagcaaggagatgggcttcgagctgagcagagcgcggcgaagggctgcagcgctggggctcgactggaagaagagcgctcggctggccggagatgagagcgagtgcgtgcaagcagggagagagagacacgcggggaggagtaggcgctgggagagagaacgcggcatgagcagagagggaggagataaggccgcgtcaggggagaacggcggcggaatcttcaccggcggtgagcggcgaccgtagaaaaatcaggacagggtgagaacgatgacgtgtaggaga

SEQ ID NO: 153555 - DNA, 2067 bp, Zea Mays
acgagctcgcccgagcaaaccgtcgccggtgcctaccgttcccgtcgccggtgcctaccgttcccgtcgccgcccgtcctctctacggagcccatataaaagttgatctcatgaattcgggaagaacagcggcatccaacgtttcctgttcagcgggaaacagcggcagcttccctccctgcctccttccaggatttcttgggttcccaattgttttcgtcaatttccacttgttcaaggccattgttcgcagccctgcatcttccgttgtcttgggaatgtgtggaaggagccttccttaaattgtggcccaagacttcctagtcatcttgcggaatctcataggttctcgaagatggtttcctctgagatgacctctgtcacagtgacgcgtgcacagggctccaagctttttagagggaagatccttctgccagggggatcctcagatgttgtgccttctgaaaatgttgagttcgatttttctgatgtttttgggcctagtgctgtccatacacacacagaagtgagtgttctcactctgggcagtccagcacctgtggctgagtccaacgatgaggtttacaatgaccctgatgtcattgtcaaacgatcccattcccttgttggtccatcatctcttgttagtcaatctttgccatttagcaagcttacattacacaagaaagacagctcattggaaatttcagagtgcctttccaaagaaaaacaaatcaaccaagggtcctttagtgatgatgagtttgatgatgtaaaaaaggagaatgagggtgttggacttgacgacttcgaagttctgaagctcgttggccgaggggcatttggcaaagtatatcaggtgagaaagaaaggtacttctgaaatatatgcaatgaaagttatgaggaaggacaaggttgtggagaagaatcacactgagtacatgaaagctgagagagatatactgacaaaggttgaccatcctttcgtcgtgcagctgaggtactcctttcagacaaagtaccgactttaccttgtcctggacttcataaacgggggtcatctcttcttccagctttaccaccagggtttatttagggaggagcttgcacgcatctacgctgctgaaattgtatctgccgtagcccacctccatgccaatggtattatgcatagagatttgaagcctgagaacatcttactggatgctgatggtcatgctatgctgaccgactttggcatggcaaaagaatttgatgaaaacactagatcaaactcaatgtgtggtactgttgagtacatggccccagaaatttttcagggccgaggtcatgataaggctgcagactggtggagtgtgggaatccttctttttgaaatgcttacgggaaagccaccgtttgttggtggaaacagatgcaagattcaacagaagatagtaaaggagaagataaagctgccaacttatttatctagtgaagttcactctctgttgaaaggattactgcacaaagaagctggcaggcggctgggaagcggaccaggcggcagtgatgaaatccagaagcacaagtggttcaagtctgtaaactggaagagactcgaggcccggcagatcgagccaagcttccggccgaatgttgctggcaagacctgcatcgcaaactttgacaagtgctggacgaacatgtccgtgcttgactctccagtggccagccctgttgcagccaacagcaactttgtggggtacagttatgtgaggcccgcaccgttcctccaaaagccgagcccacttggctgaggaactgcttccgtggtctgagatctgccccggagttcaaatatttatctttttgactccgaatcctatgtatttcatcaagacactagtgttggagatctaaccttattgaggacaacaacttggttggtgattcccaaaaagttcctattgaagtgccatggttattatcctctgtttttgcttattgccattccttgtttgtgtatcttcactggtgaatattgtgataactagacaccgtcaagccaaaaagggaaaaaaaa

SEQ ID NO: 153556 - DNA, 2095 bp, Zea Mays
acgagctcgcccgagcaaaccgtcgccggtgcctaccgttcccgtcgccggtgcctaccgttcccgtcgccgcccgtcctctctacggaggtcctttttcagatatcgctagggattgcccatataaaagttgatctcatgaattcgggaagaacagcggcatccaacgtttcctgttcagcgggaaacagcggcagcttccctccctgcctccttccaggatttcttgggttcccaattgttttcgtcaatttccacttgttcaaggccattgttcgcagccctgcatcttccgttgtcttgggaatgtgtggaaggagccttccttaaattgtggcccaagacttcctagtcatcttgcggaatctcataggttctcgaagatggtttcctctgagatgacctctgtcacagtgacgcgtgcacagggctccaagctttttagagggaagatccttctgccagggggatcctcagatgttgtgccttctgaaaatgttgagttcgatttttctgatgtttttgggcctagtgctgtccatacacacacagaagtgagtgttctcactctgggcagtccagcacctgtggctgagtccaacgatgaggtttacaatgaccctgatgtcattgtcaaacgatcccattcccttgttggtccatcatctcttgttagtcaatctttgccatttagcaagcttacattacacaagaaagacagctcattggaaatttcagagtgcctttccaaagaaaaacaaatcaaccaagggtcctttagtgatgatgagtttgatgatgtaaaaaaggagaatgagggtgttggacttgacgacttcgaagttctgaagctcgttggccgaggggcatttggcaaagtatatcaggtgagaaagaaaggtacttctgaaatatatgcaatgaaagttatgaggaaggacaaggttgtggagaagaatcacactgagtacatgaaagctgagagagatatactgacaaaggttgaccatcctttcgtcgtgcagctgaggtactcctttcagacaaagtaccgactttaccttgtcctggacttcataaacgggggtcatctcttcttccagctttaccaccagggtttatttagggaggagcttgcacgcatctacgctgctgaaattgtatctgccgtagcccacctccatgccaatggtattatgcatagagatttgaagcctgagaacatcttactggatgctgatggtcatgctatgctgaccgactttggcatggcaaaagaatttgatgaaaacactagatcaaactcaatgtgtggtactgttgagtacatggccccagaaatttttcagggccgaggtcatgataaggctgcagactggtggagtgtgggaatccttctttttgaaatgcttacgggaaagccaccgtttgttggtggaaacagatgcaagattcaacagaagatagtaaaggagaagataaagctgccaacttatttatctagtgaagttcactctctgttgaaaggattactgcacaaagaagctggcaggcggctgggaagcggaccaggcggcagtgatgaaatccagaagcacaagtggttcaagtctgtaaactggaagagactcgaggcccggcagatcgagccaagcttccggccgaatgttgctggcaagacctgcatcgcaaactttgacaagtgctggacgaacatgtccgtgcttgactctccagtggccagccctgttgcagccaacagcaactttgtggggtacagttatgtgaggcccgcaccgttcctccaaaagccgagcccacttggctgaggaactgcttccgtggtctgagatctgccccggagttcaaatatttatctttttgactccgaatcctatgtatttcatcaagacactagtgttggagatctaaccttattgaggacaacaacttggttggtgattcccaaaaagttcctattgaagtgccatggttattatcctctgtttttgcttattgccattccttgtttgtgtatcttcactggtgaatattgtgataactagacaccgtcaagccaaaaagggaaaaaaaa

SEQ ID NO: 153557 - DNA, 2224 bp, Zea Mays
acgagctcgcccgagcaaaccgtcgccggtgcctaccgttcccgtcgccggtgcctaccgttcccgtcgccgcccgtcctctctacggaggtcctttttcagatatcgctagggattggtgagttgtacggttcagagcgcttctacctgagttttctggtctttgatcagctgtgtgtaagggactaaaatttggaaagtgtcatccttcgaagttgacaaccaaccaatgtagcatgtttgacagcccatataaaagttgatctcatgaattcgggaagaacagcggcatccaacgtttcctgttcagcgggaaacagcggcagcttccctccctgcctccttccaggatttcttgggttcccaattgttttcgtcaatttccacttgttcaaggccattgttcgcagccctgcatcttccgttgtcttgggaatgtgtggaaggagccttccttaaattgtggcccaagacttcctagtcatcttgcggaatctcataggttctcgaagatggtttcctctgagatgacctctgtcacagtgacgcgtgcacagggctccaagctttttagagggaagatccttctgccagggggatcctcagatgttgtgccttctgaaaatgttgagttcgatttttctgatgtttttgggcctagtgctgtccatacacacacagaagtgagtgttctcactctgggcagtccagcacctgtggctgagtccaacgatgaggtttacaatgaccctgatgtcattgtcaaacgatcccattcccttgttggtccatcatctcttgttagtcaatctttgccatttagcaagcttacattacacaagaaagacagctcattggaaatttcagagtgcctttccaaagaaaaacaaatcaaccaagggtcctttagtgatgatgagtttgatgatgtaaaaaaggagaatgagggtgttggacttgacgacttcgaagttctgaagctcgttggccgaggggcatttggcaaagtatatcaggtgagaaagaaaggtacttctgaaatatatgcaatgaaagttatgaggaaggacaaggttgtggagaagaatcacactgagtacatgaaagctgagagagatatactgacaaaggttgaccatcctttcgtcgtgcagctgaggtactcctttcagacaaagtaccgactttaccttgtcctggacttcataaacgggggtcatctcttcttccagctttaccaccagggtttatttagggaggagcttgcacgcatctacgctgctgaaattgtatctgccgtagcccacctccatgccaatggtattatgcatagagatttgaagcctgagaacatcttactggatgctgatggtcatgctatgctgaccgactttggcatggcaaaagaatttgatgaaaacactagatcaaactcaatgtgtggtactgttgagtacatggccccagaaatttttcagggccgaggtcatgataaggctgcagactggtggagtgtgggaatccttctttttgaaatgcttacgggaaagccaccgtttgttggtggaaacagatgcaagattcaacagaagatagtaaaggagaagataaagctgccaacttatttatctagtgaagttcactctctgttgaaaggattactgcacaaagaagctggcaggcggctgggaagcggaccaggcggcagtgatgaaatccagaagcacaagtggttcaagtctgtaaactggaagagactcgaggcccggcagatcgagccaagcttccggccgaatgttgctggcaagacctgcatcgcaaactttgacaagtgctggacgaacatgtccgtgcttgactctccagtggccagccctgttgcagccaacagcaactttgtggggtacagttatgtgaggcccgcaccgttcctccaaaagccgagcccacttggctgaggaactgcttccgtggtctgagatctgccccggagttcaaatatttatctttttgactccgaatcctatgtatttcatcaagacactagtgttggagatctaaccttattgaggacaacaacttggttggtgattcccaaaaagttcctattgaagtgccatggttattatcctctgtttttgcttattgccattccttgtttgtgtatcttcactggtgaatattgtgataactagacaccgtcaagccaaaaagggaaaaaaaa

SEQ ID NO: 153558 - DNA, 1030 bp, Zea Mays
atccatcgccagcgacactcgaccaactccacaaacaatcagccagccctcgcatcctgacctgctgacggccgacgcccacaaagcattgaagagaagaagagaagggacgccgccgcgcgagttcacgtggacgatggagagcgccgctcccgttatcgccaggccgtcgctgcccaagaagccctcgccgtcgttccgcctccggaacggcagcctcaacgttctgcgcctgcgccgcgtgttcgacctcttcgaccgcaatggcgacggcgagatcaccctcgacgagatggccgcggcgctcgacgcgctcggcctcggcgccgaccgccccggcctgcaggccgcggtgggcgcgtacatcccggccggcgccgcggggctccgcttcgacgacttccagtccctccaccgcgcgctcggggacgcgctgttcggccccatcccggagacggtgcctgaggaggacgtcgagggggacatggaggaggcgttccgcgtgttcgacgaggacggtgacggcttcatctcggccgccgagctgcaggccgtgctcaggaagctcggcctgtccgaggctcggaacctggccactgtgcaggagatgatctgcagcgtcgacagcaactgcgacggccgcgttgacttccgcgaattcaagaacatgatgatgcagggggtcaccgtatggggcgcttagctgcagcgcacctgccttgtcgttccctcagctcagctgcctttgtgtgtacttaagggtgttaatgaactctgaattttacgctataaaatttaatggtcggaacttctttaggttaaactctatttttatttatttttaaactaatattaattaatagcttaaaataaatcatgaaaaacattttgaccgtgatccataaccacctctgcatgtatgtatctaggcaccataggttgagcttttctacctgatgcttttcgttatttcgatcatattttgatataattcatcaagcaagaggctaattgaataaacttagtttgc

SEQ ID NO: 153559 - DNA, 4285 bp, Zea Mays
ccttttcctcgcgtccaccactccacctccatccatcactggagctccccagaaaaaaaggcaccaggcaattcccgattagcatctcgaattcgcgatatgacctgcggcggcgtcagaccggatgcgggaagctagtgttccattccatctgggctttgaagtagataaggagctgactgtttatatcagttccagtgttgaaagtggcaactattaacgtgtgcataagcaaaatggatagggaacttgctagcgacatggagcttgattctgttgtcttccaagtatcctcgcctgacaacaggtatgaagcaattgcttgcagtaagggaaaaacagaactgatagcttctggtccttttgaccagttagttctgcacctggaagatgccaaaacattccaatcttgttcatcaagtggtacttttaaactgttattggctggggatggaaaagactcttcctggtttaccaaatccaccttgcagagatttttgcatatcataagttcatttgatacatcaaaatcggtcaatggagttttagacgagatgtcacagctggaggaaacaagaaagtttcatcaatcactttatgttaaggagcaacagaatgttattagtggcgctttaacaggaggtttatttggtactggtgccatagcacagcagggaaatgatgggccaaattcatcggatacgacaaagaatgaattgcttcgagcactggatttgagattaactgcactgaaggaagagatcttggtcgtattgaaccgagcagttggatccaatttatcggcaagagaaatatctgatttatctgcttttgttcagcgatttggaacatcagagttttgttggttgatgcggtgtacgttgttgatatcggattgtaagccctctgagctcccactacagcagaattctacaactgagaaagttgacaaggatgagaatgcacataaaccttgcatcagtcctcagactaatcttcagatgcccattgccaataatgtatctccagcaaagcttgcacaaattgagcgtgagagctcaacagaaagtgatgattcctctgaatccagtgatgaaggtgaggccattgttgaaaggagccgtcctcttgtaagatctgcttcacctagaagatctgcttctccaatgcggagggttcaaattgggagatcaggatcacgtcgttcaacagcaattgctatcaagagcctcagttacttccctcctagtcagaggattcctatggataaagatgatgaaagtagtaccttcaatggtgaaactgatcagccaccaaagaaatctgacactaacgttagaaggatgagtgttcaggatgcaattaacctttttgagagcaagcagaaggatcagaatccagattcacaaaataagaaagctggcttgtttgccactaagtctgtcttgagaaggtggagtgcaggaatgggtgattctttgaatgaaaactcagaaggaaaagtctcagattccacatctgaaagtaaatcaaacaacatagcttctgaaactgagaaggttgaagctgaaatgaaggctgaactaggtaacataccaaatttttttgttacacctgaggctgaagatttaactttccatgctaattctcatgagattagagtgtcagaaacggagagtgctgtttgtagtaatgtttgtgcagaacaagcaaagcctggtctggaggaaagcagtgatcgggcaatggcctccgctgagtggaatcgccagaaggaagccgagcttaatcagatgttattgaaaatgatggaagtcatgcctgggaaatttgcgggtgctaatgccaccgctacaggtctcagttccaccaatcagcaaaaagctgtatctcatggccagcatacagagaagcgagacacaaaagtcagaactgagaaaggcacaaggcgaccagcaaaggaaccaagcaccaagcccttgaaggaaacagctgggaagaataaaccagcaatgacctcgaaatctggctcttcaacagagagacgtatttcaccagttccacaaagggcgcggcgaaattcatcacctccagtcctaccgaaagaagtagcatcaaagacaccaccagtcaggaaaagctcaccgaaaccatcacctgcacctgcatctgtgcctactacacgtagttcatggtcaggtggttctttgactaaagcaactacaacacaaaaaactaaaaggtctcctgggatggcttcaacgtccacacaaactagccgaaggactccaacaacgccctcgtcgtctcagccagcttcaaaagcggaaagggccattcaatcagtgaagaacaagaaggaaaccattactgctaccaagccagctataaagggacaagaagagaagaagaccaaaacagcaacaaagacaagcagaataactaaagtttcaccttcagaagaaaaatcaggtgtaaaaacgaagcaaagcttgcaaaaggtttcaaataaaagcagtgttgtacctcttgagtccaaaaccttgaagaaaaccactggaattagtcagagcattaggtctggtatggtgaagaataaggtaccccaacctaatgacttctcaaaagataccggaagtgttaaccaagctgaagataaggagcaatctcctgtgacaaccgagccaactactaaggtactggaggctgatcttgctcaaccagcacatgatgttgatgaaaatttagaaatttcgctcgataatgacttgaatattgaaaaaacagagaaaccggcctcgagtttaactgcaacagaaatgggctccagtatccaagttgaaccctctacggatgagttagatgaggccatacaacctcctgacgatgacatgggcatctcatcatctgcgtgggtagaagtagagcgtcaagaactagaagtcactgtttcgagtgaaaatgtagttgttgaggatgtaacttctccaggaattgcaccattgccgtcatcaagcccaagagtgcgtcattcgttgtcacaaatgctgcaagcagatagcaatgaaccagaaattattgagtggggaaatgctgaaaacccacccgcaatagtttttcataaggattctccaaaaggattcaagaggcttctaaagtttgctcgaaaaaacaagggagacaacaatgctaacggctgggcaagcccctcggtagtttcagaaggagaagatgaactagaagaaccaagaggcactagtgatggtacaaattcaagcaggagaacttttgatggttcaaagactaatagcatcttatcagctcaatcaactaccggcagcttcaactctttgaactcggataagctacgggagagatcaggtgctgccacatcaacaagagcatcaaggtcgttcttctcactctcaaacttccggagcagcaggtcaaatgagtcgaagcttcgatagtgtctgccttgtttgtccagcagatacatgggtagttcatctccgctcccattcaggacgtctagacttaaaaatggtttgagatttgattgttcggacggagccagcttgctgtgtttcgctctagtcacctgacatttgatatatagatagcttctgcctatgagatgccatacttcgcttctgccgtcctgtacatttctatattttactgcattgggtgcgagctgattgagacgaccgatatgtttgcatggcttgcaagagatttgcttcgaccaaaagccctttgctgtcaatagtttgtaccgaaaattgtcatgagcaacaacattaggaatgatgtaagttgtcacatttttttttgacgagaggaggaccccatttctattattgtcataacagaaatacaaagcggttcagatagtttccacactacaacgcaaaataacaggaagaacccgcaaacagaagcgctgacgagccaatccgcttcggatggctcagaacagccgagtcccctaccaggcaacatgccaaccgacgagtttagagttttacatcacacaagtaccagaccatacggcggaggatggcaagggcataacagacgacagcaaaatagagcgagtttctgacaaagctaacaccagacgagcagtcacgtcatgactcaacgcccgtgtggctgcagcatcccttctatctcatcgcccgacccgaggatccgatttcctctagcacttgcaccacgaaccagcatcttggcgccctcttgcagaaggtcctggagctctttcttgctaagccctata

SEQ ID NO: 153560 - DNA, 3605 bp, Zea Mays
gactggtacagatctgacacttggagcatatagggttatacgttctgggctttgaagtagataaggagctgactgtttatatcagttccagtgttgaaagtggcaactattaacgtgtgcataagcaaaatggatagggaacttgctagcgacatggagcttgattctgttgtcttccaagtatcctcgcctgacaacaggcccctgtttggaatgtagtgcttagattttttgaaacggaccggtcccaaccccaagaagaggttccacacatcttaaaagtttgaaggaactttgcctcggttttttcactgcatctagtcgagcacagtatgaagcaattgcttgcagtaagggaaaaacagaactgatagcttctggtccttttgaccagttagttctgcacctggaagatgccaaaacattccaatcttgttcatcaagtggtacttttaaactgttattggctggggatggaaaagactcttcctggtttaccaaatccaccttgcagagatttttgcatatcataagttcatttgatacatcaaaatcggtcaatggagttttagacgagatgtcacagctggaggaaacaagaaagtttcatcaatcactttatgttaaggagcaacagaatgttattagtggcgctttaacaggaggtttatttggtactggtgccatagcacagcagggaaatgatgggccaaattcatcggatacgacaaagaatgaattgcttcgagcactggatttgagattaactgcactgaaggaagagatcttggtcgtattgaaccgagcagttggatccaatttatcggcaagagaaatatctgatttatctgcttttgttcagcgatttggaacatcagagttttgttggttgatgcggtgtacgttgttgatatcggattgtaagccctctgagctcccactacagcagaattctacaactgagaaagttgacaaggatgagaatgcacataaaccttgcatcagtcctcagactaatcttcagatgcccattgccaataatgtatctccagcaaagcttgcacaaattgagcgtgagagctcaacagaaagtgatgattcctctgaatccagtgatgaaggtgaggccattgttgaaaggagccgtcctcttgtaagatctgcttcacctagaagatctgcttctccaatgcggagggttcaaattgggagatcaggatcacgtcgttcaacagcaattgctatcaagagcctcagttacttccctcctagtcagaggattcctatggataaagatgatgaaagtagtaccttcaatggtgaaactgatcagccaccaaagaaatctgacactaacgttagaaggatgagtgttcaggatgcaattaacctttttgagagcaagcagaaggatcagaatccagattcacaaaataagaaagctggcttgtttgccactaagtctgtcttgagaaggtggagtgcaggaatgggtgattctttgaatgaaaactcagaaggaaaagtctcagattccacatctgaaagtaaatcaaacaacatagcttctgaaactgagaaggttgaagctgaaatgaaggctgaactaggtaacataccaaatttttttgttacacctgaggctgaagatttaactttccatgctaattctcatgagattagagtgtcagaaacggagagtgctgtttgtagtaatgtttgtgcagaacaagcaaagcctggtctggaggaaagcagtgatcgggcaatggcctccgctgagtggaatcgccagaaggaagccgagcttaatcagatgttattgaaaatgatggaagtcatgcctgggaaatttgcgggtgctaatgccaccgctacaggtctcagttccaccaatcagcaaaaagctgtatctcatggccagcatacagagaagcgagacacaaaagtcagaactgagaaaggcacaaggcgaccagcaaaggaaccaagcaccaagcccttgaaggaaacagctgggaagaataaaccagcaatgacctcgaaatctggctcttcaacagagagacgtatttcaccagttccacaaagggcgcggcgaaattcatcacctccagtcctaccgaaagaagtagcatcaaagacaccaccagtcaggaaaagctcaccgaaaccatcacctgcacctgcatctgtgcctactacacgtagttcatggtcaggtggttctttgactaaagcaactacaacacaaaaaactaaaaggtctcctgggatggcttcaacgtccacacaaactagccgaaggactccaacaacgccctcgtcgtctcagccagcttcaaaagcggaaagggccattcaatcagtgaagaacaagaaggaaaccattactgctaccaagccagctataaagggacaagaagagaagaagaccaaaacagcaacaaagacaagcagaataactaaagtttcaccttcagaagaaaaatcaggtgtaaaaacgaagcaaagcttgcaaaaggtttcaaataaaagcagtgttgtacctcttgagtccaaaaccttgaagaaaaccactggaattagtcagagcattaggtctggtatggtgaagaataaggtaccccaacctaatgacttctcaaaagataccggaagtgttaaccaagctgaagataaggagcaatctcctgtgacaaccgagccaactactaaggtactggaggctgatcttgctcaaccagcacatgatgttgatgaaaatttagaaatttcgctcgataatgacttgaatattgaaaaaacagagaaaccggcctcgagtttaactgcaacagaaatgggctccagtatccaagttgaaccctctacggatgagttagatgaggccatacaacctcctgacgatgacatgggcatctcatcatctgcgtgggtagaagtagagcgtcaagaactagaagtcactgtttcgagtgaaaatgtagttgttgaggatgtaacttctccaggaattgcaccattgccgtcatcaagcccaagagtgcgtcattcgttgtcacaaatgctgcaagcagatagcaatgaaccagaaattattgagtggggaaatgctgaaaacccacccgcaatagtttttcataaggattctccaaaaggattcaagaggcttctaaagtttgctcgaaaaaacaagggagacaacaatgctaacggctgggcaagcccctcggtagtttcagaaggagaagatgaactagaagaaccaagaggcactagtgatggtacaaattcaagcaggagaacttttgatggttcaaagactaatagcatcttatcagctcaatcaactaccggcagcttcaactctttgaactcggataagctacgggagagatcaggtgctgccacatcaacaagagcatcaaggtcgttcttctcactctcaaacttccggagcagcaggtcaaatgagtcgaagcttcgatagtgtctgccttgtttgtccagcagatacatgggtagttcatctccgctcccattcaggacgtctagacttaaaaatggtttgagatttgattgttcggacggagccagcttgc

SEQ ID NO: 153561 - DNA, 3776 bp, Zea Mays
ggaaaacgtttgattccttcacacacccgcacacatacacacactcgtcccttccctccccctccatctccattctccaatctccccttcgacgctctcccctcgcttctcgcgcacactaaccaatccgagcgcccgacgctgccccccgatcgaatccaccggagccgcccacctagggctcgcccgcgccattgtcgaaccaggagggttcgtccgcccgcgcctgctgccccgcactcccgcgccgtggcggtggcgttggcggtatgtatgatcgctagagggagaggaggaggtggcagcaccggtggggattagggtggcggcagtgctggtgccgggaggaggaggaggaggaggaggaggaggaggcgtagcccatgaaggcgacggcgccgccggcaaagcggcggaggggcccgcggctggcggtgctggcgctcgtgttctgttcgctgctcgtgccgatcgccttcctcttcaaccgcttccccgccgtgtatgtgacggatgagcgccctcagcaggagattgacttgccttcattcgatcgcgtggcatttgaaagtggtggatctgtaaatgaagatgtgttcaagaagacttctgggagcagtagtgtgtcgcaccatggtattgatactggcccttccatagttaggactgaaccaaaagttatagttctcccgcctccaaaaattgaactagtcctcccccctccaaaagttgaacccaaaccagaagtgaagccagtaccagtatcagttccagttcatcataacaaaaaaattaacgttgacaagattaggcctcctagagttcaaagtgctgatgaggtggaaaaggctaaggcttgtcaacttgagtttgggagttactgtctctggtccatagagcacaaagaagttatgatagataccattgtgaaaaggctgaaagatcagctgtttgtagcccgatcttactacccaagcattgcgaaacttaaaggaaaggagacattgactcgtgaactgaagcaaaatattcaagagcacgagagggtccttagtgaatccatcgttgatgctgatctaccatcctttataaaaacgaaggtcgagaggatggaccaatcaatagcaagagccaaatcatgcactgtggattgcaacaatgttgacagaaagcttcgtcaaattcttcatatgacagaggatgaagctcattttcatatgaagcagagcgcatacctgtacaaccttggtgttcacaccatgcctaaaagtcatcattgtcttaatatgagattgacagtagagtacttcaaatccatgccattggatccaaatgactcttctgcccatacgtttaacattccagacaataggcactatgttatattgtctaaaaatgtccttgctgcttctgttgtcatcaactcaactgttagtagctctgaggatactgaaaatatagtctttcatgtactaactgatgctcaaaatttttatgccatgaagcactggtttgcaagaaactcctacagggaatcagctgtgaatgtcataaattatgaacaaattattttcgagaatttccctgagtttggaacccagcagttatatttgcctgaggaatttcgtgttttcatcagtagccttgagcggcctactgagaagagtagaatggagtatttatcagtgttcagtcactcacatttctttcttgccgaaatattcaaagatttaaagaaggtaattgtgttggatgatgatttggtcgttcaacatgatctctctttcttgtggaatcttgatatgggagataaggtccatggtgctgtcagattttgtggtttgaaacttggccaactgaggaaccttctgggtaggacaatgtacgatcaacagtcatgtgcatggatgtcgggggttaatgtgattgatttggaaaaatggagagatcataatgttacagagaattacctgcaactcctgagaaagtttgggaacaatggtgatgaggcctcattgcgatcttcagctttgcctataagtttgttgttgttccagcatcttctttatccccttgatgagagattgactttatctggacttggatatgactatggaattaaagaaaaacttgttcagagttctgcatcattgcattacaatggaaatatgaaaccttggcttgagttgggcataccagattataggaagtactggaagaggtttcttacacgagacgagagattcatggatgagtgcaatgtaagtccatagtgcacttgagcttgagagccggatcatttttgacagtagatttcagtctacactgctgtaatatatactaagaggaccaacacttccattgagaaaagacttgggaagcagtcactagccatcaattttgacagagtagatccagcgccatctgttgagtgaacttgtgagctcgatggatggttttttctgcagttagaggactttagtgttaagtttgaaggataatgcagtagacaacgttggtggtgtgtggtggtgaggctccacgtaagagggagcatcacactacgtaacaggaatgatctttggtggattggggcgtcttaattcaaattggtgccttccatctcatcgattcaggttaattcttttctttgttgattgatttgttgacccctcttgctttgtccttctgtcaataaggacatacacaggttaaaattcaatttctttgctcgtagttgttgcacattgattgttctatcattattatgttgatgcaaagtatattatgatgtcagactcatctgttacaaaaatgagattaacaactgttctatttggatgtcttctgagcactcaaactttatctcatgatccagtaaatttgaatctccatatatggtcgtgactgggtttaactgccgacataggtttcctctgtgtgctccactgtggcctagaaagaattaaaaagtgcagtgcggttcatagcaatacatatacttgacattgcagaagtaaaaacgtgttccgggcacttggtgaatggagaaccttgtcactgtaaattggttcttaaaccttgttgcgatgtaataatcatgtaaacactgtaaaacatgcgaattttccaaggcagcaataagcttcagagttgaagaaaccgttaacctggatgaacatgcgaggacgcttcttatctttgagtaaaaggtggcttagggtttgtttggatgacgtgtggattttgaaaaagtgaaaaaaccgttgtaaggtatagaccatgagaattcaaataattctacgtctcctttgatgacttcacaaagaatcagatctctttcgatccttttctcaagcgatcaccaagatcgagcttcagttctcttatcaaatcaaatggtgagtgcaatctctcccacaaggtactccacaaaaagtcggaagctcttgtttgctttacaatttggagcagcaactctatacaagaatgatagtaaatcttctctcttttctcggagtcaaaactcaacacaagtgttctagccactcttttgctaccttaggctcttgcaagatgctatgctaagcacacgatggttttgtaagcacttaagatggtttggatgctatggagatgatcctctaacttgtatatgatgtttgtttgttaatggattgagttgtttttggttggaggggtatatataggttgtccatctcaaaatagctgttggaaccccactttagcttctgcgtacccattagacatgtcca

SEQ ID NO: 153562 - DNA, 2318 bp, Zea Mays
atctccattctccaatctccccttcgacgctctcccctcgcttctcgcgcacactaaccaatccgagcgcccgacgctgccccccgatcgaatccaccggagccgcccacctagggctcgcccgcgccattgtcgaaccaggagggttcgtccgcccgcgcctgctgccccgcactcccgcgccgtggcggtggcgttggcggtatgtatgatcgctagagggagaggaggaggtggcagcaccggtggggattagggtggcggcagtgctggtgccgggaggaggaggaggaggaggaggaggaggaggcgtagcccatgaaggcgacggcgccgccggcaaagcggcggaggggcccgcggctggcggtgctggcgctcgtgttctgttcgctgctcgtgccgatcgccttcctcttcaaccgcttccccgccgtgtatgtgacggatgagcgccctcagcaggagattgacttgccttcattcgatcgcgtggcatttgaaagtggtggatctgtaaatgaagatgtgttcaagaagacttctgggagcagtagtgtgtcgcaccatggtattgatactggcccttccatagttaggactgaaccaaaagttatagttctcccgcctccaaaaattgaactagtcctcccccctccaaaagttgaacccaaaccagaagtgaagccagtaccagtatcagttccagttcatcataacaaaaaaattaacgttgacaagattaggcctcctagagttcaaagtgctgatgaggtggaaaaggctaaggcttgtcaacttgagtttgggagttactgtctctggtccatagagcacaaagaagttatgatagataccattgtgaaaaggctgaaagatcagctgtttgtagcccgatcttactacccaagcattgcgaaacttaaaggaaaggagacattgactcgtgaactgaagcaaaatattcaagagcacgagagggtccttagtgaatccatcgttgatgctgatctaccatcctttataaaaacgaaggtcgagaggatggaccaatcaatagcaagagccaaatcatgcactgtggattgcaacaatgttgacagaaagcttcgtcaaattcttcatatgacagaggatgaagctcattttcatatgaagcagagcgcatacctgtacaaccttggtgttcacaccatgcctaaaagtcatcattgtcttaatatgagattgacagtagagtacttcaaatccatgccattggatccaaatgactcttctgcccatacgtttaacattccagacaataggcactatgttatattgtctaaaaatgtccttgctgcttctgttgtcatcaactcaactgttagtagctctgaggatactgaaaatatagtctttcatgtactaactgatgctcaaaatttttatgccatgaagcactggtttgcaagaaactcctacagggaatcagctgtgaatgtcataaattatgaacaaattattttcgagaatttccctgagtttggaacccagcagttatatttgcctgaggaatttcgtgttttcatcagtagccttgagcggcctactgagaagagtagaatggagtatttatcagtgttcagtcactcacatttctttcttgccgaaatattcaaagatttaaagaaggtaattgtgttggatgatgatttggtcgttcaacatgatctctctttcttgtggaatcttgatatgggagataaggtccatggtgctgtcagattttgtggtttgaaacttggccaactgaggaaccttctgggtaggacaatgtacgatcaacagtcatgtgcatggatgtcgggggttaatgtgattgatttggaaaaatggagagatcataatgttacagagaattacctgcaactcctgagaaagtttgggaacaatggtgatgaggcctcattgcgatcttcagctttgcctataagtttgttgttgttccagcatcttctttatccccttgatgagagattgactttatctggacttggatatgactatggaattaaagaaaaacttgttcagagttctgcatcattgcattacaatggaaatatgaaaccttggcttgagttgggcataccagattataggaagtactggaagaggtttcttacacgagacgagagattcatggatgagtgcaatgtaagtccatagtgcacttgagcttgagagccggatcatttttgacagtagatttcagtctacactgctgtaatatatactaagaggaccaacacttccattgagaaaagacttgggaagca

SEQ ID NO: 153563 - DNA, 2349 bp, Zea Mays
cactactactgggacccttccttcccaccgccaccgctcactactccggccgcctctcttccagcaaatccctcccacctcctccccgccgtctcacgaggagctagaggaaggggaggctctgtaccagcctgttggaagggggcgagatgagcatgtacgggagggatccctggggcggcccgctggagatatgccacgactcggccacggacgacgaccgcagccgcaacctggacatcgaccgggccgcgctgtcgcggacgctcgacgagacgcagcagagctggctgctggcggggaccgccgaccagccccgcaagaagaacaagtacgtcgacatcggctgcctcctcgtcagccgcaagctcttcgtctggacgctcggcgtgctcctcgccgccgccgtgttcgcgggggccgtggccgggatcgccaaggccatccccaggcggcaccgcccgctgccaccgcccgacgactacaccgtcgcgctgcacaaggcgctcatgttcttccatgcccagagatctgggaagcttccgaagcacaacaatatacattggcgcggtaactcttgcatgaaggacgggctttctgaccctgcagtcaggcgaagcctggttggcgggtattatgatgccggcgacgccgtcaagttcaatttcccagctgccttctccatgaccctcctcagctggagcgtcattgagtacagtgccaagtacgacgctgttggggaacttggccatgtccgtgacattatcaagtgggggtcagactacttcttgaagacctttaattccacagccgatagcattgatcgtgtcattgcgcaggtgggaggtggtgcgacgtcgcctggttcgacacagcccaatgatcggtattgttggatgaggccagaggacattgactacccacgtccagtggttgagtgccacacttgttcagatcttgctgctgaaatggctgcagcattagctgcagcgtcgattgtattcaaggacaacaaggcttactcacagaagcttgtacatggtgctaccactctcttccagttcgcaagggaccggcgtgggaggtatagcgcaggtggatcgtatgctgcaaagttctacaattcaactagttactgggatgagtttctgtggggtagctcatggatgtaccttgcaactggcaattcatcatacttgactctagccacaaaccctaaacttgcgaagcatgctggcgctttctggggtggaccggattatggtgtgttcagctgggataataagctcactggtgcacaggttcttctaagtcggttgaggcttttcttaagtcctggatatccatacgaagagatcttgaggacgttccacaatcaaactagcattatcatgtgttcctaccttccagtctttaaatccttcaacagaacaagaggtggtctgatccagctaaatcacgggaaaccacggcccctccagtatgtggtcaacgctgcattccttgcttctgtgttcagtgactatcttgaggctgcggatactcctgggtggtattgtggcccccatttctactctgttgaggttcttcgcagttttgcaaggactcagatcgattacatcttaggaaagaatcctttgaagatgagctacgtggttgggttcggaaagcgttaccccaggcatgttcaccaccggggcgcctcgatccctaagaacggtgttcactatggctgcaaaggagggtggaagtggagggacgccaagaagccaaaccctaataccatagcaggtgccatggttgctggccccgaccgccatgacgggttcaaagatgcccgcaggaactacaactacactgaagcaacgctggcgggcaacgctggtctagtcgccgcattggtagctttgtcgggtgacggccacggcggggtggacaagaacaccatgttctctgcagtaccgcccatgttcccttcgcctccgccgccgccggctccatggaaaccgtgacggcctgtgggggtatggtatggtatggtatctgattcttttgtatactgctttatttatttagatttagattagtgttccctctcgccgtactgctaccatcacaatcatggagatctaacagtatgtagctccggtcttttttttcattgtttttatattttgccgtgcaatgtaaaggactagtactacgttttgcatggatctcggggtcagtaactgatatcctggggatttgtggtaactaaagcccatctctgtgcttccgtgaatgagtggaattcgaaaatttcagccgcgctgtattgactgtatataggaatgtttggttgcaggt

SEQ ID NO: 153564 - DNA, 799 bp, Zea Mays
aacccctcgtctccctccccagatccaaatcgcgcaggaccaggcatcccatccaggcggttattggtcttcttgcgtgcgcaggtgagccctctccctctctccctcctctgcgtgctccctttttttttccgatcaagccgctgtgtcgtggccatgtcccctgcgacagggcgtcttcaatccatggctgcctcccctgcgtgctccctctattttcctcggtcggcggcgcggtgtggccaggcccgaagtcctcgggcgcggccagcccgcggctggccccagcgcgacggccagcgcgcggcagcctgcgcggctcgtccagcgcgacgcgggcgaccccagcaccccggcgtgcaggccccgcgcgccctcgcactgctccctcgcgcggtcgagctgtccctacgcaggcccctgtacgtgtgtttgtacgcggctgcattctccatgcggctgctcaccacgccgtgctggcccctgcggtgtttgcctctcctgttagcacggtggtccaaggctcccggcgagatcccctggtggccgatttcttgttccattagtgcccaggtcggcctcccttctctccatgctgctggcgagggagtttttcatttgtgatccatcgtgaggagagaaaggaagaagctagccacatgtgatcctaagcttgggatcttctatagctgtgtttcgtgtgaccatatgtgtggccagcctctagccaataataattagccatatcgattaaattccgtaaagtactaaataattaatatatgtcgagttataaatc

SEQ ID NO: 153565 - DNA, 926 bp, Zea Mays
atggaccgcgcgctggactataagaaatgcatgagcaaggacttgaggagggcccccgtggccgagccgtgtaggccgatagacggctcgacgcaaaagtggtggttgtggaggccgcggcagcgcacaaggccatcgctgggttatggcggggcaggagagatgagtgggggagactgggagagtgatgagcctttttttgtaattgagacggactccaccaagatttgggtccggagtttgtcttcacaatcaaacgatttgagatcgagcgaagataagcttttcatcaagatggcactttttcgacttgtggtgtggcatgtcatgatggcctcaaatcatcagttgtgcggagcctgcttgggtagggtgaacaaagtggctttgtttatggccctttccaccctgctgttgcaaggaaacatgaacttgatggcagcaataaacctgggtaaagggagaaggcgcatgactggagagcctttcttctttattttgaccagtcctagaaacaagattattacaaaactaacaactcagtgcagtgagaagccttttgagttagagaatgtggaaatcaacgatttacaagaaaaagtttttcgcgttgagcaacaacttttagtccaaggttcttttactgataatgttcttccactttgtgtatttgagccccttgtgcagtacatattcttcaacgtacaatattcatgggaggctgctttggcagagaaggagtttcttgaagaggagtacaagaaaaagtttgatgaggcaaagaaggaactatatctggagaatgatctagcaggcatgtgggttcttgttgctaagttgaaaagaggggctttagacatatctgatttgaatgttgatgatcgaactaaagtgtaagggcgtagagatcaccacattgttgtctc

SEQ ID NO: 153566 - DNA, 2053 bp, Zea Mays
agccgtgccacagcatcggtcgtgcgacgaggcgtacgagccgcagcgtcggtcatgcgacgtgcgcgggcggagcactctctggagagaaccgctcgccgacccacccaccgcactgctctcccacccaaatcgccgaccgataggagagaacccgagctgagaagagagagggcagcaggcggcggcgcggagtaacacgcggaggggaatgcacagcccgtgtgagcctctcgcccccgcgaaaccccaccgattctgattccgccggcgaaatcgggcgcctcgcggctcggccggctaagcggtggacggcggcgccgaggggctcgttcgacacggtggggtgagctcgtgaggagcagcagccacggcgaaggggatgatgaagggagggggcgggaaggagacgctcctccgcttcctcctcctgcttctccaccccctcaccgccctctacttcttctacacgctgcacctcctcttcacctcggcgtcgtcggccgcctccaactgcgcgcctgacgccgtctcggtctcccggatgtctgccaacctcacggcggtggcggagaagcaactgcccccttccgccgtggctgggtccacgtcgacaacgctgcagcatgaagttttcggcatcgcggcgtcgtcgcggttatgggacaagcgtaaggagtacatcaaagtgtggtggcgctcgcgcggcgccatgcggggctacgtgtggctggaccgcgaggtgcgcgagtccaacatgtccacggcgcgcacgaggctcccagccatcaggatctcgtctgacacgtccgccttcccctacacacaccgccgtggccaccgctccgccatccgcatctcccgcatcgtctccgagatgttctgcctcggcctccccggcgtgcgctggttcgtcatgggcgacgacgacaccgtcttcttcccggacaacctcctcaccgtgctcaacaagttcgaccaccgccagccctactacatcggctccctctccgagagccacctgcagaacatctaattttcctacgggatggcgtacggcggcggcggcttcgccatcagccggccgctggctgaggcgctcgcgcagatgcaggatggctgcctccgccggtacccggcgctgtacgacagcgacgaccggatccaggcgtgcatggcggagctgggcgtgccgctcaccaagcacctggggttccaccagtacgacatgtacggcgacctcctctgcctcctcgcgtcccacccggtggcgccgattgtgacgcttcaccacctcgacgtagtgaagccgctgttcccggatgcgaggtcgtgcccctcggtggtgcgacggctgttcgacgggccggtgaagctggacacggcggggctgatgcaacagtccatctgctacgacagcacgaaccgctggacggtgtccgtggcgtgggggttcacggtgctggtggtgaggggcataatgtcgcctcgggagatggagatgctggcgcgcacgttcctcaactggtatcgccgcgccgactacacgacgtacgccttcaacacgaggccgctggcgcgcagcccatgccagaagccggcggtgtactacctatcgtcggcgcgacacgaggccttgcgcggcggggagacgacggtgacgcgatacgagcggtggcgccatccgaatgagacgcggcccgcgtgccggtgggacataaccgacccggacgcgcatctcgatcacatcatcgtgctcaagaagcctgaccccgggctctgggaaaggtctccgaggcgaaattgctgcagagtggtgtcttcgcccaaggatgggaagagctgggagaagacgatgaccatcgatgtaggcatatgcagggaaggcgagttcagccaagtagcaggagcattagcttttattagagatagatgaagataggaagatttcaaattcttttcttcttcctttttcttgtacgaattcgttcctcttggagagtatgaacttgtatcgtttcaaatccctctttttgcatggtgctttgcacct

SEQ ID NO: 153567 - DNA, 103 bp, Zea Mays
cctatttccatattctgtcatttcctattctgcctttctcattccccctccccacaaagcatatttctattctcattcccgcgtacagcccacgtttagctaa

SEQ ID NO: 153568 - DNA, 148 bp, Zea Mays
gccagaccggctcatatacatacaacagtaatacatcaacaaaaagtaatatatatatatatatatatatatatatatatatatatatatgaccaaaataaaactaagatgttttatggatgcacattataaacctttggtcagaaag

SEQ ID NO: 153569 - DNA, 1823 bp, Zea Mays
ctcacagctcctggtcctggcggtaagaagtgaacctgcccggcgccccccgccggacggggtccgtcgcctacaagccgcctccccacggctctccgctcccggcccgtcacaccggccgccaatcctatataaagccgctccaggccctccgctcctccagtccaaagccccttgccttctatccctttcacacacgcctctccttccctctctctctctctatcttcctgcctgaggcagcagccatttccgcttccgatcgtggaggcttggtgtggaaggaggaaaggaggccagctgctggttttcggtgcggcggagatgtctgaggtgtcggtgataaaccaggcggaggtggaggatgcgggtgccgggcagctggacctgccgccggggttccgcttccaccccaccgacgaggagatcatctcgcactacctcgcccataaggccctcaaccaccgcttcgtctccggtgtcatcggcgaggtcgacctcaacaagtgcgagccatgggacctgccaggcagggccaagatgggggagaaggagtggtacttcttctgccacaaggatcgcaagtacccgacgggcacgcggaccaaccgcgccacggagaccggctactggaaggccaccggcaaggacaaggagatcttcaggggccgcggcgtcctcgtgggcatgaagaagacgctcgtcttctaccgcggccgcgcgccgcgcggggagaagaccggctgggtcatgcacgagttccgcctcgagggcaagcttcccgagcggctcccgcgctccgccaaggacgagtgggccgtgtgcaaggtgttcaacaaggagctggcggcgaggaccgagccaataatggcggcggccggcgcgggcgagctcgagcgcgtcggctcgctgggcttcctcagcgagctcctcgactccgccgagctgccggccctcatcggcgccgacgtcgacgaggtgatcgacttcaacggccccgcgtccacctccggcgcgccgggcacgagccacagccacctcccggtcaagatggaggagcacgcgctgctgcacatgcagtaccagccgccgccgcccccgacgtcctactactcgagccagtacttctctctgccggcgatgaactccggcgacgtccttcccccggcgatccggaggtactgcaaggcggagcagcaggtggtgtcggggcagacggcggcgtcggaggtcagcccgtcccgcgagaccgggctgagcgccgaccccaacgcggagatctcgtcggcggtgaccccgtcgtcgtcgcaccagttcctgcccgagttcgacgacccggtcctgaacctcgcggacctctggaagtactgaagccttcccctggacggctggacgacgatcgatcggtggatcggggcgcccgcccacccgcctcgatcccatggtttggttggttaattgcttgatgattcgattgattatcttggcctgttgtgggatttggggttagtgacggaccgtgacgcgtcctccgcctctactgacctcggggtctgactagattattgcccgtgcagaccggcaggggattagggcccccctccttgttaatgaatccgcccccatcctaggttccttgtcttggtcactgtacatagcgccctactctgattgtgtcagtagcagtagcatgattattgataggattaatgaaatggggggtagattagcgtcagcagtgcgttattacagggcaaagtctacggattgattagtgaatttgggcgcttgatgagccagctagcgccagcttcatatgcaca

SEQ ID NO: 153570 - DNA, 2048 bp, Zea Mays
ctcacagctcctggtcctggcggtaagaagtgaacctgcccggcgccccccgccggacggggtccgtcgcctacaagccgcctccccacggctctccgctcccggcccgtcacaccggccgccaatcctatataaagccgctccaggccctccgctcctccagtccaaagccccttgccttctatccctttcacacacgcctctccttccctctctctctctctatcttcctgcctgaggcagcagccatttccgcttccgatcgtggaggcttggtgtggaaggaggaaaggaggccagctgctggttttcggtgcggcggagatgtctgaggtgtcggtgataaaccaggcggaggtggaggatgcgggtgccgggcagctggacctgccgccggggttccgcttccaccccaccgacgaggagatcatctcgcactacctcgcccataaggccctcaaccaccgcttcgtctccggtgtcatcggcgaggtcgacctcaacaagtgcgagccatgggacctgccaggcagggccaagatgggggagaaggagtggtacttcttctgccacaaggatcgcaagtacccgacgggcacgcggaccaaccgcgccacggagaccggctactggaaggccaccggcaaggacaaggagatcttcaggggccgcggcgtcctcgtgggcatgaagaagacgctcgtcttctaccgcggccgcgcgccgcgcggggagaagaccggctgggtcatgcacgagttccgcctcgagggcaagcttcccgagcggctcccgcgctccgccaaggtccggccctccccccctgttctcgcctcgtttaattgctcgttcggccctggaaatctttttctccccccccccccccccccccccccctttttcgtccgccggtggcctaaatcctcttcttttcttgctgccttcgtttgtttgtttgttgcgtgcaggacgagtgggccgtgtgcaaggtgttcaacaaggagctggcggcgaggaccgagccaataatggcggcggccggcgcgggcgagctcgagcgcgtcggctcgctgggcttcctcagcgagctcctcgactccgccgagctgccggccctcatcggcgccgacgtcgacgaggtgatcgacttcaacggccccgcgtccacctccggcgcgccgggcacgagccacagccacctcccggtcaagatggaggagcacgcgctgctgcacatgcagtaccagccgccgccgcccccgacgtcctactactcgagccagtacttctctctgccggcgatgaactccggcgacgtccttcccccggcgatccggaggtactgcaaggcggagcagcaggtggtgtcggggcagacggcggcgtcggaggtcagcccgtcccgcgagaccgggctgagcgccgaccccaacgcggagatctcgtcggcggtgaccccgtcgtcgtcgcaccagttcctgcccgagttcgacgacccggtcctgaacctcgcggacctctggaagtactgaagccttcccctggacggctggacgacgatcgatcggtggatcggggcgcccgcccacccgcctcgatcccatggtttggttggttaattgcttgatgattcgattgattatcttggcctgttgtgggatttggggttagtgacggaccgtgacgcgtcctccgcctctactgacctcggggtctgactagattattgcccgtgcagaccggcaggggattagggcccccctccttgttaatgaatccgcccccatcctaggttccttgtcttggtcactgtacatagcgccctactctgattgtgtcagtagcagtagcatgattattgataggattaatgaaatggggggtagattagcgtcagcagtgcgttattacagggcaaagtctacggattgattagtgaatttgggcgcttgatgagccagctagcgccagcttcatatgcacatgtactactattgattgctggtcgagctcgacatagcattatgtgaaaatttgatgcttcagtt

SEQ ID NO: 153571 - DNA, 861 bp, Zea Mays
acttttcttcgccgcttccgcaatcttccattcctcttcttctctctggcgccgtgatccctcttgtgtctcctggcgagctcttcataccatcttcgagcgcgatttggcgatggcggcggcgcaggtggtcgcgaaggggagcgtggtgtcgccgtgcggcaatcgagcggtgccgggcctcttgggcaggcggagggatgccgtggcggcgcagatgacgccgtcggcggtgcggatcgggggctcctggaggaagaacgcgtttcctggcgtgaggctagccttggggacgaggagatccaggcccgcgtcccggagtttctccgcctcgccggtgcagatgaacatgaaccttgcgattgggaaatcaatgaggtggtgggagaaggggttgcagcccaacatgcgtgagatcgagtccgcccaagaccttgtagattccttaaccaacgccggcgagaggctcgtcgtcgtcgacttcttctcccctggctgcggcggctgccgtgctcttcacccgaagatttgccaatttgcggagcggaaccctgatgtgctgttcttgcaagtgaactacgaggagcacaagtctatgtgctacagccttcgtgtccatgtgctacccttcttcagattctacagaggagcacagggacgactctgcagcttcagctgtacaaacgcaactgtaagatcatgtccatgtttcttctgttcgtatgattattggtatgtcctcaataacatgcaacatatccaaaatgacctttattgaacactagtacataattatagtcaccctctcagatctaaaatgtatggagtcagaaagttgtgaattcgggtagagcttgttga

SEQ ID NO: 153572 - DNA, 1413 bp, Zea Mays
acttttcttcgccgcttccgcaatcttccattcctcttcttctctctggcgccgtgatccctcttgtgtctcctggcgagctcttcataccatcttcgagcgcgatttggcgatggcggcggcgcaggtggtcgcgaaggggagcgtggtgtcgccgtgcggcaatcgagcggtgccgggcctcttgggcaggcggagggatgccgtggcggcgcagatgacgccgtcggcggtgcggatcgggggctcctggaggaagaacgcgtttcctggcgtgaggctagccttggggacgaggagatccaggcccgcgtcccggagtttctccgcctcgccggtgcagatgaacatgaaccttgcgattgggaaatcaatgaggtggtgggagaaggggttgcagcccaacatgcgtgagatcgagtccgcccaagaccttgtagattccttaaccaacgccggcgagaggctcgtcgtcgtcgacttcttctcccctggctgcggcggctgccgtgctcttcacccgaagatttgccaatttgcggagcggaaccctgatgtgctgttcttgcaagtgaactacgaggagcacaagtctatgtgctacagccttcgtgtccatgtgctacccttcttcagattctacagaggagcacagggacgactctgcagcttcagctgtacaaacgcaactattaagaagttcaaggatgcacttgcgaagcacaagccagatagatgtacctttggcccaaccagggggctagacgaatcggagttattagccttggcagcaaacaaggaactccagttcacctacaccagggagccagaactgactcccatgggagatacccccggggaggtcattgctcccgagcccgcaaagcttcctgccgctacgaagcctttggtcaagctggggtcggaggaaaggtcattggtctctccaggaagatgagacggtccgatgcttccgttctgtatagttccatggttcttgatgtgtacaggttgtagcttctcatggtagcagagtgcaggctaaggttttttacatgtgaagcctgcccacctgtcgtcccgtagtttggctcggttgtactagcaggtagcaataagtggtgctgtggagctatgtcttagggaaatcgtatggtagttgcatcgatgattggtctgcatgctcttgtttcatttttccttaagcctcaggatatgggcatgggtgcctgtcgcaaaactgaataatcaatcgtgctttatgttgtgctaggcattgtggtgcttggagatcattgttgtgttaatatttgagtttgtgactagttttctgccttggccttcggggcatggaacgggaggaactggtggagatatgcttaattgctagcaagagtttggggctcgaactct

SEQ ID NO: 153573 - DNA, 774 bp, Zea Mays
attttaagtttcccctagcagttcatgcaatatggtgacctttgctgaccggttagaaacaatttccctcatggacccaactggatgttatgtgattgatttttcagctattatacaattttagctatacttggggttgctgttggctgtggtcacccatcagtactgatgggtgtcatttctgtatgcagattaagaagttcaaggatgcacttgcgaagcacaagccagatagatgtacctttggcccaaccagggggctagacgaatcggagttattagccttggcagcaaacaaggaactccagttcacctacaccagggagccagaactgactcccatgggagatacccccggggaggtcattgctcccgagcccgcaaagcttcctgccgctacgaagcctttggtcaagctggggtcggaggaaaggtcattggtctctccaggaagatgagacggtccgatgcttccgttctgtatagttccatggttcttgatgtgtacaggttgtagcttctcatggtagcagagtgcaggctaaggttttttacatgtgaagcctgcccacctgtcgtcccgtagtttggctcggttgtactagcaggtagcaataagtggtgctgtggagctatgtcttagggaaatcgtatggtagttgcatcgatgattggtctgcatgctcttgtttcatttttccttaagcctcaggatatgggcatgggtgcctgtcgcaaaactgaataatcaatcgtgctttatgttgtgctagg

SEQ ID NO: 153574 - DNA, 1971 bp, Zea Mays
ggtagaatatgtatcgttccgttgcgttcactctgctctcctttttccctttctcccgttcacctttctctatcgcttttctttcccccatccccctttctttcctcgtggtgacgactgggctagtgctatcgtccttcgccaggtcttcgccggcgacgagcacctaccaggtgaccctattccttttcttcactcggtgtataatccccctttgctgcaatcaagcttctcaaacataataagcaaatagtctcttcacgtgattgccaaaattagtcaagacgggtgctctttgctgcgtggccgctaggccacatgggacgaagtctgaccctgcaagcagagatcgttctatggatcctactgagcctcgttggcgcataaactcgagcttctctcccccaacatcaaggagatgggactgtcgttattcatcagatggattgccccacagagttcatgatgctcctcatgatcacccaccttatgtttcatcattgtcatcccatagcaaaggaagcagaaatgcatttggcagtgatcagtacctcagtcaccatcattctgtgtctgatggagcactttcttattttgggagtccagctgacagccttcaggctccacgctggacgccctctcttcaaagatttgatcttggtgaattctctacccctgcaggaggatcaaggccagaaacttctgactatcctcagtcaagtgagaggccactgactgccacaagcagtttcagttctgcatccccattttcagaatcaagccagttagcttcatctagtaaacaaccagccccatatctacctcgcaaccatatgggcaggcggtctttcatgtctaaaccagtctacccacttgtcttccggaatcctgtctcagaatcagaagcgtgcaggatgcttgaggttggtaatgccgggcgagcgacaccaagtgatgacagccaagcttctcctctgtggcgtcgcagcttggcgagcccagatctcaagttccacaatgcaccgaatgaacttgggaagatggaaacctcacccgaaccgaacacaagctcaagaagggaagggttcagatggagcaacgccagcagttatgactttggatacgatggagatgccattgacatttcagatcatatcagcatcgagtcccagagatctcccacgagctcagcgaggttcctgaagtgtgggctgtgcgagagattcctgcaccagaaatcaccctggacctcgaacaggattgttcgaaacgccgacatgccagtggcagcagttctgccttgccgacatgtcttccacgcggattgcttggaggaaagcactgccaagacagaagtccatgaaccaccttgccccctgtgcgcgcgagccactgacgatgaagggcacgtgtcgttctcagaacctctgcatgttgccctccgatctgctcgcaggaaccttttgttgggcactggtgctggtgggaacagcggcatttctgaccctcctcgcactgatcgtggcttgaagaggaacaactctgcagtcatgcctaggcgcagcggcggcgcattgttccgcaatcgcttcaagaaacagttccccttcaaagcgaggatcgggaaggagctctttggcggtagggttctcaacaaggttggattgtctttgtcttcaggtcagcatgatgatcatcgacagcaagcgccaaagcatgaccggcccatgaagtagctagatcttagtggcacagagtataatatgttgtgtgccctcctgatattttatctatggcatctgttatcgaaacttggcatccatgcgcagcagtcgtccaagatgggggccctgtatggattatggaaggctgcttgcattgcgtgtaacagtagcaccttgccattgcatgtattttgcatgtagcacagtaagaatctatgccctgtgattgatatgttctgaatgttcc

SEQ ID NO: 153575 - DNA, 1868 bp, Zea Mays
actctgctctcctttttccctttctcccgttcacctttctctatcgcttttctttcccccatccccctttctttcctcgtggtgacgactgggctagtgctatcgtccttcgccaggtcttcgccggcgacgagcacctaccaggtgaccctattccttttcttcactcggtgtataatccccctttgctgcaatcaagcttctcaaacataataagcaaatagtctcttcacgtgattgccaaaattagtcaagacgggtgctctttgctgcgtggccgctaggccacatgggacgaagtctgaccctgcaagcagagatcgttctatggatcctactgagcctcgttggcgcataaactcgagcttctctcccccaacatcaaggagatgggactgtcgttattcatcagatggattgccccacagagttcatgatgctcctcatgatcacccaccttatgtttcatcattgtcatcccatagcaaaggaagcagaaatgcatttggcagtgatcagtacctcagtcaccatcattctgtgtctgatggagcactttcttattttgggagtccagctgacagccttcaggctccacgctggacgccctctcttcaaagatttgatcttggtgaattctctacccctgcaggaggatcaaggccagaaacttctgactatcctcagtcaagtgagaggccactgactgccacaagcagtttcagttctgcatccccattttcagaatcaagccagttagcttcatctaaatcagaagcgtgcaggatgcttgaggttggtaatgccgggcgagcgacaccaagtgatgacagccaagcttctcctctgtggcgtcgcagcttggcgagcccagatctcaagttccacaatgcaccgaatgaacttgggaagatggaaacctcacccgaaccgaacacaagctcaagaagggaagggttcagatggagcaacgccagcagttatgactttggatacgatggagatgccattgacatttcagatcatatcagcatcgagtcccagagatctcccacgagctcagcgaggttcctgaagtgtgggctgtgcgagagattcctgcaccagaaatcaccctggacctcgaacaggattgttcgaaacgccgacatgccagtggcagcagttctgccttgccgacatgtcttccacgcggattgcttggaggaaagcactgccaagacagaagtccatgaaccaccttgccccctgtgcgcgcgagccactgacgatgaagggcacgtgtcgttctcagaacctctgcatgttgccctccgatctgctcgcaggaaccttttgttgggcactggtgctggtgggaacagcggcatttctgaccctcctcgcactgatcgtggcttgaagaggaacaactctgcagtcatgcctaggcgcagcggcggcgcattgttccgcaatcgcttcaagaaacagttccccttcaaagcgaggatcgggaaggagctctttggcggtagggttctcaacaaggttggattgtctttgtcttcaggtcagcatgatgatcatcgacagcaagcgccaaagcatgaccggcccatgaagtagctagatcttagtggcacagagtataatatgttgtgtgccctcctgatattttatctatggcatctgttatcgaaacttggcatccatgcgcagcagtcgtccaagatgggggccctgtatggattatggaaggctgcttgcattgcgtgtaacagtagcaccttgccattgcatgtattttgcatgtagcacagtaagaatctatgccctgtgattgatatgttctgaatgttccgcttgatctgttcacattggctgct

SEQ ID NO: 153576 - DNA, 1310 bp, Zea Mays
cttcctcgtcttgcgctcccctcctataagtacaaccccacaacaaagacatgagtgtgcaagtgtggttgtctcctaaacggggtgcctctcttccagtcttcctcaagttatccacttctctctcgatcgaagtcgaagcacaaaccctactgcccgcccacctcccacgtagtgtgtgtgctactcgatcttgtgtccactctcgcccacacacaaacttccacacgaaccaaagattccaatctgaaccaacgttattctgtcgttctccgcctaaccagcaagcagtcgatcgatcgatggagggaagcagaaacagcccggacaggcagtcgtcgggcggcagccctgaggagcgcggaagcggcggtagcggaggccgtggcgccggggagccggtgcggtcgcggtggacgccgaagccggagcagatactgatcctcgagtccatcttcaacagcggcatggtcaacccgcccaaggatgaaaccgtccgcatccgcaagctgctcgagcgcttcggcgccgtcggtgacgccaacgtcttctactggttccagaaccgccgctcccgctcgcgccgccgccagcgccagatgcaggccgccgcggcggcggcggcaacagcggcggcggcctcctctgcggccaacagctctcccggagctagcgcaaccgtcggccttccttctggtgctctacaatatcccttggtcatgagcgggagcgggaccgcctgccagtatgagcagcaggcgagctcctcgtcgtcgtcgggaagcactgggggctcgtctcttgggctgttcgcgctcggagccggggtgcccagcaccggcggtgggttcttccaggagtcgtgtggcgcttcgtcgccactggcgacagggctgatgatgggggacgtggaccgcagtggcggcagcgacgatctcttcgccatctcccggcagatggggttcgcggcggcgagcccagtcgcctcggcttcggtggcgcctccgagcacaacggcacaccaccagcagtattactcatgtcaatcacctacagggacgatcacggtgttcatcaatggagttccaatggaggttcccagtggtccaatagacatgcgagccattttcggccaggacgtgctgctcgtccattccaccggggccctcctcccagtcgacgactatggaattctaacgcagagcttgcagacgggcgaaagctatttcttggtaatctcacatatcgactctctcatgtactccctccattctaaattgtcatggtcatactatgcatctagatactaa

SEQ ID NO: 153577 - DNA, 1881 bp, Zea Mays
cttcctcgtcttgcgctcccctcctataagtacaaccccacaacaaagacatgagtgtgcaagtgtggttgtctcctaaacggggtgcctctcttccagtcttcctcaagttatccacttctctctcgatcgaagtcgaagcacaaaccctactgcccgcccacctcccacgtagtgtgtgtgctactcgatcttgtgtccactctcgcccacacacaaacttccacacgaaccaaagattccaatctgaaccaacgttattctgtcgttctccgcctaaccagcaagcagtcgatcgatcgatggagggaagcagaaacagcccggacaggcagtcgtcgggcggcagccctgaggagcgcggaagcggcggtagcggaggccgtggcgccggggagccggtgcggtcgcggtggacgccgaagccggagcagatactgatcctcgagtccatcttcaacagcggcatggtcaacccgcccaaggatgaaaccgtccgcatccgcaagctgctcgagcgcttcggcgccgtcggtgacgccaacgtcttctactggttccagaaccgccgctcccgctcgcgccgccgccagcgccagatgcaggccgccgcggcggcggcggcaacagcggcggcggcctcctctgcggccaacagctctcccggagctagcgcaaccgtcggccttccttctggtgctctacaatatcccttggtcatgagcgggagcgggaccgcctgccagtatgagcagcaggcgagctcctcgtcgtcgtcgggaagcactgggggctcgtctcttgggctgttcgcgctcggagccggggtgcccagcaccggcggtgggttcttccaggagtcgtgtggcgcttcgtcgccactggcgacagggctgatgatgggggacgtggaccgcagtggcggcagcgacgatctcttcgccatctcccggcagatggggttcgcggcggcgagcccagtcgcctcggcttcggtggcgcctccgagcacaacggcacaccaccagcagtattactcatgtcaatcacctacagggacgatcacggtgttcatcaatggagttccaatggaggttcccagtggtccaatagacatgcgagccattttcggccaggacgtgctgctcgtccattccaccggggccctcctcccagtcgacgactatggaattctaacgcagagcttgcagacgggcgaaagctatttcttggtagcaaggccaacttaaaactgcccgcacctagttagattgtagcgcagtctctctgccggccggtctctactggatattcagatgggacgcagttcatgatcaatcaaggtgggtccttttgcacgcaaatgatattgtccatcattcatatacagtccttcgagaagaaaagttagctaccaagaacaatatatgtatattgcacctcaagcaagtacgtacacatatgtccttgcaacataagagagcgtacagtacatgggcggttcagattggattatgagaattacagtgtatgcatgggtgttttctctcacgcatcattttctttacaaggatatgtgcatgtgaatgctgaatacatgcatggaatctccttgacagtcgagctacatatttattttagctagacagttgcacctttgaaacgatttgatttataagtatgtaatgttgtacgtctatatatgtcgactggaccgtgtttggaatgtctgtccaccaatttagaagagagagtactccttttggatgtttatatatatgtcgaccgtgttagacttcatattttgtatactttgtatttcaagaagagagagtactccttttggatgtttattaattaaatgacgacattactaattaa

SEQ ID NO: 153578 - DNA, 2421 bp, Zea Mays
aagaatatggcactcagcaaagagccaaattccggtagggagtacaagtataaaccagtttccaagttccagccgccttgcagctactgcagaaacctatacgaccaagaccctatagactcgacactcgacaacttaggagaaccatggagcaggagcaccatggagagacccaaagcttataacgacgcttttctctctctctctctctctccctctcttttctcagccctacaggtttatttattcttcagtagaaccaattggtcccgtcgttcctctgtgccgcgcctgggtagtcgacgccgctagacatgttgaaaccaggaccgaacctgaactccggcgcgctggcggcgatgtcgcccatctggctcacgaatggcgtgtcgtcgcggatgaagaactgctgctgctgctgcactggcgcctgctgctgctgctgctgcatcatgctgttgttgacgtcgtcgaaggctccgttgccctgtacgaagaaaccctcgtccatctggatcctctgctggggcatcgcgtttggcctctccatgacggcgacgctgtcgctgctcgggttcttgttcggcacgaagttgttgtcgtacatgttcatcagctcggcgatggacctctgcccgtccatgggcaggctgaaatccagactgttcagtgcctggttgggttggctgaaggccggctggaaggcttgtggctgtggcggtgctgacggcggcttgttctcggtgctctgaggggttggatccttgtgcttgcaggtgtactggtggctgttgcgggcattccggtccaggaatccgtagctgtagtcactgcgcgggcactggacgttgttgcaggtgtacaatcggttgtttagcatcagctctggctcggctgcagcgggggcgttcctcttctggatgaactccacgtcggcggtctcctccttcatcggcgtcggcacgaggaacttgtcgcttaggatagcggcaccaaggttgaacgcggttgggtcagtgactgccgtcctctggttaccggcctcgtcccccttgcactcatcgatgatgtccacatcatactcgctcgagctggtgttgaaggatatggcacttgcgatgccaccagtagacgccggtgggcgtgcgcccgggttcagcttctggtacagctcctcttcctgcttgacgaccgccagccaggttgagatctccttggcagtcatcttgtcctggaggcacttggactggcgaaccaggcgacggatcttctctatgtccggtgacatgtgcttgatgacagcggtgagcacgctcaccttccaggccttcttaaggtcatgaggcttcttgtacgggggtgggccctggtccttgggaatgccgagttccggccaccactcctcgtcgccggtaggccaccacggtggaggaacgcccttctcgagcgggtagcgccgctgtgggggctcgcagtgctgcataagcgctgagagcagtgagcccagcgtagtgtcctgcagctcctgcaaggaatgggggctggcagcgcccgaggcgagctcgttctcggcgccagggacggcgttgtcggcctggtacttggcaatggcggccggtccgttgcggtcgaagcggaccttctccttccaccacgcacggaggttgtcggaggcaccactcactggcttgcccttctccggaatgatcccatacacaaacccctgcgcgcggcacacctccatcatcttgagcatgtacttgaggatgccgtcctgcgcgcgcgacatcttcttgcgccgggcctgctcctgcgactgccttggcttggacgagccatcagccagtcccgcaccgctagccaacgagtccttgccgcgggtctgctgcagttccctgagccgcttcagcttcatacggtcgcgccacatgcggcgctccagctcctcgatgtcctcgacgtcatcgtcgctgtcgtcctccccggcgtccgggaagctatccggaggcgggtccacgagatcgccctcccccatcacgcactggtcgccagaggacgtctgcggcatcagagacccgaagcccaggttcttgtcgccgttctgctgcaggagatccacgaagttgtggacgccagggaacaccacgctctgatccaccaacagcccgcctcccatcatcgtgatctcaacaaacaccacacccaacaaattcactcgcagtcacgggcagactgactctcttccttctactgctacttgtaaactcaccctagctcttcctgtttatctcccacttgctattttcacgggtgctccagctttgccatgacctgggagacgagaggagggaggggcgagtccagagagaagccgcaagagggaggagaaagaaaagaggaaggggggataagagcatctcc

SEQ ID NO: 153579 - DNA, 1599 bp, Zea Mays
atcgggtttcgggtacccattgccatctctacccgcgaagggtccagaacggttaccgaccccggtagcaagcaaagaagcacaatgcatcggcaactgagccacggtagcacgcgtcggcctccggtgcgaagcgacgcggcggtcacgtacgtgtcactggttcctgtctccctacatgaatcccacgtgtccatgcattcggatgtacgtgtcccgctctcatttctcaggagagcggtatttatctacacggcgtttcgaaaccagtaagacgatctgcgaaacaaacactagtgcgtttgcgagagaaaccgagaaagagaagctacagagtcactgaccgaccgctatggcatcgaggcagaacacgcgtgaggcgcgcgccgaggccgacgcgcggcgcgccgtggaggagctggctcgggcgcgggacgagcacctcgagaaggcggaggtgaacgcccgctcggccgcggacgagatcgcgcgctcccgcgccgaccgcggtgccgccggtggcggcggcatcctggagagcgtgcaggagggcgccaggtccttggccagcgccgtgggccgcaccttcggtggcgccaaggacgcgaccgtggacaagacctcgcagacggcgcacaccgcgggcgacaagctcggcgagtacagggactacaccgccgacaaggcccgggaggccaacgacagcgtctcgcgtaagacgggcgagacggcggaggccacccggaacaagctgggcgagtacaaggacagcgccgtggagaaggcgagggagaccaaggacgcggtggcgcagaagacgagcgagaccgcggaggcgaccaagaacaagctcggggagtacaaggacgcggcggccggcaaggcgcgggaggccgcggacaccaccgccggcaaggcgagggaggccaaggacgcgaccatgcagaaggcccaggagacgagggacgccaccgccgacaaggcgagggaggcgagagacgtgaccaggcagaaggcgggcgagtacaccgacgccagcagggaggccgcgcaggaggccagggacaggtcccgagccacagcacagaccgccgctgacaaggctagggagacggccagcactcacgacactgataggtatgtgacgtagcagtgaagaattctagtgtagttggatgatcgatgacgtactgtgctctacacaaccacacttcgcagggagcagggacaaggtctgctgggggcgctggggaacgtgacgggcgcgatcaaggagaagctgacgctgggccaaggtcagcacgtcgacgtccggctgggcggcgaggacgagcgcgcggcgaaggaacgcgcggcggagaaggcggcgtcggtgtacttcgaggagaaggaccggctgatgcagcagcgtgcggcggagcgggtggaccagtgcgtcgagaagtgcgtggagggttgcgccggctcgtcctgcgtgcatcgccaggggaagatgtgatcatgtgatgccgtggcgcgcgcccgcccctacgtgccgccccctactgtggcgtccgtgcatggtcgatgagcgataataaataaacttgttaaactagt

SEQ ID NO: 153580 - DNA, 3960 bp, Zea Mays
cactcggccactccctccagtctccacacacacgcgcgccattgccgctgctgctcatcgtactcccaaatggagcagcctgcattcccctcttgctccgtggagcgcattcgctccagcacagggaagctgtgacgcatcgccgccgccaaatcctccacccgacggctaacgcttttctctcgggtctagtcggggtggagatccgtcaaggccatctcgtcgcgttgttggtcagtaatcctagctcgcttggacgaagcaaccagcactatggttcttggatgacaaaattggagcaggccactgctcacactgcggcggtgtccatttcttcgtgtctcggttcttggccccgtccttcctgatttctctgcttttcatactgaaaaaatcctcaaacctttcatccttaatcccctttctcggttccaagggagcttaaaccctaccctactgcctttttcatcttaagctccgtatctcgaaaaatccatcccatttgcatgagcattgcttcaattgcctggctgcacagcaggatcttgcgatgcggctcatcttgttgtggctctcgatctgggccgtgtgctccgctgcctcggcgggggctggttcagacatggaggcactgctggagttctcccgaggcatccggcaagacccgtcccgccgccaggccattccctggaaccccaccagcgcgctggactccgacgactgccccgttgattggcacggcgtgcagtgcatcggcgggcagattctttccattgcgttcgacggcattggtctcgttggaaatgctagcttgtcggtgctagcgaggatgccggtgctccggaacttgtccctgtcagacaacaagctagaagggttcttgccgggtgagctggggtcgatggcgtcgttgcagttgctggatctgtccaacaacaggttctccggttcaattccgtctgagttgactaagctggcaggtttgggctatctcaatctctcttccaatggttttcgtggcgcattgccgttgggtttccggaacttgaggaaattgaagtacttggaccttcatgacaatggcttcactggcaaattggacgacgtattcgcgcagctgcagagcccagtccatgttgatttaagctgcaaccagttctcggggtccttggcatcgatctctgacaactcatctgtggttagcacgcttcagtacttgaatgttagccacaatgtgctgtcagggacattgtttgacagtgttccgatgcctttgttcgacagccttgagatttttgatgcgagttttaatatgctcagtggcaacatcccgcagtttaattttgtcatctccctcaaggtgctgcgcctgcagaacaataatttttctggctccatcccagaagcattctttagggagacgtctatggtgctgactgaacttgaccttagttgcaaccaacttacaggtccaattagacgtgtgacatcaacaaacttgaagtacttgaacctgtcacacaataatcttcagggaactttaccgatcacatttggaagctgttcagtagttgatttgagtggaaacatgctgtatgggaacttatcagttgcccgaacatggggaaattatctccagatggttgatttgagctcaaacagattaacaggaagttggccaaatgagacaacccagtttttaaggctgacatctttgaggatttccaacaacttgctatcaggagaactgccaattgtccttggaacctatccagagctgattttcattgacctcagtattaatcagctgcatggacctttgcctggaaatctgtttacagcggttaagctgacttttcttaatctttcaggcaacagttttacagggactctcccccttcgaaattccgataccaagaactcgacttctatagacttgtccattcttcctgtgcaaacttcaaacctctcctatgttgatctttcaagcaattttttgcacggctcactgcctatgggcattggtgatttgagcgcgttgacattgctgaaccttcgtcagaacaactttactggcgaaatcccaagaacaatcaccaaacttaagaatctcttatacattgacttatcaagcaacaatttcaatggtagcatacctgatggcctccctgatgatctggtcgaatttaatgtttcctacaactacctgtctggctctgttccaagtaatttactgaaattcccagattcatctttccatccagggaacgaattgctcgttcttcctcgctctgaatcattaaatggttctgacaaatcagatgaggcaagacacggcttgaagcgtgggattctatatgcattgattatctgtgttgttgtatttgttactgggattattgcgcttttgcttgttcattggaagatcagtagctggaaaagtagggaaaaaggtactggccaaggtaaacatgtgggtcaagtccagagtgctcagagaagtgcagaaatttcaacaactgaaatgcatgatgtagcattagaatcgtcaccttctgcagagtatggagctgtttcattgcctggcaaggaaagacgacatgaagcccaagatgcgccaattgatgctgcttatttcaacgaaccagcaggtagtagctcagcccgtaaagacagcacaaagtcttcgatgccttctttatcatcgtcgcctcctgatgcacgctcccagcatcatcactctatccttagagtgcactctcctgataaactggttggggatttacatcttttcgacaattcagttgtgttcacggctgaagagctctcttgtgcccctgctgagataattggcaggagctgccatgggacatcctacaaggctacacttgataacgggtacatgctgacagtgaagtggctgaaggagggctttgctaagagtaagaaagaattttcccgtgaaataaagaagcttggcagtgtaaggcaccccaatcttgtccccttgcgtggctactactggggccccaaagagcatgagaggatcatgatatcagactatgcagatgccacatctctgtctacctacttgtctgaatttgatgagcggaatctcccacccctatcagctggacagcggctgaacattgcgattgatattgcccgctgtctagattacctgcacaacgagcgggtgattccacatggcaacatcaagtcgtctaacgtcctgattcagaactccactccatctgctctggtgactgactacagccttcacaggctgatgactccaatcggcatggcggagcaggtcctaaacgccggcgcgctaggatattcccctcctgagttttcaagcaccagcaagccatgcccatctctgaagagcgacgtgtatgccttcggtgtcatcctgctggagttgctgacagggaagattgccggtgagatcatctgcatgaacgatggcgtggtcgacctgaccgactgggtgaggatgctggatctggaggagcgtgtctcggagtgctacgacaggcacatcacgggtgttgagagctcggaaggcgccccacaggcactggatggcatgctgcgcatcgccctccggtgtatccggtcagcatcggagaggccggaggtccggacggtgtttgaggatctcttgtccttatcgtcgtgaccgtagttattggtagtgtacatctcgtacttgcatcagcttgtggaaacttggagggtatactaacaattgctaggatttcggggtgatcaggtgatgtgtgtgtagtctccttgagcattcattgtttgggtcgctctttctgggaatagttgattcgtttttagttagtccacaattttagcagtagatgattgtgagaataatgtttgtgcattgtgatttcagacactagaaaggaaaataaagatagtcttattgatttgttgctc

SEQ ID NO: 153581 - DNA, 1772 bp, Zea Mays
atggacttcaacaaacggtcggtctccgtctcctccgtcgtcgcctttataagcgcctccgccacgccttcactcgccaccaccatcctcttcctacctcagctactcccttcgcttcctcatctgcgagctgtgagctgcggcaaggatccaagccacaggcaggacaggatgcagtccaagcaccgggtcttcgcggaggacctgctcctggcggcggagggcgaggaccacttcgaccgggtgcccgactccctggtgctcctcatcttcaacaaggtcgccgacgcgcggtcgctggggcgctgctccgcggtgtcgcgccgcttcaacgcgctggtcccgctcgtggacgacgcctgcctgcgcatcgaccgcgtcatccccgccggcgacggcgacggcgacgcgctcctcggcctcgcgggggcgccgcgcccgcgcgccgtgctctcgcacctcctcaaggccgtgctgctcgccgtgctcaagcccttcgcgcactgcgacgccaagtccgcggcggcggcgcacaagcacgcgcaggcgcaggcgcagcagcagcaccactcgccggcccaggtgctcaagaacttcagcagcatccgcaacctccgcatggagctccccgtgtccgacgtcggcaccgacgacggcgtcgtgctcaggtggaaggccgtgttcggcagcacgctgcagagctgcgtcatcctcggcggcaccaaggtggaccgggccgccgcgggtccccgcgcccccaccggcgccgacgccgacgccgaggacgcgggcgacggcggcggcggcggtggcagcatcccggagtccttctacaccaacggcgggctgaagctgcgcgtggtctggaccatcagctcgctcatcgccgcggctaccaggcactacctcctccgcgagatcgtcaaggagcaccccacgctggagcaggtcgcgctgacggacgccaacgggcagggcacgctcagcatggggcgcgagcagctgaaggagttcagggacaagccgctcgccgcggcggccgccgccgccaaccgcacgcaggtgcccgcctgcaacatgaagctccgctacgcgccgctgctggagctgtcggacggcaccaggatccacggtgccacgctcgtggtcatcaggcccgtcggcgaggccaccgcgggcaccggcggcggcggcggcaggaagggtctcgacgagttcgccgccaacgccttcgacgggcctctcagggaggccgtggccgcgctcagcaagcgtcgcacctacctgctcgagatgaacggcttctagtctccttggccaatggccatctctctctcctgcgcacgcgcgtcgtctgctgcagcagcaagaccccccagcgccgccgcctccgttggttttagcctcagctcggtcctgatcgggggaacactgaggtgttccgtccttctcgaatgtcgcagcaaccaacgctgatgtctcctcggaccattgtgaaaatagtagtgtagcgaatggagtgggcggcgccagcagcaaagcttttgctacgttttgaacaggatgaaaacagtcactgttttcaatcaaatgttgtccgagagtactgtacaagtttctgagacgaaatcacggtctcattgatggagaaatcactttttcgatcaggccagtagtgtgaaaaaactttgaacggaattgcagcgttcttgccattgtattgccatgccaagagtgcagcctttgtggaatgcttcttttcttgcacgtta

SEQ ID NO: 153582 - DNA, 252 bp, Zea Mays
gctcccagtcgccctccttcccaagcaacgaggcgattcctccctctggcctcgcccgcccaggggaaagcatcaatcaggtcaagcccaactggcaactggtactactacttttctttttcttttttctttattttccttctttatttattattatccttgctagctccattccggaaacaagattttttcaaccgatatggccgaagaagagagatatatgtttcgataaataaataaacgaagtacaag

SEQ ID NO: 153583 - DNA, 1142 bp, Zea Mays
cttctctcccgtcccttctctctcttcgtgatgtgttgttatttagtaagctgttaagctaaagccagggccgctcctctgctgttaagctaaagcgcgctggcctgctcccaccgccgcccaccccccccgtcttcttcctcacccatctccgccagtccccttcctcactgcatttcttggttttctccctccaccggaaccaagcgatgtctccggcgccgagttcgcatcattcgcaaaccaattcgaggaaggagaagcggatgcggaaggtggacaccttcgcgccgcacaacgatggccaccaatggaggaagtacggcgagaagaagatcaacaacaccaacttccccaggtattactacagatgcacgtacaaggacaacatgagctgcccggccacgaagcaggtgcagcagaaggaccacagcgacccgccattgtacgcggtcactactacagcgaccactcgtgcaacagcgccttcctcccgctctccccctccgagttccagctgcggacaccgtccgggaaggccgtctccatctgcttcgactcctcgtccggggcggcggcggccgtggcgtcggtcgccaccaatgctagcggcggctcgccctcttccagcgccgcggcggcgcggcgaggcacgccgccggatatcagttacccgtccgacctgcggcggtctgacacttacccgtggggcgccggcgccgtggagcagaagctggcgtcctgcgccaccgagtgccacgacgccttctcggccggcgccgtgccggaggaggtggtagatgcaggcagatttgggtctatcaggttcttccattttttgtaaattcatcggtggaaggcaactgattttacttcgacaaactaaggccctgttccaatctcgcgagataaactttagcagctattttttagctacttttagccatttataatctaaacatgagagctaatggtgataattgaaactaaactttagcacttcaattcatatagctaaagtttagcaggaagctaaagtttagctcatgagattgaaacggggcctaatatgatacagatgtttcttttttacatgccgaagcttacccgacattcgcatgcaactttttttttcttggttc

SEQ ID NO: 153584 - DNA, 1394 bp, Zea Mays
aagaagatattttgcggttttgtgagttgtgatggcttcaggcagtttggtagattgtggcgatagaaggacggccagtttagcctagccacgctcgctctacctcctcaatcctgattagcttcaaaccgccatggccatggggctccccggcctccgctgccaccgcctcctcgctcgcgggtcactccctccactcggtcccgccctctatcgcaggcccctggagcgaacctcggctctccgctactcctccctccaagctcaagctggggacagtattggggaggaggccctgcgcatgttccttgaggacaggcaactgcacggcgatttcgtcaccaaggtctctgacatggtctggaggaggaatggcgccaatgttggtgcggctgaggcgaccacgggccaagggagtgcaatagatgttgctcagcctgaagacgtgcgggaagatgctgtggacgagggaatgttgagactagcggcgattactagtgattgggtgtccggtgacagcagccctcctttaagcaagaggctttctgccgaggaaaggcagaacgagagcaacaaaaggaaggagctgaatcttttgaaatatgaagcactcaaggatgaattgctgctcttgaccgcaggaactggagcagcatgtagtttatattgtctcctggttttctctctggagactgctgtcagttatgctttgggggttggtttcagttgcttgtatcttcaacttctgtatcaacatgctgataacctatcaaaggaagatattccagaagtttttctaaagaagaaagtgaagaaaattggcattacaagtgaagatttgaagaatacaatagagaagacattgggtggtgcaggactagctctttcatctccaaggcttataattcctgccgtgatttatggattgtcagctttatcacatcacttccaaaatagctttttcagttttgaggttcttccagggatgatgggtttcctcgcgtacaaggctgcagctttggttcaagtctacagagacaacgaggacctccgcttgatacttcctgatgaagaggccgctgacagtgacagcacttgatttatacgaattagagattatgttaacctagtggttgttgacaaatacaaaacagatctgttcaccaccgagtcaagcttcacttttgaacttttttttgtctttaggagatcctgaaattcgtttgcttatcttcttggaaggggggaaacaggaagagttgaatgaaaaatcattatatgttagagacagctgaaagctcaaaggaacacacattttttttgtccttgggtaactatacaaaactgttgcaagtgcagttggaagcaagaatgcgcaacagtaccattgtagt

SEQ ID NO: 153585 - DNA, 1596 bp, Zea Mays
aagaagatattttgcggttttgtgagttgtgatggcttcaggcagtttggtagattgtggcgatagaaggacggccagtttagcctagccacgctcgctctacctcctcaatcctgattagcttcaaaccgccatggccatggggctccccggcctccgctgccaccgcctcctcgctcgcgggtcactccctccactcggtcccgccctctatcgcaggcccctggagcgaacctcggctctccgctactcctccctccaagctcaagctggggacagtattggggaggaggccctgcgcatgttccttgaggacaggcaactgcacggcgatttcgtcaccaaggtctctgacatggtctggaggaggaatggcgccaatgttggtgcggctgaggcgaccacgggccaagggagtgcaatagatgttgctcagcctgaagacgtgcgggaagatgctgtggacgagggaatgttgagactagcggcgattactagtgattgggtgtccggtgacagcagccctcctttaagcaagaggctttctgccgaggaaaggcagaacgagagcaacaaaaggaaggagctgaatcttttgaaatatgaagcactcaaggatgaattgctgctcttgaccgcaggaactggagcagcatgtagtttatattgtctcctggttttctctctggagactgctgtcagttatgctttgggggttggtttcaggtaagcaagctctcttcacagcttaggagatttttactcatgatttcagctgaagttttaacaagtgctttgagtattctgaaacttgtcgctctatattgagtagttgcttgtatcttcaacttctgtatcaacatgctgataacctatcaaaggaagatattccagaagtttttctaaagaagaaagtgaagaagtaggtttcaatattccacctgcagtctgtatcccattatttggttcctcacattttgattgtttaagtaaatatgactatttatgcaaatgctagaattggcattacaagtgaagatttgaagaatacaatagagaagacattgggtggtgcaggactagctctttcatctccaaggcttataattcctgccgtgatttatggattgtcagctttatcacatcacttccaaaatagctttttcagttttgaggttcttccagggatgatgggtttcctcgcgtacaaggctgcagctttggttcaagtctacagagacaacgaggacctccgcttgatacttcctgatgaagaggccgctgacagtgacagcacttgatttatacgaattagagattatgttaacctagtggttgttgacaaatacaaaacagatctgttcaccaccgagtcaagcttcacttttgaacttttttttgtctttaggagatcctgaaattcgtttgcttatcttcttggaaggggggaaacaggaagagttgaatgaaaaatcattatatgttagagacagctgaaagctcaaaggaacacacattttttttgtccttgggtaactatacaaaactgttgcaagtgcagttggaagcaagaatgcgcaacagtaccattgtagt

SEQ ID NO: 153586 - DNA, 101 bp, Zea Mays
cgcggatggtcctggacgcttgaaactagggtttactgcttcagtgggctgggccgaggtatggcgcaggccatacttcgccataacgggccatccgcccc

SEQ ID NO: 153587 - DNA, 1519 bp, Zea Mays
cccaatcgcaagctcaagcaaaaacacaaagcgcttaaaccacactcaaaccaaccgccaacaaacaggcctcctagtcccgaccagaacttgctcgtagccccgcccccgagaacccgacagcgcgagatggctcccgagctgatgacagccaagatgaccgccaaggccgcggcggcggcggcggcggtgaagcctgccacgagggcgtacgtgacgttccttgcgggcgacggcgactactggaagggcgtggtggggctggccaagggcctgcgcaaggtccgctcggcctaccccctggtggtggcggtgctgcccgacgtgcccgagtcccaccgccgcatcctcgtctcgcagggctgcgtcgtccgcgagatcgagcccgtgtacccgcctgagaaccagacgcagttcgccatggcgtactacgtcatcaactactccaagctccgcatctgggagttcgtggagtacgagaggatggtgtacctggacgcggacatccaggtgttcgagaacatcgacggcctgttcgagctcgagaaggggtacttctacgcggtgatggactgcttctgcgagaagacgtggagccacaccccgcagtacaggatcggctactgccagcagtgcccggacaaggtggcgtggccagcggcgaccgccgagctgggccctccgccgtcgctctacttcaacgccggcatgttcgtgcacgagcccagcgtggccaccgccaaggcgctcctcgacaccctccgcgtgactccgcccacccccttcgcagagcaggacttcctgaacatgttcttcagggatcagtacaggccgatccccaacgtgtacaacctcgtgctggccatgctctggaggcaccccgagaacgtgcagctggagaaggtgaaggtcgtgcactactgcgcggcggggtccaagccgtggaggttcacgggcaaggaggcgaacatggacagggaggacatcaacgccctggtgaacaagtggtgggacatctacaacgacgagacgctggacttgaagggcctgccctcgctctcgcccgacgacgacgacgaggtggaggcggtggccaagaagccgcttcgcgcggccctggcggaggccggcacggtcaagtacgtcaccgcgccctcggccgcgtgatcccgtgctctggccttcccccaccgcgcaccgtaccggtggccgcgcgctatagcttgtgtgtgtgtggccatcgcggaacataagaagaatctctcactataaaggccttcgttctgtgtttgcattttggttttggattagggtgtctaatttttcaccagttccttttccccttgtgtaagtgtggagcttactatatagctagcgcccatttcaaggtgctgcaagcgttggtcaggaattgggctagagtgtttgtcctgtaccgagggattatgtgtatttttgctatttcgctcggtaaattaatacaataataaaaaatagggagccgcaaaattatggccat

SEQ ID NO: 153588 - DNA, 1775 bp, Zea Mays
cccaatcgcaagctcaagcaaaaacacaaagcgcttaaaccacactcaaaccaaccgccaacaaacaggcctcctagtcccgaccagaacttgctcgtagccccgcccccgagaacccgacagcgcgagatggctcccgagctgatgacagccaagatgaccgccaaggccgcggcggcggcggcggcggtgaagcctgccacgagggcgtacgtgacgttccttgcgggcgacggcgactactggaagggcgtggtggggctggccaagggcctgcgcaaggtccgctcggcctaccccctggtggtggcggtgctgcccgacgtgcccgagtcccaccgccgcatcctcgtctcgcagggctgcgtcgtccgcgagatcgagcccgtgtacccgcctgagaaccagacgcagttcgccatggcgtactacgtcatcaactactccaagctccgcatctgggaggtacgtacgtactgtgtgtgtgtgtgtgttttttgtttactttttagccttttcttttgcccataattgttctgtagcagtgctcacgtcacgtgtcgattcgtgcagttcgtggagtacgagaggatggtgtacctggacgcggacatccaggtgttcgagaacatcgacggcctgttcgagctcgagaaggggtacttctacgcggtgatggactgcttctgcgagaagacgtggagccacaccccgcagtacaggatcggctactgccagcagtgcccggacaaggtggcgtggccagcggcgaccgccgagctgggccctccgccgtcgctctacttcaacgccggcatgttcgtgcacgagcccagcgtggccaccgccaaggcgctcctcgacaccctccgcgtgactccgcccacccccttcgcagagcaggtgagcggtgtgatccatgcgtggcgtgcgtgcgtgcgtgctcactcttcttaattggcacagcatacagcatgtgtgctcactcatctcgatcgaattcctccccccgcaggacttcctgaacatgttcttcagggatcagtacaggccgatccccaacgtgtacaacctcgtgctggccatgctctggaggcaccccgagaacgtgcagctggagaaggtgaaggtcgtgcactactgcgcggcggggtccaagccgtggaggttcacgggcaaggaggcgaacatggacagggaggacatcaacgccctggtgaacaagtggtgggacatctacaacgacgagacgctggacttgaagggcctgccctcgctctcgcccgacgacgacgacgaggtggaggcggtggccaagaagccgcttcgcgcggccctggcggaggccggcacggtcaagtacgtcaccgcgccctcggccgcgtgatcccgtgctctggccttcccccaccgcgcaccgtaccggtggccgcgcgctatagcttgtgtgtgtgtggccatcgcggaacataagaagaatctctcactataaaggccttcgttctgtgtttgcattttggttttggattagggtgtctaatttttcaccagttccttttccccttgtgtaagtgtggagcttactatatagctagcgcccatttcaaggtgctgcaagcgttggtcaggaattgggctagagtgtttgtcctgtaccgagggattatgtgtatttttgctatttcgctcggtaaattaatacaataataaaaaatagggagccgcaaaattatggccatatttctgtcgggttcggtgtcactcgcattactggt

SEQ ID NO: 153589 - DNA, 1387 bp, Zea Mays
ctaccacgcctcggcggactggatgcaagtcgggcttccacccttcacgcgcgcttggcccgctacgacgcttcgtcttcgtctgtccaccaaccagaccaacctccggccacgggctcacggcggcgagcggccccagctccgatggcgccaacggttgagatcagccacctcaccttcacctaccccggcatcgacggccgcccgccacccggcgcgccaccgctcatcgaggacgtctgcttctccctcgacgccggccaacgatgcctcctcctcggctccaacggcgcaggcaagacgacgatactgaagatactaggcgggaagcacatggtggatccgagcatggtgcgggtcctgggaaggtccgccttccacgacacggcactcacctcctccggcgacctctcctatctcggcggtgagtggagacgcgacgtggcctttgctggctaccaggtgaacattcagatggatatatcggcagagaagatgatttttggtattgctggtgttgatccaaagaggagagacgagcttatcaagattttagacatcgacctcacctggcgcatgcacaaggcatcagatggtcagaggagacgtgtccagatttgcatgggacttcttaagtcattcaaggttcttcttcttgatgagatcacagttgatcttgatgttctggcaagatcaaatctgttatcgtatcttaaaaaggaatgtgaggaaagaggtgcaacaatcatctatgccacacatatttttgatggtcttgatgattggccaacacacattgtttacattgctcatgggaaactgcaattagcagtgcctttggaaaaggtgaaagaaatgagtcagttatctctcatgaggactgtggagagctggttgaggaaagaaagaaatgaggacaggaggaggagaaaggagcgaaaggagaaaggcctcccagaattcgacaaggttgtcgagggtagtcgggttataggtgatccagcaaagaacgcagacagagttataaacaacgggtgggcagctggacggcttacctcgacgattgcaggagaggaaaatttcgtcttcagctctaacagcgtacttaggcaatgatctagctttgttttcctttatctatacattgaaaacggtaaataatagtcttgcggatccaatagagatatcgttggagctttgtcatttatagcgaaagttctgtcaggaaaggagaattcactctatatagtttggatttgaggatttacactgtaattttattcgcagctgagtgttcgagaaaaagaaattgcactgtaacaacatatatatactgcaccaaatatttgtgtggtcatatttatttctacaggggctacgcataact

SEQ ID NO: 153590 - DNA, 554 bp, Zea Mays
gcgctgtccctgccgtcgcagctcaaagtggacaacttctcctactgtttcaccgacataacgcggccggagcccagctccatcctgctcggccttccggccaacctttacggcgacgccggcggcgtagtgcagtccactcctctggtccagaacttctcgtctctggaactatactacctgtcactaaagggcataaccgtcggctcgacgaggctgccgattccggagtcaacgttcgcgttgaagcaggacgggacgggcggcacgatcatcgactctggcaccggcatgacaatgctgccccaggacgtgtacaagcttgtgcacgacgcgttcactgctcaggtgaggctgcccgtggacaacgccacgtcgtcgtcgctctcgcagctctgcttctcggtgccgcggcgagctaaacccgacgtgccacagctggtgttgcactttgagggcgcaacgctggccctgccgagggagaactacatgtttgagttcgaggacgcaggcggcagcttcacctgtcttgctatcaacgccggagatggcct

SEQ ID NO: 153591 - DNA, 2022 bp, Zea Mays
atggctggaaaccaaaccgcacagcccaacatggacagcccactgttccatcgtaaatacaagaattgggaattcgcgtgcgcgtgctcctcctggggtccttttgtgctgctcctcagcatggttggagggtataacgttgcatgtaaagcaacaccagtcgcgcggaggacctgtgctgcacatcgcgcggagagcccgtcgcggttgcctcggactcgagggagctggcggcgcaaacgtcgtgcggccaaaatcgagatccccaccatccgaatcgaggaaggcattctcttttttgccgtaccatggatgcaccggatgttcaacagagcatgggatataaggagtccaggggtgggagagccacgtgcagctctgaatcttgcatcttatgggggaagtcatgctcttaaactatcaaaagaggatgtctttctttattcagctaaggttattcctagaaatgagacacgggtaatgaagatgatggatcgtctcactgatcttggcccaaaaattatcatgggtaaagattctggcctgcatacctctaggcatgcctaccgagaggagctggtaataaaaaatggagaaatgcttggtgtatcgcatctaagaaacagaagagttttgtccaatgggtttgtttcattagggaaggaggatcttcagctcatgtatagtgatggtgataaggcttttggtacatccactgatctctgcattgatgagagactaagaatcgcatctgatggcattatttttgtcggcatggagatcttccgacctcagaaggaacatggtttaacgcagactggtttgaaaggaaaatttaagattactacaagatgtctatggcttgataatggaagattgttggacgcactctacaaagcagctcatgctgcattgtcaagctgtcctgtgaattatccacttagtcacatggagaggatggtagctgaaatcttgaggaaaatggtacggaagtatagtgagaagaggcctgatgtcattgcggttgctatggagaacaccacaacaagtttctcaaaacacctcgatgctaaatcatctagaaattttgaaccttcctcagctactagccatctgagcaggagtccagctatgagtcttgaaggcagttataaaacacacccagacaacccagaggtggatgctgaagaaacccttcctgaggccacgagaacaacaccggatgatgcaaccacaagttccaatggtgaagcattcttctcttcagatttacatcagcctaaaacattggagcacttatgggagtcattcaaatctcctatagctgttaaaattgcacggattgtcaatggggggaagaagcaaaatctcggcaagattggcataatgggtaaggactcatcaatccagtcaactcccgctccagctaaatcttcaaaaaagaacaagtggaaacctgaggaaatcaagagcttaatacagatgcatggcgagatgaatgagagatttcagagcgtgaaaggaagaatggtcctgtgggaggagatttccgacaacatgttgaagcaaggaataagtcgtactccggcacagtgcaaatcgctttggacatcgttagttcagaaatacgagtggaaatttgctcatgttacattcagtaagccagaatacctccaagattcagatattgtaatgaacagattccataaacagagacctgtttatggaggttgggaacaacaccttggattggagcatacaaccactaccccaaaaaggtcctacttaggcaacaaccaggatatgaaggcagcctgttccaaaagcagtcttttggtgatgtacatggaccttttgcatagagtagtttatgtggcagttgtctcaagaattttcatctggtggatgtacagggttcgtatagcaacatttccttgtagaaagttgaagttgtatatcgagggtgaatttacctatgtttatcttttcgaccccaagcctctggaaagctgtgaaccatag

SEQ ID NO: 153592 - DNA, 1013 bp, Zea Mays
tatataaagcgcgggcaaccagagacccggccaccatgcaggggcggcagctgctttatttatttggttccaaccaattaaccaccagcatcagcagcgcgcagcttcacttgatccagccgccgccaccatatcatcgatcgcacgcacgcacgtactatacgttcaacggataacaacaagctagctgagaacatggacagcaataagcggctgggcctgggcgtgcagcacgggcaccacagccacaacggcaccatcgccaagccgccgccggcgcaccaccaccaccacgcacggaggaagcaggggaggcagaacggcggcggcggcggcaaggggatcaaggtggtgtacatctccagccccatgaagctcaccgccagcgccgaggagttccgcgccgtcgtgcaggagctcaccggccgcgactccaacgtcgccgaccacgacctcgacctcgacgacggcgcctgttacagctactcctccttccaacgcgtcgtctccccgacggcgacgccgacagagacggccgccgcggcggcggctgctgcggcgggaccccgcgctctgtcgccgacgacgacgacgaacgccgggccggtccgacgacgaacgcccgagtatgatggcgccgccgtggccgagccgccgccgccgccgttccagggcgtgttcgagtacgacgacgaccaccagactgcagagagcttgctttacggccaggactactggtaggaggaggaacttatcatcctatatgctgaacctcaacgtacggcgggaattttctcctacgatatggtttccgatttcacgacggaaacacagcaggtcgagcacgcgtacgtacgccgtgtagatttgtacgtagcgtgcattatttatttacataaggtttctctgtacgtatgtgcgcggtccttgttctctataggctggctgcaccgatccatccatcatatctttgtacttgatatgaaaaacaaaatatatatgttagcagttaa

SEQ ID NO: 153593 - DNA, 1097 bp, Zea Mays
ggggcaaaggcaagggcagttcgggaattcgcggcgcggcgtttaacgaggaagggagtggacggcggaacggagcggacggggcgcgggcgggggcgcgtataaatcccggtaaaattcccccgacgcgaggcctcaaatcgctctctgcccccgatcaccggtcgcctcccttccgctcccctgcctgcctaatccctccggccaccccgaaaccgctcgctcgctcgctcgctccccgcgcccagagacaagcccggagaccatggcggaccagctcactgacgaccaaatcgccgagttcaaggaggccttcagcctcttcgataaggacggcgacggttgcatcacaaccaaggagcttggaactgtcatgcgttcactgggtcagaacccaacggaggctgaactccaggacatgatcaatgaggtggatgccgacggcaatggcacgatcgacttccccgagttcctcaacctcatggcccgcaagatgaaggacaccgactccgaggaggagctcaaggaggcgttcagggtgttcgacaaggaccagaacggcttcatctctgccgcggagctccgccacgtgatgaccaacctaggcgagaagctgaccgacgaggaggtcgacgagatgatccgcgaggccgacgttgatggcgatggccagatcaactacgaggagttcgtcaaggtcatgatggccaagtgagtaaagcctgcggtaatggtatagtaaccccgctcggaaggaggaaaccgtgcgttgcatattagtaaggcaatgcaatgcagctcttgtttccttcttcccgtgaagaaaccgtactagctgtagctgctgaacgtttgagtccctctgctgccacccttatctccattgtgccgtcgaacctccttgcttcccctgtgtgaatctgtacggattttcgtgttctgaacactgattgcagttgaatccagtttgtagttctatttgttcatcgaattcgaatctgcccgattcctttggtgctttctgtttatcctgtggttgggctgccaggatggtgccttgtgttttgcaaggaaatgtcatgtggttgaaggaccat

SEQ ID NO: 153594 - DNA, 849 bp, Zea Mays
agttcgggaattcgcggcgcggcgtttaacgaggaagggagtggacggcggaacggagcggacggggcgcgggcgggggcgcgtataaatcccggttgcatcacaaccaaggagcttggaactgtcatgcgttcactgggtcagaacccaacggaggctgaactccaggacatgatcaatgaggtggatgccgacggcaatggcacgatcgacttccccgagttcctcaacctcatggcccgcaagatgaaggacaccgactccgaggaggagctcaaggaggcgttcagggtgttcgacaaggaccagaacggcttcatctctgccgcggagctccgccacgtgatgaccaacctaggcgagaagctgaccgacgaggaggtcgacgagatgatccgcgaggccgacgttgatggcgatggccagatcaactacgaggagttcgtcaaggtcatgatggccaagtgagtaaagcctgcggtaatggtatagtaaccccgctcggaaggaggaaaccgtgcgttgcatattagtaaggcaatgcaatgcagctcttgtttccttcttcccgtgaagaaaccgtactagctgtagctgctgaacgtttgagtccctctgctgccacccttatctccattgtgccgtcgaacctccttgcttcccctgtgtgaatctgtacggattttcgtgttctgaacactgattgcagttgaatccagtttgtagttctatttgttcatcgaattcgaatctgcccgattcctttggtgctttctgtttatcctgtggttgggctgccaggatggtgccttgtgttttgcaaggaaatgtcatgtggttgaaggacca

SEQ ID NO: 153595 - DNA, 1536 bp, Zea Mays
gcatcagtcatgcatttgcgtctgcagtgtcaaatgaccagttgtcaatagtaactacaaagaacacatgttggacgatccaaaatgtttcgagcagcagcttattccatcgaggcgatacatacggagctagctagcttagcttgcatgtaggcgcctacttcacatggccgagcatcatgtgctcatggcgcaacaggaacatacttttgtttgtctcatgcctcactctatatagctaccatcaaaatggattttttttttcccacacggcaagctcacaacattacacatgtgagaaacacctcctaaaacacttaatctatagtacctagctttatcaaagtagctcaacacagctcagaagggatagacatagaacagaagtaagaacagatagaaaggtgtgaggtagagaagattaggtcaaagaaaagatgtatcgtagagttgggtcttacaaggtcaagaaaaggtcttgcaaggtcaagaagacctgatcttgcgaaaccacaagcatcacgatatggagaatatgaggaaggataaagatggtggctgaaaagctcaattaggataacgccgtgctgatgctaggcatgaagcatcagctgaactgctgctctcggcgtccaaaccagacgctctccagcctcatcatgccaagcggacacctcctgttcacggggcttggtcacagagctcctctccgtctgatgagagaacaggatgcgtataccatgagtgcgagaagaaggctgccattcatgaaaggaacctcttgagcttaccacaacgttgctgtgcttcatcgtgccttccatctgactcctagctctgcgcgagataacaccgcgagaaagcggcatcaaacattagcagtgcggccggcacacacaaactggaagaaagtatagtaggctgtgaagctcggaacgaggaagagagaccgcacacacaccgatcgagcttgccaccagccggccggccagcggcaggaaggagaacgaaaccgcccagcttctcccaaaagtgtaggtcacctctgtgtctgtttgtgtggtagtgcacgggtgctgcggctgcggtgaataaaaaggccaaggaaacggaggggagggagagagagacggagatagcaggctcaggactcaggtggcgccggacatggagacttggcagtgtgtgtatgcagaagctgcagcagatggagatttggggtcaggaaatcttttgggggagttaaaaggagataaatctcttcaggctttttcaagagatcgatgcgctatagctagctggcttgggtctagtgctctagggtatatagcgagtgagcttgcgccaggcggtcagcgtccggggagattgggagagaagcaatgcagcttgtctagatgtctacttcgactcctccttctgtttagtggtgatactactgtttatcactgtagcaaaggagtcattttgcttttccgagacagcctcatcgatcttgagaatgcaaacaagtcatggaatgacgtatcacgatga

SEQ ID NO: 153596 - DNA, 2175 bp, Zea Mays
cgctttaaaacggcgagtccatttttcctctcacataaacccgcgctcattcctttttctctcacctaattcccgtcctcgtgtgttggcgctgctcgcttgggtttggatccgatcgagggctcggcccggcggatgctgtagaggaatggcggaggctgtcgcgtctgcgggcaggctcgccatggactcttcgacctccgtctcgcccggccaggtttctgctattctgggctttctgtgggttttcgcagcatgggcgtatgctgaggttctcttccataggaagaatactgcttctattaaaacacattcagatgtcaatctagcagtgatggatgacagttcagtcaaagcagaagaccagacaatgttattggaggagggtggtcaagcaatggctgcaaagccagcttatacttccctcacatcacaaatactcagacttatattcatggaccagttgcttcttctggagaatcgtttaacactgagggcattatctgaatttggaggttatctactttatttttacatatgtgatcgtacaaacttgcttggagagtctgccaagaattacagccgagatctgttccttttcctctactttcttcttatcattgtagcagctatgacttcctttaaggtccatcaagacaagtcatcattcacaggaaaatctgtactgtacttgaataggcatcaaactgaagaatggaagggttggatgcaggtgctattcttgatgtaccattacttcaatgctaaagaaatctacaatgcaatccgtgtgttcatcgctgcatatgtctggatgactggatttggcaatttctcttattattatgtgaggaaggatttcagtcttggaagatttgctcagatgatgtggcgcctcaatttctttgttatattctgctgcattgtcctgaacaatgattatacactctattatatttgtcctatgcacacccttttcaccctcatggtttatggtgctcttggaattctaaacaaatacaacgagattagatcagtgatggcaatgaaatttgttgcttgcttcttggtagttgtcctggtttgggaagttccaggtgtctttgacatagtatggagcccattcacattccttctaggctataccgatccttctaaaccagatcttccccggttgcatgaatggcaatttcgatctggactggatcgctacatttggatcgtggggatgatatatgcatattaccatccaactgttgagaagtggttggagaagctggaagaaactgaaatgagaaccaaactctatattaagacctcaatagttacagtgtcaatgatggctggttatttgtggtatgaatacatttataagctggataagattacttacaacaagttgcatccatatacatcctggatccccataactgtctacatatgtctacgcaacttcactcaagaattcaggggcttctccctcacactatttgcctggcttggaaagattacactagaaacatacatatctcagttccatatctggctcagatcaagtgtgcccaatggccaaccaaaatggctattgtcaataatcccaaattatccactgctcaatttcatgctgactactgctatatatgttgcggtttcccataggctcttcgaattgactaataccttgaagatggtatttgtaccaaatcgtgacaacaagcgcctctcatacaattttgtggcaggaacagccatttctgctgccctgtactttgtatcgtttgttctaattggcattgcaggatactaggaagtctagttattgcctttttctttgttcgattagttacaacaaggcctgatctactgatcaaatttaaggcgacacagcacgcagccacgcactgctaaggaacctgcaatttcattcactggagtcaggttttatctgggtttcatggtgaagaaaaaaaattgctgtgcaaggcagaagatctcgaagagtgtaacatatgagtgaaccccaatcccaagaggggatatgataaaaatatctctgtataggcgttggaacacataccgacttaccgagtggtcacgtcgtctgtgaaaatcagattttgttccttgttttgtttaaaagcttgaaatagacagaattgttccttttttttgttt

SEQ ID NO: 153597 - DNA, 2210 bp, Zea Mays
cgctttaaaacggcgagtccatttttcctctcacataaacccgcgctcattcctttttctctcacctaattcccgtcctcgtgtgttggcgctgctcgcttgggtttggatccgatcgagggctcggcccggcggatgctgtagaggaatggcggaggctgtcgcgtctgcgggcaggctcgccatggactcttcgacctccgtctcgcccggccaggtttctgctattctgggctttctgtgggttttcgcagcatgggcgtatgctgaggttctcttccataggaagaatactgcttctattaaaactagacattcagatgtcaatctagcagtgatggatgacagttcagtcaaagcagaagaccagacaatgttattggaggagggtggtcaagcaatggctgcaaagccagcttatacttccctcacatcacaaatactcagacttatattcatggaccagttgcttcttctggagaatcgtttaacactgagggcattatctgaatttggaggttatctactttatttttacatatgtgatcgtacaaacttgcttggagagtctgccaagaattacagccgagatctgttccttttcctctactttcttcttatcattgtagcagctatgacttcctttaaggtccatcaagacaagtcatcattcacaggaaaatctgtactgtacttgaataggcatcaaactgaagaatggaagggttggatgcaggtgctattcttgatgtaccattacttcaatgctaaagaaatctacaatgcaatccgtgtgttcatcgctgcatatgtctggatgactggatttggcaatttctcttattattatgtgaggaaggatttcagtcttggaagatttgctcagatgatgtggcgcctcaatttctttgttatattctgctgcattgtcctgaacaatgattatacactctattatatttgtcctatgcacacccttttcaccctcatggtttatggtgctcttggaattctaaacaaatacaacgagattagatcagtgatggcaatgaaatttgttgcttgcttcttggtagttgtcctggtttgggaagttccaggtgtctttgacatagtatggagcccattcacattccttctaggctataccgatccttctaaaccagatcttccccggttgcatgaatggcaatttcgatctggactggatcgctacatttggatcgtggggatgatatatgcatattaccatccaactgttgagaagtggttggagaagctggaagaaactgaaatgagaaccaaactctatattaagacctcaatagttacagtgtcaatgatggctggttatttgtggtatgaatacatttataagctggataagattacttacaacaagttgcatccatatacatcctggatccccataactgtctacatatgtctacgcaacttcactcaagaattcaggggcttctccctcacactatttgcctggcttggaaagattacactagaaacatacatatctcagttccatatctggctcagatcaagtgtgcccaatggccaaccaaaatggctattgtcaataatcccaaattatccactgctcaatttcatgctgactactgctatatatgttgcggtttcccataggctcttcgaattgactaataccttgaagatggtatttgtaccaaatcgtgacaacaagcgcctctcatacaattttgtggcaggaacagccatttctgctgccctgtactttgtatcgtttgttctaattggcattgcaggatactaggaagtctagttattgcctttttctttgttcgattagttacaacaaggcctgatctactgatcaaatttaaggcgacacagcacgcagccacgcactgctaaggaacctgcaatttcattcactggagtcaggttttatctgggtttcatggtgaagaaaaaaaattgctgtgcaaggcagaagatctcgaagagtgtaacatatgagtgaaccccaatcccaagaggggatatgataaaaatatctctgtataggcgttggaacacataccgacttaccgagtggtcacgtcgtctgtgaaaatcagattttgttccttgttttgtttaaaagcttgaaatagacagaattgttccttttttttgtttaaagcgtaaaatagacataatggtctcatgcg

SEQ ID NO: 153598 - DNA, 405 bp, Zea Mays
atggtccatgcaattggagggatgaagatggacgacctagttatcttttacagtcaggtaatgtccagttcgttccaggtgagcgacctgcatgaaataccctgcaagcagggttttcctgatattgacgtagtactcacggctattgaaatccgtgctgcacatcttgaggttgaatctagtcatgatgcgaacaagctgttgtctgacattgtctgcagacttgagtgctctggaattgataaagttctcataacaccactggggatcttcattgttttgcttgtatgcatggtatacattcagaagcgtcagatggtccccatcaatatggccaaatcgagccttggcctcatcagcagccttttgagcttccctaggccggaggaagcaattgggtgctag

SEQ ID NO: 153599 - DNA, 2370 bp, Zea Mays
tctactcaacaatttcaaaagcgtgaagttccgtccacctcgtcgtctccgcgtctgccacccactcaacaacgcggcggcaaatcgcggccggttggctggcgatcgccgcctcctacccctcgccagcggcccgctccagaagcaatggcgctggaccttgccatcgggggctcggcggcccgcagggccgagacccaaaccctagcgcccgtgttgctcatgggcccgccgcctccaccgccgatcccgccgatgacggggatgtacttcgtggggcccccgaccacaggggcgctcctgccgctcccgatccccgtggcgctcccgcacgaggtcatcatgtacatggacgagtgtcggagccgctccctcctcaagttcatttccaacgcggggattgagccttcgctagaggacgagcggaggagggagcgggtagtacgcgagctcggcaagatagtaatggattgggcaaggagggtggcctacgagcagggcaaacagcactggatcacatcagccaccgtgttaaccttcggctcttatgccttgggggcgtatggacctgaatctgatattgatgtcctctgtattggcccttatattgcatcactgcaacaccatttttttgttgtcctacgacaaatgctcgaagggaggccagaagtatcagaattgcattcaattgaaggagctaaggttccattgatgcgttttaaattcaatgggattttagttgactttccttatgttcaactcccagtgatcaatgctgcagaggctatgcatgcatttgatccccatgtgctagagaatgtggatgggccaagctggagatgtctatctggagtccgtgctaatagacaaatcattcaattagttcctaatatgaagaaatttcaatatctattgcggtgcctcaaactatgggcaagaaaaagaggacttgattgccatctacttggcttctttgctggaattcatttggctattcttgctgcatatgtttgccgcagacatccaaatgctagtataaatactctgctgtctttgttcttcgatatttttgttcactggccgtggcctcttccagtgagtttgcttgatccgccagttctttgtgggggtcctgatgggtgctctctcatgcccataatgttgccctgtattccaccagaattttgctcctctagtacaacagaaagtactttcagcaaaatcaaagaagaacttcggcgtggttatgctcttagcaaggataccagaagtactgattctgactggagttggctctttgcaccttttccatatggtgcaagatacaaatgctttctccgcatagttctctctgctccgatggaagacgaattgcgtgactgggttggatgggtgaaatcacgattccgcaatcttcttctcaagctggagagtctaggtgtttactgtgaccctgatccctcaaaacaagttgatcataccatcactgatccaaatgttgtattcttctggggtctcatctacagaaggagtattcaaatatgtacaaattctctcaaagaagatttcatgaaaagtgtctgcaataacatctatgggaaggaaaaatgtgcccattcagacatcacaatggccgttgttgggcctccccagctgccaaaaaagtgtctgtgatctctcagtttactcagaaaagctgccacaacatatgatggggaccaactaatgaagcagaactacaatgcagtcagttaggctcagctgtcatattgcgtgcgagcttcgattgtgaatattacaacagtaagaagccgccgcttcgattgtgaatatgacaacagtaagaagccgccgttgaagtcattttcaacatcagatcaggattttttgctgccctttttaaggggcttgttcatgacatggaatgggagattttttttttgtgaagtgtagaacaaatgcaggaggctcctagggttcaagcatccagcaaaatagggccattcaagcgacttattcctgttatgagttttgtgcaggtacatgcatattcatgtacacatcatagcaattggaggtatggtatagctgtatgtaaactgtacgtataatgtttccagcagcaaaaattgtgtagattgcttcctgttagcactgctgctgggcacagatgctgaggtcgatgtggaggagattctgaatggaagctatacattccaggctagtatggaagtgttttggatcgattcgatgcacttttgccttataagctgcaaaaaaaagtctgtgtcctagaatccaaggattctcatggtaatgagtaatgatcatgactctgatgaagataaatgtttactcatgctaagcttg

SEQ ID NO: 153600 - DNA, 2285 bp, Zea Mays
tctactcaacaatttcaaaagcgtgaagttccgtccacctcgtcgtctccgcgtctgccacccactcaacaacgcggcggcaaatcgcggccggttggctggcgatcgccgcctcctacccctcgccagcggcccgctccagaagcaatggcgctggaccttgccatcgggggctcggcggcccgcagggccgagacccaaaccctagcgcccgtgttgctcatgggcccgccgcctccaccgccgatcccgccgatgacggggatgtacttcgtggggcccccgaccacaggggcgctcctgccgctcccgatccccgtggcgctcccgcacgaggtcatcatgtacatggacgagtgtcggagccgctccctcctcaagttcatttccaacgcggggattgagccttcgctagaggacgagcggaggagggagcgggtagtacgcgagctcggcaagatagtaatggattgggcaaggagggtggcctacgagcagggcaaacagcactggatcacatcagccaccgtgttaaccttcggctcttatgccttgggggcgtatggacctgaatctgatattgatgtcctctgtattggcccttatattgcatcactgcaacaccatttttttgttgtcctacgacaaatgctcgaagggaggccagaagtatcagaattgcattcaattgaaggagctaaggttccattgatgcgttttaaattcaatgggattttagttgactttccttatgttcaactcccagtgatcaatgctgcagaggctatgcatgcatttgatccccatgtgctagagaatgtggatgggccaagctggagatgtctatctggagtccgtgctaatagacaaatcattcaattagttcctaatatgaagaaatttcaatatctattgcggtgcctcaaactatgggcaagaaaaagaggacttgattgccatctacttggcttctttgctggaattcatttggctattcttgctgcatatgtttgccgcagacatccaaatgctagtataaatactctgctgtctttgttcttcgatatttttgttcactggccgtggcctcttccaaattttgctcctctagtacaacagaaagtactttcagcaaaatcaaagaagaacttcggcgtggttatgctcttagcaaggataccagaagtactgattctgactggagttggctctttgcaccttttccatatggtgcaagatacaaatgctttctccgcatagttctctctgctccgatggaagacgaattgcgtgactgggttggatgggtgaaatcacgattccgcaatcttcttctcaagctggagagtctaggtgtttactgtgaccctgatccctcaaaacaagttgatcataccatcactgatccaaatgttgtattcttctggggtctcatctacagaaggagtattcaaatatgtacaaattctctcaaagaagatttcatgaaaagtgtctgcaataacatctatgggaaggaaaaatgtgcccattcagacatcacaatggccgttgttgggcctccccagctgccaaaaaagtgtctgtgatctctcagtttactcagaaaagctgccacaacatatgatggggaccaactaatgaagcagaactacaatgcagtcagttaggctcagctgtcatattgcgtgcgagcttcgattgtgaatattacaacagtaagaagccgccgcttcgattgtgaatatgacaacagtaagaagccgccgttgaagtcattttcaacatcagatcaggattttttgctgccctttttaaggggcttgttcatgacatggaatgggagattttttttttgtgaagtgtagaacaaatgcaggaggctcctagggttcaagcatccagcaaaatagggccattcaagcgacttattcctgttatgagttttgtgcaggtacatgcatattcatgtacacatcatagcaattggaggtatggtatagctgtatgtaaactgtacgtataatgtttccagcagcaaaaattgtgtagattgcttcctgttagcactgctgctgggcacagatgctgaggtcgatgtggaggagattctgaatggaagctatacattccaggctagtatggaagtgttttggatcgattcgatgcacttttgccttataagctgcaaaaaaaagtctgtgtcctagaatccaaggattctcatggtaatgagtaatgatcatgactctgatgaagataaatgtttactcatgctaagcttg

SEQ ID NO: 153601 - DNA, 483 bp, Zea Mays
atgcacagctcgctgtccctgcaccgcacctggaagcaggcgccgcagccgacggcgcccctgtacagctcggggctggctgcggcgagcaggccgccgttgaaggacgcggccaaggagccgtaccccgcacgacccggcgttgagggcgagcgaggaggcctggtaataggtggccttggaccggcgcacgcagcgatcgcagccgtcagccggagacggggcggcggagaagacaaggagcaggaggacgaggggcaggcacgccgcgtctccgtcgacgtccacgaggcactaccaccacttcatgagaagatcgcccaccgtgcccaccgtggtgtacgaggacgccgctgccgccggtggctctctcgtcgtcggaggggaaagaggggagtctctggagtggtactccaccgtcaaatagtcgctggctccagcggccatggccgtaggcggctacagcggcatggacaacagtga

SEQ ID NO: 153602 - DNA, 549 bp, Zea Mays
atggaagaggaccgcgtcaggactcaggcatcaacagctgctgctgctgctcgcgttgagaggcctgtgaagctgctgctgctgctcgcgccaagccatcccacatgcaccacacctgctcgacggaacctctcaaaggcggcacatttaccagctcccggaaggggcgaggcgaaggtattcatgccaaaccaggccggtgcagaggcagcaggctgcgtcaagcgacttatcggcaccaatccccccgtggatgatgaatctggttctgatcgatccagtccacacgaattggtgcctggatcttgcgccgcgatacctcattatttgggcgccactgccagtttgcatcaccgtgccttttccccggcaaaatgctatgggtggcagcatcctctgggctctggcggcctgcccgcgtacgtgcctgccacaagcccacaaggcttagctctctctcgactccgcgaggcaacgcctgtcagatcagatgccacattgagccatgttgatggacaggtttatttcacagaacaggactgtttctga

SEQ ID NO: 153603 - DNA, 2957 bp, Zea Mays
aagctggtgttatccagagccacatattggacgagattctgaggctctgtctagtggctgcatgtgtctagatgttacaaagcatcacataacagcacaaatcaatatcaaagaacctatctcatatagtaacttaacaacatgctattatttggtgctgtccagacatcacataacagcacaaagcacaatcgaagaaccactcgctactattgcacaacaggctcacaaactcaatcactcactacctaactacgcatcacattccagcagctgtctggcagggatcagaacccgactccagttgcgttcagtggcagatggcggtccttccagaagcaagcatcgggtgccaaccgtgctgatgatcgcatcggctctgacttgcaccttttcagaacgaacggggcgtaggctgccgcattggtgaccggcggcaactccagcttcggcgtctgttctgttgttgctggtttgagtgccagtgtattctggacaactggacatggcatgggcacagctgagttcaccgtcgatggatctttgctctcttgtacatctttcacaacggtgctgccatcagcattctccttttttacagtctccactgttccagtagcaaaagccttctgttgcctgtggttgtagttattcttgccctggtaagacttccaatggacgaagtcagtgctgcagacccatgtctccttggagacctccatggagagctttggctcatacatcatcaacatgaggcaatctggtaactcgccactcttcttcctcctctgtatcactggtccggccccaccttcacactcttctgctctagtttctactttctctacttcttggttgatttccgaataatgtgtttttccttctccctctgcattctcggtagtttcttcttcctttccatcatcacaggattcttgtccttcctctacactgtttggagcaacaacaacacaatctttctctgactctggctcagaagaagtcttcttcccctttctggatgccatcagcaccttaggctccgcaacgagatgctcctgttcaatcgagaagctccacctccggccatctctatcaatggtgaaactagctctccttgaatccttgaagctcgagaagctagaacgccgtgcctctgtctcggccgagaagctgtgccgcctgccaaccctatcactggacgatgaggccctgctgctagtgttaccacgcctcctgctactccaccgtcgcaatttggtgcggtcctccttcagagctgctgagggagaataactgctgattgacctcctccccttcatcttatcttcaacttcctcttgtgctggaacttcttcctcactgaccaccatgtccagcccttggttttccgtctctgtaacttcacccaaagaaacctccaacccagcatttttccgaacaatttgtgcttcctctactcctactagatctctgcaggatgcatcctccttttcttccattagatctccacatttagaactctcttcagcttctgtttttgcttgatctatctcatctgtttcagcgccaccattttcatcacaaccacactcttcacatttcaagtctgtgacagaaacaactgaaccgtgagcttcgtctttgcactccactggctcagcctcagccccagcttcctctttcccctcttcctcattgtcgttgaggcacccagacacctcattatccacctgttccacggtagctgcagctggagacccgcagaagcgggtggcaagagcagccatgcgaactgggtctgaccggcagcgcattagcagcagtgcattcctcggggggatgcagacgctcaccctcccctcttcttccttccccaccaccaagatctcatctttcttctccacctccacttcccctaccatcacagtcttctcctcctcgacatcccacccgtccgatgccctcatctcttctgccggcacaaccgcggctcccttgccgacctcgtcgtcgtcctcctcctcctggatcgccaggaggcacctcgccacagcagcaccgcacagccagctacccccagcaggagcgcgctgcccccgcttcttaccacggtgtgcgtcggtggacagcgcaccccactcgccggcttcgccaggccgagacgatgagcagagagagcggcccccgcaggagccaaatgtcttgagtgcctcgcagatgttgaccgggatctggtgcacccagccctggttcttgccctggggtccttcccggtcgtcgccagcgcggcggaagctggcctctgcgctcccgcctccgccgcgcctggagcgggagcgcagcgcggcggcggaggcgtgcttgggcttgcgcttaccgcccttgacgcggacctggccgatgcaggtgaccttgggagacgagggttcggcaggttcgaatccgccccggccgcggcggccaccgccggtggacccggaggggaacattggggactggccgcccttgaggctgccgctgttgcggaggcggcggctgagtgaggggtgcagaggcggggccggcactgcctcagctccgcttgcgctggcactgccgcggccggggctgaggagcttggaggagctggaggggcggagggaagagtgcgcgctgacgccggcgacggaagtggctgaggcagcggaggaacgcgaggtgaagcaaatgaagagctccgtgccacctccgccgccgcccccaacccggtccaagtgcttcttgcggcgcatgaggggggtaagggaggccggaggctcgtgagctctctcactctctctctctctctctctctctcgctttgctgcaacctgcaatgccgctgctgggcgcctgctgcttgggctgcgttggtccgctagatgcggtcgctggtggagaggggaatgattagggtttgttggtagtggtgcgct

SEQ ID NO: 153604 - DNA, 107 bp, Zea Mays
aatttccgagcgacgctaaacaaatcaaattcctagtacggataatccttcgctctgtccgaccgagcaccggctcgctctgcctttgcacagacgagttccgcagg

SEQ ID NO: 153605 - DNA, 2205 bp, Zea Mays
aaactgcctagattgaacttcccatgtttcgacggcgaaaaccctaagctctggcagcgccgttgtgaggattattttgttatgtatgcagtgagttcctcagtttggattaaggtagccaccatgcatttctctggagcagctgctcgctggtggcaatctgtagagcaccagttgagcactgcttcgtgggtcgactttgtccacatgttgagagaacgttttgggaaggatcaacacgctctattagttcgccagctatttcatatcaagcaacagggaacagtagttgagtatgtagatcaatttgcccagctggtcgatcagttaaatagttatcaaaccatgtcagaccccctgtattacaccatgaggtttctagatggtcttcattttgacattaaatctatggtcatgattcagcgacccaaggatttggatactgcctacgttcttgcgcaattgcaggaggaaatcggcgccacagccaagaagccagagtataagaagatggattatataccactgggaatgtcttacaatagaggtcccctacctctaccttctccacccaaggctggtgctacaactcctgttcggccacaagaacacaagtctctgcactctattcagccacctgggagtgattcagtccagctgcacctcgtggaagaactttgggatcaatttccagaaccatctgaagaggccctttctgaaaagcttgaggacattcagctcaacagttttcagttatcgtattcagcaattgctcaggtgcctcaaatgaaaacaatgcgttttgtgggcgaagcttgtggtctctcggtgctcatcctgcttgattccggcagctcaatttcatttattagctccaccattgcaaatcaatgttccaatcttacttccttgccacaaccattgttggtccgtgtggcaaatggcgcccagatgacttgtgaatctgcattggttgacacagtgtggtcccttcaaggttaccagttcaccactacattccgggtattggatttaactcagtacgacgtagtgcttggcatggattggttggcaacaaatagcccaatgatggtgcattggctggacaagtgggtctctattccggtgggaaattcttacatcaagctctatggagtgaagacatcagacagtcaaggctcgtttatccaattgtgcagtctcagtgacttctcaacaaaggaacaagacatgatccaatcacttccagccggcttacaagcattattggaccagtactcttcagtgtttgaattacctaaaggccttccgcccgcaagagactgtgatcaccacattcctctagttccagatgctcgtcccgtgcaaatgcgtccttatcggtacgctccagccctcaagacagagattgagaaacaagtcactgagatgctagaatcagatatcattcaacacagtaagagtctgtttgcttcttcagtaattttggtgcgcaagaaagataatacataccgtttctgtgtggattatcgacatctcaacgccttgactgccaaaacaaaatttcctgttcctgtcatcgacgagtttttggatgaattacacggtgctgcgtggttttctactctggacctccgagctggcttccaccaaatacgcatggcacctcaggatcaatataaaacagcattctagacccatcatggtcactttgaatttcgtgtgatggcattcggactcacaggcgcacccgccaccttccaaggagctatgaacaaaaccttgcaacccttgttacgcaagtgtgtccttgtatttttcgacgatatattagtgtacaacgacacttgggataatcatctcattcatttggagtgggtcttgcagctgttgaaacaagaccagtggcagattaaattgtccaagtgctcatgggctcaacaaaatattgcctaccttgggcatgtgattagcaaagctggcgtcgccacagatcctgcaaaagtggcagcagtatcttcctggccacaaccacgtaactgtaaggaattacggggatttttggggttggccggatattaccggaagttcgtcagaaatttcggtgtgattgctaagcctctcaccaacttactcaagaaaaactcagtgtttgtctggacttctgaacacgcttctgccttcactcggctgcagcaagcttta

SEQ ID NO: 153606 - DNA, 229 bp, Zea Mays
gatccggtggtccgagcaagatgatgcattagcaacatgggaagatgaagtggctctgcaacagcgttttccgtctgcacccgcttggggacaagcggccattcatggggagggaattgtcagcaccaagggaaatacagtgccagcacaagcaagcgaaggagctgatcatctactgggccgtcgcaagcgcaagccaaatgtgagagttatgggccgcgagtgggtt

SEQ ID NO: 153607 - DNA, 814 bp, Zea Mays
atcaacatcctcctccacccgaaccaatcttgtagcatttccttccgctgcgaacacccaaacggcagctttctactaggggaagagaaacgttttcttgtctcaacgatcgatgcgtcgaccgcacgagcagctgcctagattggcgtcaggtctcgctctactggcctgcctcgccgtgctcgctcgttctcgcgttgccggcgctggtggcatgccggcgaccttcatcttcggcgactcgctcgtggacgccggcaacaacaactacatcgtctccctgtcgaaggccaacttccccccgaacggcatcgacttcttgggccaccagcccaccggccggtacacgaacggccggaccatcgtcgacattctagggcaagagatgggactgggagggttcgtgccgccgtacatggccccggagaccacgggcgacgccgtgatgagaggcgtcaactacgcgtccggcggcggagggatcctcaacgaaaccggcagtatcttcgtcagtacatggccttccactggaactgttgtgtgaaatcctcgtgctagtctagcagcagtactacgtaccacaaacatgtgttttaccccccaacgcttagctagcttgttcccgcgtaacttcggatcatcgcgtctgcgtgagttagttcttctcttttgcgtgaaacacagagctatcaattaagtaacgaatctacaaaaaggaatcgattttaaatttaaaaagaaaagaaatcattttgaatgggagacacaggcagacagtacggttgccttgccttaacaaaagctgttgcttgac

SEQ ID NO: 153608 - DNA, 1569 bp, Zea Mays
atcaacatcctcctccacccgaaccaatcttgtagcatttccttccgctgcgaacacccaaacggcagctttctactaggggaagagaaacgttttcttgtctcaacgatcgatgcgtcgaccgcacgagcagctgcctagattggcgtcaggtctcgctctactggcctgcctcgccgtgctcgctcgttctcgcgttgccggcgctggtggcatgccggcgaccttcatcttcggcgactcgctcgtggacgccggcaacaacaactacatcgtctccctgtcgaaggccaacttccccccgaacggcatcgacttcttgggccaccagcccaccggccggtacacgaacggccggaccatcgtcgacattctagggcaagagatgggactgggagggttcgtgccgccgtacatggccccggagaccacgggcgacgccgtgatgagaggcgtcaactacgcgtccggcggcggagggatcctcaacgaaaccggcagtatcttcggtgggcgcctgaatctggacgcccagatcgacaactacgcgaacagccgccacgacctgatggcgcggcacggggaggtggaagcggtgagcctgctgcggggcgcgctcttctcggtcaccataggctccaacgacttcatcaacaactacctcacgcccatcttctccgtgccggagcgcgccacgacgccgccggtcgccttcatcagcgccatgatcgccaagtaccgccaacagctcaccaggctgtacctcctggatgcccgcaagatcgtggtggcgaacgtggggccgatcggctgcatcccgtaccagcgcgagacgaacccgtcggccggcacggcctgcgccgagttcccgaaccggctggcgcgggcattcaaccggcggctcagggccctggtggacgagctgagcgccgccctccccggctcgcgcttcgtctacgccgacgtctaccgcatcttctccgacatcatcgccaactacggatcccacgggttcgaggtggcggactcggcgtgctgctacgtcggcgggcggttcggcgggctgctgccgtgcgggccgacgtcgctgtactgcgcggacaggtcaaagtatgtgttctgggacccctaccaccccagcgaggcggccaacgcgctcatcgcccgccggatcctcgacggcggacccatggacatctcgccggtcaacgtacgccagctcatcgtcacttgagttcaaccgttggatcaccagccggtgctacggctcagcgctacatattgatttgcattcactttttccgaaaagagattagtttgccttttttcaacaaaaaaaagagatcagtttggggtgattcaaactccggtgtaacatcatttttcgtgtttagatagctagtagtaggcagtagcacagtatcttatctcgtgcgcgttgttctatttttatctctgtgccgtgcgttctagttcaccatttgaactcttgagacgtgaacttatgaaatgttttaggggttgtttggatacatcaactaattttaggggtgtttgttttctagggac

SEQ ID NO: 153609 - DNA, 517 bp, Zea Mays
tgaagaaacggtttggacttgagtaggttgaaaaaagacatccaaccttggcaagaacgacgttcagcagaatatatgacccatgctcctttaggctctttaaattccatgggtggcgtagctaccaagatcaatgctgttaattatgtctcccctagaagttggttagcgacctcccattttgttctaggattcttttttgtgggccatttgtggcatgcaggaagagcccgagctgctgcaacagactttgaaaagggaattgatcgcgatttggaaactgttctttgcatgacccctcttaactaagatttttattttatatctgttctagtttttttctgttctggctcggttattccatctagccgaaccttctcccactccggatttgtgtattccctccggaaaatggggtaggctacttttgagtgagatgcggttttctcaaaagcaatccatcgtttcgagggtgctgggctatggttcagttcgagtctagtttcctgaaaatatt

SEQ ID NO: 153610 - DNA, 176 bp, Zea Mays
cctaaacattataacacatttgtaacctttttctataatattataacatatttgtacatgagttatcgtgatattttatcttcccgttgcaacgcacgggcatccacctagtatacatataagatgtactaagtgaaactggtcatcaacctaagctaagaaccaaatttgccgcc

SEQ ID NO: 153611 - DNA, 1334 bp, Zea Mays
cacttcactttttataaaggggtacatgttactttatatagagacttaaaactcttcaagggcagagtcaccattgtcatctcatgcgaacaccctgctgtaggcctctaagtgcggacgaggccgaaaggccaaaagcccatatatctaagcccacgctttcacttttaacccagtgactcccggaccctccgttaccagttacctcgcctcgcggataagaggcgagggctagcaaaccaaagccccttccgccctccgcccaaaaccccacgcgagcaccccattcccatccatggcgaccaccacctcttcctcctcgctgaccactcctctcctccgcccgaaccccaataccaaccctgctcccagatctctccaactcctcaggagcaggaggtgcgctcgtgccgtaactaccgccgtagccggaggtgcggtgccttacggggctaatccgcggcgcgggatttggtcgatcagggatgacttggtggtgccaaggtcgccctacttcccagtggagtccgcggcggggcaggagcgtgggccgtcgcccatggtgatggagcggttccagagcgtcgtcagtcagcttttccagcacagaattattcggtgcggaggccccgttgaggatgatatggccaacatcattgtagcacaactgctctacctcgacgctattgatcccaataaggatatcattatgtatgtgaattcgccaggagggtcagtgacagctggaatggctatatttgatacaatgaagcatatcaggcctgatgtatccactgtttgtattggactagctgcaagcatgggagcttttctacttagtgctgggaccaaaggaaagcgatacagcttaccaaactcaaggataatgatccatcaacctcttggaggggcccaaggacaggagactgatcttgagattcaggccaatgagatgctgcaccacaaggcgaacttaaatggataccttgcataccacactgggcagcccctggataagatcaacgtagatactgaccgtgactacttcatgagcgcgaaagaagcaaaggagtatggccttattgatggagtaatcatgaatcccctcaaggcccttcaaccacttccagcttccagttagtcatgaagtgtgctagaactccgtcaaacatttttgttgtatcaatgtgtctgttggaagccctggctacgtaatattctacgtccaaatgcatcaaagattgtacaaaacaagatatgcggttaggatatccatccttggtgatggatattggaactaaattaacagtattagggcttggtttcctcgtcta

SEQ ID NO: 153612 - DNA, 2035 bp, Zea Mays
cacttcactttttataaaggggtacatgttactttatatagagacttaaaactcttcaagggcagagtcaccattgtcatctcatgcgaacaccctgctgtaggcctctaagtgcggacgaggccgaaaggccaaaagcccatatatctaagcccacgctttcacttttaacccagtgactcccggaccctccgttaccagttacctcgcctcgcggataagaggcgagggctagcaaaccaaagccccttccgccctccgcccaaaaccccacgcgagcaccccattcccatccatggcgaccaccacctcttcctcctcgctgaccactcctctcctccgcccgaaccccaataccaaccctgctcccagatctctccaactcctcaggagcaggaggtgcgctcgtgccgtaactaccgccgtagccggaggtgcggtgccttacggggctaatccgcggcgcgggatttggtcgatcagggatgacttggtggtgccaaggtcgccctacttcccagtggagtccgcggcggggcaggagcgtgggccgtcgcccatggtgatggagcggttccagagcgtcgtcagtcagcttttccagcacagaattattcggtgcggaggccccgttgaggatgatatggccaacatcattgtagcacaactgctctacctcgacgctattgatcccaataaggtgaaaacgaacgggacaaccgtttgctgctgtaattcccatgtgaatagaacatgcttgcgctttaaataaacctttgtttgttgataccagacagtgaaccaacattgtagtactaaactttgtacagtgcttctttaactttctgtgttgcggaattgggttatacaattgtaaccactgaacttgtaggtttatccaatgttgccatttcatctagctagggactcgaatacatggcaattatatattcaaaacgtggtttcttccatctagtgcatgatccttgtcaaccttcctgtaggatatcattatgtatgtgaattcgccaggagggtcagtgacagctggtaatagctcatctaacatagtatgtctgcgttagctgcttcaattaatactaatgcattttcgttttctgttaggaatggctatatttgatacaatgaagcatatcaggcctgatgtatccactgtttgtattggactagctgcaagcatgggagcttttctacttagtgctgggaccaaaggaaagcgatacagcttaccaaactcaaggataatgatccatcaacctcttggaggggcccaaggacaggagactgatcttgagattcaggccaatgagatgctgcaccacaaggcgaacttaaatggataccttgcataccacactgggcagcccctggataagatcaacgtagatactgaccgtgactacttcatgagcgcgaaagaagcaaaggagtatggccttattgatggagtaatcatgaatcccctcaaggcccttcaaccacttccagcttccagttagtcatgaagtgtgctagaactccgtcaaacatttttgttgtatcaatgtgtctgttggaagccctggctacgtaatattctacgtccaaatgcatcaaagattgtacaaaacaagatatgcggttaggatatccatccttggtgatggatattggaactaaattaacagtattagggttagtttgggaactccattttcccttgggattcctattttcccaagggaaaatgaactaattttccttgggaaaatgaaattcccttgggaaaaatgtggtttccaaactaacctaacccttagagttaatttgtcaactctatttttctaaggaaattcctctcataaggcttggtttcctcgtctatgtactctatatggatgcctttttttataggaccgatgtctttctattttaggtcaacaggtgacggtaataactgtgtcttcattagggcatgtgcccccattaattaagggtttcttgagggatcaagtgagaaaaaaaaatcaagaga

SEQ ID NO: 153613 - DNA, 1473 bp, Zea Mays
accagttacctcgcctcgcggataagaggcgagggctagcaaaccaaagccccttccgccctccgcccaaaaccccacgcgagcaccccattcccatccatggcgaccaccacctcttcctcctcgctgaccactcctctcctccgcccgaaccccaataccaaccctgctcccagatctctccaactcctcaggagcaggaggtgcgctcgtgccgtaactaccgccgtagccggaggtgcggtgccttacggggctaatccgcggcgcgggatttggtcgatcagggatgacttggtggtgccaaggtcgccctacttcccagtggagtccgcggcggggcaggagcgtgggccgtcgcccatggtgatggagcggttccagagcgtcgtcagtcagcttttccagcacagaattattcggtgcggaggccccgttgaggatgatatggccaacatcattgtagcacaactgctctacctcgacgctattgatcccaataaggatatcattatgtatgtgaattcgccaggagggtcagtgacagctggaatggctatatttgatacaatgaagcatatcaggcctgatgtatccactgtttgtattggactagctgcaagcatgggagcttttctacttagtgctgggaccaaaggaaagcgatacagcttaccaaactcaaggataatgatccatcaacctcttggaggggcccaaggacaggagactgatcttgagattcaggccaatgagatgctgcaccacaaggcgaacttaaatggataccttgcataccacactgggcagcccctggataagatcaacgtagatactgaccgtgactacttcatgagcgcgaaagaagcaaaggagtatggccttattgatggagtaatcatgaatcccctcaaggcccttcaaccacttccagcttccagttagtcatgaagtgtgctagaactccgtcaaacatttttgttgtatcaatgtgtctgttggaagccctggctacgtaatattctacgtccaaatgcatcaaagattgtacaaaacaagatatgcggttaggatatccatccttggtgatggatattggaactaaattaacagtattagggttagtttgggaactccattttcccttgggattcctattttcccaagggaaaatgaactaattttccttgggaaaatgaaattcccttgggaaaaatgtggtttccaaactaacctaacccttagagttaatttgtcaactctatttttctaaggaaattcctctcataaggcttggtttcctcgtctatgtactctatatggatgcctttttttataggaccgatgtctttctattttaggtcaacaggtgacggtaataactgtgtcttcattagggcatgtgcccccattaattaagggtttcttgagggatcaagtgagaaaaaaaaatcaagagatgattttccgtgt

SEQ ID NO: 153614 - DNA, 3131 bp, Zea Mays
cgcaacgcaagtagtgctggagattggagagtggagacagaaggcaagggggccgtcgcagaattcgcgccaccgcccgcgatggcttcgtcctcgaaggcctccgattcctcccaacgatccaagcggtcggatcaggggatgggcaaggacgccgctgccgcctctgttgtcccgatccacgcgaacctgacgcagctgatacggcaagtccaatcggggcgcctcgcgtacatcaaggagaaattggaggtgaacaggaaaacgctgcagaggcactcctgctcgctgttcgacgtggcagcggcggcggaggtggcgtcgaggggcaccgatggcggcaacgcgctgtcacagcgcgcggcggagagacagtgtgggtcagacctggcaaacgggataggggagagggacgtggtttccgttcaggaggagaacctggctaccggtacgctcgcgctctccagctcgggcgctaccgcgcagcggacaattgtgcggttcgtgaagctgccgctggttgagaagatccctccgtacaccacttggatcttcctggacaacgcagaaaccaaagaatggctgacgatcagtcagttgttggtaggagaaggatatactatgatacagttggaaacgaggctctgatctgcagtgacagtgatgaagaaattccagaaccagaggaagagaaacactttttcacaaagggagaagatcatttgatatggagagctactcaagaccatgggttaaaccaagaggttgttaatgtcctttgccagtttattggtgcaaccccatcagaaattgaggaaagatctgaagtcctatttgagaaaaatgagaagcactcaggatcttcagataagatagagagccgactttctcttgacaaaactatggatgccgttctggattcttttgataatctcttctgccgcagatgcttggtttttgattgccgccttcatggttgttcacagaatttggtatttccatgtgagaagcaaccctacagctttgaccctgatgaaaacaagaagccatgtggtcatttgtgctaccttcgatttccccagtggagagaaggatttaaagagatgcatgatgatggtcttgctggtggtgcaacatatactatggaatcgggaactgcctcacagagagttgatgttaatgttatgtatgaatcagaagattcaaaccgacagaaaggcaacattaggtccatgacactagttggaaccagtggatcaaaaataatttcttctgtcagtgcggaagaaagcactactactccttcagcagatatctctgaaacagagaatgtatcctctgatttgcctcccagtagtttaaggaaacacaagatttcaaaacatggacctaggtacagggagcattctcctggcaaaaggcagaaggttttcacttctgacatttcttttgaaggcaatataatgaataaactttccattccggagattcgtgacacaagactagagtccagagaatctggtggtgataaactacgaattcttgacgagtccactaagaagacttcaaggaaagatatgtgtggggaaagcccagctactaccatggaaaatgtgggaagacagagtaataaagtgtcttcaacaaagaatttcttggagtccactctttcttgttggagtgccttagagcgagatctatacttgaagggcatagagatatttggaaagaacagctgtctcatcgccagaaacttactatctggtcttaagacctgcatagaagtggcaaactacatgtataacaatggtgcagcgatggcgaagagacctctcttgaataaatccatctcaggcgactttgcagaaaatgaacaagactacatggagcaagacatggctgccagaacaagaatctatcgtcggaggggccgcaatcgaaagctgaaatatacttggaaatctgcagggcatccaactgttagaaaaagaactgatgacgggaagcaatgttacacacaatatagcccatgtgcgtgccagcaaatgtgtggtaaagattgcccctgtgcggacaagggaacttgctgtgagaagtactgtgggtgttcgaagagctgcaaaaacaagtttagaggctgtcattgtgcaaaaagccaatgcagaagcagacagtgcccctgttttgcagccagtcgtgaatgtgatccagatgtttgtaggaattgctgggtgagctgtggagatggttcactaggtgagccacttgcaagaggtgatggttatcagtgtggaaatatgaagctccttttgaaacaacagcaaaggattttgttaggaagatctgatgttgcaggttggggtgcattcattaagaatcctgtaaataaaaatgattatcttggagaatatactggtgaattgatctctcacaaggaagcagacaaacgcggcaaaatttatgaccgggcaaactcatcttttctgttcgatttaaatgaccagtatgtgttggatgcttatcgcaagggggacaaattgaagttcgcaaatcactcatctaaccccaactgctatgcaaaggtgatgctggtggctggcgaccatcgggttggtatatatgcgaaggagcatattgaggctagcgaggaactcttttatgattatcgttatggacctgaccaggctccagcttgggctaggagacccgaaggatcaaagaaggacgaggcatccgtctctcaccgtcgagcacacaaagtggctcgatagctgaagagtcgctccggatgatacaatatgcagtaaacttaatacttaatacatgattcagtcctagttcattggtagataaacatgctatatactatccattagtaaataaactctcattcatcgagttggagaataaatgcgtataaacatatgtggacctcaggtcgggaaggtggcaaccttgttagtttgagcaccaacaggttctcaaacttgagtggctattgctagagtatcaaataatggctgcgactatagccttgtttgtatattttcttggtgagatgaaataatttgtcaaacactcaaatgtacactttattcctgaaagtatttgatgattcattagtagtgtta

SEQ ID NO: 153615 - DNA, 3126 bp, Zea Mays
cgcaacgcaagtagtgctggagattggagagtggagacagaaggcaagggggccgtcgcagaattcgcgccaccgcccgcgatggcttcgtcctcgaaggcctccgattcctcccaacgatccaagcggtcggatcaggggatgggcaaggacgccgctgccgcctctgttgtcccgatccacgcgaacctgacgcagctgatacggcaagtccaatcggggcgcctcgcgtacatcaaggagaaattggaggtgaacaggaaaacgctgcagaggcactcctgctcgctgttcgacgtggcagcggcggcggaggtggcgtcgaggggcaccgatggcggcaacgcgctgtcacagcgcgcggcggagagacagtgtgggtcagacctggcaaacgggataggggagagggacgtggtttccgttcaggaggagaacctggctaccggtacgctcgcgctctccagctcgggcgctaccgcgcagcggacaattgtgcggttcgtgaagctgccgctggttgagaagatccctccgtacaccacttggatcttcctggacaaaaaccaaagaatggctgacgatcagtcagttgttggtaggagaaggatatactatgatacagttggaaacgaggctctgatctgcagtgacagtgatgaagaaattccagaaccagaggaagagaaacactttttcacaaagggagaagatcatttgatatggagagctactcaagaccatgggttaaaccaagaggttgttaatgtcctttgccagtttattggtgcaaccccatcagaaattgaggaaagatctgaagtcctatttgagaaaaatgagaagcactcaggatcttcagataagatagagagccgactttctcttgacaaaactatggatgccgttctggattcttttgataatctcttctgccgcagatgcttggtttttgattgccgccttcatggttgttcacagaatttggtatttccatgtgagaagcaaccctacagctttgaccctgatgaaaacaagaagccatgtggtcatttgtgctaccttcgatttccccagtggagagaaggatttaaagagatgcatgatgatggtcttgctggtggtgcaacatatactatggaatcgggaactgcctcacagagagttgatgttaatgttatgtatgaatcagaagattcaaaccgacagaaaggcaacattaggtccatgacactagttggaaccagtggatcaaaaataatttcttctgtcagtgcggaagaaagcactactactccttcagcagatatctctgaaacagagaatgtatcctctgatttgcctcccagtagtttaaggaaacacaagatttcaaaacatggacctaggtacagggagcattctcctggcaaaaggcagaaggttttcacttctgacatttcttttgaaggcaatataatgaataaactttccattccggagattcgtgacacaagactagagtccagagaatctggtggtgataaactacgaattcttgacgagtccactaagaagacttcaaggaaagatatgtgtggggaaagcccagctactaccatggaaaatgtgggaagacagagtaataaagtgtcttcaacaaagaatttcttggagtccactctttcttgttggagtgccttagagcgagatctatacttgaagggcatagagatatttggaaagaacagctgtctcatcgccagaaacttactatctggtcttaagacctgcatagaagtggcaaactacatgtataacaatggtgcagcgatggcgaagagacctctcttgaataaatccatctcaggcgactttgcagaaaatgaacaagactacatggagcaagacatggctgccagaacaagaatctatcgtcggaggggccgcaatcgaaagctgaaatatacttggaaatctgcagggcatccaactgttagaaaaagaactgatgacgggaagcaatgttacacacaatatagcccatgtgcgtgccagcaaatgtgtggtaaagattgcccctgtgcggacaagggaacttgctgtgagaagtactgtgggtgttcgaagagctgcaaaaacaagtttagaggctgtcattgtgcaaaaagccaatgcagaagcagacagtgcccctgttttgcagccagtcgtgaatgtgatccagatgtttgtaggaattgctgggtgagctgtggagatggttcactaggtgagccacttgcaagaggtgatggttatcagtgtggaaatatgaagctccttttgaaacaacagcaaaggattttgttaggaagatctgatgttgcaggttggggtgcattcattaagaatcctgtaaataaaaatgattatcttggagaatatactggtgaattgatctctcacaaggaagcagacaaacgcggcaaaatttatgaccgggcaaactcatcttttctgttcgatttaaatgaccagtatgtgttggatgcttatcgcaagggggacaaattgaagttcgcaaatcactcatctaaccccaactgctatgcaaaggtgatgctggtggctggcgaccatcgggttggtatatatgcgaaggagcatattgaggctagcgaggaactcttttatgattatcgttatggacctgaccaggctccagcttgggctaggagacccgaaggatcaaagaaggacgaggcatccgtctctcaccgtcgagcacacaaagtggctcgatagctgaagagtcgctccggatgatacaatatgcagtaaacttaatacttaatacatgattcagtcctagttcattggtagataaacatgctatatactatccattagtaaataaactctcattcatcgagttggagaataaatgcgtataaacatatgtggacctcaggtcgggaaggtggcaaccttgttagtttgagcaccaacaggttctcaaacttgagtggctattgctagagtatcaaataatggctgcgactatagccttgtttgtatattttcttggtgagatgaaataatttgtcaaacactcaaatgtacactttattcctgaaagtatttgatgattcattagtagtgtta

SEQ ID NO: 153616 - DNA, 2169 bp, Zea Mays
tgctctagtggtggcactggcggcggcggacacaggcgtactcgtcgggggcatagacggcgaagacccactggtgcggctggtgttgtggacaccagcgtccctcccgagtttccccagtggagagaaggatttaaagagatgcatgatgatggtcttgctggtggtgcaacatatactatggaatcgggaactgcctcacagagagttgatgttaatgttatgtatgaatcagaagattcaaaccgacagaaaggcaacattaggtccatgacactagttggaaccagtggatcaaaaataatttcttctgtcagtgcggaagaaagcactactactccttcagcagatatctctgaaacagagaatgtatcctctgatttgcctcccagtagtttaaggaaacacaagatttcaaaacatggacctaggtacagggagcattctcctggcaaaaggcagaaggttttcacttctgacatttcttttgaaggcaatataatgaataaactttccattccggagattcgtgacacaagactagagtccagagaatctggtggtgataaactacgaattcttgacgagtccactaagaagacttcaaggaaagatatgtgtggggaaagcccagctactaccatggaaaatgtgggaagacagagtaataaagtgtcttcaacaaagaatttcttggagtccactctttcttgttggagtgccttagagcgagatctatacttgaagggcatagagatatttggaaagaacagctgtctcatcgccagaaacttactatctggtcttaagacctgcatagaagtggcaaactacatgtataacaatggtgcagcgatggcgaagagacctctcttgaataaatccatctcaggcgactttgcagaaaatgaacaagactacatggagcaagacatggctgccagaacaagaatctatcgtcggaggggccgcaatcgaaagctgaaatatacttggaaatctgcagggcatccaactgttagaaaaagaactgatgacgggaagcaatgttacacacaatatagcccatgtgcgtgccagcaaatgtgtggtaaagattgcccctgtgcggacaagggaacttgctgtgagaagtactgtgggtgttcgaagagctgcaaaaacaagtttagaggctgtcattgtgcaaaaagccaatgcagaagcagacagtgcccctgttttgcagccagtcgtgaatgtgatccagatgtttgtaggaattgctgggtgagctgtggagatggttcactaggtgagccacttgcaagaggtgatggttatcagtgtggaaatatgaagctccttttgaaacaacagcaaaggattttgttaggaagatctgatgttgcaggttggggtgcattcattaagaatcctgtaaataaaaatgattatcttggagaatatactggtgaattgatctctcacaaggaagcagacaaacgcggcaaaatttatgaccgggcaaactcatcttttctgttcgatttaaatgaccagtatgtgttggatgcttatcgcaagggggacaaattgaagttcgcaaatcactcatctaaccccaactgctatgcaaaggtgatgctggtggctggcgaccatcgggttggtatatatgcgaaggagcatattgaggctagcgaggaactcttttatgattatcgttatggacctgaccaggctccagcttgggctaggagacccgaaggatcaaagaaggacgaggcatccgtctctcaccgtcgagcacacaaagtggctcgatagctgaagagtcgctccggatgatacaatatgcagtaaacttaatacttaatacatgattcagtcctagttcattggtagataaacatgctatatactatccattagtaaataaactctcattcatcgagttggagaataaatgcgtataaacatatgtggacctcaggtcgggaaggtggcaaccttgttagtttgagcaccaacaggttctcaaacttgagtggctattgctagagtatcaaataatggctgcgactatagccttgtttgtatattttcttggtgagatgaaataatttgtcaaacactcaaatgtacactttattcctgaaagtatttgatgattcattagtagtgtta

SEQ ID NO: 153617 - DNA, 897 bp, Zea Mays
gcagttttgcctgtggtcaatggtcgtcgcttcattggtcaaaccttgagagccccggttcagcaatcgcagttccacaaggcggcgatggacggcggcggggtcgatacggccacgacggcggcctggatggagaagcaccggcacatgtacgagcgggccacccggcacccgttcaccgtctccatccgcgacggtaccgtcgacatgtctgccttcaagcgctggctgaaaattgaagtggctaagctttgaccttttcatgtctgattcttggttcgtggtgtcgggcatcgagatctgtacatcaatctaaatactaccaagaagtcttggagttgctaccaagttaacaaaaattagtgtgcacggctatgaaattgagtgactagttgcgtgattcgagtcagaggtgtttctgggagaactgtgaatttaaaattgaacctgaaagcgtgaaggcaaacgatctttatcggcatatactgatactgcgtctgtgaagatcttgtgtttccagtggactagtcactctgaatgttgttattctgctgttgcttcctgttgacaaaaataactccagaatagaattggctcttagttgacactgtccaattatgatagtataaagtgatgaaggatcttgttcagagaactgtgcaaaaaagaactcaactgagtcaactcctagttgagcatagtattctgtaatttttttttaaaagttactctatatgatcttgggttctttttctagttgaaagcattttggttggtcataattacagctgtctacacaatgatcaatatgtgctggctaattttctttccgtgattttcttaaataaatttcattttggttatgagtaccatgaggggagaaaaaaaataaacaga

SEQ ID NO: 153618 - DNA, 901 bp, Zea Mays
gcagttttgcctgtggtcaatggtcgtcgcttcattggtcaaaccttgagagccccggttcagcaatcgcagttccacaaggcggcgatggacggcggcggggtcgatacggccacgacggcggcctggatggagaagcaccggcacatgtacgagcgggccacccggcacccgttcaccgtctccatccgcgacggtaccgtcgacatgtctgccttcaagcgctggctgagccaggactatctgtttgtaagggaatttgttgcattcatagcaagtgtactgctcaaatgctgcaagcaagaagacagctcggacatggaaatcatcctgggtggagtagcgtctatcagcgacgagatctcttggttcaagaacgaagctactgtatggggcgtcgatctagcaagtgtttcccccttaaaagccaatctagagtaccacaggtttctccggagctttactgagccagagattagctatgctgttgctgtaactaccttctggacgatcgaaaccgtgtaccaggacagctttggtttctgcatacaagacggcaacaagacgccgccggagctcctgggcacctgccagagatggggcagcgccgggttcagacagtactgccagtctctgcagagcatcgtggatcgttgcttggctaacgcaccggctgatgctgtccagagtgctgaagaggccttcgtccgggtactcgagctggaaattggtttctgggatatgagctcttctcggtcctaattaccagcgtgttctctgagtccaaacatctacgcaaataatcgaacgaaataaatggtgcttcgggctcagacccaggttttccccatgtcaccttattcctatctttggttttcgcgtgacagtactttccgctgcc

SEQ ID NO: 153619 - DNA, 963 bp, Zea Mays
cttcccatatagctataaattacatgtgtgctgaaccttcatattgtattgcaggagacatacgggcaggagatggttaagaagtatggagaagactacgattggcgaggagcgcctaccatcgacgctgaggttgtgcattcacttggcggcaaggcgcatggacggtatgaacttgtgaattgttttcaataatattgaaactacgaccgaatagctaattttcttgttcttaaagatattctatgtttaccggtgttatcgattcgacggagttgcgttctcgtggcggctcttcgtcgcaggcgggctgtggtagtagcagccgtagtcgccgctctgtatctagcatggaggaagctatgagggagcagcaagaaaagtttcgtgaagagatgcggcaacaacaaatggcatttctccaacagcaatcagagtacatggctgcttacaacgcacaggcgcaacaagcaatgaacgtgagtgtcttatttattctcaacacgctcgatattggttctataactaatatattatatttgcaacagtcttggtttccacagcaggcacagcagcaaccatttgttttccctcaatttcagccgccgatgcctcagtggggattacatgctccgccacctccacctccacctcaggttattcaatttagttaagacttgtcgtttgtatcaacctaattgtcaaatctttactaaacttgattttgtagggatccggggtcatgggccacaacacgccaccaccggtcataccagcaccaggagcttatgcaggggagggagcttatgcaggagaggttagtttgagaaacaatttgtttgaatagtcgttatacatgtaaccaatgccgttattaatgtcatctttttttaggatacaaccccgttacacgacttcgtcgaccagttattggcttctggaggtagtggacacaactccaac

SEQ ID NO: 153620 - DNA, 957 bp, Zea Mays
atgtcgagtccctcgcacgatgtgcggtggctggcactagcccggtggattattaccaggatagatgatcggaggtactggagccaccttgccacagaggacttaagtgaaggaccaaattccccatcgatatcattcaaagttatgtttgcagttattcaagacaatatatcatctgtggcaagggagctaatctttcatcattatgaagagctaaaggaaagtataattactcatgaagaaatggtgaagaaaatgatcatagtgggtcgagagaaaagtcttgatatagacttccatcatgtcatgctacattacaggatgatatgggtgcgaagtttcaatccttttaagatagaaatatctgtcaaagacctgcagaacatattaagtataaatctagatatgactctaaaatgttttgacatggctgttcgattgcttgccaataaagagtcacgtaggccaaaaggtgaaattataaagaatagaaagcattatatggacatgcgcttctggagaatgattggttttggtaaattgccaaagtaccatgaggaccctacagcagaagagttaacaaaaatactcgattgttggccatcaatgaactattatatcacggcttgtaaatatgttcttatgccatggaaattcaacggttgctacgcccttttcgtaatagatcatggtaaaaaacatgtcacttttattgactttgcacctaatcaagattggtgtaagcacatgccatacaagaggcttaacaacagctaccttatcttacaagctatggccatgtgggagaatgataatccaatgaaatttgttagggatacaaagattcttcggagaaactttattatcgaactgttaagttacgaggaaaattcgtgcagacatgccatcccagcaaatatacaacagagagttaacaatattgttaaaaaatattag

SEQ ID NO: 153621 - DNA, 1984 bp, Zea Mays
tcaggtgggattacaaagagtgagatgatgagtgagacgaggattatgatccaggagcttatggggttggggttaaagttatatgagttagagggcagattatgatccaaagccaatacaaacccatatgagttaaagttagaactagtgccgaacgatgtgaagctagagggcagcaaaaattacttgagctagtcgaggagagtgtgcgtcctcttaggaggcaagggagtggagcactacttggaggagacctgtgttgagccggttgataagcttggcactgaatggagaacttggcatacaacaaactctgtgatagtggcatggttattggcatctatgtctcctactattagcaagagggtggaagctatgtgcactgcatcacagatatggcagaccttgagtagcatatactctcggagggggaatgtggtggtgatgatggagattcagaataaggcagatgtggtgaaacaagcagggagaccaatggagcaatatgctagtgagcttcagtacttatggggagaactagatcactatgcccctctccaaatggtttgtccacaggatgcacacattgttcataagtgggtagaggacaggagagtgacccacttcttaaagaatctggatcctgagtttgagagtaggagagctgccttttgtcatcaggagagtcttcctaccatggatgaggttgtgtcagccatgattgatgaagagagcagacttcgagtgatggctaatgataatcatgtgaaaccggtctatgctacaatcgaggatcgagaatgctataattgtggggaaaagggacacctaagttacaattgtcctaatcctagaggaaatggtggccgaggaggatctcgtggaggtcgatgaggtactcgtgggagttatggaagaggtcgtggtagtcgtggaggaggttgaggtcgtggtggttctagggccaacatagctaccactgaagagagtccctctgttactctaactggggaacaagttgaacagtgggagcaatggcagaagggcaagtcttctgagtgcctcactgtacctgttgaacaagccaccaacaactttggtaacttttccaactatgcccacatgggcgaaggtactcaggcacaagtttttgcatcctcatgtaggcatcgcatagattgggtcatagattcaggagcatcaaagcatgtgaccggcatgtccacttctttcaaaacatacactccttatacacattctaagtcggttcaaattgttgatggtacatcccaacagatccatggtatagggtccatagagtgtacaccatctctgagcttgtcatcagtcctgcatgttccataaactggttgctaatcagtttaatgcaaggattcgaattattaggactgataatggaacagagtatgtgaataatgaatttagatcatatttgtcaggtcaagggattattcaccaaacaacttgtcctagaactccacctcagaatggtgtagcagagcgaaaaaatcgtcatttgttggaggtagcaagatctctcatgtttgagatgaatgtgcccaagtatatgtggagtgaggcagtaatgacagccacatacctcatcaatcgaatgccctcaagaatacttgatatgaaatcacctactgagcttctgttgggaaagagtgactttcgagttccacccaaggtctttggttgtgtctgctttgtaaaagatcatcgacctatggtgagcaagttggatcctcaagcagtcaagtgcatttttgtgggttatgcatctactcataaaggatacaaatgttgggatcctattggtaggcgactatttgtgagtatggatgtgacatttcgagaggaagacccatactacacaaagaaagttaatctagaacaaatcatggatgacttctctctggttgatggaagataccgtagagagggggaggatgatagtggc

SEQ ID NO: 153622 - DNA, 1242 bp, Zea Mays
gtcaagctagcagcaccaagttgtcgatcacttgcctgctcttgagctcgatcaagctatcatcagctacagcttccgatcccaactgcaactgtagcagcgacaactgccatggaggcccagaacgtggaggttgctgccctggtgcagaagatcacggccctccacgccgacatcgccaagctgccgtcgctgagcccgtcccccgacgccaacgcgctgttcaccagcctcgtcatggcctgcgtcccgccaaaccctgtcgacgtgaccaagctcagcccggacgtccaggggatgcgagaggagctcatccgcctctgctccgacgccgagggccaccttgaggcgcactacgccgacatgctcgccgccttcgacaacccgctcgaccacctcggccgctttccatacttcagcaactacatcgacctgagcaagctggagtttgacctccttgtccgctacatcccagggctcgcgccttcccgtgtcgccttcgtcggctccggccccttgccgttcagctcgctcgtgctcgccgcgcgccacctgcccaacacactgttcgacaactacgatcggtgtgccgccgccaacgaccgtgctcggaagctggtccgtgcggacaaggacctgaacgcgcgcatgtccttccacacggtcgacgtcgccaacctcacggacgagctcgccaagtacgacgtggtcttccttgccgcgctagtaggcatggcggctgaggacaaggccaaggtggttgcgcatcttggcaggcacatggcggacggagcggctctcgtcgtgcgcagcgcccacggggctcgcggcttcctctacccgatcgtcgatcctgaggacattcgtcgcggtgggttcgacgtgcttgccgtgtaccacccggacaacgaggtcatcaactccgtcatcatcgcgcgtaaaatggacgcccacaccaaggggcttcagaatggacacgcgcatgcacgcggcacggtgccgatagtgagcccgccgtgcaagtgctgcaagatggaggccaacgcgctccagaagagagaggagatggcgaccacgacagagctgtccatctgatgcaaggaacttttgagcacctatgcgtgcgtggtaacaataatagttacaaatcgctgcttctgaatttctcatgcacttctttattcgatgctatgcattgtgaagtgtttaataagaatgtgttcttcctatgtgatgatatat

SEQ ID NO: 153623 - DNA, 201 bp, Zea Mays
atgcttgcgctgatggttgcgatgagatcacgcaacaagtcgctggcttgcttgatctggtcaaaattgccttccagctcgatgttctttaggttgtggttagactcgtggtcgcggatggatagcttgacgcttgtaactctgcttagtgttgaccccacccttgtcgattatgccaccggccagagaggcgtccaaact

SEQ ID NO: 153624 - DNA, 1233 bp, Zea Mays
aaattcaagggtattcaatgaatatccattattttttgcaaaaaaatttcgatatatacatgtatgtagtgtatatacatggaaatagaaaatcaatcaaataaatgaagaaattctgctaatttgaaccaaaatatctccttcctacatctcatacctaactagctcaatagattctcgtggcccatgtggccatgagacccaacgaagtgacaaagtccaccttattacctcatagcaaaaaatctctaaactatattgtagtcgcaccacgacagagccaccaaagcgccagccgccaagtcatggtcgtgtcttgccgccccatgtgcccacatggagacactagcacttttgtcgcgccaccgcgtcatcgctaggtgcccatacctaactggctaattgttgtcgtcgcgttgcacctgacctcattgctgtaccgaccgtcgtctgaggcttcgatccgtcgcagtcagggcaccatcacgtgcaagtacaaaccgccatggggcagggtcccatcatgtcaatgtccaagctcgcctggctggtggccacccgatcgtgacctctcctgcttgaccgcttccagtacttggctgcaggtgaagccagtaagagttccttcgatgtataataattgtgtatcaaaattgagacattccattgctctgggctctgcaaaactccaactctatcgatgcgtgtactaagttaagttccaatgaaaactaccccaccaaaaaaagttcgttttgaggctaataatccagaaattaatcaaagcagggcagtattgatccaagtagtcaggtaggggaaatgaacaaggcatgcatatacaatgcatgtgcagcaagcaagtaacaactgatgatggataacatgtgaactgcaacctctagcctagcttgattccttttcttcggccaagaatcatgccagttcacagaaactatgcacaaattacctcttcctccatggacgccgatgacttggctccatcacagcctgccatctcttcctcctcttgtctcccttgtccgctactgctagaacgaagcgctctgtaaacgtttcagtggctcaagaggagggaaacaaacgagttaagaaggtgacaggaataatcggcatgagagaagagggggcgttgggcagtctttgaagcaggaccttgtggcgctctctgcagttggagggaggcgaggggcgaggagaatccaggcgcgt

SEQ ID NO: 153625 - DNA, 996 bp, Zea Mays
atgaaacacctgttctgattctatttaataagtagagtaattttacacggcaaattccggtcgcgctatatatcagcttgtgacatggaggtcacgtcatgccatccgtacatgcagtttgacagggtacatgatcacagcaggcattcattgcattgggacagagaagaagacgattaggttgatcagagcaccttcttgatcatcggctggtggatcagagggaggcaatggagatgcagcttatcagaagagccaatggggcgtcttcttgggcaggacgcgctcctcgatggtccgtaagctgggcttccaccccctgctggacagctcccggctgaggaactccggccggtgctcctcgaacccgtccggcctcgccgcctccgcctcgtcctcgtcctcctctcggtgcgcttgcgctggctcttcggcgccgggctgcccccggcccttgttggacgacgacgacgacgaaagcttccgcctgagcccgggcatcgaccgcgaccgcgccagggagcgcgccgccgacagcgcgcgccgcgcctcctcggccgacaccttgccccgcgtggccggcagcagcacgtacaccccgccggcgccgagcacgtggtcggccggcagcggcgcgaccttggccccgctctgctgctgctgctggtggtggtggtggttgtggtggccaagcttcttgagcacgcgcgcgtcgacgacgaagtggcgcgggtggtccatcatgagctccgccacggacaccggctcgctgagcgcccgcacgctgccgtccgccatcaccaccttcccgccgccgctcgccgccgcggcacccgagaccaggttgcccatcttgctctcgcctagacccagacccagacccagacaccccggtgggtcgtgttcgatcgcgcaggcagcagagcgcacagccgagccacacggacagggaggggaggggagggggtattaaaacggttggcgggagcgaagaac

SEQ ID NO: 153626 - DNA, 1648 bp, Zea Mays
atccaggcatccacacacgcggccgagccaattccgctggagaggagtacacgcctcattacgcccatccacgtgctcgcctcgccccatcgcggacctttcctcggcggcgtcgccatctcatcggcggcgggcgtgcggccggtggccggagcccttaggcgatggcgacctcgtctgtggcggcggacatggagctggaccggccaaacctggaggactacctcccgcccgactcgctcccgcaggaggcgccccggaatctccatctgcgcgatctgctggacatctcgccggtgctcaccgaggcagcgggtgccattgtcgatgactccttcacacggtgctttaagtcaaattctccagagccatggaattggaacatatatctgttccccttatggtgctttggtgtagtaataagatatggaatactcttcccactgaggtccttaacgcttgcaataggatggttagcattttttgctgccttttttcctgtccatttcctattgaaagggcaagacaagttgagaagtaaaattgagaggaagttggttgaaatgatgtgcagtgtttttgttgcttcatggactggagttatcaagtatcatggaccacgcccaagcacacgacctcatcaggtattcgttgcaaaccatacatcgatgatagatttcattattctggagcaaatgacagcatttgctgtcatcatgcagaagcatcctggatgggttggatttattcagaagactatcttggaaagtgtcggttgcatctggtttaatcgtaatgatctccgggaccgtgaagttacggcacggaagttacgtgatcatgttcaacaaccagacaacaatcctctgttgatttttccggaaggaacttgtgtgaacaaccagtacacggtcatgttcaagaagggtgcctttgagcttggctgcgctgtatgtccaatagctatcaagtacaataaaatatttgttgatgccttttggaacagtaagaagcaatcttttacaatgcacttggtccggctgatgacatcatgggctgttgtgtgtgatgtttggtacttacctcctcaatatctgagggagggagagacggcaattgcatttgctgagagagtaagggacatgatagctgctagagctggactaaagaaggttccttgggatggctatctgaaacacaaccgtcctagtcccaaacacactgaagagaaacaacgcatatttgccgaatctgtcttgatgagactggaggagaaatgaagggacgtaaagccgtacaagtgcacttcgttagggttttacatgcagctaccttgtaattcggttggcttccagaaaaaaaaaagtgagcctgggacacgtcaagtgaccacctcagttttgttgtaaatttgttactagtttgataggattattagtatgtacttatcaggaaaagaattctcagtatgtgttttggctgcccattcaatgataggtcagtgattaacaccgaagcattgtgctctcgtgagatgctgtgttggtcttaatatattgacggtactgtaccatggtttaaatgtgattattgaagcaatgtgaatggattagctggctaagaaaggaagtaaattgaattgtttgaa

SEQ ID NO: 153627 - DNA, 1869 bp, Zea Mays
actgatctctaggtcatagcctctggtagtccctggtcagcctgtgtggactgtcctcaggacaatcgccaaaaccccccgagccaacacctactacgccgccgcgccgccgcgtcaaacaacggcgagaggacgcctatggcattcacttcccaatccctaatcttccgggcacccgcctcgccctcttgtgcccgcataaccccgtcatccggtcgcgtcaccctccgggaccgcagcgccgttttcccgctcgtcgcggcggcctccacctcgatggcgtcctcggagagcgaagataagagggaaaccaagctgtggggcgggcggttcgaggagggcgtcaccgacgccgtggagcgcttcacggagtccatatcctacgactggcagctctacaaatacgacataatgggcagcaaggcccacgcctccatgctcgctggccagggtttgataacagctactgatagggatatcatcttagaggggcttgatcagatagagaggctgatccaagaaggcaaatttgagtggaggaaggaccgggaggatgtgcatatgaacattgaagcggctctaattgaaagggttggtgagccagccaagaagttgcatactgctaggagccgcaatgaccaaattgtgacggatctaaggctatggtgccgtgatgctattgacaggattttgattcgtatcaagcagcttcaggtgtctctggttattttggcttcaaaatatgttgatttaatagtcccaggttatacccatctgcaaagggcgcagcctgttctgctgccacatcttctcttatcatatgttgaacagttggagcgtgatgctggtcggctggtcaactgcagggagcgaatgaatttctgtcctcttggtgcttgtgctttggctggaactggacttcccattgataggtttcaaactgctaaagatttgaaatttacagctccaatgaagaatagcattgatgcagtatcagaccgtgattttgtacttgagtttcttgctgccaattcgattgctgctgtccatctttcgcgaattggtgaagaatgggttctttgggcatcagaggaatttgggtttctgataccaagtgacaaagtttcaactggaagcagcattatgccccagaagaaaaatccagacccaatggagcttgttcgtgggaaatctgctagggttgttggagacctcatgactgttctaaccctctgtaaaggccttccacaggcctacaaccgtgaccttcaggaagacaaggaacccttgtttgatagtgtgaaagctgtattaggaatgcttgaagtatgcacagagtttgctcaaaatatctcttttaattcaaaaagaatacaaagttcacttccagctggttatctggatgcaacgacgctggcggattatctcgtgaagaagggagtccctttcagaacttctcacgagatagttggaaggtctgttgctctatgcgtctccaagaactgtcagctagctgagcttgaattggctgacctaaaatctgtccatcctgtatttgaggatgacgtctatgaatacctgggggttgaaaacgctgtaaacaagttcatatcctatggctctactggttcagaacaagtgaaaaagcagcttgaggattggcgcatccagctcggggtgagctcataagggttggcatggttcaagaaataagctcgcaaattagtgcttgcgatttttgaaggtgtatgttgacgtcgtgaactttttctgtgtgtttgttcatacatttcgaaaactggaatgaatgatgtaaacatgttggacaccttgagcctcttttatatattattattgcactgtgtttta

SEQ ID NO: 153628 - DNA, 338 bp, Zea Mays
gcaggttttaaaaacctcaacgtacaggggaggtgctgtcgattttttttgtattaacagacttgtgtttcttttttacagagaagatacttgtcttcctagccgctgcgggtctgcctgcaccgcgtcgcgtcgccactgcaccgacccgccacagcctcactagcctgactccaccgccaccctaggtataacctatatttccgcatcatggtcgtagatcacgtaacccagttaggcgtctcccgttcgaaagagatacggtgtagatatgcagatctttgtatatctacaaatgtatcagtttcgaattgtccacgttttttggacagcccgcg

SEQ ID NO: 153629 - DNA, 103 bp, Zea Mays
cacctattagaaggtaggaacgtagtgtacatgcattacatgtctatattaaactatacttggttatatatgttagaggatggaggaccgtgagtggatgtac

SEQ ID NO: 153630 - DNA, 2054 bp, Zea Mays
aggcaaccagatcacacgcgcctgactaaccgctccgatccgtcgatgagcagcgagctgagcagtgagcaccgcacgttcctagctactgatgcggaggagagtaactgtagtatggtactacatgttaatggattttatacaggccgacccgaggccggtacgtcgtactcctgcccaaaattaaacaggggggggggggggggcagagagacaacgtggtcgctagcgaggccgcgagagcggacggtggtgcggcctcgcgccacggcgcccactttgccgggcgcgcccacgtgcccgcgccagcagccacacgtacggccgcgcgccgccgtggccgtggccgtgccggcccgctagctactcgctctcgctccgctccccccacttaccgtccgcccaggtaacggagcatccggtcggttacgtgtacgcgctagcgtactctactccgtgtacccgcgagcccggccgctgctactatattatggccggccgtggcgtggcctcgctattagccagcgagctgaggcctgaggagcgagcacagccgagtcacccggccggccgcccgcacgcacggacaccaacaactcccttggacgcacccgatcgaccctgctgcctgctagccgtgcgcagtagtgggagcgagcacgagtgagagtgggcagcgagaacatacgccgcccccggccggtgtgactggtggtggcgtcgcgcgcgcgatggggagggcgccgtgctgcgagaaggtggggctcaagcgcgggaggtggacgaaggaggaggaccagatactcgccaactacatcgcagagcacggcgagggatcctggaggtcgctgcccaagaatgcagggctgctccgctgcggcaagagctgccgcctgcggtggatcaactaccttcgggccgacgtcaagagggggaacatctccaaggaggaagaggacgtcatcatcaagctccacgccacccttggaaacaggtggtccctgatcgccagccacctccccggccgaacagacaacgagatcaagaactactggaactcgcacctcagccgccagatccacacgtaccgccggaaatacaccgccggcccggacacggcgcccatcgccatcgccatcgccatcgacatgagcaagctgcacagcgccgagaggcggcgcggtggcaggaccccgggccggtcgccgaagagcgccaccagcagcagcagcatgaccaagagcaagcagccggacgaccctgagccagaaccggaggccggcggcgcgtccagcccgcggcacagcgacggggcgcgaagcgccgtggtggacccggacccggacccgaaccagcccaacagcagcagcggcagcggcagcacgggcgagggggaggacgcgacggggccgtgggtgctggatccgatcgagctcggggacctctgggaggccgagagcgagatggacgccctcatgtctatcgggggggctgcccacgactcggccaccgcggaaggattcgacgcggcccaggcccaggtggacgacctgttcgacgacatggactgggataacttcgcggcccatctgtggggggagccggagcagcagaacgaccacagcgcgcagccgcagccccagcaggccgccgagccgcaggctgctgctgctgctgatgtggcggcggcgggggcggaggcctgcgacccggacgaacacgaactggaggcgttggaaacttggctcctgtccgactcgttctgacagttcccgtcatcagataccgatcaggtcgacgcagctagctagggcctaggtgttgctccgtgcgtgcagtttcgtgtaaatttcgtttctagttcgtaaataggtgctggttcgtgcatggtatattggtatgggccttcgagttcgaatagagagagagaggagacttgcgtcatgcatggcatgtaaaacgcgctattccgagctttcactcatgcatcttactccgctactagtggtagctgtcagatgagaacatcagatgctgggcgtgccctctgatgc

SEQ ID NO: 153631 - DNA, 1138 bp, Zea Mays
cgtcacttcctagctccggtccgaccgtcttgtacacaatcttccatcttgcttaccgcagggctgctccgctgcggcaagagctgccgcctgcggtggatcaactaccttcgggccgacgtcaagagggggaacatctccaaggaggaagaggacgtcatcatcaagctccacgccacccttggaaacaggtggtccctgatcgccagccacctccccggccgaacagacaacgagatcaagaactactggaactcgcacctcagccgccagatccacacgtaccgccggaaatacaccgccggcccggacacggcgcccatcgccatcgccatcgccatcgacatgagcaagctgcacagcgccgagaggcggcgcggtggcaggaccccgggccggtcgccgaagagcgccaccagcagcagcagcatgaccaagagcaagcagccggacgaccctgagccagaaccggaggccggcggcgcgtccagcccgcggcacagcgacggggcgcgaagcgccgtggtggacccggacccggacccgaaccagcccaacagcagcagcggcagcggcagcacgggcgagggggaggacgcgacggggccgtgggtgctggatccgatcgagctcggggacctctgggaggccgagagcgagatggacgccctcatgtctatcgggggggctgcccacgactcggccaccgcggaaggattcgacgcggcccaggcccaggtggacgacctgttcgacgacatggactgggataacttcgcggcccatctgtggggggagccggagcagcagaacgaccacagcgcgcagccgcagccccagcaggccgccgagccgcaggctgctgctgctgctgatgtggcggcggcgggggcggaggcctgcgacccggacgaacacgaactggaggcgttggaaacttggctcctgtccgactcgttctgacagttcccgtcatcagataccgatcaggtcgacgcagctagctagggcctaggtgttgctccgtgcgtgcagtttcgtgtaaatttcgtttctagttcgtaaataggtgctggttcgtgcatggtatattggtatgggccttcgagttcgaatagagagagagaggagacttgcg

SEQ ID NO: 153632 - DNA, 105 bp, Zea Mays
atggacggacggtcgaattggatcgctcaccggccggcctcgcctgttgaatgccatcatgaaaatttgtcacttggcattgatcgcgacgcgactagcggcagg

SEQ ID NO: 153633 - DNA, 2821 bp, Zea Mays
cctatgggattaccagttccatgatgtttttattctgttgtttgtatgcagctcttggagtccatgctgagcaaacttgttgaagaatttgaaaatcgtctaaacagccaaaatgaactggtcaaagcggctctaaaaaatggtattgataacaccagatccttttcaaaatcaaaggttctggttgagaccactcctaatactagtgggagaaagatggatacagcagatatttactgtaaccataaacaaacaaaaaaagtagcatcaagtgaattggcactgaagcaatattcaattctacaacaacagtcaaagaatgttgaggaacttaagagtgatttaataaatacaagggatggtatggagtatatgcaaatgaagtacgctgaggatctcaaccttcttggaaggcacctgtttagcttggctcatgctgcttctggttatcacaaagttcttgaagaaaatagaaaactatacaaccaggtgcaggatcttaaaggaagtattagggtatattgtagggtgcgtccctttttgccgggacaagcaagtccgtccactgtggcttccattgacgagggcaacataacccttgtcatcccttccaagtctggaaaggaagtacggaaaacttttagcttcaataaggtttttggctcatcagcgacacaagatgaggtgttcttggatactcaaccccttattcgctcggttcttgatggatacaatgtatgtatctttgcatatggccaaactggatcagggaagacatacacgatgagtgggcccaaaaacatgactgagcaaacccaaggtgtcaactatcgggcacttggtgatctatttaagcttgctgaacaaaggaagagaaccttcatttatgatattgctgtgcaaatgattgagatttacaatgaacaagtcagggacctccttgtcactgacggtctcaacaaaaaatatccttgaagaaattatgttctgtctaagtgtgtcagtttctttatgtcatatcatgctgccgcaggaacataattttccttaacgaatacgtacattagagattcggaataactctcaaaatgggctaaatgtgccagatgcaagtcttgttcgtgtggcatcaacaatggatgtcatggaattgatgaatgttgggcacaagaatcgtgctgttggtgccactgcactaaatgacaggagtagtcgttcccacagttgtttaactgttcatgttaagggaagggatctgacatcagggacaatccttcgcggttgcatgcatttagttgatcttgctggcagtgaacgggttgataaatcagaggtcactggagaaaggttaaaagaagcacagcatataaacaaatcattgtcagccttaggggatgtaattgcttcgcttgcccaaaagaattcacatgtaccttacaggaatagtaaattaacacaacttctccaagattcacttggaggtcaggccaaaaccttgatgtttgttcatataagcccagaaagtgatgctgtaggagaaaccatcagcaccttgaagtttgccgagcgtgtgtcaactgttgaacttggtgctgctcaactaaataaagaatctggagaagttagagagcttaaggcgcaggtttatttttgctgttatgttatgctatcatatttcttactgccctttctctattcaacatattcatgttctctgttcatgcttagattgctcaacttaaatcagcattagctgcaaaagatttaggatcggagcaaatcatcagtcatgacactgaggcatttaacataaagatgccttcgcctggtttttcaattaagcgacagggtagctgtgatctactgtctacccaaactaacttcagacaaccattggatgctgttggaaacatagaggctagagccaatcctacactgaggcaaaagaaaccaagctttgacctccaggatttattaacagcaaatgattctccttcatggccagatagcaatttgagggtaaattttcagacgggagatgaaagagaagtaattggtggggactggatagataaggttgtagtgaacaacaataattcagtcggtgactgggagggtgacaatgcagctttacctgacttcttttaccagagatatcattcaggtatgagggagaagcagtaccagaggaataacacaagacaaaaggatgaccatgagtatgaagagcaaaggtctcgattttactctaccaatactgatgattctgatgacattgacatggcaacaagtgattcctcagaatcagatgcgctatggcagcagctcaatgtccaaagcatggataactctattagtttgagcggttcaaaggttaagaaaccacaaataaagcttagagatggttcagatgccaggacaccaatccattctcaaataccatcagcgtcaagaaaagttgcaaacggttcaaacagatctgttaggcagcctttaagcagaagcgacagcagaaggctttcatcaaatggaagacaatctggtgcaaagtagggacttacaatgatcgtgtgcattttttgcctttttctcagtgtttgtcacgagagattgtgaggatgttcttgagtacagcaatgagtgacaataaacccgattgattgtgtcagtgtggtgagttgtgatctcaacaactggtgtgtgaggccattaacctttttttttccttattggccttcaggctatgttgagttatagctagttctttgtatctgttcataatataaatttatataatgaaaagaaagcaaatcgattgatc

SEQ ID NO: 153634 - DNA, 1945 bp, Zea Mays
ctgttcacggccctcgccaaatccccaaaatccaagcgcgtcgccgacggcattgcgtcgccattgcctccaaatccgtgtgcgactcgcgtgatcccagatcccgctcgccgtatcccccgcagtgacctctgaccagagcattttccgcgcggaaaatgccgccgtttcggccggctcttggaagggcgcttcttctgtaggaccgcggcgcgaggctgcgatggcgttcgccgccagcgagggaaatctttccccggcgctgcccctggccactctgatcggccgcgagctccgcggcgacggtaccgagcgcccgcacgtgcgctacggccactctggcttcgccaagcgcggcgaggactacttcctcgtcaagcccgactgcctccgcgtccccggagacccttcctcctctttctccgtcttcgctgtattcgacggccacaatggcgtgtcggcggcggtgttcagcaaggagaaattgctggagcacgtgatgagcgcggtgcccgagggcatcagtcgcgaggactggctacaggcgctgccgcgcgcgctcgtcgcaggattcgtcaagacagacattgacttccagcgcaagggtgagacgtcaggaacgacggcgacacttgttgtggttgatgggttcacggtcactgtggcgtcggtgggagattctaggtgcattctggatacacagggaggcgaggtctcattgctgactgtggatcaccggctagaggagaatgcagaggagcgtgagcgcgtcacagcgagtggaggagaggtcagccggcttaatctctgtggtggacaggaggtgggtcctctccgatgctggccaggtggattgtgcctttcaaggtcaattggggatactgatgtcggcgagttcattgtaccgattccacatgtcaagcaagtgaagctcccaaatactggtggaagactaataattgcatcagatggaatatgggacgctctgtcctcagagagtgctgctcaggcgtgccggggattacgtgcagaactggctgcaaaacttgttgttaagcaagctctgaagacaagtgggctgaaagatgacaccacatgtgtggttgtcgacatcatcccatctgatcattgttcaacaccaccagcattgtctccaaagaaaaatcagaacaagttgaagcatcttatttttggtaaaaggtctcatagttctgttggaaagctcagcaaatctgcttcattgggttcagtggaagaaatattcgaggagggatctgcaatgttggaagaaaggttgggaagtaattttccaccaaaagcaaatctgcctccatttcgctgtgcaatctgccaagtggaccaagagccattcgaaggtttaatgacggacaatgtaggtggctgctgctcaaccccatcaacaccatggggtggtccttatctttgctcaggctgtaggaaaaagaaggacgcgatggaaggtaaacgatcgaatcgttcaacgacgtgcaggtgaaggttctgataggaatcactgggactgggtcctgtgatcctgtcatgcaagcttgcaaagtagtctccgatttcggttttctgctccttgtaaaaagagaagaataaaccgtctgtcgtttgattgaagtattgttcggtgaaaactaactgcactccagcctgatctgagaaaaaccggggtactaataacaagcctgatttctattgacatcccctatcaaactttcgtttgctctgagaggatagctgacagaactttgaggctgtagttttgtgaacccttagcatgtagagggaaatgagtagcttaacaatgttttatagaacgatggtgtggcttctcattgttgctttagaatgtattttgtgtttgtggagctaaagacccaaatgttttttttacttgatcgaatttggcttgggtttt

SEQ ID NO: 153635 - DNA, 2063 bp, Zea Mays
ctgttcacggccctcgccaaatccccaaaatccaagcgcgtcgccgacggcattgcgtcgccattgcctccaaatccgtgtgcgactcgcgtgatcccagatcccgctcgccgtatcccccgcagtgacctctgaccagagcattttccgcgcggaaaatgccgccgtttcggccggctcttggaagggcgcttcttctgtaggaccgcggcgcgaggctgcgatggcgttcgccgccagcgagggaaatctttccccggcgctgcccctggccactctgatcggccgcgagctccgcggcgacggtaccgagcgcccgcacgtgcgctacggccactctggcttcgccaagcgcggcgaggactacttcctcgtcaagcccgactgcctccgcgtccccggagacccttcctcctctttctccgtcttcgctgtattcgacggccacaatggcgtgtcggcggcggtgttcagcaaggagaaattgctggagcacgtgatgagcgcggtgcccgagggcatcagtcgcgaggactggctacaggcgctgccgcgcgcgctcgtcgcaggattcgtcaagacagacattgacttccagcgcaagggtgagacgtcaggaacgacggcgacacttgttgtggttgatgggttcacggtcactgtggcgtcggtgggagattctaggtgcattctggatacacagggaggcgaggtctcattgctgactgtggatcaccggctagaggagaatgcagaggagcgtgagcgcgtcacagcgagtggaggagaggtcagccggcttaatctctgtggtggacaggaggtgggtcctctccgatgctggccaggtggattgtgcctttcaaggtcaattggggatactgatgtcggcgagttcattgtaccgattccacatgtcaagcaagtgaagctcccaaatactggtggaagactaataattgcatcagatggaatatgggacgctctgtcctcagagagtgctgctcaggcgtgccggggattacgtgcagaactggctgcaaaacttgttgttaagcaagctctgaagacaagtgggctgaaagatgacaccacatgtgtggttgtcgacatcatcccatctgatcattgttcaacaccaccagcattgtctccaaagaaaaatcagaacaagttgaagcatcttatttttggtaaaaggtctcatagttctgttggaaagctcagcaaatctgcttcattgggttcagtggaagaaatattcgaggagggatctgcaatgttggaagaaagttggatgttccagtcctggtgtcctgggaattccattctatgttctcatttcctacactggcacaacctgttctttcatggcattgccattttccctttgtactatttcgatgccttggttgggaagtaattttccaccaaaagcaaatctgcctccatttcgctgtgcaatctgccaagtggaccaagagccattcgaaggtttaatgacggacaatgtaggtggctgctgctcaaccccatcaacaccatggggtggtccttatctttgctcaggctgtaggaaaaagaaggacgcgatggaaggtaaacgatcgaatcgttcaacgacgtgcaggtgaaggttctgataggaatcactgggactgggtcctgtgatcctgtcatgcaagcttgcaaagtagtctccgatttcggttttctgctccttgtaaaaagagaagaataaaccgtctgtcgtttgattgaagtattgttcggtgaaaactaactgcactccagcctgatctgagaaaaaccggggtactaataacaagcctgatttctattgacatcccctatcaaactttcgtttgctctgagaggatagctgacagaactttgaggctgtagttttgtgaacccttagcatgtagagggaaatgagtagcttaacaatgttttatagaacgatggtgtggcttctcattgttgctttagaatgtattttgtgtttgtggagctaaagacccaaatgttttttttacttgatcgaatttggcttgggtttt

SEQ ID NO: 153636 - DNA, 399 bp, Zea Mays
atgaggctgcggatgatagaacccctacttgccaccgtcaacgtgattttccagccagaagatcaactgcagaaccatcacatgatcggaatacaaatagcttacattagagttcggggtgctcagcttcgcacaggagggggacagaagggagcgggcgtacctggaggatgttcgtcgcagactcgcaggcgctgtgtgagagagattggggagaaacgggtgaacgaaagaaagaagaagaaaagagcaaagtgctcttccgtgccgtttggattctggaaatgcggtggcgtccctgctaccaagatccgtggctgcagcgaggaaaagagagagatgggcgtggaggagcaccagcgggagtccgccaaggcgaccggtccctcgacgggctag

SEQ ID NO: 153637 - DNA, 1065 bp, Zea Mays
gaaacagaggtaatagaagcagtgcagaaggaaattggcaggattgaagagacacaagcatggtcttcatctcattcaattcatggtctactccagttgaaaaaatgcagattgctgagaattcagcagctgaccgtgttgaggtaccaacagatggtgctagtgaatgggaaattgatgtaaagcttctcaagtttgggaataaagtagcatcaggatcatatggtgacctttaccggggtacatattgcagtcaagatgttgctattaaagtgctgaaacctgagagaataaatgcagacatgcaacgtgaatttgctcagcaaaatgggcctagatttgaacttcaaatgcaggatgtaactggatgaatgcaccacatttatgataaaaatcaccccatagtttgcttccgtgacactgcttttttatgtactactttgctgggcctgaaagctgggaacaaaaaacaaaagtatgaaagatcagcgaaaggaaaattgctacttcaactgaggctctctgtcgtggatatcctaccaaatttgcttcttacttccattactgtcgctcactgcgtttcgaagatgcaccggactatcagtacctgaagagattgttcagagacctttttattcgggaaggacatattgctaagaatctgccacattatgtttgcttgaggtattaatttatccaggtgtttaatgctggagtacagttagaagatccctaatcaattgcttctcatttcagtcgtgtaactttattcatgctacaacagcgactttgagcgaacatgagaccactgagctctggagtgaatgaaggacgtcgtctttggaagtcagacatcacctagagctagggtgtccattcttgacatgtttctcttagtgataggtggatactgtctagttaggaacagagtcttgagggattgatggacgcatgcatcttcaattcatgtgtgttgtattactactggtacaatctccaattcttgtgaacttttgtatttggacttgtgtgaatttgtgatatgaacatatatccatgtgtttg

SEQ ID NO: 153638 - DNA, 1345 bp, Zea Mays
gatgggaaagatgtaaaaaatggttattttttctccaacaacctttcagaagttgcacggctcgtcaatagcaatcttcatggcccattaacaatgcgctaacaaatagacagagtccaattcatcgaggcccacgcaacgcgggcacacaaagattctacaatccgtggcggagccggtggggggatcccaatgtcgtaaatagctgcggagccggtggcggagcccgtagcgggcgctcgaaaatatctcggcacggctgggagctctggaaccttcgctggcggctccaacccccgacgaggcgacgaccacagcactcccctcctatttatttcagagaaagaagacgagagatatttttctcacgccctccccgcggaattatacctttttttttctctctctctcgcctcgcttccttcgaatccatccatctctcgcctccctttccaattcgatgcctttgtagcgctgctgcctcgcccccgccgcgtcgtcgcgggtccccggcttcgcttgctgctgcgcttccagcgtcatggacgggggatccggcaatgcctccagcggcggagcggcggtgtgctgctactacgcgctcctcggcgtccgcaagagcgcctccgccaccgacatacgcaccgcgtaccggaggctcgcgatgaagtggcacccggaccggtgggccagcgatcccggcgcggccggcgaggccaagcggcggttccagcggatccaggaggcctactcagttttatcggacaaggggaagaaggccatgtacgacgccgggctcttcgatcccctcgacgacgacgaccaggatttctccgacttcatgcaggagatgctggtgatgatggataacgtgaaaaacgagaagccggacacgctagaggacctgcagaagatgctggcggacatcgtgaacggcgacggcggggacggcgtaggcgggcgcgtgccgccggcgccgccggacgttgctcggcgaacgcgcgtcgcgccccacccgcagccgcagcaggcgcgtaggtgaccgccgcgccgccgtagctgcggcggagtacgtacgcttttggtgaaagggactggagaaggatcagaaacgggaggctctctggaaaaaggagaataaaaatttcaggccatcttttgatcataatctaccaatcctttattgtagcagtggtcgattgtgtaagctaccggccgcgccgccgcaataactgtcggtcgtggccgggtattcttactttttttttatttatctcgtcgacgtttcgatttattgtctactgccattttcgctcgtgtgctgtgctgcgtctctgtcacgtcc

SEQ ID NO: 153639 - DNA, 1509 bp, Zea Mays
gatgggaaagatgtaaaaaatggttattttttctccaacaacctttcagaagttgcacggctcgtcaatagcaatcttcatggcccattaacaatgcgctaacaaatagacagagtccaattcatcgaggcccacgcaacgcgggcacacaaagattctacaatccgtggcggagccggtggggggatcccaatgtcgtaaatagctgcggagccggtggcggagcccgtagcgggcgctcgaaaatatctcggcacggctgggagctctggaaccttcgctggcggctccaacccccgacgaggcgacgaccacagcactcccctcctatttatttcagagaaagaagacgagagatatttttctcacgccctccccgcggaattatacctttttttttctctctctctcgcctcgcttccttcgaatccatccatctctcgcctccctttccaattcgatgcctttgtagcgctgctgcctcgcccccgccgcgtcgtcgcgggtccccggcttcgcttgctgctgcgcttccagcgtcatggacgggggatccggcaatgcctccagcggcggagcggcggtgtgctgctactacgcgctcctcggcgtccgcaagagcgcctccgccaccgacatacgcaccgcgtaccggaggctcgcgatgaagtggcacccggaccggtgggccagcgatcccggcgcggccggcgaggccaagcggcggttccagcggatccaggaggcctactcagttttatcggacaaggggaagaaggccatgtacgacgccgggctcttcgatcccctcgacgacgacgaccaggtgaatgagcaaatgagtttcctgctgcttattggcttgtagaaattaatcaatttttttttgccattttggttccgaatattatatgtgtatcatgtatagtatagccctgagcaggaaattaaaaaaaaactaatttctctgctctgctatcggacggccaggatttctccgacttcatgcaggagatgctggtgatgatggataacgtgaaaaacgagaagccggacacgctagaggacctgcagaagatgctggcggacatcgtgaacggcgacggcggggacggcgtaggcgggcgcgtgccgccggcgccgccggacgttgctcggcgaacgcgcgtcgcgccccacccgcagccgcagcaggcgcgtaggtgaccgccgcgccgccgtagctgcggcggagtacgtacgcttttggtgaaagggactggagaaggatcagaaacgggaggctctctggaaaaaggagaataaaaatttcaggccatcttttgatcataatctaccaatcctttattgtagcagtggtcgattgtgtaagctaccggccgcgccgccgcaataactgtcggtcgtggccgggtattcttactttttttttatttatctcgtcgacgtttcgatttattgtctactgccattttcgctcgtgtgctgtgctgcgtctctgtcacgtcc

SEQ ID NO: 153640 - DNA, 1892 bp, Zea Mays
tttttttcaccaaaccagcgaggcagctaccgttttgtcgccatagcactcccgccgaccccctcgccgccgccgggaatggagaccagcaccaagaagcttagcagccttcgtatcacctccctggacgacgatgacgacgagaccgagatcccgcaccagccccctcaagcaggcctctccaccgctgaagcggattatgaggacgacgacgatgaggaggaagaagccgaagtgactcttggtgtccttagcaaaccgaagcacccaggcctcctcctccgccacttgttccccagcaaggccggtggcatcccggcgtggctagacccggtgaacttgccgtcgggaaagtccagctactgtggtttctgtggcgagcctctgcagttcgtcctccaggtgttttctttgtgtgcaatgaagttgccacactcgactgcttattgtttggatatcgacttggtcacagttaggcttggttgtgtttagatttatgcaccaattgaagataatgtagcagccttccaccgaacgctgttcatgttcatgtgcccatccatggcatgcttgcttcgagatcaacatgaacaatggaagcacaagtacgggaatccatgtagaagcgtgaagattttccggtgccaattgccacggaataatgccttctactcagctcaacctccaaagcatgatggctctgacaaaccactctgtccaggagctcctgtatgccactggtgtggtacctggaaaggtgataaaatatgtagtagctgcaagaaaagcaaggtactgttctgagaaacatcaggcactgcattggcgaactggtcataaaaatgattgcctccagataataagttctgctgcttcaaattcagttctgccagctgtaggaatagttcctgctagcatttcttggccagaatttgagataaaaatagactacgaaggtacttttgattctgatagtggtgatgaaaacaactcgaagtcattggtgatgcaaagacatgggaaacttgatgctatgatgcagtcgtggatggaccatttcgaggctgatgctgacaacaaatgctgggcgtcttttcaagaacgggtctcaagagcaccaaatcaagtgttgaggtattgtcgagaaccaaatgctaaacctctatgggccttatctttcgggtgcccgtcagatgctgatatcccatcatgtagctactgtagaggtccattatgctatgaatttcaggtaatgccacaattgctttatttctttggtgttggaaatcaaccagactcgcttgattgggcaacaattgttgtctacacatgtcaagggtcatgtgaccaaactgttagctacaaagaggaatttgcttgggttcagttgtaccctacaacaaccacgaggcggtaataatgtttacctattcctcggagtaactactgtccaattctgcagggaattgacaggaatcataggcaagtgcatacctcctttgggtactggaattttgagataggatgtggcttcaatgtttccaggtctattggtcgtgcagggagttttaagcatcttccgaccgtggcccaatgcttggtgctcgttacagtgcctttgatccatttaggcactatccttgggcccacgaatacgtgatggcaaatagttgcatacttccatttttgtggtgggccaccattttcggtttaattgtcatcatcacatcattaaaaagctttgttgttttttgttatctaaaaggatcattggtctcagaaggtgctcgcattcatgtaaacatttccttcatcggctaaagttttgatgttggttttgattttaaatggaacattattatgttaatattccagtggtgttttcaccccca

SEQ ID NO: 153641 - DNA, 1802 bp, Zea Mays
tttttttcaccaaaccagcgaggcagctaccgttttgtcgccatagcactcccgccgaccccctcgccgccgccgggaatggagaccagcaccaagaagcttagcagccttcgtatcacctccctggacgacgatgacgacgagaccgagatcccgcaccagccccctcaagcaggcctctccaccgctgaagcggattatgaggacgacgacgatgaggaggaagaagccgaagtgactcttggtgtccttagcaaaccgaagcacccaggcctcctcctccgccacttgttccccagcaaggccggtggcatcccggcgtggctagacccggtgaacttgccgtcgggaaagtccagctactgtggtttctgtggcgagcctctgcagttcgtcctccagatttatgcaccaattgaagataatgtagcagccttccaccgaacgctgttcatgttcatgtgcccatccatggcatgcttgcttcgagatcaacatgaacaatggaagcacaagtacgggaatccatgtagaagcgtgaagattttccggtgccaattgccacggaataatgccttctactcagctcaacctccaaagcatgatggctctgacaaaccactctgtccaggagctcctgtatgccactggtgtggtacctggaaaggtgataaaatatgtagtagctgcaagaaaagcaaggtactgttctgagaaacatcaggcactgcattggcgaactggtcataaaaatgattgcctccagataataagttctgctgcttcaaattcagttctgccagctgtaggaatagttcctgctagcatttcttggccagaatttgagataaaaatagactacgaaggtacttttgattctgatagtggtgatgaaaacaactcgaagtcattggtgatgcaaagacatgggaaacttgatgctatgatgcagtcgtggatggaccatttcgaggctgatgctgacaacaaatgctgggcgtcttttcaagaacgggtctcaagagcaccaaatcaagtgttgaggtattgtcgagaaccaaatgctaaacctctatgggccttatctttcgggtgcccgtcagatgctgatatcccatcatgtagctactgtagaggtccattatgctatgaatttcaggtaatgccacaattgctttatttctttggtgttggaaatcaaccagactcgcttgattgggcaacaattgttgtctacacatgtcaagggtcatgtgaccaaactgttagctacaaagaggaatttgcttgggttcagttgtaccctacaacaaccacgaggcggtaataatgtttacctattcctcggagtaactactgtccaattctgcagggaattgacaggaatcataggcaagtgcatacctcctttgggtactggaattttgagataggatgtggcttcaatgtttccaggtctattggtcgtgcagggagttttaagcatcttccgaccgtggcccaatgcttggtgctcgttacagtgcctttgatccatttaggcactatccttgggcccacgaatacgtgatggcaaatagttgcatacttccatttttgtggtgggccaccattttcggtttaattgtcatcatcacatcattaaaaagctttgttgttttttgttatctaaaaggatcattggtctcagaaggtgctcgcattcatgtaaacatttccttcatcggctaaagttttgatgttggttttgattttaaatggaacattattatgttaatattccagtggtgttttcaccccca

SEQ ID NO: 153642 - DNA, 2836 bp, Zea Mays
ccccgcgcgcgtcttcctccggcatgcgccagcccccccgagctcgcccgcgcaccaatctcgccgtcgggtatcccgcccgcgagcccgcgcaccaagctccttccccgcgacaagctccctcccccgcgacgcgtcttcctcctcgccctagatcgccgccccagctctctcctcaccccgcaatccccgccgcccatgctccgctctctactcgccccagatcgtcgcccctgttcgcgtggattgggtaccggtcccaactatctccatggattgcgcgtccgcgacaacccaatctcctcccggtctccatggaaggcgcgtcctccccccgtgattctcgattccccgcgtccgcgccccagatccactctcctctctcccacaatccccacggactctgccccgtatcaccaccccggctccttagaacgtgatccactctcctctctcctgcaatccccgctacctcaacccagatcgccgccctcgctctcgatcctcgcccacgctctccatggaaggcgaggccgcgatgctcgcgtggatctatgtagaggctgcgacgctctcccaggaagactactgccagtgctccgtgctccatgcgccgcgctggaacgccaccgtgcggtccatgtcctcgtagtatcgcccagactcgcccatgtagtcccacctgcatccaccgaccaccaagcacactctcactgcagaccagagaggattgccacgaataggtgtgtgcagttctactctacccctgcatcgagccggtgtgcgtccaccagaggccggagttgaaggagagcacgtcggcgtcgcgccatgactcggcgttctcgtagatgtcgtccagcatcagcacctgcttcccctggaccacgtcgatgtccaccaggaacttgtacgtgtacaaagggtccacggagacgagctgcgtcggcgactgcagcgcggcggcgtgcagcaggcagacgagcgactcccactggttgcgccccagcgagtcgcccacgaacatcaccgtcttccccttcatccgtgtcaggaagaccgtggcacaacgcctgatgtcacgttgtcccagcggcgccgcggccggcgtcacgccacgcggatggtcacccacgccacgtccctagaccggtgtggtacgccggcgcccacagcgtcgatgaggaggaggtcggagcagcagtagctgtcatgggcagtgccgcagatgtggagcagtcgaatgagaggctagacgggctggagcaccacagcaggctggtgtcgctgttggccggtagccgctcctcccccaccggcaccgagagggacttgtgacccaaggatctgttcccgggggatgtggtgtttgcgctcgtcgatgatctcaggctcaaccactccaaggacccataggccatggggttatgcaatccaaaggtctccatcgccaatttcattttgtagacaaataagttagctcttctgatggcataccatttatagattgccaacgatctgaaggcatatatgaaggcttgttatctcttctgtgtttaattgatcagtgactttgatttggacctggttatcagcttgttatttctatctgaattttctcgctttatttgtactacactcgtgctaattatgtgagaatgatttgtgtcactatggtgttcatctgttattttatactattatatgtattcatctgtcatgttgttgaactcctgttatcaattgcagaaggaaattcctgcttgagccaattacagaaggccctgatatttgtcaaattgatggttgtagtgttaaattggaatacaagaggaggcaagtcaaatatggtttgtgtgacagcacgttactaacttactctactatatctgcatgagaaaggatgaaccctgtttgcatgtatactaattaatctacggattcattaatgtgtgaataagattttatttaattatgacagcaaacgtgacatgccattacaatttcgtttatgcaaaaaagtaagttgcttatagtttagcctttggtttcaatttgcactttatagaattatactggcagagctcctgacggagcacctgacggagctcgccacaggtaccaaacggcgcagcagcagttgatgtgcaacccgagtgtactgccgctcgaggaggccagtaagtgccaacaacatgaatagccaaagcagggaaatagggctggcgggggcacatgggtaacttggtcctggagcattggagaaggagcataccacaaggaaaccaacacgagttccttgcttcctgaaggcctcatagctcagattactgggttaacgaacaactcatactttgatggagcacatgaggttcgacattatgtcaggaagcattcgaatcttggtcgtattgtgcttgaagttgctaaggactcgcaaatcccccgccaagcaaactgctagaaatcttttcagaggtggagatgatgaagatgatagtgctgatgccgacacaaatgatcctgttgtaccttggtcattaggtagagtaggagttgggcatatggtgtacatctccggtttgacttgtgccttgagttcaacaaatatgaaagtgctgagagaggtggcatctagaggacgtcatgtcgaacgtgtgaagaatttttttagaaatatgtatatttgtgcgaaactttttagaaacttgactccattttattttctatgttactctcggctttgtttcctatcctttccaatgacttgctatgcatttgcactgtatttggcatgtttaaaactgctacacaaaacttgctatatattttgtcc

SEQ ID NO: 153643 - DNA, 1465 bp, Zea Mays
atggataaattggggaatcttcctattattgattggattgggggagttggtaacaaggtttcacgtatccaggagcgtggtttttccccaacttataacatggaaaggagtagcatgcatgggtgcgggactgaggtgattaacaagcgagctccacccaagcttgcaaaggaatccatggaggattttctagatgctagtttggtcagggagacgatgatggaagggacaaaggaggaagtctgggagcgggaatccatgagcgggttaccgacgaaaaaaggcatgtcatcggcccaagtgtttgggcactcctggaggcccatcaaccccacgtggtgctgggttccaagaagcggaatccacactaagtcatgctaccctgctcgaccggacgaagtgcgtaggcttcggctctctgccaagtccgtgtctagggttagacatcaatccttggaggctcgttcctatgcccaagtagtgagggaaggcagaatggcttggaggagggatcatggagggagcaattggaaacggcgccaagatgaatggatggaggaagatgaccttctggaaggggatccctgcagagaacaagatctgcgcgctaaacttcagaggggatcaggagattctactgacaggatcccagcagagcaggtacgtgccatgccaaacattagacctgcgggtaactttgggaattggaaaaagggtcaaggaggccgtggttttgctgccaggggaggctttggaggtcgacggggtttgggacgctctgaatttgatggtcaaggaagtagacagtttgagacaaaggaaaaattccgtggtgcccaattctctggagacagtggtttgatcacagaaaacagattggggacacactttgaaaaagattttcgtcttcaggaagatcagggcaaagaaatcaaatgttttcgctgtactcagtctggacaccaccaatctgagtgtagtaatgaacctctttgctacaaatgcaagggatttgggcacatggctgcagagtgccacatgcagaggaaactgaggttgtttggatttggtatgccagaacagggtttctttggtattgatatttctgaaaacaaagagcagatggcgggtctggtggcttctatccatgttttggagggggaacctaatgaggaaaaattagaggaggaactaaaaaatttagtgcaagaaaattgggaattcagggtgagaagggtggataagtttgacttcattgcctccttcccagataaaggatcccttgagacttatgctaagctcaatagcctggagatgcctatctataggttcagagttaaaattggaaaaaccagtgtggatccaaaagcttcagcagaattacagagtgtttgggttaagattttcaacataccagagaaagcacgtgagaaaattattgtgaaggaagtggctagcttagttg

SEQ ID NO: 153644 - DNA, 297 bp, Zea Mays
tttttagatctgttaggttagttttatcagtgatgctttacgtgaagctttatggtgtgtactagctgcgatctggcggctgatttcagaactttgttagttgaactttgtcaggtcatagatattaagctggtgatttgaagtctcagttcttagtggagggtctgttttttttttgatggtcatgggtgtcatgtgtggagcttccctggttaactggttatcccagttcaacgctgtggggtgtgctctatgtagctacctctgttattgctttcttaaaagctgagtaaaatc

SEQ ID NO: 153645 - DNA, 2305 bp, Zea Mays
tgaggcaggcgacagcggggatgaaaaagtcatcctagaagcatcgcatctcgtgtccgcgtcgttctgcgctccgcctcattctttctaccttcgtctctctctgtgaccacctccacccctcctcttcttcttcctccccttctcccccgatctgcggcggggttgattcgatttcgatccccttctccatccgtcgcccacctccccgcccaggcagccaacgcaatccgctccccgaggcgcctccctgaccctgactcccctgcccccacaacgtgcgtgctcactcgcggtcgggcgggcggggccggcacactcaccgtcaccacacttattaattcctcttccgcgtccgcgcttcaaaaacctcctccggctcgtccccctctaaccagtccccagtcccgcggcggccgcattgcccgccgccgcaccgtgtccggctaggactaggacccctgtttgggctcttgcgtttcgattcctgggtcgtctgcaaggagtgtggccgacggagggggccaaaatgtgggcggagagggtggtcggcgagcgccggatgcggcagatccagcgcttcgcgcggaacgccaagctcaccgtcgtctgcctcctcctcaccgtagttgtgctccgcggcaccgtcggcgccggccgcttcggcacgccgcagcaggacctcatcgagctccgccagcacttcgtctcccacccgcaccgggcgctcgcggagcaccacgacgccaggtccagggcctccaccaccaccacgtcgtcctcgtcctcgtcttcctccggccgccgcgacgagcccgacccaccgccgaggtcgctcagggacccgccctacacgctggggcccaagatctccgactgggacgagcagcgcgccgcctggcaccgccgccacccggagacgccgcctttcctcaacgacatcaagccacgggtgctgctcgtcacggggtcctcgcccaagccctgcgagaaccccgtcggggaccactacctcctcaagtccatcaagaacaagatggactactgccgcgtccacggcatcgaggtcttctacaacatggcgctgctcgacgccgagatggccggcttctgggccaaactcccgctcatgcgggcgctgctcctcgcgcacccggaggtcgagttcctctggtggatggactctgacgccatgttcaccgacatggcgttcgagctcccgtgggagcgctacgggccatacaacctgatcatgcacggctgggacgagatggtctacgacgacaagaactggattgggctcaacaccggcagcttcttgctgcgcaactgccagtggtcgcttgatatgctggatacctgggcgccaatggggccaaagggccctgtccgcatcgaggccggcaaggtgctgaccaagtccttgaaggatcggccagtattcgaggccgatgatcagtcggccatggtgtacatcctcgcgacacagcgcgagaaatggggtgataaggtttaccttgagaatgggtactacctccacggctactgggggatcttggtcgacaggtatgaggagatgcttgagaactacaagccagggctaggtgatcaccggtggccgctcgtcacacattttgtcgggtgcaagccatgcggcaaatttggagactaccctgtcgagcgatgcctcaagaacatggaccgtgcattcaattttggggataaccagatcttgcagatgtatgggttcacacacaagtcactagcaagcaggagagtgaagaggatcaggaacgagaccagcaacccgcttgagacgaaggatgagcttgggctgcttcatccagcattcaaggctgtgaagacttccacatgataattagagtacagttccacttgtttattttgttggctcgttctagatcctgttgggtctataatccaaagtgttcttttttgtagaatcgggtgacgacagaagtttgggttggggtcatgggatggatatctttgttgtaatgtgaggtgttaggagaattatgttatgtttatttattggcataagttatgtcttacacgtacaaatgagttaatggatgaactcaagttattggttcaatgatagatttcaatggagtttcctgttttttttattattgccgggatttatgttaggctgtctccactctctagtagactgtgtatacttagactctactgtttatacaataggaggtgagatataaagtgctggagaaggccaaagtgtggtaatagccctgtaggtgttcttaaatcaagcttg

SEQ ID NO: 153646 - DNA, 660 bp, Zea Mays
gcgggtccacggcggtctcgactcgaccgccgccttctcttactataaaacgaagcaacgcgatcctagggtttccttcctgctcagtgttctcgactcgaccgccgccgtcccagttcgcttcgcgtcaccgagagctcgtcggcctccgtccccgcgagaagcgagagcatggacacccaagtgaagcttgctgttgtggtaaaggtgatgggcaggaccggctccaggggtcaggtgacccaggtcagagtgaagttcttggatgaccagaaccgtctcatcatgaggaacgtcaagggccctgttcgtgagggtgacatcctgaccctgctcgagtctgagagggaggccaggaggctgcgctgaagcccttgttgtcttggatgtaattctgttaattttgttcaatgtttgtcgaacttgccgtgtgacccatactatatctgctttgggatttagtaagcctggattgcagttttttttatgttcctggtggaaattgcaattgtttgtcggcatgttctcttgaatttaatgcgtacggtttctactactactacaatgatttttagcattctgaacagctttaatcccatgtgtccaatctgaaggtgttgttatatgtggtaaggtcgtctatgggtttttgtcatcgtt

SEQ ID NO: 153647 - DNA, 1132 bp, Zea Mays
agccccaaatacacagcctaggcccacctattcggacacaccagaaaagagagagagagaggaaaagaacccaacacgctctctcgcgcggcaagagcttcccggcccgaaaccgaaagcaccaccaccaccaccaccaatctctgcgtttttcgtctgcggcggcggcggcagcagcggaggaggtagacgagatgctgtccgccgacatccccccaaaccagaccatctacctcaacaacctcaacgagaaggtcaagaaagaagagttgaagagatcgctttatgccctgtgctcgcagtatggaaggatactggatgtggtggctctgaaaacacagaaactgagagggcaggcatgggtggtgtttagcgagattacagctgctaccaatgctttccgtggattgcaagactttgatttctacggcaaaaaaatgcgagtacaatatgcaaaaacaaaatcagactgtattgcaaaagaagatggtacttatgcacctaaggagaaaaggaagaagcaagaggagaaagctgctgagaaaaaacgacgagcagaagaggcacagcaagctggccccaatgctgctgctgctcaaagcaatggaactggctatcaagcgtctcgtctgggcaaggcttcgcaggagccacctgctcctccgaacaacatcctcttcatccagaacttgccagaccagaccacgagcatgatgctccagatcctgttccagcagtatcccggcttccgggaagtccggatgatcgaagccaaaccaggcattgcctttgtggagttcgaggacgacggccagtccatggtggcgatgcaggctctccagggcttcaagatcaccccggagaaccccatggctatatcctatgccaaaaaatgagaaccctcgcggaatccctgtacccaatacccataatattttccgttccgccttccggaatcgagccacagtatctagtctactttccggccatgtatttttggaaagcacttgcttaatttagaagttagactcttgccacttttaaaccgtgtttggtgctcagtctttatgttgagcctgcttttgctcttgtcaagtctggtattgtgcctatatatagggctgtctcgatt

SEQ ID NO: 153648 - DNA, 706 bp, Zea Mays
acaggcttaatgtacttaataacttcagattatcacctcgctttcatgtagtttcatatgtcaaagactcgaactaacgaaacgtctctcactgaagttctataatctgtaatctgtacctctaccttaccttgagtgctagtttcttcattaactgttgagcttctttgacgacttgtacacagggctatcaagcgtctcgtctgggcaaggcttcgcaggagccacctgctcctccgaacaacatcctcttcatccagaacttgccagaccagaccacgagcatgatgctccagatcctgttccagcagtatcccggcttccgggaagtccggatgatcgaagccaaaccaggcattgcctttgtggagttcgaggacgacggccagtccatggtggcgatgcaggctctccagggcttcaagatcaccccggagaaccccatggctatatcctatgccaaaaaatgagaaccctcgcggaatccctgtacccaatacccataatattttccgttccgccttccggaatcgagccacagtatctagtctactttccggccatgtatttttggaaagcacttgcttaatttagaagttagactcttgccacttttaaaccgtgtttggtgctcagtctttatgttgagcctgcttttgctcttgtcaagtctggtattgtgcctatatatagggctgtctcgatt

SEQ ID NO: 153649 - DNA, 4596 bp, Zea Mays
cgcgcaatgcccctgtcgcggcacacggtcgggaacgagtacgcgctgggtggccgcgacctctaccgcgcggccgaccagcacgacccggaggacgtcctcgatggcgtcgccatggccggactcgtcggcgtcctccgccagctcggcgacctcgccgagtttgctgcacaggtgttccacggcctgtacgacgaggtgatgagcacgtccgcgcgagggcacggcctcatgctccgggtgcagcagctggaggcagagctgccgctgctggagagagactcctgccagagagactacctgcatgtcgcttctaacaggggtgtcgattggcgttcgaatccgagggtcgaccaaggggttgtcacgagaggcgacacgcctcgcttcatcatggagtcaatcaagcagtgtcgcggaccacccaagctcttcatgctcgacaagtatgatatcggcggcgagggggcgtgcttgaagagatacaccgacccgtctttcttcaggacggattccgcatgttccaccttgccgcatgaggaaggaattcgagatgaaagaagacctcccaaagccatggagatcaggcctaaccttgagaatgcccagattttccagccccctaacgcagccgacaatgtctccaagctggagactgatccatctgctgaagctatggatgaagtgcccacaaaccgcagacggctgaagtaccgccaactaaatggatctgtattccaaagcttcagaccacttatgctgaatctgtatgaaaagccttcgtcagaggagaaactcgtcacaggtggccactcaaaagtgcgtatatctgtgaatggttcacctgaatcggatactgaagagagagataccatggtagacacgtccgtcaacatgggcaaaggcaaggtcgctgttcgcaagaacagaccagtttctgaagaagcactgtcacgttcttcagatgctcggtcagctggaagcagcaagggctacaactccgaattggatgtctacgtggacgcattaaccacggtggactctgaagcggagacagactcggaacacaggggccatggacaatgtacctttgatcggatggattcagacaatagattctccaatgctcaaaacgccatgacatcgaggaacagcaacttcgacaagaaagataggccagatgttccctcagcaaatagagatatgagtaaccagcatgaagaagccacggtctccacacaaaacaccaaaccagtggttgttggcgaacatgagaggaccagctcgttagaggaactgcttggccaagaaaaacctgcttcttgggatcatgagaggactagctccttggaggaattgctcaccgaagatttcaatgctccagaatctggagcaagagagcaggctactgaagagcagagctgcaatggcagtgccaccggtgctgtatcaaatggcacacaagatattactaagaagaccaaggaagtcaaggagaactctaacattgcaactatttccttcaagaaaatagcaagcaagaggtccagatatgtcggcagcatggctgcaaaagttggcattctgccaaggaaactctccaagaagcatgaccctttctctgattccctccggtgcatggcgaagcaactccttgaactgaagtacgatggcactaaagatagcgacttatatgactttgaagcaaacagtgtgggatgtgatgtcaagtatcagggaatttctgaccctcctgttgaaattaaggagagtgacgtgcacaaatttctgccagattcatcctatgatgatgtgggttcaagaaaatgcccgcaggaagaaatgaaccatgggcaggagcatgatgctccacctactgacagtccacatgattcagtccctgatgaaggaaacggatttcaggaccccaacatgatctacttggcaagcatcatcacatcttccagttcccaagaggaagaaggatgtgcaagtacttcactgcatgagaattcatctatggcagtgctcaaccatattttggagcatgctcaagagaagtttgaggaacatcttgacaaggatgtgaatgaggacattcatacagaagtcatttctgaaaattcatctggcaagtgtgaagacttgaaagaagtcagcatttactcagagcaggtgaatgtggaagatatggaggaaagcaataaatctgatgtatatgtgttggatgatgaaacagccgagtacatagaagagcaagtagtttcagatggtatgaactcttcaccggtttcatccaagcaatcagatgatccctgccggataactccactcgccctcgcagatgaagatgatacagtggcatgtaaggtcatcgatagccctgaagtggatcatattacattatcagaaacattcacggacattgatctacctaatgtggtaaatgagtcagtaatcagcagcgaacatgccatgccagaaaatgaacagtactatttccatccagaaactacttttggacaagatctgtgtctcgacaacaatgaaattgtaggggaaaatggggaagttccactatgcagctcaaccactgtggctataactcctgaaccaactgtaaacagagagatagaacatgagtttcatcaagctgtgtatcaggaaccatcgaattcattcaatagcagtaaagtttttggagatccactagcttctgactccagagatgttgcaccgtcagtcatctcgagctttgattggatgcttaatggtgcaatgcagcagtcattcaatgtctttccttctcatccaactaatggaaatgaacaagaaaatggttcttctgaagatgcgccaccacttcctcctcttccaccgatgcagtggagaacaaacaagatacagacatgctcatcaccgttatctgcaaagatcgggagaccaccaaggccaaaacctccagcaaaacaacaagaaagtgaagctgctcatattcttcaggagaacaatctccacaaaggcttgagtttgcagaatgaagtagcgcaggcaactatttctagtgatcatgagacaaatcaactccttaacatggattttcatgaaaaccatcaccaggaaggagatgaatatcatgcccaggattccaatccatttccctcgtcagaagctgaatgtttggcagaaattgattcagtaaaaagtgaaaatctgcacccattgcagctacctgagcttatagttgttccggaagaggcatggtcagagtttggtaatataaaattcatgccagaacaagaaggaaaactccaactaaacaacggactttctggtttggcagcacaaaagaccagcgggaagcctgatttgtttgcatattataaggaaaaggaattatcatttgcaggtagtgacaaagttgcaaattcagaagaaaacaaaccaaatggtgctgttaaacatatgcaaaatctggacttgccagcacaacagaaaaacgacaaaaatgattgtgatcgcaaggcagaggagttttcctctgcattagaggatgaatcatcaaaatcaccaactcatacagtgccaaaaccacctagataccctctacttcctgttacttctcatgacagaagcatgctaagaaaggtaccaactttggttcagccttcgagtaagcttgcagatgagaagaacacactattggaacagataaagaacaagtctttcaacttgaagcctgttcttgcaaagagaccaaatgtaatgggtggtccaaaaactaacttacaagtggtggccattctagagagagcccatgcgattcgccaggctgttgctgatgacgatgacgacgatagctggagtgagtagctggctcttccccaaagcgatttcggctcctgatgtttcagaagtgattgcatcgatcagacctttgtgtccctgttcttgcatggagcaaaagatgaaatagagccaagttaccacaggttttcatgccaagacaattggcatggaccaggtgatgcccatggatgggcaggaacggtagaagcaacgttgcaactgcaaacgtagtgtgtctctacttgtactatctgtgaagtttcgaagtgcgtcaatgtttattacctttcgatgcgcctcttgaaagtttcatgtgcttggtgaggattgttaggttgtatatgcctcctaggactagtgtcatttttgtaacttggtgagtgtacagaaagaagcatgatttttgagttgttctggacatctgaagcagatagagcaagcaactgaattgtatatgcctcctaggttgtatatgactgtacagatctctgaatccgacagttggccgcctaagctgagtttcaggaaacagatggtgcagcagtgcaggtaggggtggtaatagactctaaattttatactgcaaaatttaagaatcaaattggattagaattaggctctatttctatttaattttaaactaaaattatttaaaggctcaaactttgttgtgaataaacatttaaatcgtgatctatcaccactcctacgcaccaaatctgaattgtacatgaagatgctgggtct

SEQ ID NO: 153650 - DNA, 1349 bp, Zea Mays
ataaatgcaagtaccccgatcatcctctcttgagcatccccaaccccaacccgtcgccggaaaattccaccgcacacgagaccagcaggcgaagaaaggcagctaactaggagaagcaaagatgccgtgcctccaggcgtccagccccggcagcatgccttaccagcaccacgggcgcggcgtcgggtgcgcggcggaggcgggcgcggctgttggcgcgagcgcggggacggggactcggtgcggggcgcacgacggcgaggtgcccgcggaggcggcgcggcaccacgagcacgcggcgccggggcccgggcggtgctgctccgcggtggtgcagcgcgtggcggcgcccgcggaggcggtgtggtcggtggtgcggcggttcgaccagccgcaggcgtacaagcggttcgtgcgcagctgcgcgctgctggcgggcgacggcggcgtgggcacgctccgcgaggtgcgcgtggtgtcgggcctgcccgcggcgtccagccgcgagcgcctggaggtgctggacgacgagagccacgtgctcagcttccgcgtggtcggcggcgagcaccggctccagaactacctctccgtgaccaccgtccacccgtccccggccgcgcccgacgccgccaccgtcgtcgtggagtcgtacgtggtggacgtgccgccgggcaacacccccgaggacacccgcgtgttcgtcgacaccatcgtcaagtgcaacctccagtcgctggccaccaccgccgagaagctcgcactcgcagccgtgtaggcgtgactgcgtgaggaggggactccatctccatgggtgatctgatcgatagtttttcgggggggaggacggatgcgtgagtttttttttcttttatcccctctttttttagccttttcacattagtgccctctcctcttggttttggttattattctttttttttctcgttgttgcgagagacaagcagcccttggcctccctctctagctagtcccttgcccaaacattcaagggatcaaagatgacaagtataaatcgatccgtagagatccaagttccggcccacgctcgattgacatgtatatgtatatatatgtttatggtattatatatagacagatatgatgttcaacatatcgtgtatatattcatgcaaaatactgttacagtactgtttattaagcgaagtttaaaataaaagatgtgatagtaaataaggccgaagagcttttggagatagcataaagcacggaactatgaaggaaacatagttcaacatatcgtgtatatgttcatgcaaaatactgttacagtactgttacagtactgtttaaatatgaaggaaaca

SEQ ID NO: 153651 - DNA, 519 bp, Zea Mays
atggcagattcagaagtcgttcatgagagcaatactgatttaggaaaaggaggagagcactctcttcatgactacgtgctagacgaacagcttggtctgacatgcagactgtgcaatgttgtatgcattgaggcaaaggatttctttccaccaatgttcactggtaaggaccacgagaggcctgaaaggaaccattttggtcaagatggtcatgtacttgacctttccttttttgagatttgtgatccagaattctccaaaatcaaggaatctgggaatgtgtgggcttcaatcactgatcttgaaccaaagttacttgctcatcagagaaaagccttcgaatttatatggaaaaacttggcaggatcattacagcttgaagaaatggatggctcaacaagtagaggtggttgtgcggttgcacatactccagaagcgggtaaaactcttctgctgattttgtttcttgtcagttacttgaaagttcacacccaagaagccggccattggtcctcatag

SEQ ID NO: 153652 - DNA, 1044 bp, Zea Mays
atgacaagtacattgacatcaaaggaataccagagctatcagtcatcaacagcagcgttaagggaattgagcttggatcggttgtgtccatctctacaggctacaaccattgaggtgttgtcagatggaaatctggtcttcagaaaaattgccaatcacctaagcaaagtggcttcgccatttgttcggaacacagcaaccataggtggcaacataatcatggcgcagaggttgccattcgagtcagacatagcaactgtgctactggctgcagcgcctcggccatttggcaatgctgcttcatatgtcaatgctgctctcttggcaaggacttcaactgatgcagcttcagggaagaacatcatggaggatatatgcttggtgttcggtgcttatggagctgaccatgccatcagagctagcaaggtagaggattttctaaagggtaaatcactgagctcttctgttatacttaaagcagttcagttgcttaaagagacggtttcaccaccagaaggcacaacacatcctgagtatagggtcagcttggctgtcagcttcttgttcaccttcttatcctccttaaccaacagcatgaatgaaacagcaaaggttaatgttatcaatggatcacttactaatagaactacaaatattagcggtaggtactcactgaaggaaaatcttgaggttgacagaaattatttaccaatacactcaagacaagaaatggttttcggtgatgaatacaagccagttggcaagccgatcaagaaagtcagggcagagctccaagcttctggtatttcccctccaatgtactgccttgccaaaaaaaatattttgacagcatcagcttataacctttcttcagcatattctgcaaaatactgtatagtgatgcttctgttcatttttagtacttcctctgttccaaattatagacgttttagtacaaaacaacaagaagatggatatttccccttcagaaaaaatgagcggggagtggcagtgatcatcattgttctaagagttcagagttga

SEQ ID NO: 153653 - DNA, 498 bp, Zea Mays
tgaatataaacacttatagcaacgggctttgttttcagtcccaagaaaaaattggtgattctcgacagaagtaaacgctaccccaacaccggctgagcccaaaacattaacaacgcaggtaacgagtttcagcgaattcaccaaaacctaacagaaagaaactgcttccaaacagaacggcttagaacttagctggtgctgtacagcaaagctcatccaaatcaaccagtgtagccttagtaagcagcgacgccagaatttgtaatgtcgacgtcccccattcctgtatcttcctcctcttcactgtcagcatcaccatcgacctctgcgttttgctccattagggaatcaatctggtcgaggaatagcttgtcttcccgctcactaacctctcttggtggttccttcactactaactttcctttgtacttttcaatctctgctgtacaagccttgactgcagtagtgagaactgaaatgccttgatcctgttcaaag

SEQ ID NO: 153654 - DNA, 790 bp, Zea Mays
atccatatgcactagcagtatcacctcatttaatatgcggccggcatcgtcgccagagctctcgataaggctcgccagagctctcatctcatacgccggaggtgctccagagagcaggtggtccctgatcgcgaatcagctgccggggcggacgggcaacgacgtgaggaactgttggaacacgaaactgagcaagcagctacggcagcgcgggatcgaccccaccgccccatcgccgacctcatgcacatcctcaccagcgccctctccctacggcgacgacggcgcgggagagatcatcgacgccaccctggagtcctggactgcgacaagaagacgcgggtggaccagctcatcgcctagctgctggccgacccggcctactacgctggctcctcctccgagatgggctggatcatgggcttgatgaatgctgattaattagcggttatacaatggatccatgaggctaaagcaaactgactgaaatttagtcactttagaggctaaagtttcaaacataatgaactaaaagggactaaaatgttttagctcctttagcttgtaaggaagagttagggggtgtttggttagagggactaaagattagtctctagtttttagtcccatttagtcccttttttgccaaacactaggactaaaatatggactaaaatgatttagtctttagtccttcacataggtgctaaaagagactaaaagcccacatgagtgtattctaagggcatttgagtcttgtggacaatgtatttaatgacttgagaatcta

SEQ ID NO: 153655 - DNA, 886 bp, Zea Mays
atccatatgcactagcagtatcacctcatttaatatgcggccggcatcgtcgccagagctctcgataaggctcgccagagctctcatctcatacgccggaggtgctccagagagcagggctgaagaggtgcggcaagagctgcaggctgaggtagtgaggtacaccaactatcacgcgctgatctgggcgacgaactgcgtgcgcgtttgcaggtggtccctgatcgcgaatcagctgccggggcggacgggcaacgacgtgaggaactgttggaacacgaaactgagcaagcagctacggcagcgcgggatcgaccccaccgccccatcgccgacctcatgcacatcctcaccagcgccctctccctacggcgacgacggcgcgggagagatcatcgacgccaccctggagtcctggactgcgacaagaagacgcgggtggaccagctcatcgcctagctgctggccgacccggcctactacgctggctcctcctccgagatgggctggatcatgggcttgatgaatgctgattaattagcggttatacaatggatccatgaggctaaagcaaactgactgaaatttagtcactttagaggctaaagtttcaaacataatgaactaaaagggactaaaatgttttagctcctttagcttgtaaggaagagttagggggtgtttggttagagggactaaagattagtctctagtttttagtcccatttagtcccttttttgccaaacactaggactaaaatatggactaaaatgatttagtctttagtccttcacataggtgctaaaagagactaaaagcccacatgagtgtattctaagggcatttgagtcttgtggacaatgtatttaatgacttgagaatcta

SEQ ID NO: 153656 - DNA, 518 bp, Zea Mays
ggaagccaagaatatattagcatttctgagttctgactgctacaagacgtaaataatcaatactttgatctgatgtcaaaaatggatgcttgtcctcagtgcgtcactagccatgtcctggtggccccttctggacttctggtacatccaacaaaaaaaaaatacaatgatagtttatctgcaccaacgggattctaagctaattaaaacaccaattgctcctctcatacatcgtgcagctcaatcccaggacgttacagacaatgcaacccaaaggtcattagatgtcccagatatatacatcctatgtgtctggatcttctcattgttggtacataatggggttgggctcgaataatgaccgttgcttattctctcctggactgagaatatgatttccctttgcatcggttcatggccgttcagaagatttcccatgctcaaaactttcctccaagactgattagcagtagggggaggaaacaggttcgacacagcatctctctcatacatcccga

SEQ ID NO: 153657 - DNA, 533 bp, Zea Mays
ggaagccaagaatatattagcatttctgagttctgactgctacaagacgtaaataatcaatactttgatctgatgtcaaaaatggatgcttgtcctcagtgcgtcactagccatgtcctggtggccccttctggacttctggtacatccaacaaaaaaaaaatacaatgatagtttatctgcaccaacgggattctaagctaattaaaacaccaattgctcctctcatacatcgtgcagctcaatcccaggacgttacagacaatgcaacccaaaggtcattagatgtcccagatatatacatcctatgtgtctggatcttctcattgttggtacataatggggttgggctcgaataatgaccgttgcttattctctcctggactgagaatatgatttccctttgcatcggttcatggccgttcagaagatttcccatgctcaaaactttcctccaagactgattagcagtagggggaggaaacaggttcgacacagcatctctctcatacatcccgaccttttccttagttg

SEQ ID NO: 153658 - DNA, 1785 bp, Zea Mays
atggcggcggcgctggagtgctggtcggggcggccgagcaccgatgaggagacggtggagcacgttctcatgaagccccacgggcgttcagatgactccctcccgacctgcgccgattctgcccgcgctgccggcgagccgacgccgacgccgacgccggcgccccccaagaagtggcagcggctgggccgcaactttgccggcgccatcgccgcgttcaagaacacgctgaacctggatggcggcggcggcggcagcggcctcccccgcgacccatcaccgcgagccgagaagccgccaccgctcctcctccgtggcctcgcgcagctctactcccgcggcgccgccaaccagcagctgccagaaaagctcgtcgctgacctccgccgccacttcgacgctctccccaacagctacgcacaggcaggatatgacatgaaagatgtcctcctgcatgcccgccttgcagagcaggcgacaggtgaggatcagcctgcagtgaacattgaggaagttcatggcagaggaagttgtgaagaaggcactgttttccagctaacatttgcttgcacagccccgctctcatggcagtcaatgtcaggatcactagacagcccttcgttctgttgcaagaagatccagatctttgagaagagagggctgacacttggcgtcgtcatgatacttgtgcagactgggaacgaggcgctcttcaagaaccaggttgagtccgcgctgaaatcggtagtaaagaagcaaagaaagaacagtggtggtgtgaagctaccatttgggctctgcggttgtcaagaagaaggatcaagaaacttcgatgaggagtcgatgtttgatccagatgatggtcgggtactcgacaatgagccggcgcacagaccacagcttcccactcccctaccacaggcatcagtcttcgtctcagtagatgaatggcaaaccattcgctccggtggcgaggagcttggtcgctggatgctgcgttccgaggagatcgagttcgttgattggtttggcgcgaattcattcaggggtgtctataagggaaagaaggtttgggtcaacaaactgaggggctgtgacatggggagtgcttacgatgtcgagattcgtcaggacttgctgcagttgatgagctgtggccaaaggaacatcctacagctccatggcgtttgtttcagtgagaaccatgggctatgcatagtaacgaggatgatggaaggaggatcggttcatgatattcttgtgcagagaaacaagaggctgtccctccgagacacggttaggatcgctctcgatgtcgctgacgcaatggccttcatgaacggctatggcatcgcgtaccgtgatctcaatgctcggaagatcctgctggacaggcaagggaatgcttgccttggggatatgggcattgttaccccttgtagtaatgttggtgaggtcaccgagtacgagacatctgggtaccgatggctggctccagagatcattgctggagatcctgaaaccgtctccgagacctggatgagcaacgtctacagctacggaatggtgctctgggagatgatcaccggagaggaggcctactccacctactcgccagtgcaagcagctgtcgggatcgctgcctgcgggctgaggccggagatccccagagactgtcctcctttcctgaggtcactaatgaacaggtgctgggacagttcccctttgaagcgccctcagttctctgagatcacatccatcctacagaggcagaatgttagatag

SEQ ID NO: 153659 - DNA, 1252 bp, Zea Mays
cttttggtgttgctctaaccctttcggctgcgctgcgcacgtcccctcccacgagaaacaccccacgtctcaagctgcccctttctcaccgccgcggccgccacgcgcagcagcaaccgagcaggagcgcagccagcaagctcaggcccgagccctactgcaaccgccgctgctaccgcactgaacaccatggccgacccggcggagcaccgtccagcggaggaggacgaggaagccgcggcggccggcgaggatgaggacaccggcgctcaggtcgcgcccatcgtgaagctggaggaggtcgccgttaccaccggagaggaggacgaggacgtacttgtcgacatgaaggcgaagctctaccggttcgacaaggaggcgaaccagtggaaagaacgtggcacaggcactgtgaagctgcttaagcacaaggagaccgccaaggtccgcctcgtcatgcgtcaggcgaagacgcttaagatctgtgctaaccatcttgtggtggcgacgactaagatgcaggagcacgcagggagcgacaagtcgtgcgtgtggcacgcgctggacttcgccgacggtgagctcaaggaggagatgtttgctatccgttttggatctgtcgagaattgcaagaagttcaaggacactgttgaagagatagctgaagagcaaggaaagaccgaggtgaaagaaaacgaggaagtctccattgccgccgcagatttggtacagaagttaacagtgacagaggctagcaaggagggagatgcagaggaagaggaggctcctgcatctgaccataagaaggatgctaaagggtaaagattgaaggcaaacaaggccaaatgattatgattccattcatttcgttgtcaaggttcatcttccccacaaattttcattacaaagtttcattgcattttctcctgagatgatttgtgtgtgtgtgtgtgtgtgtgtgtgtgtgtgttgggtgaaatctgagttgtcagtcatctacatgtctttcttggttgttagacttattctcagtcgcctgtttatctgggatggctaggtacatcatgtttgtacaattatttggggttgattttggaatggctctaaagctcgagatgagatagatggtatcatggtagttattagtgatgatttcttttcgcttcttgttcgttcgttctgaaataatatgggatgctttgttatacttgttgatccattattagcttgatgcatcgttgattcgttatca

SEQ ID NO: 153660 - DNA, 1447 bp, Zea Mays
gacacagattttgattgaattgagtggacaaagggaataacagtacatggtacgagcacaggtacaacagccaacggcggccagcggagtcctaccaccccaaacccgcatttacaccaacagcagtgactgtgacaaccaggacggccatggccacaggggagcccgctgccgctgccgacgacgagcacgtcacgatcacgatcacggtcgtcggagaaggcggaggcgctgctgggtacgggcgcacttgcgctgccgtttcttggcgcctcggaactgggaggtggggcccaggtgtcagatgccaaggtggccccggtcccccaccccacttcttcctcccagtcccagctagtcggcggcccgtttgaggccaattcggcgacccgccccttggcgcgcgccatgacctcgtgcttgctctcggcctccgcgtcgtccagcgcctcagagtccgaatccgacggggcccaatcgaggaccgcgcgaggcgacggaaatggagacggagacggagacggccacgggtcggtggcgtcgtcggcagcgtccgtggagaggaacgggtggcgcagcagctgctcgcagctccaccgctgggccgcgtcgcggcggaggcacctgtcgaggaagtccaggcacgcgtccgacaggcacgcggggatcgcggggcgcgtcccgccgaacccgacgaggagcagcagctcgccgacctcggtggcgccgccgagctccgaccacggccgcctccccgtgagcagctcgagcgccgtgcatcccagggcccagacgtccgacgccggcgtcgccgcgccgccgcgcgcgacctccggggccatccacgcgggcgtcccgcgcggcccgcggggggccgtcgccgtcgcggcgtccgagaccagcctcgccgcgccgaagtcagcgagcttcgcgccgcagccccggcagcccaggagcacgttccggcccttgacgtccccgtgcacgacgccggcgtcctcgtgcaggtaccgcagcgcggcggccaccctccgcaggacgccgcgcgccccgcgctccccgaggccccccagtgccgccgccgcctccgcggcgctgccgccgggcacgagctccatgtgcaggttcctcgtcggccccgccgcgccgtcgtcgccgaggtacgccaccacgtggggcgagctcagccgcttcaggatccttatctcgctctccaggcacgccatggccgccgcgctctccgcgtccaccgacttcaccgcgaaggcgcggcctgtggccgtgtacacggcgaggtgcaccgtgccgaaggcgcccttgccgatgcatttcccgcgctgccactccatgtccgttcgcctttgaattggaaccggagcggagcctacgagtgggggagaggagcagagtgggacagggcagcagaggtgtggaggatgagtgaatt

SEQ ID NO: 153661 - DNA, 105 bp, Zea Mays
tgaaaactgatgttacatctgtttgtctaacctctgatatttgggctggcaaggctaaggaagactatttaagtgtagttgctcattttgtgaattctcactggg

SEQ ID NO: 153662 - DNA, 101 bp, Zea Mays
ctcaatcactgccttggtcgtggtactagcaaacttcaaattggctgcaaagtacatgggtagcttaatgagttgcttatgtgatacattaaaagttaagc

SEQ ID NO: 153663 - DNA, 1616 bp, Zea Mays
tctcgaacacgctcacgtgaactccagtcggggtctagcggcaattcttaccctcacatgcacacctcctcttcaatcgaactcctgagaattagcgcagctagatagattactcgcggctatctggattctggactcgtggttacacgatgaaccgagcagcagcataaaggggccatcagaaagacggctttgcttccgttctcttctcttttgtttgccacgatgctgccgtcccgcaggaagagtgccgtcctcggcgtcgtcgcgttgtcctcctccgtcctcatcctgctccacgccttctctctcccggcagcctctgcgctctccgtcggcctggcgcggcgccacaggcacgatgccacgcccgggctggccgccggcggctgcgacgtcttcagcggcagctgggtcctcgacggcggtagctcggcctcggcggcgtacaccgggtacaactgcccgctcatcgacgcggagttcaactgccagctctacggccgcccggactccgactacctccggtacctctggaagccggccggctgcgagctaccgaggttcgatggcgcggacttcctgacgcggatgaaggggaagacggtgatgttcgtgggcgactcgctggggcgcaaccagtgggagtcgctcgtctgcctgctgcacgccgccgcgccgcagtcgccggcgcagctcgtctccgcggaccctttgtacacctacaagttcctggagtaccaggtgacggtatccttctaccgcgcgccgtacctggtggacatcgacgtggtccaggggaagcgggtgctgatgctggacgacatctccgagaacgccgagtcgtggcgcgacgccgacgtgctctccttcaactccggccactggtggacgcacaccggctcgatgcaggggtgggactacatgggcgagtctgggcgatactacgaggacatggaccgcacggtggcgttccagcgcggcctcaccacctgggccagctgggtggacctcaacctcgatcaagccaagacccgtgtcttcttccagtccatgtcgcccacgcactacagctcgaaggaatggcccaacccggtgtcgaagaactgctacggcgagacggcaccggcgaccgggctcaactcgaccggccaggcctcgggccaggaccaggtgatccaggccgtgctgcggggcatgaagagccccgtccgtctcctcgacatcacggcgctgtcggcgatgcggaaggacgcgcacccgtcggcatacagcggcgacttctcgccggcgcagcgcgccaaccccggcgccggctccgttgactgcagccactggtgccttcccggcctcccggacacctggaaccagctcttctacacactcctcttctacaaatagcagtgacaccgcgatcgacacagaagaaagtcatccaaatccaactgtacacctagcagctcgccagccattcgttttttttcgttgtgtttgtgtgtaaaactattgtgacgtcgttgcatcacaggagtatacacaattagttggcgggagaaatgcgtcgataacgtttaaataaaagtgaagaacgtacaatctcggcatcaattgaacgt

SEQ ID NO: 153664 - DNA, 101 bp, Zea Mays
cacatggagtctggctgaactcgtacaacaaccaacatttgctttagttcttactcaaagcacatctaatctaagaatgaatgcccaatacaacgacctag

SEQ ID NO: 153665 - DNA, 2134 bp, Zea Mays
accatggccccgcaacgcagtcctatgattcccgccttaattatatgctcgccgcaaccactaccaccaccgatactgaaaacaaagagcagctgcaaataaatcgataagccgtctcacaccttgagcctgcaacaagctagcattgctgcatgccagcatccacgtagcatctgagcttcatggttcagattcagatagcagcggtgaagcggatgaaggggcgggccccgctgtcagtggtggtggcaatcatcggcgggctggctctagcgggcgtcatcttcaccgacgacctccgctcactcactgagatcatggagaagaaggggaaagcgaaggagcacaagaggacgacgtctctacatgccgggacgacgacgaggaagatgccgctaacgccgccgccgcagccggcgaaggcagcgttcgacccgagccggtgcagcgtgacggaggggtactgggcgtacaacaggtccaaggagctgctttacacggaccaaacatgcccgttcatcgacaggcaggtctcttgccagaggaacggcaggccggacagcgactacctgcgctgggattggcacctagacgactgcagtctcccaaggttcgacccggtggcgttgctggagacgctgcgggggaagcggatgatgttcgttggcgactcgctgcagatggggcagtggctctccatggtctgcctcgtcaactccgccgtgccctacaccgcgcggtccatggagcgcagcaccaccctgtccgtcttcaccgccacggagtacaacgcgacgatcgagttctactgggcgccgtacctggtggaggccaactccgaccgcaacatccggctgggggccgacggccgcgtgctccacgtcgacgccgtcgagctgcacgctaggcactggaagggcgtggacatcctcgtcttcgacagctacgtgtggtggatgaccggcagcaggatcaaatcagtgtgggggtcgttcggggacgacgggtacgaggagctggacgcctgggtcgcgttccggcttggactcaagacatgggccaactgggtggacgccaacatcgatcccaacgccacaagggtcttcttcatgtcgatctccaccacgcacatgaggagcgaggactggggccgggagggcggcatccggtgctacaacgagacgttgcccgtcacgcggaaggggtactggggcagcggcgcggaccggcggatgatggaggtgatgtccgacgtggtgggccggatgcgggtgcccgtgacgctgctcaacgtcacgcagctgacggagcaccgcgtcgacgcccacgtctccgtgtacaccgagaccggcggcgagctgctcaccgacgcgcagagggccgacccgcagacgtacacggactgcatccactggtgcgtgcccggcgtgccggacacgtggaaccagatcctctacgcgcacttgtagcagcaggttcggtcacagtcacagccgcgagaacgaacaacggggacacgtaccgaaatccagctgggaataattttagcggtaggtcgtcgtccggccgagttcaattcagagatgatagatccagttcaaatcatcgctcggacagaaaatgcctgagcttgtactgctctgctttgtcacacaggcagagcgcgtcacgcacgcttgctcacacacatacaatacacacggacacaccttttcctaaagacgtacagatacgatcgaggcactacacagacacgtacgctggtgacacgtaacaatagcacgtgctgccgcgccgggccgggattcgatatatatggccggccggtgggcacgcggcaggtacgccacacctaccagtcgttcgttcgtccctatcctccagttcattactgttacaccgcgatggcgacagcgacgtcgttgccgttgaccgtgccgttcgccgcgccgtgcccgtcgccgttgaccaccgccagcttgtctccggtgcggtcggtggcggcggagtcgtgggaggagatgaagcggccggaggggtcgttggaggccttccactgctccacccactcgatggccgcgggcgtgctgcaggcgatgctcgggccccacggcaccgtctccctcgccgagtc

SEQ ID NO: 153666 - DNA, 1149 bp, Zea Mays
aggctggctggaagctgaatcaatcacctgagggaagagcctctcgaatatcatccggtagtagtaggcctccttgttgacgggcgtgttgtacgggaacatctgggcggcgctgttcatcatctcatccgtcacctggacatgggggggaacgtcagcgctggttagctaacttcgacgacgaccatcaacctgctgttcggtgaaggctttgagtccatcgatccagttgtagcccactccgtcactgaactgttctttctgcctgtacagaatatgctgcggaggatgcatggcacagaggcgtcagttcaggcttgaaaacacacagacacagaggtaaacgaccagccttctctgaagatgtccttacctcgggcaggtaagggtgctcctcgtcgtcgaacgccttcctcaggacccacttctcgatgcgacccaggttcttgtctaccattttccattcggggtccatgcccatcgcgacgtcgacgaactccttgtcgaggaacggcacgcggacctccaggccccacgccgacgtcgccttgttggcgcgcaggcagtcgtactggtgcagggccttcaccttgcggcaggtctccctgtggagctcctccctgttgggggcgaagtggaagtagaggtagccgcccaggagctcgtcggagccctccccggacagcaccatcttcacgcccagcgacttgatcttgcgagccatcaggaacatgggcgtgctggcccggatcgtcgtcacgtcgtacgtctcgtcgtggtagatcacctcctcgatcgcgtcgatgccgtcctatggatgatggcccatttttgtaatttgtttgccactcgtcagcctacgtcacgatctcgccaaaagcgagcgcgcgcgcgaatgatttacttgcctgtacggtgaaatggaactcgtgatgggtggttccgaggtagtcagcgacctctcgtgcggccttcaggtcaggggagccctgaaacgtacgtgccgtcagcgtcccgtcccgcgcgcgattctatccgagacaaataagacacgcgcaccaccagtgccaaaaaaaacgaaacaaaacctcgaggccgacgacgaaggagtggagctctgtgccgaactttccggcggcgtcggtcttg

SEQ ID NO: 153667 - DNA, 399 bp, Zea Mays
atgcgagccctcctggcctgggagcagtcggagcatccgagcacggctaagatgccacacatgacgccgacggagcaattcagcggctttttgtggggaggaggagacgagacgctgagcgctcgtgctgcgagtgggatgcgggaaccaggggagaatggctgcagttttataggcgggggcgcgcgcggctccgggacctcgcgtctgcgagcgacccccgccgggagcgctccctggacacgcggcgggtgtcggttcggcgagctccgtgcgcggcaggagcttatccgttcgggatgcagcggggccgagtcagcgtggggccccgagcccgcgtcagccggggtcctggccatcggatctaccttccacggctgggcgaggttctgggagtag

SEQ ID NO: 153668 - DNA, 219 bp, Zea Mays
aggtgtgttattgtagaagtagaagagaatcgtaccatttgtcatgtcaagtggatcttcattgccatctaggcgaaacaactttaattctttgtctaaagatctagaccttccttcagagcaaggtggtctatctattgttgtacttggggcttctggttaccttgctaagaagaaaactttcccagccctctaccacctctttgatcaggtatgaac

SEQ ID NO: 153669 - DNA, 2104 bp, Zea Mays
tccggtccgagtccaccgcaccgcgtgcggcggcgtgccgatctccggctcgcctgttacggtggcctcgcgcgcccggtataaaagtacttggattctctcagcctgccctgacaagccaggccactctaccaccgcacgctcaactcaaacccccgtcccgaacgcagaagaccggcggcagcggcgggggtgtgtgtgtgtggactggactgtaaccaattgccatcaatccaggcatccatccatccacccgccccgctgacggcggcaatggcccggctcgtgctctccgagtgctgcggcctcgcgccgctccgccgcctgcgcgccggccggggcgccattgcggcgccgtcaccccccgcgctctccgcggcgccgcgccgtcgtcccgcgtccgcgtccatccaccgcgactgggcgctccgcgtctccgcgcccacccgcctcgcctccgccgccgtcgaggaggacaagccgagcgccgcgccggggcaggaggagggcgcggcggccggcggggagttcgacccgggggcgccgccgccgttcgggctggcggagatccgcgccgccatccccaagcactgctgggtcaaggacccctggcgctccatgagctacgtgctgcgcgacgtcgccgtcgtcctgggcctcgccgcagcggccgcgcgcctcgacagctggctcgtctggccgctctactgggccgcgcagggcaccatgttctgggcgctcttcgtcctcggccacgactgtggacacgggagcttctcgaacaaccccaagttaaacagcgtcgtcggccacatactccattcctccattcttgtgccataccacggatggaggattagccacaggacgcaccatcaaaaccacggtcacgttgagaaggacgagtcctggcacccgctaccagagaggctgtacaaaagcctggactttatgactaggaaactgcggttcaccatgccgttccccttgctcgcgttcccgttatacttgtttgcgaggagtccagggaagtcaggatcacacttcaacccaggcagtgatctgttccaacctactgaaaagaatgacatcataacatcgacggcgtcctggctggccatggttggtgttctggccggtctcacctttctgatgggtcctgttccgatgctaaagctctacggagtcccatacttggtaagagcggcatgccctcctcttcggcccaacttctgcaaaaaaagataatttgaatgggtggtgtctgtggtgctgtaaatttatgttcctgctggtgtgtgcaggtatttgttgcttggctggatatggtcacatacttgcaccatcatggccacgaagacaagcttccctggtaccgtggaaaggagtggagttatctgcgtggaggactgacgacgctcgaccgggactacggatggatcaacaacatccatcacgacatcggaactcatgtcatccatcacctcttccctcagatcccgcattaccatctcatcgaggcgaccgaggcagcaaagccggttcttggcaagtactacaaagagccgaagaagtcgggtgctctgccgtggcacctattccgggtgctggcacagagcttgaagcaagaccactatgtcagtgataccggagatgtggtctactaccaagctgagtcgaaaacgagcacctctgcactaaaatccgattgacagggagtatagagcgtagcgtgttcttcatttttctcggggaggggctgtgcctgaagacctgaccagcctccacctctgattagcgtgagtgggtacgtcgactgaagaatgtaagctggcgaagtagtaccatgtatgtatggagagggttaaatgtaattctttccaatggtccaaggcggatgctgcttccgatgtagcagcatgcgattctttggacaagaggtatactattacagtgaagagtgaaaaaaagagagagttagctacatagaaagctttctgagctctatacgtactacctccgttctcagatatttttgtcgtcagctcggtcatttttgaactaaacggcgataaataaataaaaagaacggaggagtatatct

SEQ ID NO: 153670 - DNA, 1999 bp, Zea Mays
tccggtccgagtccaccgcaccgcgtgcggcggcgtgccgatctccggctcgcctgttacggtggcctcgcgcgcccggtataaaagtacttggattctctcagcctgccctgacaagccaggccactctaccaccgcacgctcaactcaaacccccgtcccgaacgcagaagaccggcggcagcggcgggggtgtgtgtgtgtggactggactgtaaccaattgccatcaatccaggcatccatccatccacccgccccgctgacggcggcaatggcccggctcgtgctctccgagtgctgcggcctcgcgccgctccgccgcctgcgcgccggccggggcgccattgcggcgccgtcaccccccgcgctctccgcggcgccgcgccgtcgtcccgcgtccgcgtccatccaccgcgactgggcgctccgcgtctccgcgcccacccgcctcgcctccgccgccgtcgaggaggacaagccgagcgccgcgccggggcaggaggagggcgcggcggccggcggggagttcgacccgggggcgccgccgccgttcgggctggcggagatccgcgccgccatccccaagcactgctgggtcaaggacccctggcgctccatgagctacgtgctgcgcgacgtcgccgtcgtcctgggcctcgccgcagcggccgcgcgcctcgacagctggctcgtctggccgctctactgggccgcgcagggcaccatgttctgggcgctcttcgtcctcggccacgactgtggacacgggagcttctcgaacaaccccaagttaaacagcgtcgtcggccacatactccattcctccattcttgtgccataccacggatggaggattagccacaggacgcaccatcaaaaccacggtcacgttgagaaggacgagtcctggcacccgctaccagagaggctgtacaaaagcctggactttatgactaggaaactgcggttcaccatgccgttccccttgctcgcgttcccgttatacttgtttgcgaggagtccagggaagtcaggatcacacttcaacccaggcagtgatctgttccaacctactgaaaagaatgacatcataacatcgacggcgtcctggctggccatggttggtgttctggccggtctcacctttctgatgggtcctgttccgatgctaaagctctacggagtcccatacttggtatttgttgcttggctggatatggtcacatacttgcaccatcatggccacgaagacaagcttccctggtaccgtggaaaggagtggagttatctgcgtggaggactgacgacgctcgaccgggactacggatggatcaacaacatccatcacgacatcggaactcatgtcatccatcacctcttccctcagatcccgcattaccatctcatcgaggcgaccgaggcagcaaagccggttcttggcaagtactacaaagagccgaagaagtcgggtgctctgccgtggcacctattccgggtgctggcacagagcttgaagcaagaccactatgtcagtgataccggagatgtggtctactaccaagctgagtcgaaaacgagcacctctgcactaaaatccgattgacagggagtatagagcgtagcgtgttcttcatttttctcggggaggggctgtgcctgaagacctgaccagcctccacctctgattagcgtgagtgggtacgtcgactgaagaatgtaagctggcgaagtagtaccatgtatgtatggagagggttaaatgtaattctttccaatggtccaaggcggatgctgcttccgatgtagcagcatgcgattctttggacaagaggtatactattacagtgaagagtgaaaaaaagagagagttagctacatagaaagctttctgagctctatacgtactacctccgttctcagatatttttgtcgtcagctcggtcatttttgaactaaacggcgataaataaataaaaagaacggaggagtatatctta

SEQ ID NO: 153671 - DNA, 1014 bp, Zea Mays
acagcgtggtagtggtgctaaattcctgccatgcgggttcatgtgtgttatgtagtttgcgaggagtccagggaagtcaggatcacacttcaacccaggcagtgatctgttccaacctactgaaaagaatgacatcataacatcgacggcgtcctggctggccatggttggtgttctggccggtctcacctttctgatgggtcctgttccgatgctaaagctctacggagtcccatacttggtatttgttgcttggctggatatggtcacatacttgcaccatcatggccacgaagacaagcttccctggtaccgtggaaaggagtggagttatctgcgtggaggactgacgacgctcgaccgggactacggatggatcaacaacatccatcacgacatcggaactcatgtcatccatcacctcttccctcagatcccgcattaccatctcatcgaggcgaccgaggcagcaaagccggttcttggcaagtactacaaagagccgaagaagtcgggtgctctgccgtggcacctattccgggtgctggcacagagcttgaagcaagaccactatgtcagtgataccggagatgtggtctactaccaagctgagtcgaaaacgagcacctctgcactaaaatccgattgacagggagtatagagcgtagcgtgttcttcatttttctcggggaggggctgtgcctgaagacctgaccagcctccacctctgattagcgtgagtgggtacgtcgactgaagaatgtaagctggcgaagtagtaccatgtatgtatggagagggttaaatgtaattctttccaatggtccaaggcggatgctgcttccgatgtagcagcatgcgattctttggacaagaggtatactattacagtgaagagtgaaaaaaagagagagttagctacatagaaagctttctgagctctatacgtactacctccgttctcagatatttttgtcgtcagctcggtcatttttgaactaaacggcgataaat

SEQ ID NO: 153672 - DNA, 1258 bp, Zea Mays
tagtatatatatcatcaaataccatgcgtgagttatgcacgcagtagggcgtcttgtcttaactcttaagccagctccgatgacaagctgcttcaacagcggcgccggctggccggagcccgtggtgcgcgtccaggccgtgtcggacacctgcggcgacacgatcccggagcggtacgtgaagcctctgccggagcggccccggctctcgccagcctccgatgtcggcggcggccggaacatcccagtcatagacctgtcaatgccagacgtggacgcgacatcccgtgctgtggcagcggcgtgccgggagtggggctttttccaggcagtgaaccacggcgttcgcccggagctgctgcgcggcgcgcgcgcggcgtggcgtggcttcttcaagcagcccgcggaggtgcgcgagcgctacgcgaactcgccgtcgacgtacgagggctacggcagccgcctcggcaccgctaagggaggccccctggattggggcgactactacttcctccacctcctgccgtcgtccctcaagaaccacgaaaagtggccttccctcccttactctctacggggcacgacggaggagtatggagaggaagtgttgcatctgtgccggagggtgatgcggctgctttccagcgggctgggactggaagccggaagactgcaggcggcgttcggcggagagggtggcgaaggggcgtgcttgcggatcaacttctacccgcggtgcccgcagccagaactcacgctgggcgtagcggggcactccgaccccggcggcatgaccatgctgctggtcgacgaccacgtgaagggcctgcaggtaaggggacccgacggacagtggatcatcgtcgaccccgtccccgacgccttcattgtcaacatcggtgaccagatccaggtgctgagcaacgcggcatacaagagcgtggagcaccgagtgacggtgagcgccacggaggaccggctgtctatggctttcttctacaacccgcgaagcgacctgcccatcgcgccgatggcggagctggtggggccaggccggccggcgctgtacccggagatgaccttcgatgagtaccgcgtcttcattcggcaacgcggtttggccggcaaggcgcaacttgagtccatgcagaaagccgccgccaccgccgccgacggcggccgccgccagctcgtccaccagctagcagctactgaacatatcatctccagggccagctggtctgttagcgatgcataa

SEQ ID NO: 153673 - DNA, 126 bp, Zea Mays
tcatcgtttcgaaagaatctaggcaaatctagagagggaaaattaggccttgtcaacatccggggaaggcaatacctcctgttgccaccaagacgcaattaaggatcctagtaagaaaagctacca

SEQ ID NO: 153674 - DNA, 1243 bp, Zea Mays
gaaagatcggcgctcgctttaaccatttcccttcgttttgtttgactgccgtgcaatgaaaaaaagcagcgagctttgcttcggcaatacgcgacgcgacccgacgcgaagcaaggatgatggatggctgtgtggtacctaacctacctgatctccctgatctggtcgaagaggcggaggtccagcacgtcgtcgaggcccgcgaagaggacgacgccggcgaggcggtggtgctcgacgtgcccgagcgccacgttgcgctggtggtggcgctccttgcccgcgcccgcggcggtgaagttgtccctgtacgtcaggtggcggtacatgagccccgtggcgcgcagctgccgcgccgtggccggcgcgtccggggcggcctccacgaccacccacagcagcggcggcgccaccagccgcagcgcgtgcgccgtccgcgtcagcgcggcggcccgctcgccggacgccacgggcgtcgactccgtcgtcgtgacgaccaccaggagcgggcgcggagacgctgcccggtcgtagccaggccccgcgccgtgcgccagcaggctccggttcaaggccccgcccgccggcagcgcccgtaccacgtggctgctgctgctgctgctgcccgccgccgccgccgcggacgtccagtcggacacggacgacggcgcgaagccggtgaagaagcccatgacgaagcagagggaggaatgcagcagcgccttcttccacagctgcgacccctgcttcttgccccgccaaccggcgccaccgtggtccgtggacgaccccatcacagaagccaaccagcagaacggcgcctctgcttagctcctcgttcgagctaccgggaccgggacctggcctcgtgtcgcttaatcggcgtcgcgtcgtgtcaaagccctgggctatgcaagcgtcgcctaaataacgaggtagcttagctagacgcctagaccgacgggccgcagcagcaagcgccaagcggccaagcggtgttggggaggcaagtgaatttggtagtggtggtggtttaaaaagggcgggaggtggcgagcaggggaggagcgccgcgaggagacgagacgagaggacaggatggcagcaggctagagcggagcggacgaggggagaggatgtcgtgttggtgtcacgctttttttcttccctttatcatcccggagcagcagcaatcataaggtgtgccgtgtgcgagcaagtgaggcactaattacacttcccc

SEQ ID NO: 153675 - DNA, 928 bp, Zea Mays
agcggcagatcatgctctcatcgtacaaatagcagtcagtagtctactcattcaattcgctccggcctctcgatcgatctgctgccatggacgactacggcaacgcgatcgtcgtcacgggcacggcggctccgctcaaatacaactgtcgctccgtgtcgccgccgtcgagcgtgtcgtcgtcgtgctcgccgccaccgcctcctcctcctcctactcctcctgccgccgtccaggtggtggtgggcaacgtggcgccgaccgtcgtcctgagcccgtgcgcggcgtgcaagatcctccggcgccgctgcgccgacggctgcgtgctggctccctacttcccgccgacggagcccgccaagttcaccacagcgcaccgcgtcttcggcgccagcaacatcatcaagctcctccaggacttgccggagagctcgcgcgcggacgcggtgagcagcatggtgtacgaggcggaggcgcggctgcgggacccggtgtacgggtgcgcgggggcggtgtgccggctgcagaggcaggccaacgagctcaaggtgcagctggcgcgcgcgcaggccgacctgctcagcgcgcaggcgcagcacgccgacctgctagccctcttctgcgtcgagatggccaaccgccgcggcaaccggcagcagcagcagcagccgtcgccgccgacgacgacggtggacggcggtggcggaagcgagttcggcggcgcggcgtacgggcagacgttttacgactcggacgacctggactcggccacgtggccggatcacgaagcccagctctggacctagctagctgatgggtgcatggatagtaggtaactctcgagtgctacaggtactgcttgtgctgccttgtgtgcagcagcaccaccacatgcatgcatatacgccgtacgtaggggtggtaatgg

SEQ ID NO: 153676 - DNA, 162 bp, Zea Mays
aaaagatccaaactttagatatatatcatggaccccacatgtcattgactcatgtggacccacatgtaagtgagatagtaatggtatgaatccaaagtggtgatcttttaatggtatggatccaaatttcccttttatttacggctgccgaactctatctcc

SEQ ID NO: 153677 - DNA, 1316 bp, Zea Mays
ccggattataaacacagcgcctctcctcactcagtcgcctcctctccgtctgcgttcctgtcgtggcccacatctagccgtcgtcgtcgtcaagaaaggaggcgccacaatgacgatgatggcgcctcatccgcagccactgccgctggcacagccgccggcgttcggggacaccacgctcaccaaggtgttcgtgggcggcctggcgtgggagacccacgagggcgccctccgcgggcacttccagcgctacggcgacatcctcgaggccgtcatcatctccgacaagctcaccggccgctccaagggctacggcttcgtgacgttcaaggaggcggacgcagccaagaaggcgtgcgaggatgccacccccgtcatcaacggccgtcgcgccaactgcaacctcgcctccctcggcgccaagccgaggccccagccgctgcagcacgtcctccgtccctcgcccccgcacgcgcacgcgcttccctctcctcaccagcccacgccagccatcgcggtgggatccaggagcgtgtcgccggtgccatggtactaccacccctccacgacgcgccctccgccgccgccggccgcgcaccagcagtaccacggcgtgctcccgttctaccccgccgccgccacctacgggtactccccgaactacgtcacggacctgagctacaatacgaaggtaggccaagcggcagctgccggcacggcggccgggtcctacctacagctacaggggcacttggcgtaccaggcggcgccagctcagggcggcatggtgccggtgtacccgttctaccactacccgtaccacgcctcgcactcgcagggcctgggcgtccccgccgcgcacttcctccccccggtctccgccgccgccgtcgtctcctccaagcccaccgtcgtggccactcccaaagcagtggagtggagcgggtgacgggttgcagctgaaggcacgaggcgatggtggtggtggcggcggcgactatgggcggcgcaatgaaaggcgctctgctctgttaacaagctgcacatgaagggtgtcggatgccgaagcgacgcaaggccgcattagttacattcattcaattccctctaacttcgaccacagtaccggcaacaacagtctgtaacaaacaaatgactggattcgtctctcgtttacctctgtatttttccaatggtaaacccgtttatcagtgtctgtagtgtagtagtccgatcgctgcaggtgacagcggacctcaataaaccgtcatagtatttcgccctattctatggtcgaaatatctcagttaaaaagt

SEQ ID NO: 153678 - DNA, 557 bp, Zea Mays
tttgtgcttaaattcagtgtcaatatattaattaggccctggaacctggatcaaagtctggtacaggtagtcttcagaacaaaagaaaatggaagttacagtagccgatgaatagaagaggcaatatcccaagagctaaacgtactaaacaatgctggcagtctgagccacacttctctaacacaaaaaatatatatattctatccatcaatgccattaaaaaaaatgcctcccacatgccaatttaatactacaggtattattggacttctacccttgatgtccaattgctgaggcggtacggcattggatttgttgtgatcgccaccggtgtagtttctcatcatatattagctctaggcgctggcaggacaaagaaatgatggccgtatttactgtcttctagggtggtcacggcttgttgctgcgctttttggattcactgtaaagaatgacgccaaaaactgtgagagtgtaaccgagcattcctgttatggacacaggattcctgaatatcatgattgagatgacgactgccacggcaccctttgcatttc

SEQ ID NO: 153679 - DNA, 716 bp, Zea Mays
acgatgcgtgctcaggcgctcctgagcgccgccggagcccctgttcatcttcccctaccgtctctctctcccccaacttctctccctccttccccatgatgcgcagcaccatttttcctctccctgatgctcgcaaccacccctgctcctgcgtctggagttccgccgtgccgagctcgtcccgccgtccacggtcgccgtgaacgcacggccggtgctcgatccccggcgaagcttgcccctgcgcggcggccatcgcagcctgctcgtcgccccctgcgtggtggcctgcggctagccagcgcgcggcggcccgctagcgtggcctgctcgcggctagcctggcctagccctgcgcgacgcttccctgcccgatgcgggtctttgcagcgtgggaaagtaggcctcgccgttgggccccaccaggcgatcgacatcctcggccgagttttcccgtggcggttccgttcgtatgcgcggtcgtctccttccgaggaggatgaagaggtaactgctctgtgattcgatctgcaggattctatgcgtagaattccatgtggccttctgtgtggtaggtggtcgaccaatgagaccgtgacacatcggctataatccgcaaaagattacttattcaatataattcacattgtaaatccgttttgacccgttacagatttcattagtttcgtaatgaaattgtctatgtgttagtaata

SEQ ID NO: 153680 - DNA, 443 bp, Zea Mays
aaattgattctcgtgtggagccgaaagatcgggagtcgtttttgtgaagaaaggtgggatctaaaaaaacctgctccaccctcccttaaaacagctcctcaaccaaccaaatatggacctccccttaaagtttgatcgaaattacccgcaattgacattggacaaaaacataacgagccaatttatggattaaacatttgagaccattttatgcactactatgatgggaatattttatatgttattgtttcatattttttccgtatatgcatcctacttattggtttgtaacaaagttgaactgcaaagggtaaaacagacaatcgccacagaccaccaactcttagaagacaagaatcaatttacttgccaaacggttttaaaaatgattctgattttctaggagaaatcaggaggatcagctcctcacgaggatcaggatc

SEQ ID NO: 153681 - DNA, 948 bp, Zea Mays
ttgctgttgccccttgccgtggaggcgtggcgtggacgtggagtgagtggggatggatcaggccggtggcacgctgctcgagaaatagtcagccggccagggccaccaaccgcgcgcctcatggtccaatcatgcgcgtccaaatgtgcatcctttctggccgcacgatcgctaggattaacggccacaatgcatcctacgagaagcttccctttctcccatcaatcctccggacctccgtcctataaaccgccggggagcgtggcggccattcgacgcaggcacccagacccagcagctattgtggtcgtccctcagccgcgtcgcaccgcatcgcattctacgattcgaagctctctctgctcgcagccatggcgaagaattacccaaccgtgagcgccgagtacagcgaggccgtcgagaaggccaggcgcaagctccgcgccctcatcgccgagaagagctgcgcgcccctcatgctccgcctcgcgtaagccttccctcccccgcgcgcgcatttccagatctttgtggggggggggggggggggggagccttttcggttgcctgatctgcagctcacgtttaatcgcgcaggtggcactccgcggggacgttcgacgtgtcgtcgaggaccggcggtcccttcggtactatgaagtgcccggcggaactggctcacggcgccaacgcggggctggacatcgcggtgcggctgctcgagcccatcaaggaggagttccccaccctctcctatgccgatttctaccaggtcggcccctgatctcgcatcgatctggttggatgattcgatctgcccgaatcgatgtgcgttttgaccgtgtcccttgctccctttctctctctgctcttctttgcagcttgccggagttgtggccgtcgaggtcaccggtgggcctgagatccccttccaccccggcagggagg

SEQ ID NO: 153682 - DNA, 1856 bp, Zea Mays
ttgctgttgccccttgccgtggaggcgtggcgtggacgtggagtgagtggggatggatcaggccggtggcacgctgctcgagaaatagtcagccggccagggccaccaaccgcgcgcctcatggtccaatcatgcgcgtccaaatgtgcatcctttctggccgcacgatcgctaggattaacggccacaatgcatcctacgagaagcttccctttctcccatcaatcctccggacctccgtcctataaaccgccggggagcgtggcggccattcgacgcaggcacccagacccagcagctattgtggtcgtccctcagccgcgtcgcaccgcatcgcattctacgattcgaagctctctctgctcgcagccatggcgaagaattacccaaccgtgagcgccgagtacagcgaggccgtcgagaaggccaggcgcaagctccgcgccctcatcgccgagaagagctgcgcgcccctcatgctccgcctcgcgtggcactccgcggggacgttcgacgtgtcgtcgaggaccggcggtcccttcggtactatgaagtgcccggcggaactggctcacggcgccaacgcggggctggacatcgcggtgcggctgctcgagcccatcaaggaggagttccccaccctctcctatgccgatttctaccagcttgccggagttgtggccgtcgaggtcaccggtgggcctgagatccccttccaccccggcagggaggacaagcctcagccgccacctgagggccgtcttcctgatgccaccaagggttctgaccacctgaggcaagtctttggcaagcagatgggtttgagtgatcaggacattgttgccctctctggtggccacaccttgggaaggtgccacaaagagcggtctggttttgagggggcctggactacgaaccctttggtctttgacaactcttacttcaaggaacttctgagtggcgacaaggagggccttcttcagctcccaagtgacaaagccctgctgagcgaccctgtcttccgccctcttgtggagaaatatgctgcagatgagaaggcattctttgatgactacaaagaggcccacctcaagctctccgaactggggtatgctgatgcttaaatggtccatatcctggagcgggacacaaactgctgcctgtatggactcgtgcgattcagggtgaaccatcagattgtctagtgtcttctttgtaataaatttatctgttcttggtactttgtctatggttgaatcggaacccattttccgtttgcctagattcttaatttctggtgctgtatccagctgaaactagtagatctatgatcttgtggctgcagcatgttcttgtcacttttatctggtctccgttggttcggttcacaggttgtgtgctttaaaaggctgtgcttaagtcctgcaattcgagtccaccaaactgtagggtgcaagtcgagattttattagtgatgcaagttgctggtattggtgcattatcgggctaatacgcttgcgttgccttctgattttataagtgatgtaaattgctggttttaacgtgcattacctggtgggctggttctataactgatgcaaattcctggttttaacttggtgcattaatggtgcgtttggcaagcaggatctgctgtcatgcatttgtggcgcacccgtttcaagcgtgaaacgttcaacacttctacttgtcaaaagtcgtgcctaaaacaatctgcttgttacgttttctcgatttctgcttgtagggttgcaatggccagacgctagttttgcagtgattctggttttcaatttctgaaatatgaattattgctctaatccatttgttacata

SEQ ID NO: 153683 - DNA, 2013 bp, Zea Mays
ttgctgttgccccttgccgtggaggcgtggcgtggacgtggagtgagtggggatggatcaggccggtggcacgctgctcgagaaatagtcagccggccagggccaccaaccgcgcgcctcatggtccaatcatgcgcgtccaaatgtgcatcctttctggccgcacgatcgctaggattaacggccacaatgcatcctacgagaagcttccctttctcccatcaatcctccggacctccgtcctataaaccgccggggagcgtggcggccattcgacgcaggcacccagacccagcagctattgtggtcgtccctcagccgcgtcgcaccgcatcgcattctacgattcgaagctctctctgctcgcagccatggcgaagaattacccaaccgtgagcgccgagtacagcgaggccgtcgagaaggccaggcgcaagctccgcgccctcatcgccgagaagagctgcgcgcccctcatgctccgcctcgcgtggcactccgcggggacgttcgacgtgtcgtcgaggaccggcggtcccttcggtactatgaagtgcccggcggaactggctcacggcgccaacgcggggctggacatcgcggtgcggctgctcgagcccatcaaggaggagttccccaccctctcctatgccgatttctaccagcttgccggagttgtggccgtcgaggtcaccggtgggcctgagatccccttccaccccggcagggaggacaagcctcagccgccacctgagggccgtcttcctgatgccaccaagggttctgaccacctgaggcaagtctttggcaagcagatgggtttgagtgatcaggacattgttgccctctctggtggccacaccttgggaaggtgccacaaagagcggtctggttttgagggggcctggactacgaaccctttggtctttgacaactcttacttcaagtgagtgtatgtcttgtttactattgaaaagcaactgcatttagttaagaaatacttaaaatttgtttacctttgttatgtcattactgggcagctgaatgctgtgctagaaattaacagccatcccatatatcctactattcccatattttcatagggaacttctgagtggcgacaaggagggccttcttcagctcccaagtgacaaagccctgctgagcgaccctgtcttccgccctcttgtggagaaatatgctgcagatgagaaggcattctttgatgactacaaagaggcccacctcaagctctccgaactggggtatgctgatgcttaaatggtccatatcctggagcgggacacaaactgctgcctgtatggactcgtgcgattcagggtgaaccatcagattgtctagtgtcttctttgtaataaatttatctgttcttggtactttgtctatggttgaatcggaacccattttccgtttgcctagattcttaatttctggtgctgtatccagctgaaactagtagatctatgatcttgtggctgcagcatgttcttgtcacttttatctggtctccgttggttcggttcacaggttgtgtgctttaaaaggctgtgcttaagtcctgcaattcgagtccaccaaactgtagggtgcaagtcgagattttattagtgatgcaagttgctggtattggtgcattatcgggctaatacgcttgcgttgccttctgattttataagtgatgtaaattgctggttttaacgtgcattacctggtgggctggttctataactgatgcaaattcctggttttaacttggtgcattaatggtgcgtttggcaagcaggatctgctgtcatgcatttgtggcgcacccgtttcaagcgtgaaacgttcaacacttctacttgtcaaaagtcgtgcctaaaacaatctgcttgttacgttttctcgatttctgcttgtagggttgcaatggccagacgctagttttgcagtgattctggttttcaatttctgaaatatgaattattgctctaatccatttgttacata

SEQ ID NO: 153684 - DNA, 1693 bp, Zea Mays
ttgctgttgccccttgccgtggaggcgtggcgtggacgtggagtgagtggggatggatcaggccggtggcacgctgctcgagaaatagtcagccggccagggccaccaaccgcgcgcctcatggtccaatcatgcgcgtccaaatgtgcatcctttctggccgcacgatcgctaggattaacggccacaatgcatcctacgagaagcttccctttctcccatcaatcctccggacctccgtcctataaaccgccggggagcgtggcggccattcgacgcaggcacccagacccagcagctattgtggtcgtccctcagccgcgtcgcaccgcatcgcattctacgattcgaagctctctctgctcgcagccatggcgaagaattacccaaccgtgagcgccgagtacagcgaggccgtcgagaaggccaggcgcaagctccgcgccctcatcgccgagaagagctgcgcgcccctcatgctccgcctcgcgtggcactccgcggggacgttcgacgtgtcgtcgaggaccggcggtcccttcggtactatgaagtgcccggcggaactggctcacggcgccaacgcggggctggacatcgcggtgcggctgctcgagcccatcaaggaggagttccccaccctctcctatgccgatttctaccagcttgccggagttgtggccgtcgaggtcaccggtgggcctgagatccccttccaccccggcagggaggacaagcctcagccgccacctgagggccgtcttcctgatgccaccaagggttctgaccacctgaggcaagtctttggcaagcagatgggtttgagtgatcaggacattgttgccctctctggtggccacaccttgggaaggtgccacaaagagcggtctggttttgagggggcctggactacaaagaggcccacctcaagctctccgaactggggtatgctgatgcttaaatggtccatatcctggagcgggacacaaactgctgcctgtatggactcgtgcgattcagggtgaaccatcagattgtctagtgtcttctttgtaataaatttatctgttcttggtactttgtctatggttgaatcggaacccattttccgtttgcctagattcttaatttctggtgctgtatccagctgaaactagtagatctatgatcttgtggctgcagcatgttcttgtcacttttatctggtctccgttggttcggttcacaggttgtgtgctttaaaaggctgtgcttaagtcctgcaattcgagtccaccaaactgtagggtgcaagtcgagattttattagtgatgcaagttgctggtattggtgcattatcgggctaatacgcttgcgttgccttctgattttataagtgatgtaaattgctggttttaacgtgcattacctggtgggctggttctataactgatgcaaattcctggttttaacttggtgcattaatggtgcgtttggcaagcaggatctgctgtcatgcatttgtggcgcacccgtttcaagcgtgaaacgttcaacacttctacttgtcaaaagtcgtgcctaaaacaatctgcttgttacgttttctcgatttctgcttgtagggttgcaatggccagacgctagttttgcagtgattctggttttcaatttctgaaatatgaattattgctctaatccatttgttacata

SEQ ID NO: 153685 - DNA, 1377 bp, Zea Mays
gcgcctcatggtccaatcatgcgcgtccaaatgtgcatcctttctggccgcacgatcgctaggattaacggccacaatgcatcctacgagaagcttccctttctcccatcaatcctccggacctccgtcctataaaccgccggggagcctctctctgctcgcagccatggcgaagaattacccaaccgtgagcgccgagtacagcgaggccgtcgagaaggccaggcgcaagctccgcgccctcatcgccgagaagagctgcgcgcccctcatgctccgcctcgcgtggcactccgcggggacgttcgacgtgtcgtcgaggaccggcggtcccttcggtactatgaagtgcccggcggaactggctcacggcgccaacgcggggctggacatcgcggtgcggctgctcgagcccatcaaggaggagttccccaccctctcctatgccgatttctaccagcttgccggagttgtggccgtcgaggtcaccggtgggcctgagatccccttccaccccggcagggaggacaagcctcagccgccacctgagggccgtcttcctgatgccaccaagggttctgaccacctgaggcaagtctttggcaagcagatgggtttgagtgatcaggacattgttgccctctctggtggccacaccttgggaaggtgccacaaagagcggtctggttttgagggggcctggactacgaaccctttggtctttgacaactcttacttcaaggaacttctgagtggcgacaaggagggccttcttcagctcccaagtgacaaagccctgctgagcgaccctgtcttccgccctcttgtggagaaatatgctgcagatgagaaggcattctttgatgactacaaagaggcccacctcaagctctccgaactggggtgagtaaccattggttgcacaatgtgtgattggtcagtggaacaaatctgatcgtttactcttctggggtgcaggtatgctgatgcttaaatggtccatatcctggagcgggacacaaactgctgcctgtatggactcgtgcgattcagggtgaaccatcagattgtctagtgtcttctttgtaataaatttatctgttcttggtactttgtctatggttgaatcggaacccattttccgtttgcctagattcttaatttctggtgctgtatccagctgaaactagtagatctatgatcttgtggctgcagcatgttcttgtcacttttatctggtctccgttggttcggttcacaggttgtgtgctttaaaaggctgtgcttaagtcctgcaattcgagtccaccaaactgtagggtgcaagtcgagattttattagtgatgcaagttgctggtattggtgcattatcgggc

SEQ ID NO: 153686 - DNA, 1392 bp, Zea Mays
tgtgttacaaaatattgtattttgtgatcaattcaaggagtgcgacagataattcccaagggacaccctcttgagaacgcaccccttcacccgtatataaacagagttctcgctgcaataaagatatacgactgtcatttgtcattctctcgcttctcgtttttcactgcgcttcaacacgttatcagcacgactcgcgagatcagagaaacaaatcagagaaaaaaaagaggaacaagttgccgctagcaagatggaaaggagtggcttcgatgtccagaaacagtacgtgcgaagtatccaattcctttttgacttctacaaaatacgttgtagcactgatgatgtatgtgtagtgctgcttgtggcctctgcgcccacgctcggtcgccgtgccgacgacgcacacagtgggacccatgccagtgccatggtgctggggctgtgtgcccgcccgcgcgaataggagcctgcgcccgcgctgtgccgtgccatcgggggcctgcccgcgtgcgccgagcagccagggccgccgggaccaagtgctcatgcgccggggcaggccgcagctcgccgggcagccgcgcgccatggccgggccgccgcgcccgcgcctcggccgggcagccgcacacgccgtgtgccatggcaggccgccgcgcctgcgctgccggggtgccctgcacgcgctacgccgaggccgccgtctgggggcctacgcgctgcttggcccgcgcccgcgacgcaccggtggggctcggccgcctcgccgggatggccgcgactaaggctgcgctcgccagagacgggggtcaccaaccgccagggccgcgcccacgacgcgagccgccggggccagtgccgtcgtgcccacgcgccgaggttggggctggggccgcgtgcccgcgccaccagagggccgcaccatggcaccgacgtcggggccgcgcacccgctcagtggccgcataggtcgtgcccacgtgttcgcgctgttgagaccgcgccgagccgccgcgaagcccgtacctgggcatcgcgccctgcctgctgcaccaggacggccggccgccgccaggagatggagtggttgcaaccctaactgccagcactcctctagatgtctgggtcgtctagtgggccggttgaggaggttgcctagccaactgcctggctggaatcggcctgaatgggctacctgcggttgggctgaatcctttaccattttttctgattttctgcaattataatcagacgaacattgtgttcatttaaattactgttttcaacagtgttgagtatctaaatttaaatatttagattgcttattatatatgtaattgtacatacttgtctgtttttagtataaaaaatgcagacttgttagtgaatt

SEQ ID NO: 153687 - DNA, 1279 bp, Zea Mays
tgcaataaagatatacgactgtcatttgtcattctctcgcttctcgtttttcactgcgcttcaacacgttatcagcacgactcgcgagatcagagaaacaaatcagagaaaaaaaagaggaacaagttgccgctagcaagatggaaaggagtggcttcgatgtccagaaacagtacgtgcgaagtatccaattcctttttgacttctacaaaatacgttgtagcactgatgatgtatgtgtagtgctgcttgtggcctctgcgcccacgctcggtcgccgtgccgacgacgcacacagtgggacccatgccagtgccatggtgctggggctgtgtgcccgcccgcgcgaataggagcctgcgcccgcgctgtgccgtgccatcgggggcctgcccgcgtgcgccgagcagccagggccgccgggaccaagtgctcatgcgccggggcaggccgcagctcgccgggcagccgcgcgccatggccgggccgccgcgcccgcgcctcggccgggcagccgcacacgccgtgtgccatggcaggccgccgcgcctgcgctgccggggtgccctgcacgcgctacgccgaggccgccgtctgggggcctacgcgctgcttggcccgcgcccgcgacgcaccggtggggctcggccgcctcgccgggatggccgcgactaaggctgcgctcgccagagacgggggtcaccaaccgccagggccgcgcccacgacgcgagccgccggggccagtgccgtcgtgcccacgcgccgaggttggggctggggccgcgtgcccgcgccaccagagggccgcaccatggcaccgacgtcggggccgcgcacccgctcagtggccgcataggtcgtgcccacgtgttcgcgctgttgagaccgcgccgagccgccgcgaagcccgtacctgggcatcgcgccctgcctgctgcaccaggacggccggccgccgccaggagatggagtggttgcaaccctaactgccagcactcctctagatgtctgggtcgtctagtgggccggttgaggaggttgcctagccaactgcctggctggaatcggcctgaatgggctacctgcggttgggctgaatcctttaccattttttctgattttctgcaattataatcagacgaacattgtgttcatttaaattactgttttcaacagtgttgagtatctaaatttaaatatttagattgcttattatatatgtaattgtacatacttgtctgtttttagtataaaaaatgcagacttgttagtgaatt

SEQ ID NO: 153688 - DNA, 2767 bp, Zea Mays
cccagtttggaaacgcgtagcttccatctccactcccacagtcccgctcccccgccatggccttggccatgacctcctcgtccacgcagccaccgtcccctcaccaccgccgccgtcgccgctcgcaacctaccaccgccacccccaatgccaactccaaacctaaacccaaacccagggccaaggcgctccccctactctccgacgtcggcgtcggccgcgaccccgccgccatcaagtactacgcccgcgtcgcatctaacctcgcgggcgccggccgcctacgagacttcctcctagccgccgagggcctccgcgcagccgcgtgcaacgaccccagcttcgcggcccgcatcagcgcccgtctcctgtcgcgcggcgtcgccgccgctgtccgcgagcgcggactgcccttcatgctcgagttcttccgagacgccgagcgcgtgcgcgtgccggtagtcgagatgctcgacgccgacgcgtccaacgctgtcgccggcgcctgccggatgttgctggaggagcgacgaatggtggagttcgtggaggtcgtcgaggcgctagctcgatatggattctatgttcaagacatcgtgaaccccatggatgtactgaaaatatttgtcaagcagcgtgacccagatatagctataaggtatgcacgcatatttcctagttcccaacttttactctgcaataccatggaagcttttggaaaaagaaaggagttgaaaaatgctttattgatctttggagcccttaagaatcagcttggaggcatcaatatgtttgcatgccgaagtataatagatatatgtggccattgtggctcttctgtacaggctcgaattatatttgaggggctgcttgctgataagattactccaaatacctatgtcttcaacagcctaatgaatgttaatgcccatagcttgagctacaacttttcagtctacaagcatatgcaagtaatgcattttctactttattgttgctgttcatagaatcttggtgtccctcctgatttgacttcatataatattcttctcaagacatgctgcagtgtcagagaattcaacttggctcaagaaatttatgaggaaatgaagaaaaaggaacgtgatggccttttaaagctagatgttttcacatatagtacaatgatgaaggtgtttgcagatgcaaaaatgtggaagatggcttccaacatcaaagaggatatgcaagcaaacggggttcgtcttaacctagtaacatggtcatcgttaatcaatgcttatgcaaattctggtctggttgatcgtgcaatagagatcctcaaagaaatgataagggatggctgccaacctactgccccatgcttcaatattatccttactgcatgtgtcaagtcatgccaatatgatagagctttccgcttgttctacagttggaaggagtctggtatcaagatctctctatcctctgaacagaagagagttattgatggtggctttacattctgtaaagagtatcctaataatgacagtactatattggtggttccattcaggccaacagtcacaacctataacatcttaatgaaggcttgtggtactaatgcagaacgtgcaaagtctaccatgaacgaaatgaggcggaatggcctttgtcctgatcttattagctggtctatactcatagatatttatggatcttctcaaaatagggatggagctgttcaggcactaaggagaatgcagcgagttgggatgagacttaatgtctctgcatatactgttgctattaaggcgtgtgttgaaaacaaagatttgaagttagcactgcacttatttgaagaaatgaaaacacaccaactgaagcccaatttggtgacgtacaaaactctcctggcagcacgcatcaattatggatcactacaggaggtccaacagtgtttagcgatatatcaggagatgaggaaagcagggtttcaggcaaatgattattatctcaaggaattaatagtggaatggtgtgaaggagttctgtctagtcgcagtgataatcaagatttttacaatttggatctacaacctgagactgagaggaaagaatcgttcaacctgtttcttgagaaagtcgtaacagtcttgcaaaaagatactgatcagaaccaaattgtcgatgttcgtggcctttcaaaggttgaagctcgaattgttgttctctctgtccttcggaagatcaaagagcaatacctcctaggaagagtggtccaggatgatgtggttatcatcacgggtcatgagaagacatcaacaactgaagctgaaaccacaactagtgcagttgacgtcgtgcaggcaatagttactgttttgacggatgatctgggtcttgaagttttgattggacctggaagctgccctcccgtttcatcaaaacccaaagcaccgactaaatctagaagtaatttagagcaaatatccaaagaatttactaggagaccacagggaatgataaaaatccctatcaactcacttaaccattggttaaggaagaaagccgtgaggattgcagagtgacatttccttaaaggcttaaactacctttttggtccatttagtataccagtaaatcagcacagctattccaggattgggtgtacatatgaaaacaggttactgctcctggtattccaggcacactgacacgacttgaaaagggacttgttggcaggcaataaactgtgcttctgtgttgatttaatggtcgtgtttct

SEQ ID NO: 153689 - DNA, 2038 bp, Zea Mays
agattgattctgttgcatcacattttgccttttttgtggccggcctaatgtatctagttcttctaatttgctatgttctgcccaatttctgtctgctattgcatggttgttcatgttgttttaaattatattcactaaaacaatatttacactgcttttggttgttcctttgattcacttttccttcatccatgaccgaatatgttttataatcttatgcacagtgcagacacacagtgaccttaagctactgtttacaccattttgtgtttttgcagaatcttggtgtccctcctgatttgacttcatataatattcttctcaagacatgctgcagtgtcagagaattcaacttggctcaagaaatttatgaggaaatgaagaaaaaggaacgtgatggccttttaaagctagatgttttcacatatagtacaatgatgaaggtgtttgcagatgcaaaaatgtggaagatggcttccaacatcaaagaggatatgcaagcaaacggggttcgtcttaacctagtaacatggtcatcgttaatcaatgcttatgcaaattctggtctggttgatcgtgcaatagagatcctcaaagaaatgataagggatggctgccaacctactgccccatgcttcaatattatccttactgcatgtgtcaagtcatgccaatatgatagagctttccgcttgttctacagttggaaggagtctggtatcaagatctctctatcctctgaacagaagagagttattgatggtggctttacattctgtaaagagtatcctaataatgacagtactatattggtggttccattcaggccaacagtcacaacctataacatcttaatgaaggcttgtggtactaatgcagaacgtgcaaagtctaccatgaacgaaatgaggcggaatggcctttgtcctgatcttattagctggtctatactcatagatatttatggatcttctcaaaatagggatggagctgttcaggcactaaggagaatgcagcgagttgggatgagacttaatgtctctgcatatactgttgctattaaggcgtgtgttgaaaacaaagatttgaagttagcactgcacttatttgaagaaatgaaaacacaccaactgaagcccaatttggtgacgtacaaaactctcctggcagcacgcatcaattatggatcactacaggaggtccaacagtgtttagcgatatatcaggagatgaggaaagcagggtttcaggcaaatgattattatctcaaggaattaatagtggaatggtgtgaaggagttctgtctagtcgcagtgataatcaagatttttacaatttggatctacaacctgagactgagaggaaagaatcgttcaacctgtttcttgagaaagtcgtaacagtcttgcaaaaagatactgatcagaaccaaattgtcgatgttcgtggcctttcaaaggttgaagctcgaattgttgttctctctgtccttcggaagatcaaagagcaatacctcctaggaagagtggtccaggatgatgtggttatcatcacgggtcatgagaagacatcaacaactgaagctgaaaccacaactagtgcagttgacgtcgtgcaggcaatagttactgttttgacggatgatctgggtcttgaagttttgattggacctggaagctgccctcccgtttcatcaaaacccaaagcaccgactaaatctagaagtaatttagagcaaatatccaaagaatttactaggagaccacagggaatgataaaaatccctatcaactcacttaaccattggttaaggaagaaagccgtgaggattgcagagtgacatttccttaaaggcttaaactacctttttggtccatttagtataccagtaaatcagcacagctattccaggattgggtgtacatatgaaaacaggttactgctcctggtattccaggcacactgacacgacttgaaaagggacttgttggcaggcaataaactgtgcttctgtgttgatttaatggtcgtgtttct

SEQ ID NO: 153690 - DNA, 209 bp, Zea Mays
taaatcacatgtgttatgtatcaaattccagtacatatctggcagaaatgttttccacgaaacagttctctagcagaaataaataacacaacaactggtgttcaaatatatatgtgagtaactagattacaaagtcttcactcatgtcaatttggtacttcaaaatactgagctgagggcgtgatcttggctaaggaaattactgatat

SEQ ID NO: 153691 - DNA, 1760 bp, Zea Mays
tccaaattttctgaggtggagcagtccccgcttggcggcttgtctagagaactcacccgccgccacgcgcgaacgcaaccagcgacgcctcgcggccgcggacagcgcggagccagacgcctcgcattcgctgagaagccgaagcccgtagagcacaggagttgtggacttctagagcacggcgggtctggtatgagaggcttccgctttgcgttggtccgtgcggcgcggtcgcggtcgcgggcggagcaccagaccgtgcagcgccgccggccgtccgatgtggcccaacgtttttcccacaccgcgccggcgccggcgaggccatctttcggcatcgcgttcgacatcgatggggtcatcctgcgcggccgaagtccgatcgggggcgcgccgcgggccatccgacgcctatattccgaagaaggtaccctgaagatcccgtttctgtttttaacgaatggaggaggtgttccagagcacagaagggcccttgagctaagccaacttttaggagtcaatatttctccaacacaggttgtgcatggacattctccttacagagagctggtgaagcgttttgaagatgaccttattgttgctgttggaaaaggagagcctgcagtagtgatgtccgcgtacggatttagaaaagttctgtccatagatgaatatgcatcatattataaagatattgacccccttgctcctttcaagacttggaaagttgggcaaacagacagtcacatgtctgcaaaagtgcacccatcatatgatgtttattcagagcgagttaaaggagtatttgttgtcagcgatcctgtcgattggggaagagatctacaggtactctgtgacatcttgtctactcatggacttcctgggactgaaaaaggtgatcaacctcctttgtattttgcagctgatgatcttgaataccaggcagcatttccttctgagcggcttgggatgggcgccttcaggatagctttggaaagcatcttcaatgaaataaatgatcatccactgaagtatacatcttatgggaaacctaatccatttgtgttcaagaatgcagcaaacatacttgaaaaacttgttatgagtatgtatcctaattcacagacaccaatggaaggaaaagattatcagttttcaactatttacatggttggagataatcctaaagtggatatcaatggagctatgaaggctggccacccatggtcatctgttcttacaaggacgggtgtttttaggggaaaggataacgacccacagtttcctgcagatgtggttgttgatactgttgaagatgccatcaactatattctggagaaggaacgtatacagtgatgataccatgtatgctcccttgatcattatcatttgacatgcttgacaagacaagatgtagccctttttttttggtctagtaaatttataatccttggctggaactggaggtcgactcttagaactccacctcgtgaacagtgcagtctacagtataaaataatgtttttgttaaactataggtagactgttgcaaacagctttattcgttctgccaacaaatacacgttagagtcagcaagacatattttattgcattttttgggtcctgaagagggtatttattactatgtgtacaaaggctaaggcaggctccacgcagtggaaccaaaactgaaatgagcgtcgcttgtaatagatgttcttgtttccatgtagaatatttgcttctcgggctgctcttt

SEQ ID NO: 153692 - DNA, 947 bp, Zea Mays
gcaacagataagcccctttcactcgtctttctacttcgtgcggactccgttcgtccctcccagtcccagcgcgcaacccaacccgccgttcctccgcctcctcccgcacagcaaaatggagacctccttcctccccaccacgctccccaccgcaaagcccctcccggcattccgaacccacgctgtagccgcatcgaaacttccccaacagcgccctcgccgctgcaccatacgcgcggccatcacccgtggccgcaaggaggagacggtgaccaccgtccgggagcagctggagggctgctacctcctggctggtatcaagtacgagggcctgacggtgaagcagctgcagggaatccgcgacgcgctcccagagacctgcagactgctggtggcgaagaacactctggtggggaaagccatcgagggcaccccctgggaagcgctcaagccgtgcatgaagggtatgaatgcctggctcttcgtccacaccgaggaggtaccagccgcgctcaagccctaccgcgccttccagaaagaggagcgcgtcgaggagaccaacgacttcgtcggggccgtctttgagggcaagttttacgggcccggagacttcaaggcgctcgagactatgcccagccgcgccgaggtgtacgccacgctgctcggcgcgctgcagggacccgctacgtcgctcgtcgccacgctgcaggcgccagccagggatgtcgttgcggtgctctccgcgtacgtacgcaagctcgaagaggaggctggagccgcctagtggggttgtgaaatggttgtcatctccctttcactccctactttctgtttgtagaattctgtgtaccttaactggctcccagtcacatttgaattgaatcacactttccagtttacaatgcttgctcttcccctggaagactaaagagagtacattcgtgatt

SEQ ID NO: 153693 - DNA, 2904 bp, Zea Mays
ccactcctgtcctctcctctcctctccccgccatttggctccgaaccctcacaacagtgcatcgtctctcctgtccccgccatttggttcggaactctcgcggcctcaactcctcctcgtcatcgtaacacccacgcttagagttcgtgagggtcgcccccaggggatctcgagacgtccgtttccaagagtggaccggctcgcaggcgctgctgttaccttgggtggagctcggacctgcggatcagttggattctcaagggagacggtggtttctgatttcctttctctaagcataccaaatcctttgtctcgagtcgggagcaactggttttgggcgtcgcggagcacatggcttaagaataatttcttccagcccggcgacaaattcgcagttggattcagcatatgcattttttatgctgacataggatgtgctcaaccatccgtggactccctctagttgcacaaaccacctcagtgctctctctttcttcgaatcgggctaataatgggcagtgcttgccaagctggcacagacgggccttcccgcaaggatgtgttagggatagggaatgccgccttagagaatggccaccatcaggctgaagctgacgcagatgaatggagggaaaaggaagaggacttggccaacaacgggcacagtgcgccaccgccaggcatgcagcaggtggatgagcataaggaggaacaaagacaaagcattcactgggagaggttcctacctgtgaagacactgagagtcttgctggtggagaatgatgactctactcgtcaggtggtcagtgccctgctccgtaagtgctgctatgaagttattcctgctgaaaatggtttgcatgcatggcgatatcttgaagatctgcagaacaacatcgaccttgtattgactgaggttttcatgccttgtctatctggtatcggtctgcttagcaaaatcacaagtcacaaaatttgcaaagacattcctgtgattagtaagtagatttcctcaactaccctaatgcacgtgaaattttatcttgttaattgttgggtttaaatacttttagctgctacactgatgtgttttgcatgcagtgatgtctacgaatgattctatgagtatggtgtttaagtgtttgtcgaagggagcagttgatttcttggtaaaaccactacgtaagaatgagcttaagaacctttggcagcatgtttggaggcgatgccacagttccagtggaagtgaaagtggcatccagacacagaagtgtgccaaactaaatactggcgacgagtatgagaacggcagtgacagcaatcatgatgatgaagaaaatgatgacggcgacgatgacgacttcagtgttggactcaatgctagggatggaagtgacaatggcagtggtactcaaagctcatggacaaagcgtgctgtggagattgacagcccacaacctatatctcccgatcaactagttgatccacctgatagtacatgtgcacaagtaattcaccctagatcagagatatgcagtaacaagtggttaccgacagcaaacaaaaggaatgtcaagaaacagaaggagaataaagatgaatctatgggaagatacttaggaataggtgctcctaggaactcaagtgcagaatatcaatcatctctcaatgatgtatctgttaatccaatagaaaaaggacatgagaatcacatgtccaaatgcaaatctaaaaaggaaacaatggcagaagatgattgtacaaacatgcctagtgcaacaaatgctgaaactgctgatttgattagctcaatagccagaaacacagaaggccaacaagcagtacaagccgttgacgcaccagatggcccttccaaaatggctaatggaaatgataagaatcatgattctcatatcgaagtgacaccccatgagttgggtttgaagagatcgagaacaaatggagctacagcggaaatccatgatgagcgaaatattctgaaaagatcagatcagtcagccttcaccaggtaccatacatctgtggcttccaatcaaggtggagcaagatatggggaaagctcttcaccacaagataacagttctgaggccatgaaaacggactctacatgcaagatgaagtcaaattcagatgctgctccaataaagcagggctccaatggcagtagcaataacgatgtgggatccagtacaaagaatgttgctgcaaggccttcgggtgacagggagagagtagcgtcaccattagccatcaaatctacccagcatgcctcagcatttcatactatacagaatcaaacgtcaccagctaatctgattggggaagacaaagctgatgaaggaatttccaatacagtgaaaatgagccacccaacagaggttccacaaggctgcgtccagcatcatcatcatgtgcattattacctccatgttatgacacagaaacagccatcaacagaccgtggatcatcagatgttcactgtggttcgtcaaatgtgtttgatcctcctgttgaaggacatgctgcaaactacagtgtgaatgggggtgtctcagttggtcataatgggtgcaatgggcagaatggaagtagcgctgtccccaatattgcaagaccaaacatagagagtattaatggtaccatgagccaaaatattgccggaggtggcattgtaagtgggagtgggagtggcaatgacatgtatcagaatcggttcctgcaacgagaagctgcattgaacaaattcagactgaagcggaaagatcggaactttggtaaaaaggtagcctgttttcagttacatgcctgttgtagctatgacttgaaatcagtaatagttatttgagggttgaagggccttccacttaatatataaaagtaag

SEQ ID NO: 153694 - DNA, 3454 bp, Zea Mays
ccactcctgtcctctcctctcctctccccgccatttggctccgaaccctcacaacagtgcatcgtctctcctgtccccgccatttggttcggaactctcgcggcctcaactcctcctcgtcatcgtaacacccacgcttagagttcgtgagggtcgcccccaggggatctcgagacgtccgtttccaagagtggaccggctcgcaggcgctgctgttaccttgggtggagctcggacctgcggatcagttggattctcaagggagacggtggtttctgatttcctttctctaagcataccaaatcctttgtctcgagtcgggagcaactggttttgggcgtcgcggagcacatggcttaagaataatttcttccagcccggcgacaaattcgcagttggattcagcatatgcattttttatgctgacataggatgtgctcaaccatccgtggactccctctagttgcacaaaccacctcagtgctctctctttcttcgaatcgggctaataatgggcagtgcttgccaagctggcacagacgggccttcccgcaaggatgtgttagggatagggaatgccgccttagagaatggccaccatcaggctgaagctgacgcagatgaatggagggaaaaggaagaggacttggccaacaacgggcacagtgcgccaccgccaggcatgcagcaggtggatgagcataaggaggaacaaagacaaagcattcactgggagaggttcctacctgtgaagacactgagagtcttgctggtggagaatgatgactctactcgtcaggtggtcagtgccctgctccgtaagtgctgctatgaagttattcctgctgaaaatggtttgcatgcatggcgatatcttgaagatctgcagaacaacatcgaccttgtattgactgaggttttcatgccttgtctatctggtatcggtctgcttagcaaaatcacaagtcacaaaatttgcaaagacattcctgtgattagtaagtagatttcctcaactaccctaatgcacgtgaaattttatcttgttaattgttgggtttaaatacttttagctgctacactgatgtgttttgcatgcagtgatgtctacgaatgattctatgagtatggtgtttaagtgtttgtcgaagggagcagttgatttcttggtaaaaccactacgtaagaatgagcttaagaacctttggcagcatgtttggaggcgatgccacagttccagtggaagtgaaagtggcatccagacacagaagtgtgccaaactaaatactggcgacgagtatgagaacggcagtgacagcaatcatgatgatgaagaaaatgatgacggcgacgatgacgacttcagtgttggactcaatgctagggatggaagtgacaatggcagtggtactcaaagctcatggacaaagcgtgctgtggagattgacagcccacaacctatatctcccgatcaactagttgatccacctgatagtacatgtgcacaagtaattcaccctagatcagagatatgcagtaacaagtggttaccgacagcaaacaaaaggaatgtcaagaaacagaaggagaataaagatgaatctatgggaagatacttaggaataggtgctcctaggaactcaagtgcagaatatcaatcatctctcaatgatgtatctgttaatccaatagaaaaaggacatgagaatcacatgtccaaatgcaaatctaaaaaggaaacaatggcagaagatgattgtacaaacatgcctagtgcaacaaatgctgaaactgctgatttgattagctcaatagccagaaacacagaaggccaacaagcagtacaagccgttgacgcaccagatggcccttccaaaatggctaatggaaatgataagaatcatgattctcatatcgaagtgacaccccatgagttgggtttgaagagatcgagaacaaatggagctacagcggaaatccatgatgagcgaaatattctgaaaagatcagatcagtcagccttcaccaggtaccatacatctgtggcttccaatcaaggtggagcaagatatggggaaagctcttcaccacaagataacagttctgaggccatgaaaacggactctacatgcaagatgaagtcaaattcagatgctgctccaataaagcagggctccaatggcagtagcaataacgatgtgggatccagtacaaagaatgttgctgcaaggccttcgggtgacagggagagagtagcgtcaccattagccatcaaatctacccagcatgcctcagcatttcatactatacagaatcaaacgtcaccagctaatctgattggggaagacaaagctgatgaaggaatttccaatacagtgaaaatgagccacccaacagaggttccacaaggctgcgtccagcatcatcatcatgtgcattattacctccatgttatgacacagaaacagccatcaacagaccgtggatcatcagatgttcactgtggttcgtcaaatgtgtttgatcctcctgttgaaggacatgctgcaaactacagtgtgaatgggggtgtctcagttggtcataatgggtgcaatgggcagaatggaagtagcgctgtccccaatattgcaagaccaaacatagagagtattaatggtaccatgagccaaaatattgccggaggtggcattgtaagtgggagtgggagtggcaatgacatgtatcagaatcggttcctgcaacgagaagctgcattgaacaaattcagactgaagcggaaagatcggaactttggtaaaaaggttcgctaccaaagcaggaagaggcttgctgagcagcggccacgggtccgaggacagtttgtgcgacaatctgagcaagaagatcaaacagcgcaaggttcagaaagatgacacgtaatttctaatacaacgtatcatcttcttcggcagatctgagaattaggcggttcttcctattgcgcatcttcgtcgacagatctgagaattaagtggtccttcccattgctgatagtagcccactgattcccaacgttagagtacacaataaataagactctagttgtcaatttctgtggttgactgcagatgatcaccctagcgctatggagtcaacaatgtaatatttatatactatgttcgtgccttggcgccttggcggtttgcaatcttcagtttcctttctgagagattcttggccaagtgccttgaggaggagcaaactagcagcgtcgccattgctatattaatagctggaatcatgtagtagtagttcatccattcattcgaagatcgtgttccaaatcaacacaagtaggggtttgcttctcctctttccaagaaaagtggttgtagcgtgagatgcaaataggtctcttgtgctagatcaagctcaataaactttaggccgtgttaggcagctgatctacttc

SEQ ID NO: 153695 - DNA, 3446 bp, Zea Mays
ccactcctgtcctctcctctcctctccccgccatttggctccgaaccctcacaacagtgcatcgtctctcctgtccccgccatttggttcggaactctcgcggcctcaactcctcctcgtcatcgtaacacccacgcttagagttcgtgagggtcgcccccaggggatctcgagacgtccgtttccaagagtggaccggctcgcaggcgctgctgttaccttgggtggagctcggacctgcggatcagttggattctcaagggagacggtggtttctgatttcctttctctaagcataccaaatcctttgtctcgagtcgggagcaactggttttgggcgtcgcggagcacatggcttaagaataatttcttccagcccggcgacaaattcgcagttggattcagcatatgcattttttatgctgacataggatgtgctcaaccatccgtggactccctctagttgcacaaaccacctcagtgctctctctttcttcgaatcgggctaataatgggcagtgcttgccaagctggcacagacgggccttcccgcaaggatgtgttagggatagggaatgccgccttagagaatggccaccatcaggctgaagctgacgcagatgaatggagggaaaaggaagaggacttggccaacaacgggcacagtgcgccaccgccaggcatgcagcaggtggatgagcataaggaggaacaaagacaaagcattcactgggagaggttcctacctgtgaagacactgagagtcttgctggtggagaatgatgactctactcgtcaggtggtcagtgccctgctccgtaagtgctgctatgaagttattcctgctgaaaatggtttgcatgcatggcgatatcttgaagatctgcagaacaacatcgaccttgtattgactgaggttttcatgccttgtctatctggtatcggtctgcttagcaaaatcacaagtcacaaaatttgcaaagacattcctgtgattagtaagtagatttcctcaactaccctaatgcacgtgaaattttatcttgttaattgttgggtttaaatacttttagctgctacactgatgtgttttgcatgcagtgatgtctacgaatgattctatgagtatggtgtttaagtgtttgtcgaagggagcagttgatttcttggtaaaaccactacgtaagaatgagcttaagaacctttggcagcatgtttggaggcgatgccacagttccagtggaagtgaaagtggcatccagacacagaagtgtgccaaactaaatactggcgacgagtatgagaacggcagtgacagcaatcatgatgatgaagaaaatgatgacggcgacgatgacgacttcagtgttggactcaatgctagggatggaagtgacaatggcagtggtactcaaagctcatggacaaagcgtgctgtggagattgacagcccacaacctatatctcccgatcaactagttgatccacctgatagtacatgtgcacaagtaattcaccctagatcagagatatgcagtaacaagtggttaccgacagcaaacaaaaggaatgtcaagaaacagaaggagaataaagatgaatctatgggaagatacttaggaataggtgctcctaggaactcaagtgcagaatatcaatcatctctcaatgatgtatctgttaatccaatagaaaaaggacatgagaatcacatgtccaaatgcaaatctaaaaaggaaacaatggcagaagatgattgtacaaacatgcctagtgcaacaaatgctgaaactgctgatttgattagctcaatagccagaaacacagaaggccaacaagcagtacaagccgttgacgcaccagatggcccttccaaaatggctaatggaaatgataagaatcatgattctcatatcgaagtgacaccccatgagttgggtttgaagagatcgagaacaaatggagctacagcggaaatccatgatgagcgaaatattctgaaaagatcagatcagtcagccttcaccaggtaccatacatctgtggcttccaatcaaggtggagcaagatatggggaaagctcttcaccacaagataacagttctgaggccatgaaaacggactctacatgcaagatgaagtcaaattcagatgctgctccaataaagcagggctccaatggcagtagcaataacgatgtgggatccagtacaaagaatgttgctgcaaggccttcgggtgacagggagagagtagcgtcaccattagccatcaaatctacccagcatgcctcagcatttcatactatacagaatcaaacgtcaccagctaatctgattggggaagacaaagctgatgaaggaatttccaatacagtgaaaatgagccacccaacagaggttccacaaggctgcgtccagcatcatcatcatgtgcattattacctccatgttatgacacagaaacagccatcaacagaccgtggatcatcagatgttcactgtggttcgtcaaatgtgtttgatcctcctgttgaaggacatgctgcaaactacagtgtgaatgggggtgtctcagttggtcataatgggtgcaatgggcagaatggaagtagcgctgtccccaatattgcaagaccaaacatagagagtattaatggtaccatgagccaaaatattgccggaggtggcattgtaagtgggagtgggagtggcaatgacatgtatcagaatcggttcctgcaacgagaagctgcattgaacaaattcagactgaagcggaaagatcggaactttggttcgctaccaaagcaggaagaggcttgctgagcagcggccacgggtccgaggacagtttgtgcgacaatctgagcaagaagatcaaacagcgcaaggttcagaaagatgacacgtaatttctaatacaacgtatcatcttcttcggcagatctgagaattaggcggttcttcctattgcgcatcttcgtcgacagatctgagaattaagtggtccttcccattgctgatagtagcccactgattcccaacgttagagtacacaataaataagactctagttgtcaatttctgtggttgactgcagatgatcaccctagcgctatggagtcaacaatgtaatatttatatactatgttcgtgccttggcgccttggcggtttgcaatcttcagtttcctttctgagagattcttggccaagtgccttgaggaggagcaaactagcagcgtcgccattgctatattaatagctggaatcatgtagtagtagttcatccattcattcgaagatcgtgttccaaatcaacacaagtaggggtttgcttctcctctttccaagaaaagtggttgtagcgtgagatgcaaataggtctcttgtgctagatcaagctcaataaactttaggccgtgttaggcagctgatctacttc

SEQ ID NO: 153696 - DNA, 3179 bp, Zea Mays
tctcctctcctctccccgccatttggctccgaaccctcacaacagtgcatcgtctctcctgtccccgccatttggttcggaactctcgcggcctcaactcctcctcgtcatcgtaacacccacgcttagagttcgtgagggtcgcccccaggggatctcgagacgtccgtttccaagagtggaccggctcgcaggcgctgctgttaccttgggtggagctcggacctgcggatcagttggattctcaagggagacggtggtttctgatttcctttctctaagcataccaaatcctttgtctcgagtcgggagcaactggttttgggcgtcgcggagcacatggcttaagaataatttcttccagcccggcgacaaattcgcagttggattcagcatatgcattttttatgctgacataggatgtgctcaaccatccgtggactccctctagttgcacaaaccacctcagtgctctctctttcttcgaatcgggctaataatgggcagtgcttgccaagctggcacagacgggccttcccgcaaggatgtgttagggatagggaatgccgccttagagaatggccaccatcaggctgaagctgacgcagatgaatggagggaaaaggaagaggacttggccaacaacgggcacagtgcgccaccgccaggcatgcagcaggtggatgagcataaggaggaacaaagacaaagcattcactgggagaggttcctacctgtgaagacactgagagtcttgctggtggagaatgatgactctactcgtcaggtggtcagtgccctgctccgtaagtgctgctatgaagttattcctgctgaaaatggtttgcatgcatggcgatatcttgaagatctgcagaacaacatcgaccttgtattgactgaggttttcatgccttgtctatctggtatcggtctgcttagcaaaatcacaagtcacaaaatttgcaaagacattcctgtgattatgatgtctacgaatgattctatgagtatggtgtttaagtgtttgtcgaagggagcagttgatttcttggtaaaaccactacgtaagaatgagcttaagaacctttggcagcatgtttggaggcgatgccacagtgtaagctgtttgtttttgtccagtggaagtgaaagtggcatccagacacagaagtgtgccaaactaaatactggcgacgagtatgagaacggcagtgacagcaatcatgatgatgaagaaaatgatgacggcgacgatgacgacttcagtgttggactcaatgctagggatggaagtgacaatggcagtggtactcaaagctcatggacaaagcgtgctgtggagattgacagcccacaacctatatctcccgatcaactagttgatccacctgatagtacatgtgcacaagtaattcaccctagatcagagatatgcagtaacaagtggttaccgacagcaaacaaaaggaatgtcaagaaacagaaggagaataaagatgaatctatgggaagatacttaggaataggtgctcctaggaactcaagtgcagaatatcaatcatctctcaatgatgtatctgttaatccaatagaaaaaggacatgagaatcacatgtccaaatgcaaatctaaaaaggaaacaatggcagaagatgattgtacaaacatgcctagtgcaacaaatgctgaaactgctgatttgattagctcaatagccagaaacacagaaggccaacaagcagtacaagccgttgacgcaccagatggcccttccaaaatggctaatggaaatgataagaatcatgattctcatatcgaagtgacaccccatgagttgggtttgaagagatcgagaacaaatggagctacagcggaaatccatgatgagcgaaatattctgaaaagatcagatcagtcagccttcaccaggtaccatacatctgtggcttccaatcaaggtggagcaagatatggggaaagctcttcaccacaagataacagttctgaggccatgaaaacggactctacatgcaagatgaagtcaaattcagatgctgctccaataaagcagggctccaatggcagtagcaataacgatgtgggatccagtacaaagaatgttgctgcaaggccttcgggtgacagggagagagtagcgtcaccattagccatcaaatctacccagcatgcctcagcatttcatactatacagaatcaaacgtcaccagctaatctgattggggaagacaaagctgatgaaggaatttccaatacagtgaaaatgagccacccaacagaggttccacaaggctgcgtccagcatcatcatcatgtgcattattacctccatgttatgacacagaaacagccatcaacagaccgtggatcatcagatgttcactgtggttcgtcaaatgtgtttgatcctcctgttgaaggacatgctgcaaactacagtgtgaatgggggtgtctcagttggtcataatgggtgcaatgggcagaatggaagtagcgctgtccccaatattgcaagaccaaacatagagagtattaatggtaccatgagccaaaatattgccggaggtggcattgtaagtgggagtgggagtggcaatgacatgtatcagaatcggttcctgcaacgagaagctgcattgaacaaattcagactgaagcggaaagatcggaactttggttcgctaccaaagcaggaagaggcttgctgagcagcggccacgggtccgaggacagtttgtgcgacaatctgagcaagaagatcaaacagcgcaaggttcagaaagatgacacgtaatttctaatacaacgtatcatcttcttcggcagatctgagaattaggcggttcttcctattgcgcatcttcgtcgacagatctgagaattaagtggtccttcccattgctgatagtagcccactgattcccaacgttagagtacacaataaataagactctagttgtcaatttctgtggttgactgcagatgatcaccctagcgctatggagtcaacaatgtaatatttatatactatgttcgtgccttggcgccttggcggtttgcaatcttcagtttcctttctgagagattcttggccaagtgccttgaggaggagcaaactagcagcgtcgccattgctatattaatagctggaatcat

SEQ ID NO: 153697 - DNA, 3086 bp, Zea Mays
ctctcctctccccgccatttggctccgaaccctcacaacagtgcatcgtctctcctgtccccgccatttggttcggaactctcgcggcctcaactcctcctcgtcatcgtaacacccacgcttagagttcgtgagggtcgcccccaggggatctcgagacgtccgtttccaagagtggaccggctcgcaggcgctgctgttaccttgggtggagctcggacctgcggatcagttggattctcaagggagacggtggtttctgatttcctttctctaagcataccaaatcctttgtctcgagtcgggagcaactggttttgggcgtcgcggagcacatggcttaagaataatttcttccagcccggcgacaaattcgcagttggattcagcatatgcattttttatgctgacataggatgtgctcaaccatccgtggactccctctagttgcacaaaccacctcagtgctctctctttcttcgaatcgggctaataatgggcagtgcttgccaagctggcacagacgggccttcccgcaaggatgtgttagggatagggaatgccgccttagagaatggccaccatcaggctgaagctgacgcagatgaatggagggaaaaggaagaggacttggccaacaacgggcacagtgcgccaccgccaggcatgcagcaggtggatgagcataaggaggaacaaagacaaagcattcactgggagaggttcctacctgtgaagacactgagagtcttgctggtggagaatgatgactctactcgtcaggtggtcagtgccctgctccgtaagtgctgctatgaagttattcctgctgaaaatggtttgcatgcatggcgatatcttgaagatctgcagaacaacatcgaccttgtattgactgaggttttcatgccttgtctatctggtatcggtctgcttagcaaaatcacaagtcacaaaatttgcaaagacattcctgtgattatgatgtctacgaatgattctatgagtatggtgtttaagtgtttgtcgaagggagcagttgatttcttggtaaaaccactacgtaagaatgagcttaagaacctttggcagcatgtttggaggcgatgccacagttccagtggaagtgaaagtggcatccagacacagaagtgtgccaaactaaatactggcgacgagtatgagaacggcagtgacagcaatcatgatgatgaagaaaatgatgacggcgacgatgacgacttcagtgttggactcaatgctagggatggaagtgacaatggcagtggtactcaaagctcatggacaaagcgtgctgtggagattgacagcccacaacctatatctcccgatcaactagttgatccacctgatagtacatgtgcacaagtaattcaccctagatcagagatatgcagtaacaagtggttaccgacagcaaacaaaaggaatgtcaagaaacagaaggagaataaagatgaatctatgggaagatacttaggaataggtgctcctaggaactcaagtgcagaatatcaatcatctctcaatgatgtatctgttaatccaatagaaaaaggacatgagaatcacatgtccaaatgcaaatctaaaaaggaaacaatggcagaagatgattgtacaaacatgcctagtgcaacaaatgctgaaactgctgatttgattagctcaatagccagaaacacagaaggccaacaagcagtacaagccgttgacgcaccagatggcccttccaaaatggctaatggaaatgataagaatcatgattctcatatcgaagtgacaccccatgagttgggtttgaagagatcgagaacaaatggagctacagcggaaatccatgatgagcgaaatattctgaaaagatcagatcagtcagccttcaccaggtaccatacatctgtggcttccaatcaaggtggagcaagatatggggaaagctcttcaccacaagataacagttctgaggccatgaaaacggactctacatgcaagatgaagtcaaattcagatgctgctccaataaagcagggctccaatggcagtagcaataacgatgtgggatccagtacaaagaatgttgctgcaaggccttcgggtgacagggagagagtagcgtcaccattagccatcaaatctacccagcatgcctcagcatttcatactatacagaatcaaacgtcaccagctaatctgattggggaagacaaagctgatgaaggaatttccaatacagtgaaaatgagccacccaacagaggttccacaaggctgcgtccagcatcatcatcatgtgcattattacctccatgttatgacacagaaacagccatcaacagaccgtggatcatcagatgttcactgtggttcgtcaaatgtgtttgatcctcctgttgaaggacatgctgcaaactacagtgtgaatgggggtgtctcagttggtcataatgggtgcaatgggcagaatggaagtagcgctgtccccaatattgcaagaccaaacatagagagtattaatggtaccatgagccaaaatattgccggaggtggcattgtaagtgggagtgggagtggcaatgacatgtatcagaatcggttcctgcaacgagaagctgcattgaacaaattcagactgaagcggaaagatcggaactttggtaaaaaggttcgctaccaaagcaggaagaggcttgctgagcagcggccacgggtccgaggacagtttgtgcgacaatctgagcaagaagatcaaacagcgcaaggttcagaaagatgacacgtaatttctaatacaacgtatcatcttcttcggcagatctgagaattaggcggttcttcctattgcgcatcttcgtcgacagatctgagaattaagtggtccttcccattgctgatagtagcccactgattcccaacgttagagtacacaataaataagactctagttgtcaatttctgtggttgactgcagatgatcaccctagcgctatggagtcaacaatgtaatatttatatactatgttcgtgccttggcgccttggcggtttgcaatcttcagtttccttt

SEQ ID NO: 153698 - DNA, 1341 bp, Zea Mays
ggggatgctctgccactgcagtgtcttcgtctttattggcaacctggagttgatgtgcttttccttctgcaggttcagtcggttagattttaggtggagagtccttcttactgcattttctttctctggttctttgggtcggtttaggttgctaaccacttctgtgcttttgtaatatgggcgacggggtctctcagtagctttgtcataaaacaattctacttccccttaatatagtacatgtgactctgacatgttatcgaacaaaaaaaaacattgctcgctctaaattttatgagatctggcatgatttcaaactattcttcttttcaaaatcctgttttctgactgcagtttttacaagattttatggtcttgccgcttcatttttctgactgtttgcattggaccgataccttctgatggccttgtccgcctattttcaggttcgctaccaaagcaggaagaggcttgctgagcagcggccacgggtccgaggacagtttgtgcgacaatctgagcaagaagatcaaacagcgcaaggttcagaaagatgacacgtaatttctaatacaacgtatcatcttcttcggcagatctgagaattaggcggttcttcctattgcgcatcttcgtcgacagatctgagaattaagtggtccttcccattgctgatagtagcccactgattcccaacgttagagtacacaataaataagactctagttgtcaatttctgtggttgactgcagatgatcaccctagcgctatggagtcaacaatgtaatatttatatactatgttcgtgccttggcgccttggcggtttgcaatcttcagtttcctttctgagagattcttggccaagtgccttgaggaggagcaaactagcagcgtcgccattgctatattaatagctggaatcatgtagtagtagttcatccattcattcgaagatcgtgttccaaatcaacacaagtaggggtttgcttctcctctttccaagaaaagtggttgtagcgtgagatgcaaataggtctcttgtgctagatcaagctcaataaactttaggccgtgttaggcagctgatctacttcaccaatgtggcaaggcattcgtcgtattctgttgacagaaacaaggtgttcactgcacgggcatgccgcacgactcctcgcagatcaaaagagggaacacggcatgcttttaccaaaattattttcgaataacattgtgaggaacagacaataattaacttcccaaaacgtctcgctatactggatttttcgatgttggattcgtaatcagatccttttgacaataattttcgtacatcaggcat

SEQ ID NO: 153699 - DNA, 1723 bp, Zea Mays
ccccggacgtcaagcaggaacagcaacccagatccagatccccggcggccccacgagaaacctgcaccaccacccaggtggccagatgctcgctgcttagtgggatccagccgtcagccagcccaccagtagccatccgactccccactctgctacgggggctccggtgcggcgtcccatcaatcattcgcctcgccgttctcgcgtagctcgccttcccaaggatttggcccttcttttcctatctctcccgtacacgacgagacgaggctttcccgtaccgtcccgcccctctatgcgcctacggcctacgcccccccaaccccagcccacccacaagagtagggagtggtgcgagaaatcaatccgccccatgcccacatccgtcgccacccacgcaaccctcctcatcaaagccgcagccgccaagcccttcttctccccccgcccggcggcccggatccccgccccttctcctcaccctcctcccccgcccgccggccgccgcctgccgaacacggcggccgctctcgcagccgcagcccgccggttccggtggccgtcggcggccgcgtcggcgcgggggctgtgcgcgccgccgcattccggcggcgaggggatgggatctgatgcgggggcgggggccaggaagaggcgggactcggccgtgaacgggctcgccaaggacgtgccgccggtgaacgggatgatgatgcccaaggaggagcccgcgaccgcgccgcccaggttgctcacgctgcccaccgtgctcaccattggccgcgtcgctgctgtgccgcttctgatcagcactttctacatggagggtccatgggcagctacggccacaacaggcatcttccttgctgctgcagtcactgattggctagatggttatatcgctagaaagatgcagctaggaacaccttttggtgcatttcttgatcctgtggctgacaagcttatggtagccgcgacattagttttactatgcaccaaacctttggaaacatcactgctcaatgatgggccatggcttctaacagtcccttccattgctatcattgggagagagattacaatgtcagctgtgagagaatgggccgcatctcagaatagtgaagctcttgaggctgttgcagttaacaacttagggaagtggaagacagcaacgcagatgacagcattgactctgcttctcgccagcagagacccaagtgtacctgcgcaaggtgctctagttgcccccggtgttgctctactttacatttccgctggactcgccatatggtccctagtggtgtacatgagaaagatatggcggacacttctaaaatagtattagcacaatatatatagtgtagtagaagaaacagaagcaaggcgaggttctattcgtgatcgtacgatttttggaaggctgcttagttgattggtggactgggacctatctagagctgcttgtgatcctcattcctcagtaacttgtgcgtcatctatttttgccgccaaatttgctgaagtatgccaggattctagacatgatgtgaccctgcgtgcttaaggagatataagtctgcaatgcagaagattgtaacccaatacaaacacaaaacccagaggtttgtgcatgtggagttctatcattgtaatctgcacataatatcatatgccaggagcatgcaattattcttttcagtggtgacgatatccctgtctctaa

SEQ ID NO: 153700 - DNA, 1571 bp, Zea Mays
ggcgggcgttcacggtctcgcggacaaaaaccgggccggccccccattgttacgcttcttttcgaggcctcggcgctggtactcctctgtcctctcccagtgtcccagacatcccacagggagcgtagtgctctgtgcctgtgggctgtggcgcggcgcggtgcctcgtcacctcacgcctcacgccccgaacagaggcgtccgtccgacaccttccgcctcaagccgccgcgccgtcccctgcccgcgagctcaaaagtcagagccgcacgcaagaagcagaagcgccccggggccgccgccaaaggctgcgcagattacctacccacagcactcccagtctcccacagcccaagcaacatccggtatcaatatcacaagctcaaaagtcagagtcgggaaggatcggagaatggctgcgcaggcggcgcaatgcagggtgagcggtggggatggcggtggcggtggcatgaggacggtggagtgcctgagagggaggcttctcgcagagagggtggcgtccaaggctgcaaaggaggaggccgaccaactggccaaaaggctggacgagctagagaggaagctcgccgacgaggtcaaggtgaggaacagggcggagcggaggctcaggagggccatcaggaagctggagtccctcaaggttctggacgtcgggctctcggacggctccaccgggtcgctgtactccaacggacgctccggtcaccaggcgccggaggcggaggtgggggcggaggcggaggagaggaacggccctggctcgttgaccaccgatggctctgcgccatccgctccttccggagacgccgacagggtcgtgtcgtcggagggatcgtgcacccagctcaactcgtcctcccaggacgggagctggtgctccgttgcgtcagagcaatcccagcctggtccttgcatggatcctgccggacacaccaccaactgccgttcggcggggagcggcggctgtgaccgtgattcagagaggcaacacctcgatgcatcatcccgtggctgtggcccagctaaacccgaagaagccgtcaacgagagcgacgacacgctagcgctggtgctggtagatccccagctcgttgcagccgcggcaggcggcggtccaagaacgcaggcaggagaggtccgccgtggcaggagtcacgaggaggaagaagaagaggagagcgacaggctcgcgatcgttctagctgagccgcagcgacaggccgccgctgggcgcggcgacgtggagtccgttctcctggcgctgcggcgggtgaaggagcagctgcgctacaccatcgagcggcggtcgcgggcgcggctcgtcgtcgcccaccaggaactctacggccactagctgtgagccgtacgtgtgtgaatcattcgcagcgccgcactgctgctgtgcagcgattttataaatatagctgtctcgggggtcgatggagtatccgtagagaatggaataagatgtcataatttacaaagagtgaattgcttatttgcttctgtttactgatgaggaacacaatgtgatacggttggaagcaccc

SEQ ID NO: 153701 - DNA, 898 bp, Zea Mays
cttcttttcgaggcctcggcgctggtactcctctgtcctctcccagtgtcccagacatcccacagggagcgtagtgctctgtgcctgtgggctgtggcgcggcgcggtgcctcgtcacctcacgcctcacgccccgaacagaggcgtccgtccgacaccttccgcctcaagccgccgcgccgtcccctgcccgcgagctcaaaagtcagagccgcacgcaagaagcagaagcgccccggggccgccgccaaaggctgcgcagattacctacccacagcactcccagtctcccacagcccaagcaacatccggtatcaatatcacaagctcaaaagtcagagtcgggaaggatcggagaatggctgcgcaggcggcgcaatgcaggcaacacctcgatgcatcatcccgtggctgtggcccagctaaacccgaagaagccgtcaacgagagcgacgacacgctagcgctggtgctggtagatccccagctcgttgcagccgcggcaggcggcggtccaagaacgcaggcaggagaggtccgccgtggcaggagtcacgaggaggaagaagaagaggagagcgacaggctcgcgatcgttctagctgagccgcagcgacaggccgccgctgggcgcggcgacgtggagtccgttctcctggcgctgcggcgggtgaaggagcagctgcgctacaccatcgagcggcggtcgcgggcgcggctcgtcgtcgcccaccaggaactctacggccactagctgtgagccgtacgtgtgtgaatcattcgcagcgccgcactgctgctgtgcagcgattttataaatatagctgtctcgggggtcgatggagtatccgtagagaatggaataagatgtcataatttacaaagagtgaattgctta

SEQ ID NO: 153702 - DNA, 1453 bp, Zea Mays
caaaagtcagagccgcacgcaagaagcagaagcgccccggggccgccgccaaaggctgcgcagattacctacccacagcactcccagtctcccacagcccaagcaacatccggtatcaatatcacaagctcaaaagtcagagtcgggaaggatcggagaatggctgcgcaggcggcgcaatgcaggtcgctatgtttcccggcgtagatgcttcgttcgttctttcttgcgttcgtggatgggttcatgcattggcccccttcccagcatccgtttcttttcttttcttttcatttggaaactctggtggcaccattcccttttcttttctttacatttggatcgactccagcatcattccctttcctttttttcgaaactgggggctaggagtgtcagttcttgcattgcattgagctgcttgctggtggctccgcatttccagtgggatccttcctagtaccaaatctctgagctggctagctctgcatttgtgcgtcgtcgcattgattgcagggtgagcggtggggatggcggtggcggtggcatgaggacggtggagtgcctgagagggaggcttctcgcagagagggtggcgtccaaggctgcaaaggaggaggccgaccaactggccaaaaggctggacgagctagagaggaagctcgccgacgaggtcaaggtgaggaacagggcggagcggaggctcaggagggccatcaggaagctggagtccctcaaggttctggacgtcgggctctcggacggctccaccgggtcgctgtactccaacggacgctccggtcaccaggcgccggaggcggaggtgggggcggaggcggaggagaggaacggccctggctcgttgaccaccgatggctctgcgccatccgctccttccggagacgccgacagggtcgtgtcgtcggagggatcgtgcacccagctcaactcgtcctcccaggacgggagctggtgctccgttgcgtcagagcaatcccagcctggtccttgcatggatcctgccggacacaccaccaactgccgttcggcggggagcggcggctgtgaccgtgattcagagaggcaacacctcgatgcatcatcccgtggctgtggcccagctaaacccgaagaagccgtcaacgagagcgacgacacgctagcgctggtgctggtagatccccagctcgttgcagccgcggcaggcggcggtccaagaacgcaggcaggagaggtccgccgtggcaggagtcacgaggaggaagaagaagaggagagcgacaggctcgcgatcgttctagctgagccgcagcgacaggccgccgctgggcgcggcgacgtggagtccgttctcctggcgctgcggcgggtgaaggagcagctgcgctacaccatcgagcggcggtcgcgggcgcggctcgtcgtcgcccaccaggaactctacggccactag

SEQ ID NO: 153703 - DNA, 1383 bp, Zea Mays
tcacctgcaccgcgttcgcgtccaagtccaagtgaggccggccgccgttgggcgggcccaggacggctgtagacctgtacatgtcatccaatcaatccgtcacacgattcagactgcattcactcacctccggcggcctcccacgaagaattcgctcgctttccccggttgcccgtcaccactgacgcccgcctcccccgcggcccttcccatcgccgcgtataaaggttcgctgccggcaacgagaagatgcagctcaccgccacctccacgctcgaagctcctcccgaaccggccgcatcgccgccatggcagccgccgctcctgcaagctccgtgaaggaagtgctgccgtctcccctgacctccgcctccgagccccctccccttttcgatggcaccaccaggttgtacgtggcctatctttgcccgttcgcgcagcgcgcttggattgctagaaactacaagggtctgcaggacaagattaagatagttgccatcgatctcgctgacaggccagcgtggtacaaggagaaggtttatccagaaaacaaggtgccttctctagagcacgacaaccaggtgaaaggagagagcttggatttggttaagtacattgacagcaacttcgaaggtccatcgttgctccccgaggatcatgcaaagcagcagttcgctgaggagctgctcggatacactgacgcattcaacaaagcattttactcatgtttagtcgacagggaagatgtgtctgaggaagccgttgctgccttggacaaaatagaagacgccctggggaaattcaacgatggcccgttcttccttggtcagttcagtctggtggacgttgcgtatgtaccgttcatcgagaggtttcagatactctattccaatataaagaactatgacgtcacaaagggcagacccaaccttcagaaattcatcgaggaagtgaacaagatcgatgcgtacacacagactaaactggacccgcagtttttgcttgagcaaacaaagaagcggcttgggattgcttaaagcctgtgaccaaggacgagactttcgccagaagcaccagcgtagtagatcggagctcgttttagtcggttgtgtgcttggatattacatctggtcttcaataaggcatggccttctgtaatggctgtgcttctgaaaataaataaactagttgtccaggtattatatttgctttggtgacgtgtcgatgtcactgtatatatatgaatgggtcggaaagaatgatgatgtgcagtgtgttctgtgcaaatgttgccgagatgaaggatcagtgtccatgtagacattcatgtattgctcatatcgtgacacggcgcatgaaaggtttcggcccctaccacgctca

SEQ ID NO: 153704 - DNA, 189 bp, Zea Mays
ttttttttttttttactttttacggtgatcgtcgcatggcatgttttcttttcgaaagggaggcaatttcttatattgaagccaaaaacaatacatcaaaacgctataaagacttaagtctcataaagttccggcctctgctaacacgcacgcatctaaaaagacattaaaaaaagaaagcgaaaaaaa

SEQ ID NO: 153705 - DNA, 1063 bp, Zea Mays
cgtctttgttctcccacgaacttcattgacgaaggcgaaaagagaagaatcagctccatttctctcgtttgggaggaggaggaggcgcgcgccggtgcccgaccgtcgaccagccgctacgacgcggcaccaggataggtgctcctgagctacgaacccacaccccacggccaaactgttgcgtgcgccccggccttagcatgaggtggccgctggcgatctcgactcgccgccgccccctccttttcgtccttctcatcgccctctacacgattcctaggacattttcatcgaggcttgtcacactcgatactgttgagatatttactactcatgaatggtttgccaagccaacagtggctttccggtgcaatggagcaaacaaaacatatctgccagatgtaacggaggcgcacacgccatatacctttaagggtgaagaatcatggcagcccttaacagagcttccagaaaagaaatgcaagcgatgtggtttgtatgaggagggcacatttaagcctgatgctgtctttgatgaatgggagatgtgttcgagtgatttcaagggcggaaaatacacccgctttaaggaaggccagttcaatgcaacattcctatgcccaaactgcactgcctctactggacatggaaaccctagaccaagcgaagatttggaaactaagaagacatctattgctgtcatcataatagctagtgttctcgcttcagtccttgtcgtcactgccttgttcgggggcttcaagtattggcagaagaagaagagggagcgagaccaggtgcggttcctcaagctctttgaagagggagatgaccttgaagatgagctgggccttagtaatgaattctaaaatagtgcgtacagtcttacttccgatgttttcagatgtagtttccacgtatgatgtatagaatgtgtgtttttggtgacctcctagtagcttttgcagagggagtgaatcttgcaacagtttgcacaagccccgtaacgtacatatataaaagtgcaaaaatgaatggattcacgtatagccttcaattcttc

SEQ ID NO: 153706 - DNA, 3685 bp, Zea Mays
gcgctgcgccaccaatcgccatcgcctcgttgcccagtctccgcgccgccgcctcctccgctccctccctccctcccctcttctagggtttccatcccatgcgatctcgcggccttggtgttccgggacagtagggacgcctcctctccgttcgaatcaagggagtcagcgacccaatgggtaagggcgggcaggacgaaggcaaccgccggcgggacggatccgccgcctcggggccggaccgccccgcgccggtcttcccggcgtgggcgcgcaccccgagcgagtgcctcgcggagctgggcgtctcggcggaccgcggcctcagctccgaggaggcggcggcgcggctgcagcgacacgggcccaacgagctcgagcggcacgcgccgccgtcggtctggaagctcgtcctcgagcagtttaacgacacgctcgtgcgcatcctgctcctggcggccgtcgtctccttcgtgctcgcgctctacgacggcgcagagggcggcgaggtggggctcaccgccttcgtcgagccgctcgtcatcttccttatcctcatcgtcaacgccgtcgtcggcgtctggcaggagagcaacgccgagaaggcgctcgaggctctcaaggagattcagtcggagcacgcaaccgtcaggcgtgatgggcgctggtcgcatggcctccccgcgcgcgacctcgtccccggggacatcgttgagctccgggtcggggacaaggttcccgcggacatgcgcgtgctccagctcatcagctccaccctccgcgtcgagcaggggtctctcaccggcgagaccgcctctgttaacaagaccagccacaagatcgagctggaggacactgacatccagggaaaggagtgcatggtttttgccggtaccactgttgtcaacggcagtgctgtctgtgttgtgacgggcactggcatggctaccgaaattggcaagatccatgcgcagatccaggaggcatctcaggaggaggacgacacgccactgaagaagaagctcaatgagtttggtgaggcgctaactgccataatcggggtgatctgtgccttggtctggctcatcaacttgaagtatttcctttcctgggagtatgtggacgggtggcctacgaatttcaagttctcatttgagaagtgcacgtattactttgagattgcggtggcactggccgttgcagcaattccagagggtttgcctgctgtgatcaccacgtgcttggcactcggtacaaggaagatggcacagaagaatgcccttgtgaggaagctgccgagtgtggagacattgggttgtacaactgtgatttgctctgataagaccggaactttgaccacgaaccagatgtcagcagtgaagcttgtagcaattgggaggtggcctgatacacttaggagctttaaggttgatggaaccacttatgatccgactgatgggaagatacacgattggccaagcttgagcatggatgaaaatctccagatgatcggaaagatagctgcggtttgcaatgatgcaagcattgcccactctgagcatcagtacgttgctactgggatgcccacagaagctgctctgaaggttttggttgagaaaatggggcttcctggtggttatactccatctcttgattcatctgatttgctaaggtgttgtcagtggtggaataatgctgccaagagagtagcaactctggaatttgatcgcaccagaaagtcaatgggagttattgtgaaagcaaactctgggaagaacttgctgcttgttaagggagcagtagaaaatctgctagagagatgtacccacattcagttgctcgatggatctgttgtgctattggatgatggtgccaaggcgctcatattatctacactccgtgacatgtctgccagtgctttgcgctgcttgggttttgcttacaaggatgaattgtcagaatttgcaacatatgatggtgaagaacatgcagctcacaagtatctgcttgatccttcatattactcatccatagagagtaatatgatcttttgtggttttgttggtctaagggatcctccacgagaagaagtccacaaagcaattgaagattgcagagctgctgggatacgtgttatggtgataacaggagataacaaggaaacagcagaggccatttgtcgtgagattggggtttttggccctcatgaagatatcagttcaaaaagcttcacagggaaggaattcatgggtctttctgataaaaaggagctcttaagacaacagggtggccttctcttctccagggcagagccaaaacacaagcaggagatagttagactgctcaaagaagatggtgaagtggttgcaatgactggtgatggggtgaatgatgcaccagctcttaaactggctgatattggagttgcaatgggcattactggaactgaggttgccaaagaagcttcagatatggtacttgcagatgataactttagtactatagtcgcagcagttggtgaagggagatctatttacaacaacatgaaggcttttattagatatatgatctcctcaaacatcggagaggtcgcgtccatattcctgacatcggctttgggtattccagaaggtctcatcccagtgcaactcctatgggtcaatctagttacagatggccctccagcgactgctttggggttcaacccgccagataaagatatcatgaagaaacctcctcgaagaagtgatgactcgttgatcactccttggatcctgtttcgctatatggttattggcctttatgttggggttgcaacagtgggaatcttcatcatctggtacacgcatgacagtttcctgggaattgacctggctagtgatggtcatacacttgtatcgtactcccagctctcaaactgggacaagtgctcctcatgggagggcttcaaggtgtcaccattcaccgcaggagcgaggacattcagcttcgatgcaaatccatgcgattacttccagggtggcaagattaaagcaacgaccctctccctgtcagtcttggtggccattgagatgttcaactcactgaatgccctgtcagaggacggcagccttgtgagcatgccaccatgggttaatccgtggcttcttctggccatgtcggtttctttcgggctgcatttcttgatcctctacgtgcctttcctcgctcaagtgtttgggatcgtgcccctcagtttgaacgaatggctcttggtggtggcagtggccttccccgttgtgctgatcgacgaggttctcaaatttgtggggcggtgcctgacagcgcgtgcccggaaacaatcagggaagaggaaggcagagtagatgctagtgatcatcggtatttagaatctgtagtgccacggggaatcgatattcaatgtgacacccccattgtttttgagctgctaagggctctcgatcctttcagagtgttttaggttgggaatatgaccgtgcatgacaggctaggatactctatagaattggtaagcatatcgcgttgaacaacactgccttttgtttttcgttgtaacaaatgctggtactgtgaacatgctggagatacaacaatggttacctgacgtttttttctctctgacgatgagcagctatacatgctactgacctactgttatgttgcg

SEQ ID NO: 153707 - DNA, 1892 bp, Zea Mays
ggccatttgctccgctcgcgtccccgcctcctgcgcacgagacgctctccgctttttttttatcgacgagtttgagacagaccaaagaggcggaagaagcggggaagccgacgggcaacgaccggggcgtgaggcgatgtcgtggctccgcagcgcggtgcaccgcgccgtggaggcgagcgggggtcacagctccctccttacccgcaccgtccgcacctcccttgacaccgtcgtccaccatgccggccaggctgtcgcgggcggcgccaggctcatcaccgggagccggagttacaagagcgcgaaggtggcagcgaagaggctggaagaggaggcgctctcctgcaaaggggacgaacgggtgcagctgctgcgccggtggctcgtcgcgctcaaggagacccagcgcgcgaccacggcggtccgggagccgcaatttggggacaatccggaccagactgcgcccctgctggatttgtacatcgattacgacagcggtgcggagccgatgaactttttccatgtcttcctctacagtcaagccctcgagtgtgttgttctctccttgattagggaagccccaactgaggaagaagttccactggtctcagaagtttttggaatgtgcctttcgggagggaaggatgtgcacaatgcactcttaagtagtgtaaaggacctggcaaggttattctcaagttatagtgacgaagtgttggcaaaacgtgacgagctgcttcagtttgctcagggtgcgatctcagggctaaagataaatgctgacattgcaagattagataatgaaattactcagttgcaacagcagataaattcaatggatgcgctccatgctacatcaatcgtcaatcagaataaaaaagctcaaacagccactgagggtttcagaaaggcagtttctgaagttcggctttgctctagaatggaagaacttctattgaagaagaaatcaatacaccccggtgattcattggagactcattttgagaaggtagataaactgaaggttttgtctgaatcccttgcaaattcatctgcaaaagcagaaaagcgtatcatggaaaataggctacaaaaggaagaatctcttatcttccgggtcaccaaaacaaatgaagttagtggtatagaaaagaaaatacaacaccccatgatttcccattgaaacaaaaggaagacattcatatccatcattgcaattgcaaaagaaaaaaaatagcaggatgtgcaagctgttccaattgttttttcttttccaattcttagtccatgcaattgtctttatgcttctgcaatctgtctgattgatgattaatcaattaagttttgtaaaaggaattagttgctgagatctctggacttgaggagcaaaggaatcaactcgaggcagaactgaaaaaggtgaatactaaattgaaagttgctacagtgaagcttaaaaaaactagagaggaacgggaccaatttgatgaagcaagcaatcagattgtgttgcacctaaaaacaaaggaagacgaactttcaagatccatagcttcatgcaaagtagaagcaagtactgtcagtgcatggatcaactttttgaaagatacgtggaaattgcagtccttgtttgaagagctaagagaaaaacaggccaacgaagaattggatagatgtggactctgctttgcgaaattgatgaagtatcatgtttctgcatccatggaagagctaagcacttctattgaccgtatcaaaacctttgttgataacttgaaaatatttggtaacagatccgtgtcagcagaggatggagctaatggtccgtctaagcaatcaaaccctcgtagatatcttgaggaagaatatctccaaactgagaaaaaggt

SEQ ID NO: 153708 - DNA, 1209 bp, Zea Mays
cttggatccctccctgcgctgccctgccacactgccgctgtcgctgccatcgcttacccatacatattaacccctgacgttgatccccaatattatccgtcttctcccccaattcgcccggcccgtcatcggagcaagcaccaagcaatgtgccccagagccacggctcagcactgcgccgccgcaatggctagtgtgtgttcgttcgtggaggaggagtacatcgacctggatctcagctcgtgcagagacttcgagttccgggtgcgccggagcggagcggcggacgagcttctctgccggggcagtctgcagcggccaccgccagctgccccgcacaaggccgcgccgccgaggcctggcggcaaggcgcaggaggttgacgtcggtggctgtggtggcgccgccgccggcaggaggagcgcggcgacggtcaccccgctgcagcactcgcactccgctggctgccgcgaggacacgcagacggtggtgaggctacgcgccgagggctcccgccgcaggaaggcggcgcggacggtgcacgcgaagctgctggcttcccgtgctttcttccggtctctgttcgccaggacctcgtgcaccgacgaccaatgccgcggcgcccaggtccgggccagccccagagcggctgtggcaccacccggcgagacgaagagcgtctgcaatgcggcatttggtcatatcaagaacggctacggctaccacagcggcagcggcagggcggcgctgagcaccctgcggagcagcatcgaacaggagaagctgatggacgaggaggacgtcgctgtgcccgccgccgcccgccagcgcaagtccttctccggcgtgatcaaatggcggcacccggcgacgaaggcgaagccgctgtcgtcgtccacggcgaggaagagctccgtggttggtggtggcggcggcggcgggccggcgctgaagcggagcagcagcgcgctgtcggagtcggaggggctgatccagggcgctatcgcctactgcaagcggtcgcagcatcagctcgggctcgccaggaagagcgtcagcgacgccgccctctgctccgcctccgcgccttcgtggcctagcaatccggctcgatcagctggagtagcttactgccactagccgtgagccagtgacttgtgggaaaacggatttaaaaaaatgaccacatcaataatgtcaagtttctca

SEQ ID NO: 153709 - DNA, 1324 bp, Zea Mays
cgccggccgaaccgcctccgcagtccgcaccacacgtgccacccccgcgcgcctccctctcctcttcactccgccaccattcttctccccctccggcgagagcgtgcgcccaccccgccatgaagcagctgcaccggcagtccagcattagcaagcagcaccgcccgcaccaccaccgtacctccctctcccgcaccctcgcttcctacctcctccgcgagcagcgcctcctcttcgtcctcctcggcttcctcctagcctcgtccttcttcttcctctacccgcattccgccgccggatcctcctcggccaccaatatcaccgccgccttcgccagaaagaacccccgcagcagcggcgcctcctcctccgcgcgccgcctccccgtcggtgtccggaagccctccctgcgcatcgtcgtcaccggcggcgcgggttttgttggcagccacctcgtcgacaagctcctcgcccgcggggatagcgtcatcgtcgtcgacaacttcttcacgggccgcaaggacaacgtcgcgcaccacctcggcaacccgcgattcgagctcatccgccacgacgtcgtcgaacccattctcctagaggtcgaccagatctaccacctcgcctgccccgcatcccccgtgcactacaagttcaaccccatcaaaaccatcacaaatgtcatggggaccttgaatatgcttggactggctaagagggttggggctcggttcttgttgactagtaccagtgaagtgtatggtgatcctcttgagcatccacagaaggagagctactggggacatgtcaatcccataggtgttaggagctgttatgatgaggggaagagaacagctgaaactcttaccatggattaccaccgcggtgctggtgttgaggtgagaattgcacgcatatttaacacatatggccctcgaatgtgtttagatgatggccgagttgttagcaactttgttgcacaggctttgcggaaacaaccaatgacagtttatggcgatggaaaacagactagaagttttcagttgatgggttggtaactctaatggaaagcgaccatattggaccattcaacttggggaatcctggagaatttacaatgctggagcttgcacaggtggtaaaagaaacaatcgacccaggtgcatctgtcgagttcaaacccaatactgcggatgatccgcacatgagaaaacctgacatttcgaaggctaaatctcttctcaattgggagccccaagtttcactaaaacaaggcctgccgcgtatggtctcggacttccagaaacgcatcatggatgagaaatga

SEQ ID NO: 153710 - DNA, 812 bp, Zea Mays
ctcctcttcactccgccaccattcttctccccctccggcgagagcgtgcgcccaccccgccatgaagcagctgcaccggcagtccagcattagcaagcagcaccgcccgcaccaccaccgtacctccctctcccgcaccctcgcttcctacctcctccgcgagcagcgcctcctcttcgtcctcctcggcttcctcctagcctcgtccttcttcttcctctacccgcattccgccgccggatcctcctcggccaccaatatcaccgccgccttcgccagaaagaacccccgcagcagcggcgcctcctcctccgcgcgccgcctccccgtcggtgtccggaagccctccctgcgcatcgtcgtcaccggcggcgcgggttttgttggcagccacctcgtcgacaagctcctcgcccgcggggatagcgtcatcgtcgtcgacaacttcttcacgggccgcaaggacaacgtcgcgcaccacctcggcaacccgcgattcgagctcatccgccacgacgtcgtcgaacccattctcctagaggtcgaccagatctaccacctcgcctgccccgcatcccccgtgcactacaagttcaaccccatcaaaaccatcatatcctccccgctccgctgcccgcgcataattcgtccacatcctcacagaaattggattcgttatatttgtctttattggtttatttatggacacggatacgacttctgtgatgcacatttcacatgggggtgaaggtgagcgtgggggtgcatttgtagttttgtgcttgcgtggggaatagcctgtatttacatct

SEQ ID NO: 153711 - DNA, 1783 bp, Zea Mays
ctcctcttcactccgccaccattcttctccccctccggcgagagcgtgcgcccaccccgccatgaagcagctgcaccggcagtccagcattagcaagcagcaccgcccgcaccaccaccgtacctccctctcccgcaccctcgcttcctacctcctccgcgagcagcgcctcctcttcgtcctcctcggcttcctcctagcctcgtccttcttcttcctctacccgcattccgccgccggatcctcctcggccaccaatatcaccgccgccttcgccagaaagaacccccgcagcagcggcgcctcctcctccgcgcgccgcctccccgtcggtgtccggaagccctccctgcgcatcgtcgtcaccggcggcgcgggttttgttggcagccacctcgtcgacaagctcctcgcccgcggggatagcgtcatcgtcgtcgacaacttcttcacgggccgcaaggacaacgtcgcgcaccacctcggcaacccgcgattcgagctcatccgccacgacgtcgtcgaacccattctcctagaggtcgaccagatctaccacctcgcctgccccgcatcccccgtgcactacaagttcaaccccatcaaaaccatcaagacaaatgtcatggggaccttgaatatgcttggactggctaagagggttggggctcggttcttgttgactagtaccagtgaagtgtatggtgatcctcttgagcatccacagaaggagagctactggggacatgtcaatcccataggtgttaggagctgttatgatgaggggaagagaacagctgaaactcttaccatggattaccaccgcggtgctggtgttgaggtgagaattgcacgcatatttaacacatatggccctcgaatgtgtttagatgatggccgagttgttagcaactttgttgcacaggctttgcggaaacaaccaatgacagtttatggcgatggaaaacagactagaagttttcagtatgtttcagatttggttgatgggttggtaactctaatggaaagcgaccatattggaccattcaacttggggaatcctggagaatttacaatgctggagcttgcacaggtggtaaaagaaacaatcgacccaggtgcatctgtcgagttcaaacccaatactgcggatgatccgcacatgagaaaacctgacatttcgaaggctaaatctcttctcaattgggagccccaagtttcactaaaacaaggcctgccgcgtatggtctcggacttccagaaacgcatcatggatgagaaatgatgaggagcagaggtttgtttcgaaaaggaaatgaggagcagacgccaccagtctcagaacactgtatcctactgacagatctcttttggtgccatgaaggctgaaggccttgacaaaggtcagatgaacgactaattgccaaaaaattcttcctcgctccagggcaatttttttttgtgacaggacatctgttctttggttctggtttcttcgatacataaacttcgccatagaattccatagttgcctttaagcgaacagtgagaggtcaacataaatttagtccctctttctctctttctgatgttattgaaacccatccacgtccattttacgtaggatgataccatattctcatgctacacatgtcctctatttcgtgtctgaatttttaggtgattttattactcttgtacaacaaacaaatagttattttatggttccttaaattgttacttttataatttgtgattttatgatttgtgatttgtttttgta

SEQ ID NO: 153712 - DNA, 1767 bp, Zea Mays
ctcctcttcactccgccaccattcttctccccctccggcgagagcgtgcgcccaccccgccatgaagcagctgcaccggcagtccagcattagcaagcagcaccgcccgcaccaccaccgtacctccctctcccgcaccctcgcttcctacctcctccgcgagcagcgcctcctcttcgtcctcctcggcttcctcctagcctcgtccttcttcttcctctacccgcattccgccgccggatcctcctcggccaccaatatcaccgccgccttcgccagaaagaacccccgcagcagcggcgcctcctcctccgcgcgccgcctccccgtcggtgtccggaagccctccctgcgcatcgtcgtcaccggcggcgcgggttttgttggcagccacctcgtcgacaagctcctcgcccgcggggatagcgtcatcgtcgtcgacaacttcttcacgggccgcaaggacaacgtcgcgcaccacctcggcaacccgcgattcgagctcatccgccacgacgtcgtcgaacccattctcctagaggtcgaccagatctaccacctcgcctgccccgcatcccccgtgcactacaagttcaaccccatcaaaaccatcaagacaaatgtcatggggaccttgaatatgcttggactggctaagagggttggggctcggttcttgttgactagtaccagtgaagtgtatggtgatcctcttgagcatccacagaaggagagctactggggacatgtcaatcccataggtgttaggagctgttatgatgaggggaagagaacagctgaaactcttaccatggattaccaccgcggtgctggtgttgaggtgagaattgcacgcatatttaacacatatggccctcgaatgtgtttagatgatggccgagttgttagcaactttgttgcacaggctttgcggaaacaaccaatgacagtttatggcgatggaaaacagactagaagttttcagttgatgggttggtaactctaatggaaagcgaccatattggaccattcaacttggggaatcctggagaatttacaatgctggagcttgcacaggtggtaaaagaaacaatcgacccaggtgcatctgtcgagttcaaacccaatactgcggatgatccgcacatgagaaaacctgacatttcgaaggctaaatctcttctcaattgggagccccaagtttcactaaaacaaggcctgccgcgtatggtctcggacttccagaaacgcatcatggatgagaaatgatgaggagcagaggtttgtttcgaaaaggaaatgaggagcagacgccaccagtctcagaacactgtatcctactgacagatctcttttggtgccatgaaggctgaaggccttgacaaaggtcagatgaacgactaattgccaaaaaattcttcctcgctccagggcaatttttttttgtgacaggacatctgttctttggttctggtttcttcgatacataaacttcgccatagaattccatagttgcctttaagcgaacagtgagaggtcaacataaatttagtccctctttctctctttctgatgttattgaaacccatccacgtccattttacgtaggatgataccatattctcatgctacacatgtcctctatttcgtgtctgaatttttaggtgattttattactcttgtacaacaaacaaatagttattttatggttccttaaattgttacttttataatttgtgattttatgatttgtgatttgtttttgta

SEQ ID NO: 153713 - DNA, 4616 bp, Zea Mays
atggtgccgggtgggttgttcgggtgggcgtcgccccatgtacagccgctcacacccgtatcggaggtctccgagccgccggagtcgccctcgccgtacggggacgggccggcgggggatgccggcgtgggggcaagggagggggaaggcgctggcgccggagaggaggaggtggaggacgacgaggtcgagccgccgcccgcggcggtgtccttctggaggcttttcgagttcgccgatggggtcgactgggcccttatggctgctggggcgcttgctgctgctgcgcatggcgcggcgctcgttgtgtaccttcactatttcgggagggccctgaatttgctcgactctgagcgggttgggtcgtctctctatggacgcagcgatgagctgctcagccggtttaaggagcatgccttgtatattgtctttatagctgctggtgttttcgtcgcaggatggatagaggtatcatgctggattctcactggggaacgccagactgctgtcatcagatcaaaatacgttcatgttttgctaaatcaagacatgagtttttttgatacatatggtaacaacggagatattgttagtcaagtgctcagtgatgtattgctcattcagtcagctataagcgagaaagtggggaactacatacataatatggctacatttgttggtggtctcattgttggccttctgaattgttggcaaatagcacttctaactcttgccactggacccttgattgttgcagctggaggaatatctaacatattccttcatagactggctgaaaacattcaagatgcatattccgaagcggctagtattggtgaacaggccatctcatacatccggacactgtatgcttttacaaatgaaactcttgcaaagtactcctatgctacctcacttcaagccacacttagatatggaattttgattagccttgtccaaggaattggtcttggctttacatatggactcgccatttgctcttgtgctttgcaactttgggttggaagacatctgatccatcgtggaaaagctgatggtggtgaagttgtggtagctttattctctgtaattctgagcggccttggtttgaatcaagcagctacaaacttctattcattcgaccaagggcgcattgctgcttatagactatatgagatgattagtcgttcaacttccagcaccaatcaagaagggacaaccttaccccaggtgcaagggaatattgagtttcgaaatgtgtactttagctacctgtctcgtcctgaaatcccaatattaagtggtttcttcctcactgtaccggcgagaaaaactgtggcacttgttggtagaaatggctcggggaaaagcagtataattcctctgatggagagattctatgacccaacattaggtgaagttcttttggatggggaaaacataaaaaatttgaaagtagaatggttaagaagccaaattggtctggtgacacaagaaccagccttattgagtttgagcattcgggaaaatattgcttatggaagatctgctacctttgatcagatagaagaggcagcaaaaacagcccatgcccatgggttcatcagttcacttgaaaaggggtacgaaacccaggttggtcgagctggtctagcactcactgatgaacagaaaatcaaaatttctattgctcgtgctgtgctttcgaatccatccattcttttgcttgatgaggtcaccggaggacttgattttgaagctgagaaggctgtacaagaagcattagatgttctgatgttgggaaggtcaaccattataattgctagacgtctttgcctcattaaaaatgctgattatatagctgtaatggaggagggccatcttgttgaaatggggacacatgatgaacttctaaacttggatggcctttatgctgaacttttaaggtgtgaggaagcaacaaaacttcccaaaaggatgcctaccaagaacagcagggaacataagtcgctccaatctgaggatgcattggtgagccaatactttcaagaatcctcctctcctaagatggcaaaatcaccatcactacaaaggacacatggtatgcttcaattttggcgatcagatgccaacagaaactctcatgattcaccaaaggatctaagtccaccttctgaacaaactatggacaatggaatacctatggttgcaattgaaactgaaaggacaccgtccattaagagacagaatagttttgaaatgaaattacctgatcttcctaaagttgatgtacatcctatacagcggcagtcatctaagaattcagaacctgactcacccatatctcctcttttgacttctgatcctaagaacgagcggtcacattcacaaacttttagcagaccgcagagtgaacaagatgatacgagttctgaacgtagtgaactggatgaggttcagcaccagaaacctccatctttttggcgtcttgcaacacttagtatcgctgaatggccttatgctcttttaggtacaattggtgctgctatatttggctcatttaatccactgcttgcttacacaatagcacttatagtgtcagcatactatcagatagaaatccgtgatatgcgccatgaagtgaacagatggtgtttattcatagtgggcatgggtgttattacagtgctagtcaactggctgcaacatttctattttggaataatgggggagaaaatgactgagcgcataagaaggatgatgttctcagcaatgctacgcaatgaagttggatggtttgacaaagatgaaaacaatgctgatacactgtccatgcgcctcgcaaatgatgctacatttgtccgtgctgcgttcagtaaccggctttccatatttatacaagatactgctgcagtatctgtggctctccttattggaatgttgttgggatggcgggtggcacttgttgcacttgcaactttgccagtccttgtcatatctgctattgcacagaaattgtggcttgctggtttctcaaaaggaatccaggaaatgcatagaaaggcttcgttagtacttgaagatgcagtccggaacatatacactgtagtagcattctgtgctggcgataagatcatggaactctacagactacatcttgggaagatactaaaacaaagtcttgtgcaaggattggctataggctttggttttggtctctcccagttcctcctttttgcctgcaatgccttgcttctttggtacactgcaatttcagttgaccgacaacgtctgacaatagccacaggactaaaagagtacattctgttttcgtttgcatcattcgcgttggtggagccatttggactggcaccttacattcttaaaaggagaaaatctcttacgtcagtctttgaaattattgaccgggagccaaaaattgatcctgatgataccaccggcttgaaaccacccaatgtctacggaagcattgaattcaagagtgttgatttttcttatcctgttcgccctgacattcttgtcttgagtaattttaatcttaaagtgagtggtgggcaaacacttgcggtggttggggtctcaggatcagggaaaagcaccattatttctttgattgagagattctatgaccctgtttctggccaagttctgctggatggtcgagatctgaaatcatttaaccttagatggttgcgtagccacatgggcctgattcagcaagatccagttattttctcaacgacgataagagaaaacattatttacgcaaggcacatcgcaacagaggctgagataaaggaagctgcaaggatagcaaatgctcaccatttcatcagcagcttgccacatggatatgacacccatgtgggaatgagaggggtcgatctaacacctgggcaaaagcaacggattgccattgctagggtggttttgaagaatgcacctatactgttgttggatgaggccagctctgcaatcgagtctgaatcaagtagagtggtacaagaagctctcgacactctggttatgggtaacaagacaacgattctcattgcgcacagggcagcaatgatgaagcatgtggataacattgttgtcctaaatggtggtaggatagttgagcagggcacacatgactctctgatggatcagaacggtctatatgttaggttgatgcaaccccattttggcaagggccttcgccagcatcggctagtgtaattattattgagcttgttaggtgtaaattatcctagggcatgatcaggtttacttccgctcttggtgcagccactcagggcccgttttggcacatgaaaaatgctgggaagttgccgccttgctggtgttgttctgagtaagcggaatgcagacctgatcttgacaaaaaaaacctagcttggagattcaggtaagtaactgttggaactgtagggcacaactcattctggaaatagttagcaagtttggatggcattgtaattgttgtaatatgagttgaaacattctttcagaggctcgtgcttgtgatctctcgcatctgtaatgttagtgttttgatcatttaatgtgtgtatattgttcgattcttggtc

SEQ ID NO: 153714 - DNA, 113 bp, Zea Mays
tttgaaaatgcataaatcacgatggtctcatagggcacttgttttgttcacagtatatcaaaatataaagtacaacgatattttgtcaatattgttgcaatcatacacgattt

SEQ ID NO: 153715 - DNA, 712 bp, Zea Mays
gatccatctctgttcgtttgacgacgatcaaatcaattcgtgctcaagatcaacgatccatggcgtacggcaagaggtcgcggcagaaggccgaggagatggtctggctgcccgacggcgccgacgtcgcgcgcttcctgctgctcttctcgggccaccagcactaccacggcgccagcggcgcggcgtccacagacgcggctgcctcggcgcccgagcgggtgttcgagtgcaagacctgcagccgccagttcccgtccttccaggcgctcggcggccaccgggccagccataagaagccccgcctcgcggacggcggcgtcgacgccgccgccgcggccgagccgcccaagaccaagcccaaggtgcacggctgctccatatgcgggctcgagttcgccatcggccaggcgctcggcggccacatgcgccgccaccgggctgccgaggcggaggacgcggtcggcggcagccccggcctcgggcttgacctcagcctcgggccgaaacgcgacagagtcagtaaggccaccgtgccgtcggtcgacctggtgctggaccttaatgccgtgccggaggagctcgacgaggagcaggattgcgccaagctggggctctccatcgatttccccgtagcagtagttgacttcttacgttaagaacgtggaatagattgatcttctcccgttctccgttctatttttgaaatagt

SEQ ID NO: 153716 - DNA, 949 bp, Zea Mays
aagccgccgccgctcttccacctacctctccccggcctcgcacccatggccacggctttgatggttgcagccaccacctcctgctccccgggccgcgccgcgccgcgcctgaagccggtggcctcctcctcctccagcagcagcagcagctcggcgcggccgcggcggcccttggcgcagcagctcccgcggctgctggcaacggcggcggcggcggcggcggtggcagctgcgccgctcccggcgctggcggagcagatggagaaggccgcactgtttgacttcaacctgacgctcccggcgatcgcgaccgagttcctgctgctcatggtggcgctggacaagctctacttcacgccgctaggcaagttcatggatgagcgggacgccaagatccgcggtgagctcggcgatgtcaagggcgcctccgaggaggtgaagcagctggaggaccaggcggcggccatcatgaaggcggcgcgcgccgagatcgcggcggcgcttaacaagatgaagaaggagaccaccgcggagctggaggccaagctggacgaggggcgcagccgtgtggaggccgagctcgtagaggcgctcgccaacctcgaggcgcagaaggaggaggctgttaaggcgctcgacgcccagatcgcctcgctcagtgatgagatcgtcaagaaggtgctcccatccgcgtgatgaaaccaaaccggccctgccttatcctacgactatagttacatgaacatcataaattaatgataattttgaagaaattggccgatgactccgacactgtactcatgaaagattattggatgggttgtgtccaccgcctgtgttgggtgtggattgttgtagactcgcagtgatctttctcgataagcttgtacagttcagtacatacagacacacattgaaaccatatagatacaggatacattttgcccta

SEQ ID NO: 153717 - DNA, 1325 bp, Zea Mays
tggtgtcggtgtcggcgttggcgagtggcgactggcgacttctctgcctcgtcctccccgttttcccctccgcgtccagcccggcgcgacgccgccacgcacctagccgcggatccgaggcgcagatccaatccagcgatggcgtccacggcggcgaggcggttgcgggagctgcaggcccagacggggaacaagacctgcgtggactgcgcgcagcggaacccgcagtgggcgagcgtctcctacggcgtgttcatgtgcctcgagtgctccggcaagcaccggggcctcggcgtgcacatcagtttcgtgcgctcggtcaccatggactcctggaccgaggcgcagctccgcaagatggaggccggcggcaacgaccgcctcaacgccttcctcacagcgcggggcgttcccaaggagacgtcccacgtcgcgaagtacaactccaacgccgcggccgcctaccgcgaccgcatcgccgcgctcgctgagggcaagccttggaccgacccgcccgtagtcaaggagacgcccggatctgggcgcgcccgccccggctaggaagccacccttgcacgcctccggaggcggcggcgggtgggacgactgggacgatgattttcggtcggacatgaggcggaatcagtcggttggatcattcgccgccgcgggggcgcagtcagggaggcagccgccgaggtccaaatcaacacaggacatctacactaggcagcagctggaggcgtcggcggctaataaggatgatttcttcgccaggaggatggcggagaacgagtccaagcctgagggtatcccgccatcccagggcggcaagtacgttgggttcggatccagcccagcgccatcggctaataggaacggcggtgctgctcagggcgatgtcttgcaggtcgtctctcaggaaaacagaacaattactatggagtatatgtttgactacaatgggatttggacgcctttcattagttgcagcctctgctgcccagtctgctgccagtgttgtccaagtcggcacaaaagaaatccaatcaaagatgagggatgggggctatgaccagaaggtgaatgaaactgtcagtgttgttgccaataaaactgcagagattggaagcaagacctgggggatcatgagaggagttatggcaatggcctcacaaaaggtcgaggaatatgccaaggaaggaggaatgagcggctggggagaggattggcaacgcagcgagcagaacggtgagccttaccaaaggtttgagcacgcgaccgacagcaacagtttgaattcctcccaaaattcttcatggaag

SEQ ID NO: 153718 - DNA, 1282 bp, Zea Mays
tggtgtcggtgtcggcgttggcgagtggcgactggcgacttctctgcctcgtcctccccgttttcccctccgcgtccagcccggcgcgacgccgccacgcacctagccgcggatccgaggcgcagatccaatccagcgatggcgtccacggcggcgaggcggttgcgggagctgcaggcccagacggggaacaagacctgcgtggactgcgcgcagcggaacccgcagtgggcgagcgtctcctacggcgtgttcatgtgcctcgagtgctccggcaagcaccggggcctcggcgtgcacatcagtttcgtgcgctcggtcaccatggactcctggaccgaggcgcagctccgcaagatggaggccggcggcaacgaccgcctcaacgccttcctcacagcgcggggcgttcccaaggagacgtcccacgtcgcgaagtacaactccaacgccgcggccgcctaccgcgaccgcatcgccgcgctcgctgagggcaagccttggaccgacccgcccgtagtcaaggagacgcccggatctgggcgcgcccgccccggctaggaagccacccttgcacgcctccggaggcggcggcgggtgggacgactgggacgatgattttcggtcggacatgaggcggaatcagtcggttggatcattcgccgccgcgggggcgcagtcagggaggcagccgccgaggtccaaatcaacacaggacatctacactaggcagcagctggaggcgtcggcggctaataaggatgatttcttcgccaggaggatggcggagaacgagtccaagcctgagggtatcccgccatcccagggcggcaagtacgttgggttcggatccagcccagcgccatcggctaataggaacggcggtgctgctcagggcgatgtcttgcaggtcgtctctcagggatttggacgcctttcattagttgcagcctctgctgcccagtctgctgccagtgttgtccaagtcggcacaaaagaaatccaatcaaagatgagggatgggggctatgaccagaaggtgaatgaaactgtcagtgttgttgccaataaaactgcagagattggaagcaagacctgggggatcatgagaggagttatggcaatggcctcacaaaaggtcgaggaatatgccaaggaaggaggaatgagcggctggggagaggattggcaacgcagcgagcagaacggtgagccttaccaaaggtttgagcacgcgaccgacagcaacagtttgaattcctcccaaaattcttcatggaag

SEQ ID NO: 153719 - DNA, 2712 bp, Zea Mays
gtcagcgcgcgttctcgctacgcgttctccacttctccccacggcccacgcctttcccagccaaaagaaatatccaattcctcaccctaccccctcgctgctttctcctccccgtcgacctcgccaatcttcctcccgctaaccctagtccagcacccgagatctactccgcgcaaacagccatggcggagacgctcgacatgaccctcgacgacatcatcaagaacaacaagaagagtaacccctcgtctcgcggggcccgccgcagccgcggcgtatccgcccctggcggcgggaccggcggggtcgggccgaccaggcgcccctttaaaagggctgggaacaggcaggcgccctaccagccgccgaaggcccccgacgctgcgtggcagcacgacatgtaccctgcggtcgccgcaggaggcggcggcggcggcgggagggtctcggctctcgagacgggcgccaagctctacatctccaacctggactttggggtttcgaacgaggatattaaggagcttttctctgagctaggtgatttgaagcgtttttcgataaattatgatcgaagtgggaggtctaagggaacagctgaagttgtatttgcaaggcgttctgatgctgtagcggcggttaagaaatatgacaatgtccaacttgatggtaagcccatgaagatagagatagttggtaccaatactccagctgcagcagctgctcatccagtccctaatggtggtcatgctaggaatgctgcgaggaggcttcccgcactgtccggggtctggggaagggtatctttaagcgccaagccttacccgcataatatgcagaggctagagctcgaacctgggaccttccggttacagacgtgcaccaaaggatgctgctccagcaggtatgtcgcagcatagaacccatcagaggggtgggaggcgtgctgctggatctggtggtggtcgtcgtggcaaagagcgcagcaagccaaagtcgactgaagaactcgatgctgatttggagaagtatcatgctgatgcgatgcagaccaactaaatacattcacaaatttgatattcgacatcaaatatcaagcgcattagtccttccattacagctgtttgtgctaccatgttcaggggacaacaaaccttttctttgttgggggcgggggtattgctttactgagttttgtggattttatgtgtttacaatagaactagagttgggtgatgctgaatacttttatggaaattacttggttgcaagttgctcgacatgtgaaagttggttatgtatgaaggtactcagatgttccctggtgacctagttgtgtgcttccattctggtgttgctcagacttttctctgctgtaggcctgttcaagctctagccatctaagtaggaggtgtctgttgcatattgtgaaacattgtgatgtttattttgggcatcttaagctatcttctctggcacattaatgatttcatgagcttcaaggtgcctttcttttacaagttgattccttgcttgcataatcctcacttccggtgtccacgaagtccgagttaactgacttggctgccactagtccgattgaagcatcatggtgcaaatcctccttcaagatctgctattgatagcttagagatagctgcactattgatgcctctacttcattttggactactataggccctctttgcgtatttatgctatataaacatatgggggcatcctctacaatggttgatcttgtctactgtgctttggagttcctttcaacttcgcttggatcctttgatgacaaatggaatcatgtgcctctgcccagaaaatcagtttctaactgaaactctctcttttgcttgctttcatacttatgtcaatggcgatgcctgatgtggagcttgttttgtcatcaaccttggctgtgcgaatcataagtggtggtggtttatatcatcatggtttcacaatcttgggattcttggccaccatgttgacattgatatagtatatcacattaggaactcacaggctgttatgttccttcccgtaacatctgaactggtggtaatagctgttgctcggatgaggctgcaaggacctgatttgaatggagaacccgatcggccctaggtgagactctgtatcctgatgcttcaccatgtcgatctcacgaagcacgtacagctgcaaaccaccactcaacaagcgatggaaacactcacatcatagtgcttcgccatatcgatcttactaagcacgtacaggtgcagctgcaagactggtcgagtagtacatggtttctattcaccaagtccaagagggattttttttatacggtacaaggacgccatacactcacaccactacacacgtatacacacggcatgtccttacacaccaaattcaataccactgaatgcatattctgtacctatagaaaaatctcaggttattggtgcgtatcaaaaaaaaatatcggcttatattggattttatgactgagataatggtgataatttttttttcttttgaatatgtctaagatggtcttgtattaccaactcaaattctataactatctcgacaaaatctaagaaattatgatttgtatcattgtaaagctcttcactgcttccttcaaaagacaagctacatttaggtatttcataattgctacttttttctctctaaaactggcct

SEQ ID NO: 153720 - DNA, 5585 bp, Zea Mays
gtcagcgcgcgttctcgctacgcgttctccacttctccccacggcccacgcctttcccagccaaaagaaatatccaattcctcaccctaccccctcgctgctttctcctccccgtcgacctcgccaatcttcctcccgctaaccctagtccagcacccgagatctactccgcgcaaacagccatggcggagacgctcgacatgaccctcgacgacatcatcaagaacaacaagaagagtaacccctcgtctcgcggggcccgccgcagccgcggcgtatccgcccctggcggcgggaccggcggggtcgggccgaccaggcgcccctttaaaagggctgggaacaggcaggcgccctaccagccgccgaaggcccccgacgctgcgtggcagcacgacatgtaccctgcggtcgccgcaggaggcggcggcggcggcgggagggtctcggctctcgagacgggcgccaagctctacatctccaacctggactttggggtttcgaacgaggatattaaggagcttttctctgagctaggtgatttgaagcgtttttcgataaattatgatcgaagtgggaggtctaagggaacagctgaagttgtatttgcaaggcgttctgatgctgtagcggcggttaagaaatatgacaatgtccaacttgatggtaagcccatgaagatagagatagttggtaccaatactccagctgcagcagctgctcatccagtccctaatggtggtcatgctaggaatgctgcgaggagtgcaccaaaggatgctgctccagcaggtatgtcgcagcatagaacccatcagaggggtgggaggcgtgctgctggatctggtggtggtcgtcgtggcaaagagcgcagcaagccaaagtcgactgaagaactcgatgctgatttggagaagtatcatgctgatgcgatgcagaccaactaaatacattcacaaatttgatattcgacatcaaatatcaagcgcattagtccttccattacagctgtttgtgctaccatgttcaggggacaacaaaccttttctttgttgggggcgggggtattgctttactgagttttgtggattttatgtgtttacaatagaactagagttgggtgatgctgaatacttttatggaaattacttggttgcaagttgctcgacatgtgaaagttggttatgtatgaaggtactcagatgttccctggtgacctagttgtgtgcttccattctggtgttgctcagacttttctctgctgtaggcctgttcaagctctagccatctaagtaggaggtgtctgttgcatattgtgaaacattgtgatgtttattttgggcatcttaagctatcttctctggcacattaatgatttcatgagcttcaaggtgcctttcttttacaagttgattccttgcttgcataatcctcacttccggtgtccacgaagtccgagttaactgacttggctgccactagtccgattgaagcatcatggtgcaaatcctccttcaagatctgctattgatagcttagagatagctgcactattgatgcctctacttcattttggactactataggccctctttgcgtatttatgctatataaacatatgggggcatcctctacaatggttgatcttgtctactgtgctttggagttcctttcaacttcgcttggatcctttgatgacaaatggaatcatgtgcctctgcccagaaaatcagtttctaactgaaactctctcttttgcttgctttcatacttatgtcaatggcgatgcctgatgtggagcttgttttgtcatcaaccttggctgtgcgaatcataagtggtggtggtttatatcatcatggtttcacaatcttgggattcttggccaccatgttgacattgatatagtatatcacattaggaactcacaggctgttatgttccttcccgtaacatctgaactggtggtaatagctgttgctcggatgaggtaggagtcttttcttttgtttcctgttataattattattggttcaattctgttgcaaattatgtcaatctttttgccttttactgcttaatgatacatggttctatctggtgaaatcatcttgctgtgtgaaatgctatatggttctatctggcaaaatcggattgctttgtattgtactccctcgttcctagaattctaggatgcgatagaatagtgctaagccattacaatctgacgtctgatcaaatttatattaaaagatattccctccgttccgaaatatagttctttcatctactttttctctccacattcattcaaaatgatgatgaatataggcatacactcaaactgtattcatgtgctataattagtctaaaacaaactatattttgggacggagagagtaagatttttcttaatatgtatcatcactaataaagtatattttgttagtatagcaattttggagggaacacatgactgttttcgataaacttagtcaaacatatgatttgactttgactggatttagaattgtttctttttgtgatggaaacgagaggtagaattgcatggaaaggactgaggtatttttttcggtaataaatgacgattgaattgtatctttttcggtaattaaagaagtgacttagatgcactttctgaatgttgatgataaatggtgggatggaattgacggatgttgataaatttgattgaattgtattagacgatagatagtgattgaattgtatcctttttggatggaaataagggaggtagaattgcatcctttttcagatggaaaggacggagatattagacgactttgttgtgaaacatgtgcctctccaataaatatttcttcaaggttaggattcaattgttgtgaaacctctttgaatgaacagccatttaagatgccgttttcacctattccagatgtcttcatatggataaactaagggtctgtttggtttgatgtctaacttgccacactttgtctaacttttctgtctaaggttaggggcctgtttggtttgtggctaaatgtgccacactttgcctaaggttagtcgttcgaattgaataactaacattaggcagaaaagttaggcaatgtgtggcaactgaggtagtgaaccaaacatgccttagttcttctattcgaacgactaaccttaggcaaagtgtgacacatttagccatgaaccaaacaacctctaaatgctactagtggattggctatgtttttgttgacttttgtgttgcatgcgtgcacaagattcaaaataaggctagtacaagtaataaatcatattcataatgcatactgcatagacacattttggaaactatttggatactagcgagttcatgactagtgcaattacaattaggctgctgtttacatttttgtggtgaataagggcatgtttggtttagggctaactgtgccacactttgtctaaggttagtcgttcgaattgaataactaaccttacacagaaaagttagtcagcaaaccaaacatattcctaactgacatattcaaatggtggcttgtttttatgggtaatgtgtgcatctgtacgttccgctaggctgcaaggacctgatttgaatggagaacccgatcggccctaggtgagactctgtatcctgatgcttcaccatgtcgatctcacgaagcacgtacagctgcaaaccaccactcaacaagcgatggaaacactcacatcatagtgcttcgccatatcgatcttactaagcacgtacaggtgcagctgcaagactggtcgagtagtacatggtttctattcaccaagtccaagagggattttttttatacggtacaaggacgccatacactcacaccactacacacgtatacacacggcatgtccttacacaccaaattcaataccactgaatgcatattctgtacctatagaaaaatctcaggttattggtgcgtatcaaaaaaaaatatcggcttatattggattttatgactgagataatggtgataatttttttttcttttgaatatgtctaagatggtcttgtattaccaactcaaattctataactatctcgacaaaatctaagaaattatgatttgtatcattgtaaagctcttcactgcttccttcaaaagacaagctacatttaggtatttcataattgctacttttttctctctaaaactggcctcaaacgttctttcttctttgtgattggcttctgcaagtccttatcaatactttctttttgcaatctagtcatcaatttatttcacttgttcaaatttctaatatgttcaacactatctgcatgttatcgaagtctcatttatatgcctccaatttctatatccatcatgtgctaataaactcagactcctgccactactagactaaaagatcttataatagaaggaaaaaaaactttatcaacatgctttgaacaaactagccattttctatcgtgtacccctctattgcttcgtatgaaattacaagtatgaccacgatatttacatgtatgatttacaaataacatatggataatatcgtcttttctcctcctttcttgctaatcaagacttctggttcttccttttctttgattcgtagaatgaggccttcgacgacgaagcttctagctttgtctcacgccttcgcagcaccaatgcgcacacgaagctccacaacttctctagtttgtatattgctttgtaatgcgcacacgaagcttcacaacttctctagtttgtatattgctttgttgactccctctgttgtactaaaggaattagatattagagtgcatgtcttcttgtcttaccttggcctttttaatcacttggtgtcaggataaggataagataagactttgggacaaaaatttagagaaccctatatagtacatatttatgatcaattattagtttgtgagattgaaaaaaatgcacacatatattatacaaggactagtataccatgcaatatggctacaagcatctaacgaacaacaagagactagaggggttgcaggaatcaccttatgtgtgatgtcatgatcatgttgtccgtaaagattgaagaaatcaattatgactcggcgtcaaatgatttagagttgctggggtagtgtcgacgtcgtccagattgtgaggtcacgagggcgtcgtggcgacaaccggcgaagctagagtgaatcagagtgtgcatgattggatgcctgtatccggacgcgcaggctcgggtgaccctagctgacctgatacgacaattttctgagtacgagtggatgcaatcaaatgactataaaataacttgttttgcatccgctcatgtagcttgcgtctcccttgtgcagacaactctgtgcagacaactaaacaggagcttagataaagtcaacgcatacggtggtccaagacgagacgatgcgggtaaccaaacatatggagtgtgcatatgccttaagagtgcatattaatttatagaggttgcatatatgatgaaaagtaagtctaaatcataattgattttgcaagtttttgtgtgtgagtgtgcacttg

SEQ ID NO: 153721 - DNA, 1952 bp, Zea Mays
acggcccacgcctttcccagccaaaagaaatatccaattcctcaccctaccccctcgctgctttctcctccccgtcgacctcgccaatcttcctcccgctaaccctagtccagcacccgagatctactccgcgcaaacagccatggcggagacgctcgacatgaccctcgacgacatcatcaagaacaacaagaagagtaacccctcgtctcgcggggcccgccgcagccgcggcgtatccgcccctggcggcgggaccggcggggtcgggccgaccaggcgcccctttaaaagggctgggaacaggcaggcgccctaccagccgccgaaggcccccgacgctgcgtggcagcacgacatgtaccctgcggtcgccgcaggaggcggcggcggcggcgggagggtctcggctctcgagacgggcgccaagctctacatctccaacctggactttggggtttcgaacgaggatattaaggagcttttctctgagctaggtgatttgaagcgtttttcgataaattatgatcgaagtgggaggtctaagggaacagctgaagttgtatttgcaaggcgttctgatgctgtagcggcggttaagaaatatgacaatgtccaacttgatggtaagcccatgaagatagagatagttggtaccaatactccagctgcagcagctgctcatccagtccctaatggtggtcatgctaggaatgctgcgaggaggtatatttctcatctgattattcatcctccgtccttgtcatttgtcaatatcatttgtagtggcatgtttggcagtattcaaaatgactagatgttgtcatcttttagttattcattgttatatcaaaattgtgtcaaagaacagcactcttgtccagttccaactcatccctgccaatctaacaaggcaaataaaatgatattattttgttataacagctattctttataagtttgtaatgataattctcattgtacattaggttattttgacatggctaaacttaaggccatctccagcagatcccctaccccatcccctattggcctatttcaaacttcgctctacaaacagtgtcatctacagtgtggtgtccccttttttacacgacccaccgaagacaggcatgaaaatgaatgtctttgtatcatgctatagttcatttaataaaattttgatgagagtcagtggatagttctgtagatgattaaccttggtatggtgcacttgatcactcagattgctgttatatgtgtacttatgtaggctttatcttcacctatatagatgcaacgtttcttgttttaaatataccctagtctcattatataaaaaagggcttacccagtgccgtaggcttcccgcactgtccggggtctggggaagggtatctttaagcgccaagccttacccgcataatatgcagaggctagagctcgaacctgggaccttccggttacagacggtaggctctaccgctgcaccaagcccgcccttcagtctcattatgtgaaatcttactaaattacatttaaatattacagtgcaccaaaggatgctgctccagcaggtatgtcgcagcatagaacccatcagaggggtgggaggcgtgctgctggatctggtggtggtcgtcgtggcaaagagcgcagcaagccaaagtcgactgaagaactcgatgctgatttggagaagtatcatgctgatgcgatgcagaccaactaaatacattcacaaatttgatattcgacatcaaatatcaagcgcattagtccttccattacagctgtttgtgctaccatgttcaggggacaacaaaccttttctttgttgggggcgggggtattgctttactgagttttgtggattttatgtgtttacaatagaactagagttgggtgatgctgaatacttttatggaaattacttggttgcaagttgctcg

SEQ ID NO: 153722 - DNA, 2563 bp, Zea Mays
acggcccacgcctttcccagccaaaagaaatatccaattcctcaccctaccccctcgctgctttctcctccccgtcgacctcgccaatcttcctcccgctaaccctagtccagcacccgagatctactccgcgcaaacagccatggcggagacgctcgacatgaccctcgacgacatcatcaagaacaacaagaagagtaacccctcgtctcgcggggcccgccgcagccgcggcgtatccgcccctggcggcgggaccggcggggtcgggccgaccaggcgcccctttaaaagggctgggaacaggcaggcgccctaccagccgccgaaggcccccgacgctgcgtggcagcacgacatgtaccctgcggtcgccgcaggaggcggcggcggcggcgggagggtctcggctctcgagacgggcgccaagctctacatctccaacctggactttggggtttcgaacgaggatattaaggagcttttctctgagctaggtgatttgaagcgtttttcgataaattatgatcgaagtgggaggtctaagggaacagctgaagttgtatttgcaaggcgttctgatgctgtagcggcggttaagaaatatgacaatgtccaacttgatggtaagcccatgaagatagagatagttggtaccaatactccagctgcagcagctgctcatccagtccctaatggtggtcatgctaggaatgctgcgaggagtgcaccaaaggatgctgctccagcaggtatgtcgcagcatagaacccatcagaggggtgggaggcgtgctgctggatctggtggtggtcgtcgtggcaaagagcgcagcaagccaaagtcgactgaagaactcgatgctgatttggagaagtatcatgctgatgcgatgcagaccaactaaatacattcacaaatttgatattcgacatcaaatatcaagcgcattagtccttccattacagctgtttgtgctaccatgttcaggggacaacaaaccttttctttgttgggggcgggggtattgctttactgagttttgtggattttatgtgtttacaatagaactagagttgggtgatgctgaatacttttatggaaattacttggttgcaagttgctcgacatgtgaaagttggttatgtatgaaggtactcagatgttccctggtgacctagttgtgtgcttccattctggtgttgctcagacttttctctgctgtaggcctgttcaagctctagccatctaagtaggaggtgtctgttgcatattgtgaaacattgtgatgtttattttgggcatcttaagctatcttctctggcacattaatgatttcatgagcttcaaggtgcctttcttttacaagttgattccttgcttgcataatcctcacttccggtgtccacgaagtccgagttaactgacttggctgccactagtccgattgaagcatcatggtgcaaatcctccttcaagatctgctattgatagcttagagatagctgcactattgatgcctctacttcattttggactactataggccctctttgcgtatttatgctatataaacatatgggggcatcctctacaatggttgatcttgtctactgtgctttggagttcctttcaacttcgcttggatcctttgatgacaaatggaatcatgtgcctctgcccagaaaatcagtttctaactgaaactctctcttttgcttgctttcatacttatgtcaatggcgatgcctgatgtggagcttgttttgtcatcaaccttggctgtgcgaatcataagtggtggtggtttatatcatcatggtttcacaatcttgggattcttggccaccatgttgacattgatatagtatatcacattaggaactcacaggctgttatgttccttcccgtaacatctgaactggtggtaatagctgttgctcggatgaggctgcaaggacctgatttgaatggagaacccgatcggccctaggtgagactctgtatcctgatgcttcaccatgtcgatctcacgaagcacgtacagctgcaaaccaccactcaacaagcgatggaaacactcacatcatagtgcttcgccatatcgatcttactaagcacgtacaggtgcagctgcaagactggtcgagtagtacatggtttctattcaccaagtccaagagggattttttttatacggtacaaggacgccatacactcacaccactacacacgtatacacacggcatgtccttacacaccaaattcaataccactgaatgcatattctgtacctatagaaaaatctcaggttattggtgcgtatcaaaaaaaaatatcggcttatattggattttatgactgagataatggtgataatttttttttcttttgaatatgtctaagatggtcttgtattaccaactcaaattctataactatctcgacaaaatctaagaaattatgatttgtatcattgtaaagctcttcactgcttccttcaaaagacaagctacatttaggtatttcataattgctacttttttctctctaaaactggcct

SEQ ID NO: 153723 - DNA, 2695 bp, Zea Mays
acggcccacgcctttcccagccaaaagaaatatccaattcctcaccctaccccctcgctgctttctcctccccgtcgacctcgccaatcttcctcccgctaaccctagtccagcacccgagatctactccgcgcaaacagccatggcggagacgctcgacatgaccctcgacgacatcatcaagaacaacaagaagagtaacccctcgtctcgcggggcccgccgcagccgcggcgtatccgcccctggcggcgggaccggcggggtcgggccgaccaggcgcccctttaaaagggctgggaacaggcaggcgccctaccagccgccgaaggtacgaacgaatcgaacgggctgttgctccgcgtcgcccggcggaggatgcgggtgcttcggacttcgctgagtcgggcgggaggagaaggtctggtggttttctcactgtggtgtgacgcaatcgatccaggcccccgacgctgcgtggcagcacgacatgtaccctgcggtcgccgcaggaggcggcggcggcggcgggagggtctcggctctcgagacgggcgccaagctctacatctccaacctggactttggggtttcgaacgaggatattaaggagcttttctctgagctaggtgatttgaagcgtttttcgataaattatgatcgaagtgggaggtctaagggaacagctgaagttgtatttgcaaggcgttctgatgctgtagcggcggttaagaaatatgacaatgtccaacttgatggtaagcccatgaagatagagatagttggtaccaatactccagctgcagcagctgctcatccagtccctaatggtggtcatgctaggaatgctgcgaggagtgcaccaaaggatgctgctccagcaggtatgtcgcagcatagaacccatcagaggggtgggaggcgtgctgctggatctggtggtggtcgtcgtggcaaagagcgcagcaagccaaagtcgactgaagaactcgatgctgatttggagaagtatcatgctgatgcgatgcagaccaactaaatacattcacaaatttgatattcgacatcaaatatcaagcgcattagtccttccattacagctgtttgtgctaccatgttcaggggacaacaaaccttttctttgttgggggcgggggtattgctttactgagttttgtggattttatgtgtttacaatagaactagagttgggtgatgctgaatacttttatggaaattacttggttgcaagttgctcgacatgtgaaagttggttatgtatgaaggtactcagatgttccctggtgacctagttgtgtgcttccattctggtgttgctcagacttttctctgctgtaggcctgttcaagctctagccatctaagtaggaggtgtctgttgcatattgtgaaacattgtgatgtttattttgggcatcttaagctatcttctctggcacattaatgatttcatgagcttcaaggtgcctttcttttacaagttgattccttgcttgcataatcctcacttccggtgtccacgaagtccgagttaactgacttggctgccactagtccgattgaagcatcatggtgcaaatcctccttcaagatctgctattgatagcttagagatagctgcactattgatgcctctacttcattttggactactataggccctctttgcgtatttatgctatataaacatatgggggcatcctctacaatggttgatcttgtctactgtgctttggagttcctttcaacttcgcttggatcctttgatgacaaatggaatcatgtgcctctgcccagaaaatcagtttctaactgaaactctctcttttgcttgctttcatacttatgtcaatggcgatgcctgatgtggagcttgttttgtcatcaaccttggctgtgcgaatcataagtggtggtggtttatatcatcatggtttcacaatcttgggattcttggccaccatgttgacattgatatagtatatcacattaggaactcacaggctgttatgttccttcccgtaacatctgaactggtggtaatagctgttgctcggatgaggctgcaaggacctgatttgaatggagaacccgatcggccctaggtgagactctgtatcctgatgcttcaccatgtcgatctcacgaagcacgtacagctgcaaaccaccactcaacaagcgatggaaacactcacatcatagtgcttcgccatatcgatcttactaagcacgtacaggtgcagctgcaagactggtcgagtagtacatggtttctattcaccaagtccaagagggattttttttatacggtacaaggacgccatacactcacaccactacacacgtatacacacggcatgtccttacacaccaaattcaataccactgaatgcatattctgtacctatagaaaaatctcaggttattggtgcgtatcaaaaaaaaatatcggcttatattggattttatgactgagataatggtgataatttttttttcttttgaatatgtctaagatggtcttgtattaccaactcaaattctataactatctcgacaaaatctaagaaattatgatttgtatcattgtaaagctcttcactgcttccttcaaaagacaagctacatttaggtatttcataattgctacttttttctctctaaaactggcct

SEQ ID NO: 153724 - DNA, 2077 bp, Zea Mays
agaaatatccaattcctcaccctaccccctcgctgctttctcctccccgtcgacctcgccaatcttcctcccgctaaccctagtccagcacccgagatctactccgcgcaaacagccatggcggagacgctcgacatgaccctcgacgacatcatcaagaacaacaagaagagtaacccctcgtctcgcggggcccgccgcagccgcggcgtatccgcccctggcggcgggaccggcggggtcgggccgaccaggcgcccctttaaaagggctgggaacaggcaggcgccctaccagccgccgaaggcccccgacgctgcgtggcagcacgacatgtaccctgcggtcgccgcaggaggcggcggcggcggcgggagggtctcggctctcgagacgggcgccaagctctacatctccaacctggactttggggtttcgaacgaggatattaaggagcttttctctgagctaggtgatttgaagcgtttttcgataaattatgatcgaagtgggaggtctaagggaacagctgaagttgtatttgcaaggcgttctgatgctgtagcggcggttaagaaatatgacaatgtccaacttgatggtaagcccatgaagatagagatagttggtaccaatactccagctgcagcagctgctcatccagtccctaatggtggtcatgctaggaatgctgcgaggagtgcaccaaaggatgctgctccagcaggtatgtcgcagcatagaacccatcagaggggtgggaggcgtgctgctggatctggtggtggtcgtcgtggcaaagagcgcagcaagccaaagtcgactgaagaactcgatgctgatttggagaagtatcatgctgatgcgatgcagaccaactaaatacattcacaaatttgatattcgacatcaaatatcaagcgcattagtccttccattacagctgtttgtgctaccatgttcaggggacaacaaaccttttctttgttgggggcgggggtattgctttactgagttttgtggattttatgtgtttacaatagaactagagttgggtgatgctgaatacttttatggaaattacttggttgcaagttgctcgacatgtgaaagttggttatgtatgaaggtactcagatgttccctggtgacctagttgtgtgcttccattctggtgttgctcagacttttctctgctgtaggcctgttcaagctctagccatctaagtaggaggtgtctgttgcatattgtgaaacattgtgatgtttattttgggcatcttaagctatcttctctggcacattaatgatttcatgagcttcaaggtgcctttcttttacaagttgattccttgcttgcataatcctcacttccggtgtccacgaagtccgagttaactgacttggctgccactagtccgattgaagcatcatggtgcaaatcctccttcaagatctgctattgatagcttagagatagctgcactattgatgcctctacttcattttggactactataggccctctttgcgtatttatgctatataaacatatgggggcatcctctacaatggttgatcttgtctactgtgctttggagttcctttcaacttcgcttggatcctttgatgacaaatggaatcatgtgcctctgcccagaaaatcagtttctaactgaaactctctcttttgcttgctttcatacttatgtcaatggcgatgcctgatgtggagcttgttttgtcatcaaccttggctgtgcgaatcataagtggtggtggtttatatcatcatggtttcacaatcttgggattcttggccaccatgttgacattgatatagtatatcacattaggaactcacaggctgttatgttccttcccgtaacatctgaactggtggtaatagctgttgctcggatgaggtaggagtcttttcttttgtttcctgttataattattattggttcaattctgttgcaaattatgtcaatctttttgccttttactgcttaatgatacatggttctatctggtgaaatcatcttgctgtgtgaaatgctatatggttctatct

SEQ ID NO: 153725 - DNA, 2518 bp, Zea Mays
actagtcctaagaaagaaagaaaaggtaaccaatccgttcagatggttcgagagaataaacacacacttcgactcttcgagcgtttttccacttggtgccagaagtcacccgagcggccgagccactcaccgaaaatttccgagcctgatcggctcatcccgtcattccgtctgcccctgcaccaacaggtcccgccagcaccaacccaacgcaacccagcgtcccgtcgcaacgatacaatagaagccgcacgaaccccgcgctgcgctgttctggagaggtcccgtgcgcgcccgaaccctccgccggttgcgctcatgctcacgcctacgacgtcgcccgcgcgccgggccgcgctcgcaccgccacatcaccgcactacacgaaccttcccgaacgccaccgctccccgccctacggctttagcagagatggcgggcaacaagggagagggcccggcgatcggcatcgacctcggcacgacctactcctgcgtcggggtctggcagcatgaccgggtggagattatcgccaacgaccagggcaaccgcaccacgccgtcgtacgtggcgttcaccgacaccgagaggctcatcggcgacgccgccaagaaccaggtcgccatgaatcccaccaacaccgtcttcgatgccaagcgactcatcggccggcgcttctcggacccgtctgtgcaggcggacatgaagatgtggccattcaaggtcgtcccaggccccgccgacaagccaatgatcgtggtgacttacaagggcgaggagaagaagttctcggccgaggagatctcctccatggtgctcaccaagatgaaggagatcgccgaggcctacctcagcaccaccatcaagaacgccgtcattaccgtgccggcctacttcaatgactcgcagcgccaggccaccaaggacgccggcgtcattgccggcctcaacgtcacgcgcatcatcaacgagcccacggccgccgccatcgcctacggactcgacaagaaggccaccagcactggcgagaagaacgtgctcatcttcgaccttggcggtggcacctttgatgtgtccatcctcaccattgaggagggcatcttcgaggtcaaggccacggctggtgacacccacctgggaggcgaggacttcgacaaccgcctggtgaaccacttcgtgatggagttcaagaggaaacacaagaaggacatcagcggcaacccgagggcgctccggcggctgcgtaccgcgtgcgagagggcgaagaggacgctctcctccaccgcccagaccaccattgagatcgactcgctctacgagggcatcgacttctacgcgaccatcacccgggccaggttcgaggagcttaacatggacctcttcaggaagtgcatggagcccgtggagaagtgcctccgcgacgccaagatggacaagtcacagatccacgacgtcgtgctcgtcggaggttccacccgtatccccaaggtgcagcagctgctccaggacttcttcaacggcaaggagttgtgcaagagcatcaaccctgacgaggccgtcgcgtacggcgccgctgtccaggccgccatcctcagcggcgagggcaaccagaaggtgcaggacctgctccttctcgatgtcacgccgctctcgctcgggctggagactgcaggcggtgtcatgaccgtgctgatcccgaggaacaccaccatccccaccaagaaggagcaggtgttctccacctactccgacaaccagcccggcgtgctgatccaggtgtacgagggtgagaggacgaggaccaaggacaacaacctgctcggcaagttcgagctgaccggcatcccgccggcgccacggggcgtgccccagatcaacgtgaccttcgacatcgacgcgaacggcatcctgaacgtgtcggcggaggacaagacgacggggaagaagaacaagatcaccatcaccaacgacaagggccggctgagcaaggaagagatcgagcgcatggtgcaggaggcggagaagtacaagaccgaggacgaggaggtgaagcgcaaggtggaggcccgcaacgcgctggagaactacgcgtataacatgcgcaacacggtgcgggacgagaagatcgcgtcgaagctgcccgccgatgacaagaagaagatcgaggacacgatcgaggacgccatcaagtggctcgacggcaaccagctcgcggaggccgaggagttcgaggacaagatgaaggagctggagagcatctgcaaccccatcatctcacagatgtaccagggcggcgcgggcgctgcgggcatggacgaggatgtgcccggcggtggcgccggcaacggaggtggcagcggcgccgggcccaagattgaggaggtcgactgagcgagccatggacggtgatgatctggatgggaagcttctgtgcgtgcggtgcagctagagagtgtgctacgtgaactcgtgaaggcgtattaatctgtgtgtgcgataataatctggggttaacacc

SEQ ID NO: 153726 - DNA, 2542 bp, Zea Mays
actcaggtagcagagcgaagcatcaatcagcgagcgaaccggccagaaaaagcacaaagtagtcctcctccatttcgaatcgcgctcatagtcacagggctttagcagagatggcgggcaacaagggagagggcccggcgatcggcatcgacctcggcacgacctactcctgcgtcggggtctggcagcatgaccgggtggagattatcgccaacgaccagggcaaccgcaccacgccgtcgtacgtggcgttcaccgacaccgagaggctcatcggcgacgccgccaagaaccaggtcgccatgaatcccaccaacaccgtcttcgatgccaagcgactcatcggccggcgcttctcggacccgtctgtgcaggcggacatgaagatgtggccattcaaggtcgtcccaggccccgccgacaagccaatgatcgtggtgacttacaagggcgaggagaagaagttctcggccgaggagatctcctccatggtgctcaccaagatgaaggagatcgccgaggcctacctcagcaccaccatcaagaacgccgtcattaccgtgccggcctacttcaatgactcgcagcgccaggccaccaaggacgccggcgtcattgccggcctcaacgtcacgcgcatcatcaacgagcccacggccgccgccatcgcctacggactcgacaagaaggccaccagcactggcgagaagaacgtgctcatcttcgaccttggcggtggcacctttgatgtgtccatcctcaccattgaggagggcatcttcgaggtcaaggccacggctggtgacacccacctgggaggcgaggacttcgacaaccgcctggtgaaccacttcgtgatggagttcaagaggaaacacaagaaggacatcagcggcaacccgagggcgctccggcggctgcgtaccgcgtgcgagagggcgaagaggacgctctcctccaccgcccagaccaccattgagatcgactcgctctacgagggcatcgacttctacgcgaccatcacccgggccaggttcgaggagcttaacatggacctcttcaggaagtgcatggagcccgtggagaagtgcctccgcgacgccaagatggacaagtcacagatccacgacgtcgtgctcgtcggaggttccacccgtatccccaaggtgcagcagctgctccaggacttcttcaacggcaaggagttgtgcaagagcatcaaccctgacgaggccgtcgcgtacggcgccgctgtccaggccgccatcctcagcggcgagggcaaccagaaggtgcaggacctgctccttctcgatgtcacgccgctctcgctcgggctggagactgcaggcggtgtcatgaccgtgctgatcccgaggaacaccaccatccccaccaagaaggagcaggtgttctccacctactccgacaaccagcccggcgtgctgatccaggtgtacgagggtgagaggacgaggaccaaggacaacaacctgctcggcaagttcgagctgaccggcatcccgccggcgccacggggcgtgccccagatcaacgtgaccttcgacatcgacgcgaacggcatcctgaacgtgtcggcggaggacaagacgacggggaagaagaacaagatcaccatcaccaacgacaagggccggctgagcaaggaagagatcgagcgcatggtgcaggaggcggagaagtacaagaccgaggacgaggaggtgaagcgcaaggtggaggcccgcaacgcgctggagaactacgcgtataacatgcgcaacacggtgcgggacgagaagatcgcgtcgaagctgcccgccgatgacaagaagaagatcgaggacacgatcgaggacgccatcaagtggctcgacggcaaccagctcgcggaggccgaggagttcgaggacaagatgaaggagctggagagcatctgcaaccccatcatctcacagatgtaccagggcggcgcgggcgctgcgggcatggacgaggatgtgcccggcggtggcgccggcaacggaggtggcagcggcgccgggcccaagattgaggaggtcgactgagcgagccatggacggtgatgatctggatgggaagcttctgtgcgtgcggtgcagctagagagtgtgctacgtgaactcgtgaaggcgtattaatctgtgtgtgcgataataatctggggttaacacctgcagggtgttctctgtttccgttgtcaagtggttgtaggttcagtagggtgaaagtgtgaggcatatccattaggcttagtaaaatagtaaccctagtgttactgtaaccgcctccgcgagttcaggagtctataaatatatcagtatgtaatactgtttgtttttctcgctatgcacgttctagcatccaatcatcccatacctctgccattcctgaacaccccgtgtgcttcagagtatccaaaatccgccagagccagagtcaactcgttggtgatgaaatgtgtgcacacaccagcgcactggaagacaagcaaaaagtccttcagtatatgttttgggac

SEQ ID NO: 153727 - DNA, 2693 bp, Zea Mays
tgataggccatgaccaattctatattggtgacagataagatacagtttacaacagattacacttgccttccagaaattcctggaaactagacagagtgctacagcaccactaatccccgttaaaactttttgacaaatcctaaagacactggcaagctctcctttttttcccctagtttccatcaattcgagatgaatttcccaacagtacccacaaagcaaacgtcaagctaaagaaaacgacaaatgccctatatatatccaggagccattcagtagaataaacagattgctagtgtcaggtgatgcacggattgcagcacatccagcagacagataagctagccttttgacaccgtgaaaacaaattatgatacattatgcacccccagacaaacataatgcagacatgttccttgtgatctatagcatatacctaatacgttccaaatgctgcaatgccaactaccagaatgcttgaatcaattaggactgttccccatcaaaattggcaaaactgagctgcgtttctcggacagtagcctcagccttatggtaacaacagggaacctccgcaccagatgtgtctcccctcgagctatatagggttaggagaaaacaaaacatcagtcaagcactaacaaggatggaccagtaactactacaagggcatcatccatcacacacctcggaacaagtttcattggcaccatgacgagggcggtctcatggacacatgcacctcatgttcttcagggccaacacggtactttgggacaataatctccaggcctgtccccgtttcatcgcggtatgcttccagagtggcatcttcagggatccgggtaggcagtgggatttcccggacaaactctcctggtgggcaatgctcaggagaaggatccgccaacttgaaagtccgatcatgccttttcaataatggcatcctaccaacgctaatgcaagataccttaacaatcccattcgtaagagtattcttccatgaaaccttcaccttctgaaaatcagagaaaggcaggctaacaatgatcaagtagcccttgctgtcctcatatattgtttttgcggcagttactggtccagaagcatggcgcatcacacctgtgaagtcattcatccatgatggctcaaaggtgtggctcacatccatgtcttgggccttgtctgaattcgaattgctgcagtcctcttccgttgcagacggtgaggaatccttcctgcgcttgttacagatggttgcgatctccatggcatccccagaactgtgattggatggttgtgtcgataggttaaggccagaaccgttcagcaacctcttgtggtgcccatgtgagctactctttgtaggaaccacggctgctagcctctcgagctcaaattccgtgctcggcagattcctccaagactcgaaatcacttgcctcggctgggatcgagaaattggcatccctcccggtgagctccatccacctctttaaatcagactcaggtacacctgccaagtttggcgccctcacgatttcgatcccgtgaatacactgcgggttagagagcccacgataatgcttgcgctgcatccggtgtgagcgcacaaaccctttgtctgcgctgaaagggaactgtggatccccaaggcgcgagtgcccattcatgaagctcctcagctgcatcttccccagggcattctccgatcgctccttaaagatccacatgtacatgttctccatgtcgtgctgcaccaggaaagcgtccagagtggcactggcactattaccattcccgccggtggtggctgccttcgccttgccacccttgtcggtggacatgactggcttgaagtagtgggtgaagaagaaccacgctccccaaatgctatcattcctcttgacgcacttgcgcgccacgctggaaccggagcccttggtgtgggacacggcgatcacggtggccgcggctgctgctggggccaagacaggcccggcagcagcgggcgaatccgagtcgtagtgctgcgggccgccgaggccggcatctagcacgtcaacgttggcgtcgtgcgacgccggaggtggcggagacgggtcggcggtgagggggaggttgatgtcagggggggcgaccgccgcggcatgtaggcagcggcggaagggcccctgtggcgggaggaagaggtcgaagtggtcgtgggaggcggtgtccatggagaggaaggtgaaagggccctggtgtggatggtgggccgtggtggtgtccatggagagcgcggtgagcagcgactcgcccatggcggcggcggcggccgtcgtcctcctggcggctcgctcctcgtccgcctgctgctccccttccgtcgcttctctgcccaaatcttcggcgcttcctcctccaccgcctccgcacggcgcgctcctctcctccgaatcgctccacgagcatcagttagcgaccaggcttcacacctccctcgcgtccatccgccagccgagaggaaatggggggggtgcacgtacctacgcaggtccaagaaacccggagctctcaaatcgacgaaccgcctccaccatccagccgaacaacggtccaagaatccctccctcctcctgctgcggtacgttacaatcaaatcaaatgaaaaaaaatcaaacgtcgtcgaatcggcgggcgggggctcgc

SEQ ID NO: 153728 - DNA, 108 bp, Zea Mays
gtctcttgggaaaaactgtcgcaccccttggattgatcacatatataatattttgtaacagtcttgggatatattccgtagtagtactatctgtatattatatttaat

SEQ ID NO: 153729 - DNA, 2581 bp, Zea Mays
acaaacccccgagtggaacacacaaaagcgccccaccaccgcggaccattcctttcctttgtatctctatctatccctcctcggctcctcgccctttcccctcttgcccgagtcgctagcctccctgcccctgcccctgccccgcctcctcccgtggaccacttcctccaccttcgcttccatagcaggctagcagctgagcgaggtcaactcttccgccggcggagagagagggagggagcggggaagagacgggagggtctccgcgcacctgccatcagccaccacccgatacccaggtcttgtcccgcgcagatctgctgctgcccttgagatctaaatcaaagcttccgctccggttgttgtcggttggtcggtacctgggcggcggcggcggcggcacgggaggacagcgaacatgtcgtcgagcacgatccggaaggccctgggcgcggtgaaggaccagaccagcatcagcctcgccaaggtcactagcaacatcgcgcccgatctggacgtgctcatcgtcaaggccaccagccacgacgacgagccggccgaggagcgccacatccgcgagatcctccaccttacgtccggatcccgcgcccacgttgctgctgccgtggcagggtgctcccgcaggctctcccgcacccgcgactatgtggtcgcgctcaagtcgctcatgctcgtgcaccgcctccttgtcgatggcgacccgtccttccaccgcgagctcctacatggcacacggcggggcacccgcctgctgaacctctctgattttcgggacgaggcgcactctggatcgtgggatcactctgcctttgtgcgcacctatgcgctctaccttgaccagcgcctcgagttcttcctccatgagcgcaagcaggggttaaatgctggcagcagcagcagtgctaatggcccatcaccacgggaccgtgatcgctggggttcgcctgatccctatggccgccgctctccctcctactcgtcaccccctgggtatggaggatatgatgattaccgcgagaggaatggtgggaacaatgatgacaagaggccaccgaccccggtgagggatatgaagcctgagcgtgtccttgctcgtatgcaccacctacagcagctgcttgacaggttccttgcttgccgccccactggtggtgcaaagcaaagcaggatggtgctggttgcgctgtatcagattgtgagagagagcttccagctctactctgatatctgcgaggtgctggcggtgctgctggacaggttctttgacatggagtatgcggaatgcgtgaaggcttttgaggcatatgctagtgctgcaaagcagattgatgagctctctgcattctattcatggtgtaaagatactggagttgcaaggtcatctgagtacccagaggtgcagcgtgtcactgataagttgctggagacgctagaagagttcatgagggaccgggcaaagaggcctaagagcccaccacgggagcctgaacctgagcctgttaaggaagaacctgagccggatatgaacagcatcaaagcgcttccagcaccagaagattataaggagcctgaacctgtgaaggtggaggaagaggtgaagccggagccacccccacagccacagggtgacttggtggatctcagagaagatactgttagtgcagatgagcaaggtaataggcttgctctagcactcttccagggaccgcccgctgctggtggaaacaatggttcatgggaggctttcccttcaaatggtggcaacgaggtgacttcggcatggcagaatcctgcagctgaacctgggaaggctgattgggagcttgccctcgtagagacagcaagcaacttgtccatgcagaagccagcaatgtcaggtggtatggacccgctgctgctgaatggtatgtatgaccagggtgttgtgcgtcagcacgttagtgcacaggtgaccaccgggagtgccagcagcgtcgccctgcctgctcctggacagaagactcagatgcttgctctgcccgcaccggatggttcaatgcagactgttggtggtgacccctttgcagcgtcccttgccgtcccaccaccatcctatgtgcagatggcagatttggagaagaagcaacagctcttgtcgcaggagcagattatgtggcaacagtaccagagggacggcatgcaagggcaatcgagcctgaacaagctcgaccaggcttaccacaatggtttcgcgcccaacccgggcatgccctatgggatgcccgcggcgtacaacactgggtattactaccctacttactgaggaagcctattctttattcatccttacagttgctgtgaatttttgttctgtgttgtgatcttactcccagccctggggttgtgtccagcatcagctgttgttcccctgtctctggatcaaaccttttggtctgatatatgtaatgtaattttatttgtttggaaccaaatgcggcatccgagagtagctatagtatattacataatctcaattgatctgtacactgtttctgctaatcttctgcatgttatcacttca

SEQ ID NO: 153730 - DNA, 2371 bp, Zea Mays
gattcctttccatagaacctgcgaaattgcggggatctgcgcgtgccaaagcacctaactgattagatactattaccgagagtgaacatcgctgatttttttttttactaatttctagaaactcatcatatggttcctttttgttcagatctaaatcaaagcttccgctccggttgttgtcggttggtcggtacctgggcggcggcggcggcggcacgggaggacagcgaacatgtcgtcgagcacgatccggaaggccctgggcgcggtgaaggaccagaccagcatcagcctcgccaaggtcactagcaacatcgcgcccgatctggacgtgctcatcgtcaaggccaccagccacgacgacgagccggccgaggagcgccacatccgcgagatcctccaccttacgtccggatcccgcgcccacgttgctgctgccgtggcagggtgctcccgcaggctctcccgcacccgcgactatgtggtcgcgctcaagtcgctcatgctcgtgcaccgcctccttgtcgatggcgacccgtccttccaccgcgagctcctacatggcacacggcggggcacccgcctgctgaacctctctgattttcgggacgaggcgcactctggatcgtgggatcactctgcctttgtgcgcacctatgcgctctaccttgaccagcgcctcgagttcttcctccatgagcgcaagcaggggttaaatgctggcagcagcagcagtgctaatggcccatcaccacgggaccgtgatcgctggggttcgcctgatccctatggccgccgctctccctcctactcgtcaccccctgggtatggaggatatgatgattaccgcgagaggaatggtgggaacaatgatgacaagaggccaccgaccccggtgagggatatgaagcctgagcgtgtccttgctcgtatgcaccacctacagcagctgcttgacaggttccttgcttgccgccccactggtggtgcaaagcaaagcaggatggtgctggttgcgctgtatcagattgtgagagagagcttccagctctactctgatatctgcgaggtgctggcggtgctgctggacaggttctttgacatggagtatgcggaatgcgtgaaggcttttgaggcatatgctagtgctgcaaagcagattgatgagctctctgcattctattcatggtgtaaagatactggagttgcaaggtcatctgagtacccagaggtgcagcgtgtcactgataagttgctggagacgctagaagagttcatgagggaccgggcaaagaggcctaagagcccaccacgggagcctgaacctgagcctgttaaggaagaacctgagccggatatgaacagcatcaaagcgcttccagcaccagaagattataaggagcctgaacctgtgaaggtggaggaagaggtgaagccggagccacccccacagccacagggtgacttggtggatctcagagaagatactgttagtgcagatgagcaaggtaataggcttgctctagcactcttccagggaccgcccgctgctggtggaaacaatggttcatgggaggctttcccttcaaatggtggcaacgaggtgacttcggcatggcagaatcctgcagctgaacctgggaaggctgattgggagcttgccctcgtagagacagcaagcaacttgtccatgcagaagccagcaatgtcaggtggtatggacccgctgctgctgaatggtatgtatgaccagggtgttgtgcgtcagcacgttagtgcacaggtgaccaccgggagtgccagcagcgtcgccctgcctgctcctggacagaagactcagatgcttgctctgcccgcaccggatggttcaatgcagactgttggtggtgacccctttgcagcgtcccttgccgtcccaccaccatcctatgtgcagatggcagatttggagaagaagcaacagctcttgtcgcaggagcagattatgtggcaacagtaccagagggacggcatgcaagggcaatcgagcctgaacaagctcgaccaggcttaccacaatggtttcgcgcccaacccgggcatgccctatgggatgcccgcggcgtacaacactgggtattactaccctacttactgaggaagcctattctttattcatccttacagttgctgtgaatttttgttctgtgttgtgatcttactcccagccctggggttgtgtccagcatcagctgttgttcccctgtctctggatcaaaccttttggtctgatatatgtaatgtaattttatttgtttggaaccaaatgcggcatccgagagtagctatagtatattacataatctcaattgatctgtacactgtttctgct

SEQ ID NO: 153731 - DNA, 1963 bp, Zea Mays
tttaaacagctcccctccccctgctctcccagccccaggaggacagtcccgttccagtcagagcgcagccagttcccccggcccctcccccctcccgctcgccggcggcgatggggcacggcgcgagctgcagccgcccaagcgaggaggtggacttcttcggcgcggcgcagtgcggggacacggcccgcctcgccgccgctcttcgctcccgccccaccttgctcgcccgcaccacgctcttcgaccgcctctccgcgctccacatcgccgccgcacacggccacctccaggtggtctccctagcattagatctttgcgtgcaccccgacgtcgttaaccgccacaagcagacggcattgatgctcgcggcgatgcacgggaagaccgactgcgtccggcggcttctcgacgccggcgccaatatcgtgatgttcgattcctcgcatcggcggacgtgcctgcactacgcggcctactacgggcacgcggactgcctccggaccatcctctcggcggccaagtccgcgccggtgtcggaatcctggttggcctttccgtcgccccggagacaccgccgtctcgccgccgccgctctttggccccttgctaatgcgttctcagctgtggaggtgcagggggttcgcgcgcttcgtgaacgtgcgggacgacaccggggcgacgccgctgcacctcgcggcgaggcagggctggcggcgctgtgtccacgtcctgctcgagaacggcgccatcgtgtccgcctccagcggtgccttcggattccccgggagcacaccgctacatttggccgcgcgcggcggcaacctggactgcgtccggcaactgctctcctggggcgccgaccgcctccagcgagactccgtcgggagaattccgtatgaggtcgccgtgaagcgagggcacgtcgcgtgcgcggcgctgctgaacccgtcatccgcggagcccctggtctggccgtccgctctcaagttcatcagcgagctggaacccgacgccaaatctctcctcgaagcagccctgatggaggccaacagagagagggagaggaggatcctgaaagggactaagaatgcgttgccgtcgccaccgcaccacgatgacggcgctcatgacaccgccattgccgaggcgagcgacgcggaggtgtgcagcatctgcttcgagcaggcgtgcagcatcgaggtccgggagtgcgggcaccagatgtgctcggcgtgcacgctggcgctgtgctgccacgccaagcccaacccggcgacgcagtcccagccgctgccgacctgcccgttctgccgcggcggcatcgcgcggctggtggtggcgacgcggacgagggctggccacgacgacgagcgggacaagctggagtcgcccaggcaccgccggtcccgccggtccatgaacctcagcggcgacgcgggcagcaccagcagcacactcatgggcagcatcgcctcgtccatcggcaagatgggccgccgacgaacagatagcagcgagcaggtcgacgacaagccgtagcagaaatgcagaatcctttcatgcacccgtccattcataatccacgtgaaatctgtcgccgtcgtggccgccgccatcccatccctccaggaacgaacaagcctgtttttgtagattatttttggcaaatgagttattcacctgtgtagattcattcaagaagagccagtcctgtagctaagctttgatccgatcagcgatcatccgaataagcagcccgtccttccctggcagtggcaggccccatgcggccatgtgataatccgtggatgcgagtctcgaaaggctgctgtacatgtctgattcgcagaggtatggcccggtctgctaatgagaagccggtacaaaaatccatgtgattgattgcccggggctgcggcgctcagggtttggcctatagcagccctcagcatttgtcaaa

SEQ ID NO: 153732 - DNA, 1886 bp, Zea Mays
tttaaacagctcccctccccctgctctcccagccccaggaggacagtcccgttccagtcagagcgcagccagttcccccggcccctcccccctcccgctcgccggcggcgatggggcacggcgcgagctgcagccgcccaagcgaggaggtggacttcttcggcgcggcgcagtgcggggacacggcccgcctcgccgccgctcttcgctcccgccccaccttgctcgcccgcaccacgctcttcgaccgcctctccgcgctccacatcgccgccgcacacggccacctccaggtggtctccctagcattagatctttgcgtgcaccccgacgtcgttaaccgccacaagcagacggcattgatgctcgcggcgatgcacgggaagaccgactgcgtccggcggcttctcgacgccggcgccaatatcgtgatgttcgattcctcgcatcggcggacgtgcctgcactacgcggcctactacgggcacgcggactgcctccggaccatcctctcggcggccaagtccgcgccggtgtcggaatcctgctgtggaggtgcagggggttcgcgcgcttcgtgaacgtgcgggacgacaccggggcgacgccgctgcacctcgcggcgaggcagggctggcggcgctgtgtccacgtcctgctcgagaacggcgccatcgtgtccgcctccagcggtgccttcggattccccgggagcacaccgctacatttggccgcgcgcggcggcaacctggactgcgtccggcaactgctctcctggggcgccgaccgcctccagcgagactccgtcgggagaattccgtatgaggtcgccgtgaagcgagggcacgtcgcgtgcgcggcgctgctgaacccgtcatccgcggagcccctggtctggccgtccgctctcaagttcatcagcgagctggaacccgacgccaaatctctcctcgaagcagccctgatggaggccaacagagagagggagaggaggatcctgaaagggactaagaatgcgttgccgtcgccaccgcaccacgatgacggcgctcatgacaccgccattgccgaggcgagcgacgcggaggtgtgcagcatctgcttcgagcaggcgtgcagcatcgaggtccgggagtgcgggcaccagatgtgctcggcgtgcacgctggcgctgtgctgccacgccaagcccaacccggcgacgcagtcccagccgctgccgacctgcccgttctgccgcggcggcatcgcgcggctggtggtggcgacgcggacgagggctggccacgacgacgagcgggacaagctggagtcgcccaggcaccgccggtcccgccggtccatgaacctcagcggcgacgcgggcagcaccagcagcacactcatgggcagcatcgcctcgtccatcggcaagatgggccgccgacgaacagatagcagcgagcaggtcgacgacaagccgtagcagaaatgcagaatcctttcatgcacccgtccattcataatccacgtgaaatctgtcgccgtcgtggccgccgccatcccatccctccaggaacgaacaagcctgtttttgtagattatttttggcaaatgagttattcacctgtgtagattcattcaagaagagccagtcctgtagctaagctttgatccgatcagcgatcatccgaataagcagcccgtccttccctggcagtggcaggccccatgcggccatgtgataatccgtggatgcgagtctcgaaaggctgctgtacatgtctgattcgcagaggtatggcccggtctgctaatgagaagccggtacaaaaatccatgtgattgattgcccggggctgcggcgctcagggtttggcctatagcagccctcagcatttgtcaaa

SEQ ID NO: 153733 - DNA, 1924 bp, Zea Mays
tttaaacagctcccctccccctgctctcccagccccaggaggacagtcccgttccagtcagagcgcagccagttcccccggcccctcccccctcccgctcgccggcggcgatggggcacggcgcgagctgcagccgcccaagcgaggaggtggacttcttcggcgcggcgcagtgcggggacacggcccgcctcgccgccgctcttcgctcccgccccaccttgctcgcccgcaccacgctcttcgaccgcctctccgcgctccacatcgccgccgcacacggccacctccaggtggtctccctagcattagatctttgcgtgcaccccgacgtcgttaaccgccacaagcagacggcattgatgctcgcggcgatgcacgggaagaccgactgcgtccggcggcttctcgacgccggcgccaatatcgtgatgttcgattcctcgcatcggcggacgtgcctgcactacgcggcctactacgggcacgcggactgcctccggaccatcctctcggcggccaagtccgcgccggtgtcggaatcctgggggttcgcgcgcttcgtgaacgtgcgggacgacaccggggcgacgccgctgcacctcgcggcgaggcagggctggcggcgctgtgtccacgtcctgctcgagaacggcgccatcgtgtccgcctccagcggtgccttcggattccccgggagcacaccgctacatttggccgcgcgcggcggcaacctggactgcgtccggcaactgctctcctggggcgccgaccgcctccagcgagactccgtcgggagaattccgtatgaggtcgccgtgaagcgagggcacgtcgcgtgcgcggcgctgctgaacccgtcatccgcggagcccctggtctggccgtccgctctcaagttcatcagcgagctggaacccgacgccaaatctctcctcgaagcagccctgatggaggccaacagagagagggagaggaggatcctgaaagggactaagaatgcgttgccgtcgccaccgcaccacgatgacggcgctcatgacaccgccattgccgaggcgagcgacgcggaggtgtgcagcatctgcttcgagcaggcgtgcagcatcgaggtccgggagtgcgggcaccagatgtgctcggcgtgcacgctggcgctgtgctgccacgccaagcccaacccggcgacgcagtcccagccgctgccgacctgcccgttctgccgcggcggcatcgcgcggctggtggtggcgacgcggacgagggctggccacgacgacgagcgggacaagctggagtcgcccaggcaccgccggtcccgccggtccatgaacctcagcggcgacgcgggcagcaccagcagcacactcatgggcagcatcgcctcgtccatcggcaagatgggccgccgacgaacagatagcagcgagcaggtcgacgacaagccgtagcagaaatgcagaatcctttcatgcacccgtccattcataatccacgtgaaatctgtcgccgtcgtggccgccgccatcccatccctccaggaacgaacaagcctgtttttgtagattatttttggcaaatgagttattcacctgtgtagattcattcaagaagagccagtcctgtagctaagctttgatccgatcagcgatcatccgaataagcagcccgtccttccctggcagtggcaggccccatgcggccatgtgataatccgtggatgcgagtctcgaaaggctgctgtacatgtctgattcgcagaggtatggcccggtctgctaatgagaagccggtacaaaaatccatgtgattgattgcccggggctgcggcgctcagggtttggcctatagcagccctcagcatttgtcaaaatccagtgaagatcttggttactgttctggataggaggaaaaggtctatttt

SEQ ID NO: 153734 - DNA, 2043 bp, Zea Mays
aaacagctcccctccccctgctctcccagccccaggaggacagtcccgttccagtcagagcgcagccagttcccccggcccctcccccctcccgctcgccggcggcgatggggcacggcgcgagctgcagccgcccaagcgaggaggtggacttcttcggcgcggcgcagtgcggggacacggcccgcctcgccgccgctcttcgctcccgccccaccttgctcgcccgcaccacgctcttcgaccgcctctccgcgctccacatcgccgccgcacacggccacctccaggtggtctccctagcattagatctttgcgtgcaccccgacgtcgttaaccgccacaagcagacggcattgatgctcgcggcgatgcacgggaagaccgactgcgtccggcggcttctcgacgccggcgccaatgtgagcctctaaacggaagttgcaggttatatcggttcctcgagtcgggctactaaatggcgtttccgatttggatggcgcagatcgtgatgttcgattcctcgcatcggcggacgtgcctgcactacgcggcctactacgggcacgcggactgcctccggaccatcctctcggcggccaagtccgcgccggtgtcggaatcctggttggcctttccgtcgccccggagacaccgccgtctcgccgccgccgctctttggccccttgctaatgcgttctcagctgtggaggtgcagggggttcgcgcgcttcgtgaacgtgcgggacgacaccggggcgacgccgctgcacctcgcggcgaggcagggctggcggcgctgtgtccacgtcctgctcgagaacggcgccatcgtgtccgcctccagcggtgccttcggattccccgggagcacaccgctacatttggccgcgcgcggcggcaacctggactgcgtccggcaactgctctcctggggcgccgaccgcctccagcgagactccgtcgggagaattccgtatgaggtcgccgtgaagcgagggcacgtcgcgtgcgcggcgctgctgaacccgtcatccgcggagcccctggtctggccgtccgctctcaagttcatcagcgagctggaacccgacgccaaatctctcctcgaagcagccctgatggaggccaacagagagagggagaggaggatcctgaaagggactaagaatgcgttgccgtcgccaccgcaccacgatgacggcgctcatgacaccgccattgccgaggcgagcgacgcggaggtgtgcagcatctgcttcgagcaggcgtgcagcatcgaggtccgggagtgcgggcaccagatgtgctcggcgtgcacgctggcgctgtgctgccacgccaagcccaacccggcgacgcagtcccagccgctgccgacctgcccgttctgccgcggcggcatcgcgcggctggtggtggcgacgcggacgagggctggccacgacgacgagcgggacaagctggagtcgcccaggcaccgccggtcccgccggtccatgaacctcagcggcgacgcgggcagcaccagcagcacactcatgggcagcatcgcctcgtccatcggcaagatgggccgccgacgaacagatagcagcgagcaggtcgacgacaagccgtagcagaaatgcagaatcctttcatgcacccgtccattcataatccacgtgaaatctgtcgccgtcgtggccgccgccatcccatccctccaggaacgaacaagcctgtttttgtagattatttttggcaaatgagttattcacctgtgtagattcattcaagaagagccagtcctgtagctaagctttgatccgatcagcgatcatccgaataagcagcccgtccttccctggcagtggcaggccccatgcggccatgtgataatccgtggatgcgagtctcgaaaggctgctgtacatgtctgattcgcagaggtatggcccggtctgctaatgagaagccggtacaaaaatccatgtgattgattgcccggggctgcggcgctcagggtttggcctatagcagccctcagcatttgtcaaa

SEQ ID NO: 153735 - DNA, 268 bp, Zea Mays
gaatgggaggggcaaaagatttgccgctccaatatattagagaggagaaacaattacaagacactcacacgaagacaacgagggagaaaaaagagagcagaaaggcaaaaactcaaccgcctactgaggttaaacacaacactgagcccaacaggtcccaactaacccaaaagggcaccaactagatctttcactaaagaagcgacctgatctggattcttctgttgattcctgaagatcctgttgtttctttctaaccataagctcc

SEQ ID NO: 153736 - DNA, 92 bp, Zea Mays
gcccatggagccttcccgcgttgccagcgcggggcgccgcttagagctcatgttggcatggctctgctccaccccagagcagctctactcct

SEQ ID NO: 153737 - DNA, 3054 bp, Zea Mays
ctattattcttttcggattccttccacaccccatgcccgtgcccacctcaggctgcatcacatcatcgcccacgcccagcaccaccaccggcggcgcaccaccggcggcgccagcaccagtgccagcgcaggcggaggcccgggcgacgcggactggcctgctcttcctcagcggcgtcccttcctgtaaggtcttccggcgaggaggtcacgtgcaggttaccgatgggtctggataatacttatggcgagctatctggcatgttctatggaggcctgtcttatgatggctacgcagaccacagcagcgcaagtgattatttcaggtttgccgatccacttcctgcagttgtgccccagatggcagcagaagcctgttcaaatccttcctccactgtgtcgagggccaacactgaagctgacaacccggaggattgggaattcatctcagatgagtccctcaactatattagccggatgctcatggaggaggatattgatgagaaagttagcatgtaccaggcggagtcagcggcactgcgtgctgctgcaaagccattctacgacattcttgggcacaagtttccaccgtctcctgaccggcaggtgatgccttggcccatggacagccccagtgagagcagcggtagcatttgcacacaatctgtggcaagtgctgtcactagcagcagtgttggtggcacagtggatagcaaccggtgctacgatgttggacacagtgagcagctggaagcttttcgaggcttgtgtggtcagtcttctcatccacttgttggtgcatcaagtgatgcttccaatgcagtgggtgagctagaagacattttgatcacgaatggtgggatccctgagtatttgtttgagagccttccaacttgggatttcaggagaggtattgaggaagcccagaagagtcttcctgttagcgataaactagtaattgatttagaaactggtggtattgcaagaccccaagaagcaaggaaagatgttcctatgaatgccaaaaaggacgatgtattgaaggccaagaaaaatagacagagtgaagaccttgacctgatggaaggccggaacattaaacagtctgcattttgttccgatgaacctggttggattgagatgttcgatgatctgcttcgccaaactgagaagaaggctacagttctgcgagagctgatgcgtagtgaagcatccaagaattctcaggtcactcagatgaaaggaccaagtggtccacggccacggggaaggaaaccaacaaagaatgatgtggtggaccttaggaccatcctcatccactgtgcacaggctgtggcagcagatgaccgcagaactgctaatgaattgttaaagcaaataaggcaccattccaagccaaacggcgatggaacccagaggttagcacattgttttgcagatggtctcgaggctcgcttggcaggcacagggagtcagctttaccgcaagcttatagcgaaacgtacaactgcctcagacatgcttaaagcctaccaccttttccttgcagcaagcccgtttaagagactttcacattttctttccaatcaaacaatcttgagtttgactaaaaatgcatcaaaggtgcatatcattgactttggcatttattttggattccaatggccatgcctaatcaggcgtctctccaagagggaaggtggtccacctgttctgcgcatcactggaatcgacgtacctcagccaggtttccgccctaccgagagaattgaagagactggacaaaggcttgcagagtatgctgagaagttcaaggtgccttttgagtatcagggaatagcgtcaaagtgggaaagcatccgagttgaggatctcaaagttggcaaggacgaagttgtgattgttaattgcctatacagattcagaaacctgattgatgaaacagttgctgtagacagtcctaggaatagagtgctcaacaccataaggcaagtaaacccagcgattttcatccatggaattgtgaatgggtcatacagcgttcccttcttcatcactcgtttccgtgaggcgctgttccatttctctgcactgtttgacatgctagagacaactgtcccacgggatgatgcacagcgtgcgctcatagagagggaaatgtttggccgagaggcactcaacgttattgcatgtgagggctcagacagagttgagagacccgagacatataaacagtggcaggtgaggaacctcagggctggatttgtccagtctccgttaaaccaagaaattgtgatgaaagccatggacaaagtaaaagacatttatcacaaggacttcgtcatagatgaagacaacggatggctcctacaaggctggaaaggaaggatactctatgcaatttctacatggaagcctaagaataactaggttcttggtctcacgcgtaatctctcctattccatcgatggtggcagctaattaatcagtcctgctatcttataacatttgggccttgacctgtgaacctgtctgatcaaggcaatggcttgaagccggacaatgatcaacatggaggtttgctagatttacatctgtccagccagtactctgataaactggaaaagagcagctgtagacgtctctaacttggtgttggtaccatcacctttatttaattcgtagttttcttctttccatttacttctatgaccggcctggcgtcctattaccaacaaccagatcaccgcttctagttcaaaatggctaggcaaactacctactatcttgagcttaatatttttgacttgtatccatccatgtcaaacatcagttcggttttcagcacctgcagatcagaaattccccaacgagtaagcctaaagcatcaaaatttgttatacgagaacggacgctgctgtttgtgtggaatgtagcatctcatggagtgctttatctttgaattcttcgtttatttatttcatctgttttgtagcaagtgacgctgctgtcacaaaaacgagtccttaaacttgagtggagcactagtttgag

SEQ ID NO: 153738 - DNA, 313 bp, Zea Mays
cccgatgcaattactcaggggcagcgacgtcaaaaatctcagacccacgcgcgctacgacttcttttgtgcactctcgctcacgcgcaggatgacttcttttactgcactggagggagtacgtacgtactacgtacatcgtctatagcggcaattggccaaaaagccaaatgcgggctttctccaacctcctgtcctgagcccaaggtttacaaaaccggtaaaaaccggcggtaaaccggtcattttaccgaaaccgctggggtgcggtttcggtaaaccaccggtttttctttcaaaattcattctaaatt

SEQ ID NO: 153739 - DNA, 1074 bp, Zea Mays
aaatgatttgttgagtatcctgagcagcagaacattggaaacgatcgtggtgcgaactggctgagaattatttctggaccacgcaaaatgtagcttagcagatgcataacgggatacagcttccagagagcgctgaagaaaacggtccagcgcactcttcctcccctcactatccacctcagcctcagcgaaggcatcgatcgacccatggagttgtacgacgacgagaagtggaagttctccaagaagagccggaacaacggcagccggcgcgtcccgggggccggagccggtggtggcggggactctctgctgaagagatcgtccagcatgagagacgccccggcgatcggccgcggcgccgcggccggggcgggcgggtgcgcggcgcagcagccgccgtcgttctcgagccggtgcgcggggctggtgaaggagcagcgggcgcgcttctacatcatgcgccgctgcgtgaccatgctcgtctgctggaaggaccgctcgtagccgcggctagcttccagggccggccgccggcgaagaagctgggcccctcgtcctcccatcgtcgtttctccgtccgtccgtccgccaggatcggagagtcggcggtcacggggctggacgctgaagcaagccgagggagggacacggggaagaaggcagattaggtgatgtgtgtatagctcagtctttggttaggacgagtgctccccccgttttttttttttgacctcccatttctgggacgttttcttggttaccggtggtcgattaggtaagagtagtgattagtacagtacttagcgctgcgaggtagatgtggaatcgtggacagttttgggatctcccttcttttgaaggggaatggggatcagggttcttttacagctgcagtgctgcaactgcaaaggagcaccgcaggcaggcaccgctggcagctggatgaaatctagtggatcttctgttgtgccacgaccacggtggggggtaaaaaaagaaggatgtcgctgcccatgtatagctaaagaaaccagacgcaacagcatgctaagttcaaagatgtcaccgcgt

SEQ ID NO: 153740 - DNA, 429 bp, Zea Mays
atgccttcgacccgctgcctctaccaagtggtgttccagtgcctttgtgtttttgcggtgatccgcaaggttcccaagttcgaggaagatgacatgtataggcagagaatgaaagcaattgaacatgcagaacaacaaacacatggaacgacatgtgaggacttgtaccaaacaatgtcatcttgcggacgtgatctggttttgctgcaaggatgggataagaagaagaggagaggagaatcatctacatccctaacgataacatctaacggcaggcaaattgggattgagggcggccgggagaggggaaccgctggagaagagtactcgctagagaaagcctcgccgttcttcatggtcacacgttggcaggcgaatcatgccaacgagtacagattagggaaactgagtggagagggtgtgtactga

SEQ ID NO: 153741 - DNA, 1597 bp, Zea Mays
gcatacagagttgcttgaatcctcggccatgccggccaggacatggctcgccgacctgcggtcgaggctccgcgtcggccccaggaagaacgacgggcttggcatcctggccttcgaggcagcagccaacatgtcgcggctggtatccctccaccggacggtgtccgacgtcgaggtcaggaggctccgcgccgacgtcttgcgcgccgagggcgtcgcgcggctaacgtctacggaccagtctctcctgctccgcttcgcgtgcggcgagctcctcgcggacctcgaccgcgccgccggcagcgtggcgtgcctcggcgcgcggtgctgcgccggcgacgcgccgctactgagggacttcgatcgggtctacgccgaggcgaagcgtggccggctcgcgcagctggacgccacggtcgggttctccaggggcgccacgaggcggttcaaggagatggagcgccatgtggtcgtggcggcgaagctgtacgcggagatggacgcgctcagcgagctggaggcgtcagagcggcggatggagcggtggaagcagcacagcgggccaatcccggcgcagacgacggggacgggcaaggggtcagcggccgatcccggagagaagctgatgagtaagctcagggagcagcggcagaaggtgcgacgggtcatggagggatcgctgtggaacgtcgccgccagcaaggcggcgaggctcatggccaagtcggtcctcgccgtgctcgcgcgcatctccctcgcctttgccgcgttcgttccaggccttcccccttggacggtaggacgcgcgtgggcgctcggtcactcatccggatccggcccgttacaccggtcggcgacgcccgcggcgctccagcattcggctcccatcttcggccagagagactccgcctccctactgtcggcgtcgtcgatcaagccgtcagtgagcacggtcggcggctcgagcatggagctgcgatacgcgaacgtgatcttagccgccaagacgttgctcgcggcgctgaggccgccggcaggtgacaacgaggaggcgcacgaagggatgatcgacctgtcgaagagagacgcgctgtacaagatgctacccgtcggcatccgcaaggccatgaacgctaagctgagagagatctggaagaaagcgcaaccggtggacgaggtgtctgccgcggcatcgaaggatgcggtggagtgtctgctgcggtggttgagcccgatggcgcacgacactgtgcggtggaacgacgagcagagtatggagcgggcgcagcggttcagcatgcagcctcgcgcgctgatggtgcagacgttgcacttcgccgaccgcaagaagacggatgctgctattgttgatgtgctcatcggcctcacctgcgtatgctggtacgacgatgagcagcgaaggctggagtctctagacagggacgacgacgacgagtatcagctatagatttttgagctgtgattttatcgtgtgtgtgaatatcatgtaactgcaaatcgcgtgtacatagaacaacttaacagcctttatataatcaaatctagccgttttagataaataaaaggaacttgccat

SEQ ID NO: 153742 - DNA, 84 bp, Zea Mays
gttaaatcagtattaacagcccaaccaatttatcatcttacggtttttccagttcaaaaatggctgctaaagaaaattgataag

SEQ ID NO: 153743 - DNA, 1602 bp, Zea Mays
gaagcgttaacattgcacgacgctggcgctggacatctgtttcccaagcagcagcaacgacgagcacaacacaaccgtcaccaccaccgggaaccacactcgctgctactcactaccaggagaacgggtgacagcatgtccgtaccgggcttgtgggcagcggtagccgccgtggccgtcgtgatcatcgacgctctcgtgcgtagggcccaccggtgggcttgggaggcttcgctcggcggcagcaggcgggcacggctgcctccgggtgacatggggtggcccgtcgtcggcgcgatgtgggcattcctctgggcattcaagtccggcaacccggactctttcatcggctccttcatccgacggttcgggcgcacgggcgtgtacatgaccttcatgttcagcaagccgacggtcctggtggccaccccggaagcgtgcaagcgggtgctgatggacgacgacagcttcttggaagggtggcccagggccaccgtggcgcttatcgggcgcaagtccttcctcaccttgccctgcgaggagcaccggcggctgcggaagctcacagccgcgcccatcaacggcttcgacgcgctcaccacgtacctgggcttcatcgaccggactgtcgtggccacgctgcgcgggtggtcggacgccggcgagatcgagttcctcacggagctgcggcggatgacgttcaagatcatcgtgcagatattcctgaccgccgccgatgacgccacgacgctggcgctggagagcagctacaccgacctcaactacgggatgagggccatggccattaaccttcccggtttcgccttccacagggctttcaaggctcgcaagaagctggtgtcggtgttgcagggtgtcctgaacgagaggagggcgaggaaacggctcccccggtcgagcgtagacatgatggaccgcctgattgatgcggaggacgagcacgggaggcggctggatgacgaggagattatcgacatcctcgtcatgtacctgaacgcggggcatgagtcgtccgggcacatctgcatgtgggctaccgtgtatctacagaaacacccagagatatttgcaaaagcgaaggccgagcaagaggagatcatgagaagcattccgtcttctcagatggggctaagcctgagggatttcaggaggatggagtacctctcacaggtcatcgatgagacgctgcgtctagtgaacatctcttacgtctcgttccgtgaagcgaccaaagacgtctttgtgaatggctacctgataccgaagggctggaacgttcagctgtggtacagaagtgtgcacatggatcctgaagtttatcgtgactccaaagagtttaacccatcaagatgggagggttatacaccgagagccggcacattccttccttttggacttggtaccagattctgccctgggaacgatcttgcaaagctggagatctccgtcttcctccaccatttcctccttggttacaagctcacgaggacaaatcctaactgccggatacggtaccttcctcatcctaggccggtggataattgcttggcaaagatcaccagggtttgagatgaacaatat

SEQ ID NO: 153744 - DNA, 1354 bp, Zea Mays
aactggctctaaatgttctgtttctccctgaaggcattctccaagaagtatgccttcaatttctaggagatcaccgtactcaaggagaaagtcacttccttgtcaagatatccatctccattttcacgccggagatcacctcttcacatgaaatcaccatcatctgggccacgaaggtcactttctccttgtcatcgtcgttcaccagctcatgcaccaaggagatcaccatctacaattcgaaggtctcctgttcgacgcagattctcaccaggtagacgtccatctccatctccagcaaggcgcaggccaaggtccccatcaccaagaaggcgtaggccaaggtccccatctccacgaaggcgcaggccaaggtccccatctccacgaaggcgcaggccacggtccccatccccaggaaggagcagaccacggtccccatctccaggaagccgcaggccatggtctcggtctccaataagacgtcggtccccatctccaaaacggcggaggaggtcaccaagctcaccgaggacttgttctgcaaatcgacgtttatcgccacagggaaggaggagtatcagtccctacactagcaggactgcaggagtcctagtcgttcttgccggagtttaagtagagacatcgagaaagaaacaaatggcacccccttcactaaaaacagagctgtgcactctagggtccgagaacaaaaaacagatgataatgatagggatggcgcaaggattggtggccatcattccccagattttgagcatagattgtcaaaatccgtgaggtctcctaacaatgaagaaaggaactccacacttgatagctctttcaagaactcaggcaaacctatacctagtcagggcagcatagatacaagtggagatgaggaaggcagtcatgctagtggcaagggcgtccagaagaaacaccctgatcaactatcagaatcatcagaagatgagcttgctggtagaagaacaaagcgtcaaactgattctcctgatgatcatcgtgggaaacataattccccgactagaattgaaaatgatgactcttattcgaagaatggtagaaacagtgagcatgtcatgaggggtttgcatgatggttctgatgatgcaaagaaatatttgtctaaagtcaatgaggactcccagtcagaagatggaagtccttcgaaaaaaaaactaagaaaagagtagacggtaatagccacactttttttgtgggcacgtggctagatgagattgcccagcatttcctcttaggccccgtttgtttcctttcatttcgaggaattggaatcttattaatggaataggctactttttttagaata

SEQ ID NO: 153745 - DNA, 2602 bp, Zea Mays
cccggtttccttctctcgccttctcttttctgtaacgcgcagtatacggcgccgttgtttctccccacggcggcatctcctgcgtggcgccgccttccggcgagagctgcgacggcggcgcactaggcgagttactggacacgagagcgatgggggacggcgccagcggccgcggcggcggaggcggggccgggcggcgggtgggggagtacgagctgctgcgaccgatcgggtcgggggcgtactcgcaggtgtggctggggaggcaccgggcgcggggcacggaggtggcggtgaaggagatcgccatggagcgtctcagcaacaagctccgcgagagcctcctctccgaggtcgacatcctccgtcgcatcagacacgataacgtcattgcactccacgaatccatcaaggaccatgggagcatatatctcatattggagtattgtcgaggtggtgacttacatgcataccttcaacgtcataaaagagtttctgaaaaggttgctaggcatttcatccgtcagttagcatctggtctgcaaatgcttcgcgataataacgtggttcaccgagacctaaaacctcagaacattcttcttgttgaaaataatgaaaattctctgttgaagatcgctgactttggatttgcaaaatttttgcaaccttttgccctagctgaaactctttgtggttcgccactttacatggctccagaagtcatgcaagctcagaagtatgatgcaaaggcagatctgtggagtgtcggtgtcattctatatcaacttgttactggaagaccaccttttaatgggggcaatcagatccagttgcttaaaaatatactcaggacatgtgaaatacgcttcccatctgattgtgacttgagccatggctgcattgacttgtgcagaaagttgctgcggctcaattcagtggagcggcttacagttgaagaatttgtgcaccacccatttctttctgaacatgctccagagaagactttgagccttacacaatctgacataagagatggctttccaagaaataatagcagtccaacaaggcattcaaaccatagttcacaagaagattgtatgccttttcctttagatgatgagtcaagtggacaggacgagggtccagttcctgacagtaagagtctgatgaaatcttatggatttcccatgggtaaaagattggataaaacttcaggccagaagagtccaccgaaacataacagtttgttctccaggtatgtcttgggcaataatcatgcacctagtagccaacaccatggccattctggtaaagtgaccaaggaaagcaagattcatgaagtacaaggtcaaaaggttgtttatccagaagatcaggaatacgtcttcgtgtctggaccacacctggagggatcatcatcttcaacaaatgcctctcagcagcttaatgtaccagcaaaatatgataattcgtctgtttcaccaccaaagttaactttcatgagtgcaccaatgccgataaatggtttgccgattaatagacaacaacttgctgggactggtagctttgacagccactgttctcctgcatctggcacttcacagggatctgcagatataagtgatgccatggatcagcccccatctgattatctgacgaggattagattgttggagcaatatgcatcagccatagcagggttggtcagagatgagatcaaaggtggcagacacttggaagcgttctctattcagctaattgttcttgcaacctggaagcaagcaattcatataggaaatacctttgtagcttcacctgcaagggagagtccctcacaggatatccctatgaaggggcatattgctggtgcttcccatttgcctgcgaactcaaagctagctgatgatgcctgcatgcagatagagaaacagtttctctctgaagttgaatatgctgaagaactagccagcattgtgggacagatagctgatggtacagagatgccagatgcaattgaaatgatatttcagtcggctttactcataggaaggcgaggcggtgttgatgaaatgtttgggaaagccgcggatgccatgactgggtatatgagggcggtatccatgctgcggtttctcctggtcgaggcaccatcactcgccctcaacccccctttgactctaacgagatccgatcggaatcgactgcgcacatacattgacgctctcaacaccaggctctgtcagatgcagagccagaggcattgactgctgccatgcgccctcaaatcttgtccaggtgttgtacaatattctttcatttgtaaatatatttgttggcccaaactagggcatatgtaacatgtcagaactgtggaactaggcagagcagcgaaaatctattgtaaatatatttgtagtgtggaattaggcagagtgtacgtggtaggttcattctgtgtcgattcaggcagaagcttgaaaaccgaataaccaataatagtcacgtgtggaaatgtaaacagctcggcctctacttcgtagattctttattatatattagtaaattagctcgataaaaaaaattatgcacctaatatcatctc

SEQ ID NO: 153746 - DNA, 2027 bp, Zea Mays
tcaactcagactattccttaacattaagaaattctctagcggatatttaacctgttttagataaaagtgtttttagaataccacttttttcaaggcatactttcttctgcaaaagtatgtttaggaaataagaacatcaaaggtgtgttgtttttgtttttgcatttgatcatagcactagtgcctaaactgataatgtacagctgtagcataacctcatatctagtatttaacagaggctaaaatgtaatgttctactattgctgttatcacatacagttatcggctaacattaatggtgctgtgctaatctgtgtaattgatccagtggagcggcttacagttgaagaatttgtgcaccacccatttctttctgaacatgctccagagaagactttgagccttacacaatctgacataagagatggctttccaagaaataatagcagtccaacaaggcattcaaaccatagttcacaagaagattgtatgccttttcctttagatgatgagtcaagtggacaggacgagggtccagttcctgacagtaagagtctgatgaaatcttatggatttcccatgggtaaaagattggataaaacttcaggccagaagagtccaccgaaacataacagtttgttctccaggtatgtcttgggcaataatcatgcacctagtagccaacaccatggccattctggtaaagtgaccaaggaaagcaagattcatgaagtacaaggtcaaaaggttgtttatccagaagattcccctatcattgattcattagagtttgtagatcaggaatacgtcttcgtgtctggaccacacctggagggatcatcatcttcaacaaatgcctctcagcagcttaatgtaccagcaaaatatgataattcgtctgtttcaccaccaaagttaactttcatgagtgcaccaatgccgataaatggtttgccgattaatagacaacaacttgctgggactggtagctttgacagccactgttctcctgcatctggcacttcacagggatctgcagatataagtgatgccatggatcagcccccatctgattatctgacgaggattagattgttggagcaatatgcatcagccatagcagggttggtcagagatgagatcaaaggtggcagacacttggaagcgttctctattcagctaattgttcttgcaacctggaagcaagcaattcatataggaaatacctttgtagcttcacctgcaagggagagtccctcacaggatatccctatgaaggggcatattgctggtgcttcccatttgcctgcgaactcaaagctagctgatgatgcctgcatgcagatagagaaacagtttctctctgaagttgaatatgctgaagaactagccagcattgtgggacagatagctgatggtacagagatgccagatgcaattgaaatgatatttcagtcggctttactcataggaaggcgaggcggtgttgatgaaatgtttgggaaagccgcggatgccatgactgggtatatgagggcggtatccatgctgcggtttctcctggtcgaggcaccatcactcgccctcaacccccctttgactctaacgagatccgatcggaatcgactgcgcacatacattgacgctctcaacaccaggctctgtcagatgcagagccagaggcattgactgctgccatgcgccctcaaatcttgtccaggtgttgtacaatattctttcatttgtaaatatatttgttggcccaaactagggcatatgtaacatgtcagaactgtggaactaggcagagcagcgaaaatctattgtaaatatatttgtagtgtggaattaggcagagtgtacgtggtaggttcattctgtgtcgattcaggcagaagcttgaaaaccgaataaccaataatagtcacgtgtggaaatgtaaacagctcggcctctacttcgtagattctttattatatattagtaaattagctcgataaaaaaaattatgcacctaatatcatctc

SEQ ID NO: 153747 - DNA, 1976 bp, Zea Mays
acgctagctctgtatgcaaacatgcctgactcgcccgttcgcctatctcgcccccccccccccccccccccagcatcggagaacggagggaaccagggagctccggccgcctagaaccggagctcccaaatagatcgatccatcggtcgttgagcggacacggcaatggaagcccacgcctcgcggggccgccgcaccctggaggagatccggcagaagagagccgccgagaggatgcagcacgccctcccgatcgcggcgtctcacgtcgactctcacgggaaccaaagagccggagctgagcttcttgctcgagttcaagaacttgaaaatgggaacacggaattggtgagggaaaacaaaatgctcttgtccaagattgatgagaagggagttgagaaggatgcccttgtaaaccgtttgaatgatctcgagcggaatgtagttccctctttgcaaaaaaacttgaatgacatttctttggagaaagatgctgctgtagttgctaaggaggatgctctagctcaactcaggagcatgaagaaacggctcaaggaagcagaagaagaacagtataaggcagaagaagactcagcctccttgagagcacagctaaacaccctgcagcagcaagtaatgggacactcttacagtggatatacaatgggaatatcgactgaggaatctgttgccatggaaaaggagatacaagatttacaggcacagctaaagcaagagtcactgctaagacaacaggagcaacaaaaattagctgaagagtcgcagctgaggcaacaagagcaagaaaaactagccaaagaacaaatccatattgcttctctggaggctgaaaagcaacagctggaagaccaaattactatgttgacaaagaaagctacagaggacgcttctgagtttgctgcacacaaggcattttcaatgcaagatagggaaaaacttgaaaaccagttgcatgacatggctttgatgattgagaggctagaggggagtcgtcaaaaactgctaatggagattgattctcaatcgtcagaaatagagaaactgtttgaggagaattcggccttatctacttcttatcaagaagccatagctattacagtacaatgggaaaaccaggttagagattgtctgaagcaaaatgaagagctccgttctcacttggagaaactaagacttgaacaagctagcctgttggaagtaagcaatatcactaccaaatcagatggacaaattgaaaacagtatctcaaacctaccagaaatggtcaccgagaatatttctctgaagggtcagcttataaaagaacagagcagatctgagagtttgttggcagagataatgaaactttcagctgagcttaggaaagcagtccaagcacagaataaccttgtacgcttgtacaggcctgtattaagagacattgagagcaatctgatgaaaatgaaacaagaaacttatgcgacgatccaatgatacatggtgtcaaactcaatccacgatactgtggaatggccgcatagtcacaagctccaccgtaggcctggttcggttgcatctgaattggagacgcaaccaacaagcccttgctcaagatgctggtgaatgtattggtctcatgccattttcaagatgctggtggaaagcagttctttcggtggctaccattcataagtagagttctgtcgagatcgttcaacctgtatcatactcttgtatacccgattcccaccggttcatcttataaactgggggcaaatggagaaaaagattggttagggcttgtttggtgaaaaagattggttagggcttgtttggttacaacttacaagggaggtggaggggactggagggaaataaactaatttttcccttaatccccacatttcccttctaaccaaaacaaattattatccctgctctcagtccacaaattgggcgcaacaactttttaaatc

SEQ ID NO: 153748 - DNA, 2704 bp, Zea Mays
ttttgctataacgaaagatggccgggctcatcgttgcttttgcgcgtagcagggatgactgactgggaggaggagggagacgagaacgtgatgccgtgccgcccgcccgcccgcccgcccttgggctcgcttcaccttcaattcttttctttctgtcgcggccagcgccttcgcatcgcaccacgccgctttattctctaagaaccccgtcctctccattccatctcctcctccgtccatcgtgcagatcttgcttcttcttcttctcctcctcctcctcctcctcctcctcctgaccaccctcctgctcagctcgtcgtacgtagacatcgcgatcgccgtcgtcgatcggtctcgccaagctcttgcttccgttcttttctggttcagtttgttcggtgctctccctctacgtgggcgctgcgtctatatatatgctgtgttggcgccagctgcataaatggcgtactcctcgcggacttgtggtcggtgcaacaaccacggattagctgagctctgacaagatagcttcactgaccctgaccgcgtgccctgtcaactggagtagaatatagaaggaagcagccagcactttcgattagcacagcgttgccatgctaacccaagcaatctcttacggtgttgtatccatgtgcttgctgatcttgtccagtgcagagaggagatccggtttcatgaagtggctctgcaatttcctcaaggggccgaagcccggggagccgaaccgccggcggccccaggtgacggccggagaggaggaggacgcgctttggcaccaacgaccagttcgaccgaagaatgatccacctagaaatgacaacgaagaagtggaccgtgcaattgcagagtctctcacagaggacgtcagaacccccaaagagaaaacccgcaagggagacaaggacgacgaagatcttgcgagggccatacaggacagcctcaacatgaacccttacacgccttacaacccctatgctccctctcacgcccaacctagagggcacaggctgtgcgcaggctgcaagcatgagatagggcatggccattacttgagctgcatggggatttactggcaccctcagtgcttccgctgcaactcctgcggccaccctatccgtgagaccgagttcacattgctgagtacagatccataccacaagctgtgctacaaggagctgcaccatccgaaatgcgacgtctgccttcagtttattccaacgaacaggagtggcctgatagagtacagagcccacccgttctggggccagaagtattgcccttcgcatgagcacgacaggacgccacgttgctgcagctgtgagaaaatggagccaaggaacacaaagtacatgtcactgggagacggccgcagcctgtgcatggaatgcctggggtctgcggtcatggacaccggtgaatgccagcccctgtaccattctatcagagactactacgaggggatgaacatgaagctggaccagcagatacccatgctcttggttgagcggcaagcgcttaacgaagccatggaaggagagagtagaggcccacaccacatgcctgagacaaggggcctgtgtctgtcggaggagcagactgtgagcagtatacttaggaggcccaggattggtggaaaccggttactggacatgagaactcagccacaaaaactgactaggagatgtgaagttactgcaatacttgtcttgtatggcctccccaggctactaacaggatccatcctcgcccatgagctgatgcacgggtggttgcgcctcaaaggttaccgaaacctaaacgcggaggttgaagaaggaatatgccaggtcatgtcttacctgtggctggaatcagagattcttccgtcgtcctcaaggcacgcgcagccttcatcttcctacgcctcgtcctcctcttcgtcttactcttatccaccgacatcgtccaagaaaggtgggatatctcataccgaaaagaagctgggcgagttcttcatgcaccagattgcccatgacacgtcgacggcgtatggtgacggtttcagaactgcgtatgctgccgtcaacaagtatggccttcgccaaacactgaaccacatacgcctaacaggaggactcgctgtataataagagagagagagagagagagagagagagagagagagagagagagagagagagagagagagaagacaaaatgtccatgccagacgcaacacaaagatcacatggatatcaaaggttatatacatattgagatgaagttgctggctatggaagcatggtgattcagtttcggtgaccttgagttttcaaagaggtcctgtcggagtaaatcaggaaaaagagctgtatttgctcggattaataggaactggcgatgccatgtgtaataagatcgccaaaaagcacacactaatgtaatgctctgttactcacactaatataatgaagtgtatacttatgtgtctgcagatttaattgtttgttcttgattgcatgtaatgtaagcaagggctaagcagcaagaggataccgtgagcagaattacaacctgactagtaacctatacaagtacccagcatatgaatatcattctaacaacaaatgaaagttctgccttctcttgggtcattggatcaattctgaactcaacaaaataaacaatttggtttccaaagcaa

SEQ ID NO: 153749 - DNA, 2529 bp, Zea Mays
ttttgctataacgaaagatggccgggctcatcgttgcttttgcgcgtagcagggatgactgactgggaggaggagggagacgagaacgtgatgccgtgccgcccgcccgcccgcccgcccttgggctcgcttcaccttcaattcttttctttctgtcgcggccagcgccttcgcatcgcaccacgccgctttattctctaagaaccccgtcctctccattccatctcctcctccgtccatcgtgcagatcttgcttcttcttcttctcctcctcctcctcctcctcctcctcctgaccaccctcctgctcagctcgtcgtacgtagacatcgcgatcgccgtcgtcgatcggtctcgccaagctcttgcttccgttcttttctggttcagtttgttcggtgctctccctctacgtgggcgctgcgtctatatatatgctgtgttggcgccagctgcataaatggcgtactcctcgcggacttgtggtcggtgcaacaaccacgagaggagatccggtttcatgaagtggctctgcaatttcctcaaggggccgaagcccggggagccgaaccgccggcggccccaggtgacggccggagaggaggaggacgcgctttggcaccaacgaccagttcgaccgaagaatgatccacctagaaatgacaacgaagaagtggaccgtgcaattgcagagtctctcacagaggacgtcagaacccccaaagagaaaacccgcaagggagacaaggacgacgaagatcttgcgagggccatacaggacagcctcaacatgaacccttacacgccttacaacccctatgctccctctcacgcccaacctagagggcacaggctgtgcgcaggctgcaagcatgagatagggcatggccattacttgagctgcatggggatttactggcaccctcagtgcttccgctgcaactcctgcggccaccctatccgtgagaccgagttcacattgctgagtacagatccataccacaagctgtgctacaaggagctgcaccatccgaaatgcgacgtctgccttcagtttattccaacgaacaggagtggcctgatagagtacagagcccacccgttctggggccagaagtattgcccttcgcatgagcacgacaggacgccacgttgctgcagctgtgagaaaatggagccaaggaacacaaagtacatgtcactgggagacggccgcagcctgtgcatggaatgcctggggtctgcggtcatggacaccggtgaatgccagcccctgtaccattctatcagagactactacgaggggatgaacatgaagctggaccagcagatacccatgctcttggttgagcggcaagcgcttaacgaagccatggaaggagagagtagaggcccacaccacatgcctgagacaaggggcctgtgtctgtcggaggagcagactgtgagcagtatacttaggaggcccaggattggtggaaaccggttactggacatgagaactcagccacaaaaactgactaggagatgtgaagttactgcaatacttgtcttgtatggcctccccaggctactaacaggatccatcctcgcccatgagctgatgcacgggtggttgcgcctcaaaggttaccgaaacctaaacgcggaggttgaagaaggaatatgccaggtcatgtcttacctgtggctggaatcagagattcttccgtcgtcctcaaggcacgcgcagccttcatcttcctacgcctcgtcctcctcttcgtcttactcttatccaccgacatcgtccaagaaaggtgggatatctcataccgaaaagaagctgggcgagttcttcatgcaccagattgcccatgacacgtcgacggcgtatggtgacggtttcagaactgcgtatgctgccgtcaacaagtatggccttcgccaaacactgaaccacatacgcctaacaggaggactcgctgtataataagagagagagagagagagagagagagagagagagagagagagagagagagagagagagagaagacaaaatgtccatgccagacgcaacacaaagatcacatggatatcaaaggttatatacatattgagatgaagttgctggctatggaagcatggtgattcagtttcggtgaccttgagttttcaaagaggtcctgtcggagtaaatcaggaaaaagagctgtatttgctcggattaataggaactggcgatgccatgtgtaataagatcgccaaaaagcacacactaatgtaatgctctgttactcacactaatataatgaagtgtatacttatgtgtctgcagatttaattgtttgttcttgattgcatgtaatgtaagcaagggctaagcagcaagaggataccgtgagcagaattacaacctgactagtaacctatacaagtacccagcatatgaatatcattctaacaacaaatgaaagttctgccttctcttgggtcattggatcaattctgaactcaacaaaataaacaatttggtttccaaagcaa

SEQ ID NO: 153750 - DNA, 994 bp, Zea Mays
atcagaagctagaagcctagagcagccaagaaaagcacatacccgagtcgccgaaacaacaacaatcccaatcccccctcgtcactcaaaactcgagctcgagcaacaatgtcgctgattcgccgtggaagcgcattcgaccccttctccctcgacctctgggaccccttccagggcttatttcccttcggctctggaagcagcagcagcagcagcctgttcccctcgttcggaggcaccaccaccagctcggagacggccgccttcgccggcgctcgcgtcgactggaaggagacgccggaggcgcacgtgttcaagaccgacgtgccggggctgaagaaggaggaggtgaaggtggagctggaggacggcaacgtgctccagatcagcggcgagcgctgcaaggagcaggaggagaagacggacacctggcaccgcgtggagcgcagcagcggcaagttcctgcgcaggttccgcctgacggagaacgccaggacggagcagatcagtgcgtccatggagaacggcgtgctcaccgtcaccgtgcctaaggaggaggccaagaaggccgacgtcaagtctatccagatctccggctagtatgctcaagcccacaaccgatggtgtgccgtcttcgtcttagtgttgatcgatcgggtagttcttcacatgccgggtgtccataaaatgccagcgtccgtgtaactgtgttgtaccggtatcatggctgtcttgagtagcgtgtgttgtggctactgtgttccgaacgatattgaagtctcatccgtcgtgtatcagtgccgtctgtaacgaacccagttttaaagcatttcgaagttgagttgtttggttctaaagtttggtgtatgtattatgtttgaacgccaattaacagtattaaatataatctaattataaaatagccaattaacagtattaaatataatctaattagaaaataattagatagttgaaaactaaactaagaaacaaa

SEQ ID NO: 153751 - DNA, 1794 bp, Zea Mays
tcctagttcaggtctcaccgcaagcacctcgatacggcggagtcgtggggaaccgtggaggtgaggtcgtgaggagaggaaaatttccaccgccgtgcagccatgtcggtgcaggagtacctggagaagcacctgctctcgcgcaagatcgaggaggccgtgaacgcggcggtccgcgccaaggcccccgacccggtgctcttcatcgcgggccacatgcggcgggcggcgcccgccgtgatcacgagggttcgggcgcgccagatccttgacgggcacggcgcgccggctgtcgaggttgagttgcacaccaacaaggccatacaccgagcatccgcggccggctcgggcgcgctcgagggcgccgccgccgacgcggccggggccgccgagaggcggaagatactcgccaaggtggtcgccgactcggtgcggatgatcaatgacaaggtatcggaggcgctcgttgggatggatccgcaggagcagtcgcagatcgaccaggctatcatggacttgaacaaggcgcgccacaaggctgagcttggagttggagcaaatgctatgctggcagtgtcaattgcagcttgcaaagctggtgctgctgaaaaagaggttccactctacaagcatatagcgaatcttgttggcaaaagcgctacaactcttcctgtacctgcaattacagtcattaatggtggaaagcatgctggaaatggtcttcccattcaagaaattatgatccttcctattggtgctaagaactttgaagaagcaatgcagatgggttctgagacctatcatcatctcaaggatgttattttggagaaatatggctcagacagctgcaacattggagatcatggtgggtttgctccaaatatttccagcatatctgaaggcctggatcttgtcattgcggcaatagagagggctggatataatggaagaataaaattggcaattgatgttgctgccactgatttttgtacaggttgcaggggatgacttgttgatgtctgatcctgaacgcattaagcgggcagttaatgagtacacttgcaacgctcttgttctcaaggcaaatcaagtgggcactgtcactgaggccatagaggttgtgaagcaggcaaaggatgctcattggggtgtgatggtgtcacataggtcgggagacactgaagattctttcattgctgacctggctgttggtgcttcagccggacagatcaaagccggtgccccctgccgtggagagtgtctcactaattacaatcagctgcttagaatcgagggagaacttggaagtgaaggcgtctatgcaggggagaattggagaacagtcaacacgagctgatctgtggtatcgtttgagttgcggggagaattggaaatattgatccgccttcgtatgtagccacttagcttttctttgttttcttgtccaattgcgtgagttcgtcctcggcaagtatatggaaatagggtggtgaaatgtaccattttttactagatgatggcaattgttgttgaacatacatatagtggatgcactggtggggtttacatcttttgttttcttcaacttggatttgtttaatttatgtatagcatgggttataaacatggatactgaactgtaacactcgtgaccgccggcgatagctatttatcgccatcgacgtgagagacaagggagatcgccggattcagccaatggaacagaggtctcctctgtctctcattttagtgtttggatagattttttttttcagaaacagttcaagaataaaa

SEQ ID NO: 153752 - DNA, 2148 bp, Zea Mays
tcctagttcaggtctcaccgcaagcacctcgatacggcggagtcgtggggaaccgtggaggtgaggtcgtgaggagaggaaaatttccaccgccgtgcagccatgtcggtgcaggagtacctggagaagcacctgctctcgcgcaagatcgaggaggccgtgaacgcggcggtccgcgccaaggcccccgacccggtgctcttcatcgcgggccacatgcggcgggcggcgcccgccgtgatcacgagggttcgggcgcgccagatccttgacgggcacggcgcgccggctgtcgaggttgagttgcacaccaacaaggccatacaccgagcatccgcggccggctcgggcgcgctcgagggcgccgccgccgacgcggccggggccgccgagaggcggaagatactcgccaaggtggtcgccgactcggtgcggatgatcaatgacaaggtatcggaggcgctcgttgggatggatccgcaggagcagtcgcagatcgaccaggctatcatggacttgaacaaggcgcgccacaaggctgagcttggagttggagcaaatgctatgctggcagtgtcaattgcagcttgcaaagctggtgctgctgaaaaagaggttccactctacaagcatatagcgaatcttgttggcaaaagcgctacaactcttcctgtacctgcaattacagtcattaatggtggaaagcatgctggaaatggtcttcccattcaagaaattatgatccttcctattggtgctaagaactttgaagaagcaatgcagatgggttctgagacctatcatcatctcaaggatgttattttggagaaatatggctcagacagctgcaacattggagatcatggtgggtttgctccaaatatttccagcatatctgaaggcctggatcttgtcattgcggcaatagagagggctggatataatggaagaataaaattggcaattgatgttgctgccactgatttttgtacaggaaagaaatatgacctggagttcaaatcaacaaagaaatcagggcagaactttaaaactgctgatgatatgattgagatctatagccagctttgttcagagtacccacttgtctccattgaacagcccttcgataaagatgactgggagcactcaaaaaaattgaccactctagagctgtgccaggttgcaggggatgacttgttgatgtctgatcctgaacgcattaagcgggcagttaatgagtacacttgcaacgctcttgttctcaaggcaaatcaagtgggcactgtcactgaggccatagaggttgtgaagcaggcaaaggatgctcattggggtgtgatggtgtcacataggtcgggagacactgaagattctttcattgctgacctggctgttggtgcttcagccggacagatcaaagccggtgccccctgccgtggagagtgtctcactaattacaatcagctgcttagaatcgagggagaacttggaagtgaaggcgtctatgcaggggagaattggagaacagtcaacacgagctgatctgtggtatcgtttgagttgcggggagaattggaaatattgatccgccttcgtatgtagccacttagcttttctttgttttcttgtccaattgcgtgagttcgtcctcggcaagtatatggaaatagggtggtgaaatgtaccattttttactagatgatggcaattgttgttgaacatacatatagtggatgcactggtggggtttacatcttttgttttcttcaacttggatttgtttaatttatgtatagcatgggttataaacatggatactgaactgtaacactcgtgaccgccggcgatagctatttatcgccatcgacgtgagagacaagggagatcgccggattcagccaatggaacagaggtctcctctgtctctcattttagtgtttggatagattttttttttcagaaacagttcaagaataaaaggcacacggccgctggcccatcggaccctcatgtaattgatttttagtagctattatatgataattttgagggaatagcaagcggtgttaatctcttctactcaaaatcgatccaatgtgttgtattctttaagtatggtccttgccatattaataagagttatattct

SEQ ID NO: 153753 - DNA, 1268 bp, Zea Mays
cagcgcagctcagtatagtacgtacatcgggcgccaagaaagagttgagtgcgctttgtcttggactcgccgaattgaggatggcaggacaaggcatcacgtccatgcttgccgccgctgcattgctcgtcggaatctttgcgtccatccctacagcggtgcagtccatcggcgtgtgctacggcaccaacggcgacggcctcccgtcggcggccgacgtggtgcagctctatcggtccaacggcatcgcgggatgcgcatctactcccccgacgccaccattctacaagccctccgcggctcgggcatcgacctcatcgtcgacgagaccaacctcgactccctcatctccgacgcgccggggtgggttcaggccaacctgcagccttacaaggacgacgtcagcttcaagtacatcgccgtgggcaacgaggtggaaggcggcgacacgcagaagatcctcccggccatgcagagcctcagtgacgcgctctcggcggccgggctcggcaacatcaaggtgtccacggcggtgaagatgagcgtgctcgccaccccgtcctcgccgccgtccaccggcgcgttcgccgacccctccgtcatgggccccatcgtccggttcctggccggcgtcggctcgccgctgctggccaacatctatccctacttcgcgtacagggacgcggccgggacgatcgacctcaactacgcgctgttccagccaagcaccacggtggtgaccgacgacggcggactggactacaccaacctcttcgatgccatggctgacgcgatgtactcggccatggagaaggaaggcggctccggcgtgcccatcgtcgtgtcggagagcggatggccgtccggcggcggaggcaccggcgccgagactgtagacaatgcacggacctacaaccagaacctgatcaaccacgttggcaacggcacacccaagaggtccgggccgcttgagacctacatattcgccatgttcaatgaggacaagaagcagggggacgaaacggagaagcattttggcctcttcaacggaccggaccagtcaccagtgtaccagattagtttctccacatgaaagttatacacgattgaggtgttgtaccttttaacgccttcgatgagtataaccgtagaaaatacaaccgtaactggcatccatatatatctcttcaataaatccaggctatgagctagctataacaaaagaaagtaggttcttttgggaaaaaatctatatttgaccattgaac

SEQ ID NO: 153754 - DNA, 494 bp, Zea Mays
ggccctatccagaagtccagaaccttccccaatcacccacacggccacacctggccccgcccaacttccatttatgcacaggcggactcgcggactcggggctcgtaccaacaggaaaaaaggcccagaggcagtgccgtgaccgattcgagacgcaagagaaggatcgagacgaggcggcggttttccggggcagcatcgtctcggccacgaagatgtcttactcaaggggctcaaggtaagcactatttattttataaccttgaatgacctactttaaaaaccttcttgtttcaatttgtcttcaagtgatcttgctcggtgttctgatagtttttttacaagtgaaaggtatggatctcgctcaccttactcgagaagcacaaggtaccgaagtcgctctaggtatgccctttatccttgggccagttaatgtgtttttgccaatgtcgtatgtttaaagtctatatatgaaacatctatgttgcttgtat

SEQ ID NO: 153755 - DNA, 1364 bp, Zea Mays
ggccctatccagaagtccagaaccttccccaatcacccacacggccacacctggccccgcccaacttccatttatgcacaggcggactcgcggactcggggctcgtaccaacaggaaaaaaggcccagaggcagtgccgtgaccgattcgagacgcaagagaaggatcgagacgaggcggcggttttccggggcagcatcgtctcggccacgaagatgtcttactcaaggggctcaagtgaaaggtatggatctcgctcaccttactcgagaagcacaaggtaccgaagtcgctctaggagtgtcgactctagtgatgctgaaaaccctgggaacaacctgtatgtgactggtttgtcggctcgtgtaacggatcgagatctggagaagcacttctccactgagggtgaggtgattgatgcaagcgttgtgtatgatccttggacaagggaatcacgggggtttggttttgttaccatggctgctgttaaagatgcagatcgctgcatcaaatatctggaccgttctgtgttgcaaggtcgggtcataactgttgagaaggcaaagagaagacgaggtagaaccccaacacctgggaagtatcttggcacaaaatcatcccgtggacggaggtactccacaagctactcacctgatcggaggggccgttacagttcccgctactcacctgatcggagggactgtcatggtagagaccggtcatactctccatatgacagaaggcgatcatactctccttacggcagggatgaatcatattccccttactatggccggcgatcatactcaccttactacagcagacggtatcgttcaaggtccccatactgctacagaagacgcaggtcaccttctgtttcgccatactaccgccggcacaggtacagatctgtctccaagtcatccagttcatctccaagggccagaggacggagctattcgtgcagtttatcaccacagagaagctactcgcgcagccattccccagaatccgagagatcaacaagctattctcctaagaaagggagtaaaagggaaccctcgcgtagcagatactctggcaagagtcgtcattcaagggaaagccactctcatagccgcagttcgtactccaggtctgtgtccagggagcgctcagcttgatctgcgaggtgtgtcgtcctaggtggttataagatatgcgctgtatttgcatctatcagaacttgtgtacttcgtatattacgaacttgagaactgtatggatgtgtgcattgtgccaaattatgttcattctgtgctatctttctgatgctatcttgctattgttggtttgaacttggtaatttagtttacaaaatcatt

SEQ ID NO: 153756 - DNA, 1332 bp, Zea Mays
ccaacttccatttatgcacaggcggactcgcggactcggggctcgtaccaacaggaaaaaaggcccagaggcagtgccgtgaccgattcgagacgcaagagaaggatcgagacgaggcggcggttttccggggcagcatcgtctcggccacgaagatgtcttactcaaggggctcaagtttttttacaagtgaaaggtatggatctcgctcaccttactcgagaagcacaaggtaccgaagtcgctctaggagtgtcgactctagtgatgctgaaaaccctgggaacaacctgtatgtgactggtttgtcggctcgtgtaacggatcgagatctggagaagcacttctccactgagggtgaggtgattgatgcaagcgttgtgtatgatccttggacaagggaatcacgggggtttggttttgttaccatggctgctgttaaagatgcagatcgctgcatcaaatatctggaccgttctgtgttgcaaggtcgggtcataactgttgagaagattttgttgacagcaacagggtagatgttggtagctgctctgcaacaaactgatacaacctaacaccaaaccatgccaacctcagccaaagggttgtatgccctacattgcatattatttttcttaaatatgtttattcagattgtagatgattgctctcttgcagtcttgcttttggtatcaaagacacttccttatttggtcccctattacacaggcaaagagaagacgaggtagaaccccaacacctgggaagtatcttggcacaaaatcatcccgtggacggaggtactccacaagctactcacctgatcggaggggccgttacagttcccgctactcacctgatcggagggactgtcatggtagagaccggtcatactctccatatgacagaaggcgatcatactctccttacggcagggatgaatcatattccccttactatggccggcgatcatactcaccttactacagcagacggtatcgttcaaggtccccatactgctacagaagacgcaggtcaccttctgtttcgccatactaccgccggcacaggtacagatctgtctccaagtcatccagttcatctccaagggccagaggacggagctattcgtgcagtttatcaccacagagaagctactcgcgcagccattccccagaatccgagagatcaacaagctattctcctaagaaagggagtaaaagggaaccctcgcgtagcagatactctggcaagagtcgtcattcaagggaaagccactctcatagccgcagttcgtactccaggtctgtgtccagggagcgctcagcttga

SEQ ID NO: 153757 - DNA, 1636 bp, Zea Mays
ccaacttccatttatgcacaggcggactcgcggactcggggctcgtaccaacaggaaaaaaggcccagaggcagtgccgtgaccgattcgagacgcaagagaaggatcgagacgaggcggcggttttccggggcagcatcgtctcggccacgaagatgtcttactcaaggggctcaagtgaaaggtatggatctcgctcaccttactcgagaagcacaaggtaccgaagtcgctctaggagtgtcgactctagtgatgctgaaaaccctgggaacaacctgtatgtgactggtttgtcggctcgtgtaacggatcgagatctggagaagcacttctccactgagggtgaggtgattgatgcaagcgttgtgtatgatccttggacaagggaatcacgggggtttggttttgttaccatggctgctgttaaagatgcagatcgctgcatcaaatatctggaccgttctgtgttgcaaggtcgggtcataactgttgagaaggtaaaatcataagattgggagcatctaactttcttatttaacttggctactaaatgatatttatatcattccttagtactctacactgaacattttagtgctctgtccattgaagattttgttgacagcaacagggtagatgttggtagctgctctgcaacaaactgatacaacctaacaccaaaccatgccaacctcagccaaagggttgtatgccctacattgcatattatttttcttaaatatgtttattcagattgtagatgattgctctcttgcagtcttgcttttggtatcaaagacacttccttatttggtcccctattacacaggcaaagagaagacgaggtagaaccccaacacctgggaagtatcttggcacaaaatcatcccgtggacggaggtactccacaagctactcacctgatcggaggggccgttacagttcccgctactcacctgatcggagggactgtcatggtagagaccggtcatactctccatatgacagaaggcgatcatactctccttacggcagggatgaatcatattccccttactatggccggcgatcatactcaccttactacagcagacggtatcgttcaaggtccccatactgctacagaagacgcaggtcaccttctgtttcgccatactaccgccggcacaggtacagatctgtctccaagtcatccagttcatctccaagggccagaggacggagctattcgtgcagtttatcaccacagagaagctactcgcgcagccattccccagaatccgagagatcaacaagctattctcctaagaaagggagtaaaagggaaccctcgcgtagcagatactctggcaagagtcgtcattcaagggaaagccactctcatagccgcagttcgtactccaggtctgtgtccagggagcgctcagcttgatctgcgaggtgtgtcgtcctaggtggttataagatatgcgctgtatttgcatctatcagaacttgtgtacttcgtatattacgaacttgagaactgtatggatgtgtgcattgtgccaaattatgttcattctgtgctatctttctgatgctatcttgctattgttggtttgaacttggtaatttagtttacaaaatcatt

SEQ ID NO: 153758 - DNA, 1630 bp, Zea Mays
ccaacttccatttatgcacaggcggactcgcggactcggggctcgtaccaacaggaaaaaaggcccagaggcagtgccgtgaccgattcgagacgcaagagaaggatcgagacgaggcggcggttttccggggcagcatcgtctcggccacgaagatgtcttactcaaggggctcaaggtatggatctcgctcaccttactcgagaagcacaaggtaccgaagtcgctctaggagtgtcgactctagtgatgctgaaaaccctgggaacaacctgtatgtgactggtttgtcggctcgtgtaacggatcgagatctggagaagcacttctccactgagggtgaggtgattgatgcaagcgttgtgtatgatccttggacaagggaatcacgggggtttggttttgttaccatggctgctgttaaagatgcagatcgctgcatcaaatatctggaccgttctgtgttgcaaggtcgggtcataactgttgagaaggtaaaatcataagattgggagcatctaactttcttatttaacttggctactaaatgatatttatatcattccttagtactctacactgaacattttagtgctctgtccattgaagattttgttgacagcaacagggtagatgttggtagctgctctgcaacaaactgatacaacctaacaccaaaccatgccaacctcagccaaagggttgtatgccctacattgcatattatttttcttaaatatgtttattcagattgtagatgattgctctcttgcagtcttgcttttggtatcaaagacacttccttatttggtcccctattacacaggcaaagagaagacgaggtagaaccccaacacctgggaagtatcttggcacaaaatcatcccgtggacggaggtactccacaagctactcacctgatcggaggggccgttacagttcccgctactcacctgatcggagggactgtcatggtagagaccggtcatactctccatatgacagaaggcgatcatactctccttacggcagggatgaatcatattccccttactatggccggcgatcatactcaccttactacagcagacggtatcgttcaaggtccccatactgctacagaagacgcaggtcaccttctgtttcgccatactaccgccggcacaggtacagatctgtctccaagtcatccagttcatctccaagggccagaggacggagctattcgtgcagtttatcaccacagagaagctactcgcgcagccattccccagaatccgagagatcaacaagctattctcctaagaaagggagtaaaagggaaccctcgcgtagcagatactctggcaagagtcgtcattcaagggaaagccactctcatagccgcagttcgtactccaggtctgtgtccagggagcgctcagcttgatctgcgaggtgtgtcgtcctaggtggttataagatatgcgctgtatttgcatctatcagaacttgtgtacttcgtatattacgaacttgagaactgtatggatgtgtgcattgtgccaaattatgttcattctgtgctatctttctgatgctatcttgctattgttggtttgaacttggtaatttagtttacaaaatcatt

SEQ ID NO: 153759 - DNA, 1396 bp, Zea Mays
ccaacttccatttatgcacaggcggactcgcggactcggggctcgtaccaacaggaaaaaaggcccagaggcagtgccgtgaccgattcgagacgcaagagaaggatcgagacgaggcggcggttttccggggcagcatcgtctcggccacgaagatgtcttactcaaggggctcaagtgaaaggtatggatctcgctcaccttactcgagaagcacaaggtaccgaagtcgctctaggagtgtcgactctagtgatgctgaaaaccctgggaacaacctgtatgtgactggtttgtcggctcgtgtaacggatcgagatctggagaagcacttctccactgagggtgaggtgattgatgcaagcgttgtgtatgatccttggacaagggaatcacgggggtttggttttgttaccatggctgctgttaaagatgcagatcgctgcatcaaatatctggaccgttctgtgttgcaaggtcgggtcataactgttgagaagattttgttgacagcaacagggtagatgttggtagctgctctgcaacaaactgatacaacctaacaccaaaccatgccaacctcagccaaagggcaaagagaagacgaggtagaaccccaacacctgggaagtatcttggcacaaaatcatcccgtggacggaggtactccacaagctactcacctgatcggaggggccgttacagttcccgctactcacctgatcggagggactgtcatggtagagaccggtcatactctccatatgacagaaggcgatcatactctccttacggcagggatgaatcatattccccttactatggccggcgatcatactcaccttactacagcagacggtatcgttcaaggtccccatactgctacagaagacgcaggtcaccttctgtttcgccatactaccgccggcacaggtacagatctgtctccaagtcatccagttcatctccaagggccagaggacggagctattcgtgcagtttatcaccacagagaagctactcgcgcagccattccccagaatccgagagatcaacaagctattctcctaagaaagggagtaaaagggaaccctcgcgtagcagatactctggcaagagtcgtcattcaagggaaagccactctcatagccgcagttcgtactccaggtctgtgtccagggagcgctcagcttgatctgcgaggtgtgtcgtcctaggtggttataagatatgcgctgtatttgcatctatcagaacttgtgtacttcgtatattacgaacttgagaactgtatggatgtgtgcattgtgccaaattatgttcattctgtgctatctttctgatgctatcttgctattgttggtttgaacttggtaatttagtttacaaaatcatt

SEQ ID NO: 153760 - DNA, 1390 bp, Zea Mays
ccaacttccatttatgcacaggcggactcgcggactcggggctcgtaccaacaggaaaaaaggcccagaggcagtgccgtgaccgattcgagacgcaagagaaggatcgagacgaggcggcggttttccggggcagcatcgtctcggccacgaagatgtcttactcaaggggctcaaggtatggatctcgctcaccttactcgagaagcacaaggtaccgaagtcgctctaggagtgtcgactctagtgatgctgaaaaccctgggaacaacctgtatgtgactggtttgtcggctcgtgtaacggatcgagatctggagaagcacttctccactgagggtgaggtgattgatgcaagcgttgtgtatgatccttggacaagggaatcacgggggtttggttttgttaccatggctgctgttaaagatgcagatcgctgcatcaaatatctggaccgttctgtgttgcaaggtcgggtcataactgttgagaagattttgttgacagcaacagggtagatgttggtagctgctctgcaacaaactgatacaacctaacaccaaaccatgccaacctcagccaaagggcaaagagaagacgaggtagaaccccaacacctgggaagtatcttggcacaaaatcatcccgtggacggaggtactccacaagctactcacctgatcggaggggccgttacagttcccgctactcacctgatcggagggactgtcatggtagagaccggtcatactctccatatgacagaaggcgatcatactctccttacggcagggatgaatcatattccccttactatggccggcgatcatactcaccttactacagcagacggtatcgttcaaggtccccatactgctacagaagacgcaggtcaccttctgtttcgccatactaccgccggcacaggtacagatctgtctccaagtcatccagttcatctccaagggccagaggacggagctattcgtgcagtttatcaccacagagaagctactcgcgcagccattccccagaatccgagagatcaacaagctattctcctaagaaagggagtaaaagggaaccctcgcgtagcagatactctggcaagagtcgtcattcaagggaaagccactctcatagccgcagttcgtactccaggtctgtgtccagggagcgctcagcttgatctgcgaggtgtgtcgtcctaggtggttataagatatgcgctgtatttgcatctatcagaacttgtgtacttcgtatattacgaacttgagaactgtatggatgtgtgcattgtgccaaattatgttcattctgtgctatctttctgatgctatcttgctattgttggtttgaacttggtaatttagtttacaaaatcatt

SEQ ID NO: 153761 - DNA, 1358 bp, Zea Mays
atgcacaggcggactcgcggactcggggctcgtaccaacaggaaaaaaggcccagaggcagtgccgtgaccgattcgagacgcaagagaaggatcgagacgaggcggcggttttccggggcagcatcgtctcggccacgaagatgtcttactcaaggggctcaaggtatggatctcgctcaccttactcgagaagcacaaggtaccgaagtcgctctaggagtgtcgactctagtgatgctgaaaaccctgggaacaacctgtatgtgactggtttgtcggctcgtgtaacggatcgagatctggagaagcacttctccactgagggtgaggtgattgatgcaagcgttgtgtatgatccttggacaagggaatcacgggggtttggttttgttaccatggctgctgttaaagatgcagatcgctgcatcaaatatctggaccgttctgtgttgcaaggtcgggtcataactgttgagaagggtagatgttggtagctgctctgcaacaaactgatacaacctaacaccaaaccatgccaacctcagccaaagggcaaagagaagacgaggtagaaccccaacacctgggaagtatcttggcacaaaatcatcccgtggacggaggtactccacaagctactcacctgatcggaggggccgttacagttcccgctactcacctgatcggagggactgtcatggtagagaccggtcatactctccatatgacagaaggcgatcatactctccttacggcagggatgaatcatattccccttactatggccggcgatcatactcaccttactacagcagacggtatcgttcaaggtccccatactgctacagaagacgcaggtcaccttctgtttcgccatactaccgccggcacaggtacagatctgtctccaagtcatccagttcatctccaagggccagaggacggagctattcgtgcagtttatcaccacagagaagctactcgcgcagccattccccagaatccgagagatcaacaagctattctcctaagaaagggagtaaaagggaaccctcgcgtagcagatactctggcaagagtcgtcattcaagggaaagccactctcatagccgcagttcgtactccaggtctgtgtccagggagcgctcagcttgatctgcgaggtgtgtcgtcctaggtggttataagatatgcgctgtatttgcatctatcagaacttgtgtacttcgtatattacgaacttgagaactgtatggatgtgtgcattgtgccaaattatgttcattctgtgctatctttctgatgctatcttgctattgttggtttgaacttggtaatttagtttacaaaatcatt

SEQ ID NO: 153762 - DNA, 916 bp, Zea Mays
ttcctgagttagcagttcggcaatcttaagagctgtctaattgtacacgaattgcatacaagccgtcgtcagtcaaactgtggacatttgaatgcagccagccacacaaactcgcgagctgtttgggtacaatgtacaaattctttggttattaacagcaactagttggagagggcagcgacagaagaacccggaacacggaagcctagttactcttgtccatcttcttccgccagtacgatatcgcagtgctgtagtgctcattgcggattttcttcgaggctgctctccagtcacacttctccatctcttccctggcagcctttccaacggtttccctgagatcctttgaactgaggacttgctctatcttcctcacgcactcatcgagatctcccggtgtaaacaaaaagcttgttttaccctccttgtccttgggtattatatcaggtatccctccagcacgagcagcgacgactgggactccagaagccatggactccagcactacttgcccgagggtctcggattctgaaggcattgcaaatacatccgcactggcgtacgcttgtgagagctcctcaccttggagcattccggtaaaaactgcaggcatgcccatgaacattttttccaactcagccctgcatgcccaagtaaaacagacaatgtaaatatttctgttattatgatcaaaccattgcaagggtcaaaacagatgaccaaacacctaaagtataaattacttatcgatagtgctgctacaacatgtgtggtgtggctgtacttttagtgcattctaactattgtacttggtatacaactgtcttgcattgaacaattatgacctagtattggaaaaaaagaattctcaggccaacccaggattgaaattatgtttctccacttgtagttt

SEQ ID NO: 153763 - DNA, 861 bp, Zea Mays
atggaccgcaagccgccggagcgcttcaggcgtaggctgatcatgaaggatgggaaatttccatacgtggatgtgatccatgcgagcagcatctcggccacgacggctcggtcgccgcgtcaacctcccgcgtccgatcccgtgagaagcacagggaccacaagccgctggagcgcttcaggtgcagggtttggacgcgactggaagaagatcgaggagcatgtcggcaccaagacgacggtccaggtccagaagcttgggctggctgctgggctgccgccgatgtacccgaggcgccacttcgccatgcagcagcagcaacagagctcggtggccggtggtagcagtgcggtcgccatgccgctgctgcacggccggcaacctacttgcgcgccggtcgccatgccaggtctggccaagcccgacgctgtcgcccatcacggttccatcggatggagcagccccagtgtggtcgtccctgcggccaacagcggcggcggcggcaaggatgcaaggcttggacttggagtgggtggcaggcgcttcggttctaggggcaaatatttggttttacacatgcaggtggatgtgttctcttttgggatagttttatggaagatcttgactggtgaggaaccgtatgcaaatatgcattgtggtgctatcatagatcatgtttccttcaacactacaatgaactacgtcgaggagaattgtgctccaacagtttatacaccagaattaagatacgtgtgcattgctggaaggtacattcaaggtgctcctcttctggggaactctacagctgcttctgatgagatcctcgcagttgacactccttcagaaggaggttgtcagtag

SEQ ID NO: 153764 - DNA, 666 bp, Zea Mays
gcgctcgcgtgaggccgcttgctccctctcccacttggcaagacatgacattggcgcttgatcaaaagcgatggaagaaagctattgagaaaaagcaacagcgagcttaagctcattattctttcctgccccttgggcccccagttggatgagcatgtgtctggtcatcaattctggcgcatgaagtttcagagttttctatctctacacataatgtattgactgaggttctacttttggtttccctatgtagcgttagagcactgtgaaaacgaatgaattatgttaaactgcccccaatttttatgtttgctacatcccagatcctcacatgacattcataatgattcgtctgttcttgaaatctttattatcctttttaacatgctactccatccgttccaaactatagttctttctggcttttctaggtacgtagcttttgctacacatttagatatatatagcttttagtatgtatctagaaaagctaaaagaacttgtaatttggaacataggggagtacatgttatcttgcatatgcagcattggtgtgattgtgtactccaaatgaactcaaacccctggtatagtatatagtcgaacaatctcaagtttagccaggttgatataaaacaatataaaaaatttgagggtttcttcagg

SEQ ID NO: 153765 - DNA, 241 bp, Zea Mays
gttcagttgagacagtttgcggatcaagtgtgaagcaaaaccatttgacatcagattcacgaccaggtttgtgggcgagcagatgtgtgggatgacggcgttgttcctgagatggcagcgcatctggactacttatctattaatttcttgagaattaaagcaggaggtcttgaatatttgtccttaacagtttatattgtcagttttacaagagtagatatctcattacagatatctcatt

SEQ ID NO: 153766 - DNA, 1883 bp, Zea Mays
atggggattgggctgcctgatcgtcctgaaatagtcccaacaccgtgtctgattcatcatcacactctgcacggctggagtctgaagagaggtcgtcgtctcgttggacagccgaacaacagccagcagtccacatcaaggttcctgagtctgcactctgcagccatgggaaccatcgtccacggcgggcggagcggcatgatgaagcagctcaacgtggggggcaagctcttctcgctggaggcaagctccctttccctccccatgtctatcggttccccttcccctaccccaacattcgtggaccgcgacccagccctcctatccgccgtcctcgctgccatccgctccccgtccaccgcagcgcccgacttccccgcgcgcgtcctcctcgacgaggccaacttctacggcctgcacgcccagctcctcgctgcgctatctccgccgccgctccgcggcttctcagcctccctcgcctccaccctctgcccctcctccgagcccttctccaccgcccttgcgccgcaccacgacgggtcactatgcctcgcccatggcgccgggctggtcacctattactccccagcgctggatcaccgcgccaccattcggacccacctccaccgcgtcacctccctcctgcagctgccctccagtctcgccgtccttgggtctgactccgctcctgggcttcacgtgtacgactttctcgatggcaaacatgtcgcctccgttcagtggtcggatcccactgacactcgcaccagcaaggcgaaggtcgtcgccattgcggcccgtcctccagctgatgccgccgataagaattcaccgatcttggcaacgtttgagtgccctcatcgggaaaactgcatcatggctgttgaccctgtaactctgaagcctacacaggagattggccggcaaagtggtagtgcggctaagtcatcggcaccaggtcgagtggtgcacctgcaggcacttggtctggtgtttgcgtcattcgttagttccggggcatttggctactctggctatatgaggctatgggacattcggtctgggaatgtggtgtgggagacaagcgagccagggggagctggaagaagcagtaggtttggggatccatttgcagatgcagatgtggatgtgaagcagcaggcaatatacaaggtttgctcaaagtcaggagatttagcagtggcagacctgagatgccttggcgatgacccctgggtgtatatgtcatcaggaccacgagggagcgcaggaggctatggcagtgttctgtgctgtcaccgctctcaagtttttgtcagccgaaaggatggattggaggtttggtcccgactggaagagcaccgccacaacacaggggaattgacagagcaatcaggagtaaaggaaagacccaaaaatgaaggaattgatgacagattttataggagttgctatgtggacacagaaaaggatgctaagcgtgggatgatacagatgattgaagggggtggagaccgcttgtttgtgacaagagaagagatgcaaggtgtgcaagtgtgggagacctcccaccttgctggttctacttctctctcgtagctttattctcttgtgcacatggagtgaccattcagtaggtctaccaagagaattgaaattgcatgatgccaatattgttcttggttcatggcttcatgcataatttgacattgaacaaatatgtgttttatgtagtcttggctctcaagatatatcatgtatcacatgtcttgcttctgcatatgcatgtcatggtaaatgctgagaatagaaagacacaatcttctttgatgtaaaactattttcttaatatcttagcacgaatattttagcttctacagtat

SEQ ID NO: 153767 - DNA, 689 bp, Zea Mays
accatgtacagttgcaactcaatgttgaatagtatattgtaaaaaaacgtaaaatcaatcgtcaaatcaaactacaattcctcttttgcaaaagaacaaaaaaaagatgagctacaattcctgtacatcagcaattcacagcggccttcgcatactacgtaactctaaaacaggatgaaaatggatcaggccttccatatcactagagtttgtgacacctttgaagagtgaagacgtcaaacaagcttgcaagctgacagtctatcacgtcaccttggtgatgcgtcggttgtgctaaactgacagctgttcatgttggtctttgtacaattgtactgtatgattcagctggattgcctttggtgctttggctttgaggacgtgcctgctgtcaaactcccaaagccgccagtacgctgccgaggttctttcagtacacctggtgcaactacattttgcaggtcaatttctgctttgttagatagcatattgacaacctgcttcatggatggcctctgttgggacgtggcttgtgtgcacagcagtgccaccttgatgaaacgaagcatttgctcctctgggtactttttcagttctggatcaacaatttccaagagtcttccttcttctcgcagcttccatgtctgcagtttaacccatgtaataagctcaaccatttttccaaagaa

SEQ ID NO: 153768 - DNA, 1297 bp, Zea Mays
ctcaaaagggtgagagatccaaatctccatgactccatcccatagccccgctcacgctgtcgctgtcacgcacatcatcgtcctcctcccttccccgcaggccccctcgcctcgcgcgtgcgccccccctaccccgtctcctccctgcctgcgcgagcgactagtagaaataggcgcgcgtgccgcctcggccgctcgctcctctggttaatcccccctcgccacgactcgcagccatcccttcacattatccgcgcgcgcgcgagcggacgtagcgtgtgggtagcgtcgccgtgcggacggtctcttggtgccggtgcgggccgcgtgacggtgcgtgtgccgcccgcggggaggaggtcgttcggttggttggccctcggcgacgatggcggtccacggcggagaggcggtctccgtcgcgctcctcttctccctcgctttcttctgcgctcgcctcctgctcgaccgcctcgtctacaagccattagcagtctaccttttcaacaccaaagcttctaagttgatgaataatgaggccaggcaagcaaagattgtcaagttctcagagtccatttggaaacttacctactatgcttctgttcaagcatgggtcctcatgataataaagcaggaaccatggtcattggatatgatgcaatactttgatggctggccgaaccaacccatcgtgtcttcattgatgcttttctatatgtgccagtgtggattttatatctatagcatcggtgctcttgttgcttgggaaacccgcagaaaagattttgctgtaatgatgtctcatcatgtaataacatctactctaattggagtttcatatctgactggatttttccgaattgggaccatcattctcgctcttcatgatgcaagtgatgtgtttcttgagactgccaaattgtgcaaatacacagaaaaagagctgggtgctagcttgttttttggtctcttcgctatctcctggcttctattgcgtctgatttacttcccattttggataatcaaagcctctaggtttgttttttacttctctttgtgataactttctgtttctgtagtcttgtagttttggacttattgctgttgccgttgcaatggcagctatcattccatcacattcttgaggaagctggatgaattcccaacaactttgtactacatcttgaacacaatgcttctcacattgcttgtattccatatgtactggtggaaactcatatgtttgatgataatgagacagctgaataataaaggacaagttacagacgatgtccga

SEQ ID NO: 153769 - DNA, 1680 bp, Zea Mays
aaaagggtgagagatccaaatctccatgactccatcccatagccccgctcacgctgtcgctgtcacgcacatcatcgtcctcctcccttccccgcaggccccctcgcctcgcgcgtgcgccccccctaccccgtctcctccctgcctgcgcgagcgactagtagaaataggcgcgcgtgccgcctcggccgctcgctcctctggttaatcccccctcgccacgactcgcagccatcccttcacattatccgcgcgcgcgcgagcggacgtagcgtgtgggtagcgtcgccgtgcggacggtctcttggtgccggtgcgggccgcgtgacggtgcgtgtgccgcccgcggggaggaggtcgttcggttggttggccctcggcgacgatggcggtccacggcggagaggcggtctccgtcgcgctcctcttctccctcgctttcttctgcgctcgcctcctgctcgaccgcctcgtctacaagccattagcagtctaccttttcaacaccaaagcttctaagttgatgaataatgaggccaggcaagcaaagattgtcaagttctcagagtccatttggaaacttacctactatgcttctgttcaagcatgggtcctcatgataataaagcaggaaccatggtcattggatatgatgcaatactttgatggctggccgaaccaacccatcgtgtcttcattgatgcttttctatatgtgccagtgtggattttatatctatagcatcggtgctcttgttgcttgggaaacccgcagaaaagattttgctgtaatgatgtctcatcatgtaataacatctactctaattggagtttcatatctgactggatttttccgaattgggaccatcattctcgctcttcatgatgcaagtgatgtgtttcttgagactgccaaattgtgcaaatacacagaaaaagagctgggtgctagcttgttttttggtctcttcgctatctcctggcttctattgcgtctgatttacttcccattttggataatcaaagcctctagctatcattccatcacattcttgaggaagctggatgaattcccaacaactttgtactacatcttgaacacaatgcttctcacattgcttgtattccatatgtactggtggaaactcatatgtttgatgataatgagacagctgaataataaaggacaagttacagacgatgtccgatctgattctgaggatgaggagtaatgggagattcattctttgacatctgcaacgtggcatttcctcgtcaatacttttctatgcctgcttccagaattgattgcttttaatcttggcaagtctcgggaacgtataggaaagtttaatctctgtatattgccttatgatatcaaacatggctagaccgggaatggatctatacatgatgacgggcatagctagcaagcttacttcaaggttccttaaaaaattttggttcacctttatttgatatggggaaagacatgagagggtgtacagctttttcctgaagcttgcagaacccccctctgtaccatgatcaatatacttcacttgtgagtagatttagttctaattgatgataataaattgattcttttgattgggaatgaatctcacctgaaccttaatgatctcatctgatgtgtattgagcattatgatgctatataa

SEQ ID NO: 153770 - DNA, 2350 bp, Zea Mays
ccatgactccatcccatagccccgctcacgctgtcgctgtcacgcacatcatcgtcctcctcccttccccgcaggccccctcgcctcgcgcgtgcgccccccctaccccgtctcctccctgcctgcgcgagcgactagtagaaataggcgcgcgtgccgcctcggccgctcgctcctctggttaatcccccctcgccacgactcgcagccatcccttcacattatccgcgcgcgcgcgagcggacgtagcgtgtgggtagcgtcgccgtgcggacggtctcttggtgccggtgcgggccgcgtgacggtgcgtgtgccgcccgcggggaggaggtcgttcggttggttggccctcggcgacgatggcggtccacggcggagaggcggtctccgtcgcgctcctcttctccctcgctttcttctgcgctcgcctcctgctcgaccgcctcgtctacaaggtatacccccgtcccgacaccgccagattcgtgccgggttccgcgagatctctggtctccccggtttcgctcccacgccccaatgccccccggtcgcgactcgcgagtggcgacgcgggcgcggggcgtggtatccgccgccgctcgttgcaccttccttaccgatcagctgattccgctcgtccggcgggggatcatccgagtgcgtgtgacgtaatgctcccgccagtcgttaattgcgttactggtggctggctggccgctactctgttaaggaccaacggcgctggtgcggtttgcagtagtatgtgcagatgtgctcgcagtagagcatggatcaataactttgtccttatgcaaagattgttcgtaatagaaccttgcacctaacaagtctacatctggcatggcttgccaattgcatgatattttcctgaattcctgcaagccagctatacgtcttccctttctctagaaggtttgagcccaacagaggtgatgatgtaaataaggtggcaaggtgatgtatgtacaagttttttttctatataagcacagtggtactcataagctgtgccaatatgcaactcttaattatcttggcattggatcgcttctaaaatttcagtatgaatagtaccttttgatatcatatggcagtttaactacacatcttaacgctatgctttccagccattagcagtctaccttttcaacaccaaagcttctaagttgatgaataatgaggccaggcaagcaaagattgtcaagttctcagagtccatttggaaacttacctactatgcttctgttcaagcatgggtcctcatgataataaagcaggaaccatggtcattggatatgatgcaatactttgatggctggccgaaccaacccatcgtgtcttcattgatgcttttctatatgtgccagtgtggattttatatctatagcatcggtgctcttgttgcttgggaaacccgcagaaaagattttgctgtaatgatgtctcatcatgtaataacatctactctaattggagtttcatatctgactggatttttccgaattgggaccatcattctcgctcttcatgatgcaagtgatgtgtttcttgagactgccaaattgtgcaaatacacagaaaaagagctgggtgctagcttgttttttggtctcttcgctatctcctggcttctattgcgtctgatttacttcccattttggataatcaaagcctctagctatcattccatcacattcttgaggaagctggatgaattcccaacaactttgtactacatcttgaacacaatgcttctcacattgcttgtattccatatgtactggtggaaactcatatgtttgatgataatgagacagctgaataataaaggacaagttacagacgatgtccgatctgattctgaggatgaggagtaatgggagattcattctttgacatctgcaacgtggcatttcctcgtcaatacttttctatgcctgcttccagaattgattgcttttaatcttggcaagtctcgggaacgtataggaaagtttaatctctgtatattgccttatgatatcaaacatggctagaccgggaatggatctatacatgatgacgggcatagctagcaagcttacttcaaggttccttaaaaaattttggttcacctttatttgatatggggaaagacatgagagggtgtacagctttttcctgaagcttgcagaacccccctctgtaccatgatcaatatacttcacttgtgagtagatttagttctaattgatgataataaattgattcttttgattgggaatgaatctcacctgaaccttaatgatctcatctgatgtgtattgagcattatgatgctatataa

SEQ ID NO: 153771 - DNA, 1616 bp, Zea Mays
ccatgactccatcccatagccccgctcacgctgtcgctgtcacgcacatcatcgtcctcctcccttccccgcaggccccctcgcctcgcgcgtgcgccccccctaccccgtctcctccctgcctgcgcgagcgactagtagaaataggcgcgcgtgccgcctcggccgctcgctcctctggttaatcccccctcgccacgactcgcagccatcccttcacattatccgcgcgcgcgcgagcggacgtagcgtgtgggtagcgtcgccgtgcggacggtctcttggtgccggtgcgggccgcgtgacggtgcgtgtgccgcccgcggggaggaggtcgttcggttggttggccctcggcgacgatggcggtccacggcggagaggcggtctccgtcgcgctcctcttctccctcgctttcttctgcgctcgcctcctgctcgaccgcctcgtctacaagccattagcagtctaccttttcaacaccaaagcttctaagttgatgaataatgaggccaggcaagcaaagattgtcaagttctcagagtccatttggaaacttacctactatgcttctgttcaagcatgggtcctcatgataataaagcaggaaccatggtcattggatatgatgcaatactttgatggctggccgaaccaacccatcgtgtcttcattgatgcttttctatatgtgccagtgtggattttatatctatagcatcggtgctcttgttgcttgggaaacccgcagaaaagattttgctgtaatgatgtctcatcatatttttccgaattgggaccatcattctcgctcttcatgatgcaagtgatgtgtttcttgagactgccaaattgtgcaaatacacagaaaaagagctgggtgctagcttgttttttggtctcttcgctatctcctggcttctattgcgtctgatttacttcccattttggataatcaaagcctctagctatcattccatcacattcttgaggaagctggatgaattcccaacaactttgtactacatcttgaacacaatgcttctcacattgcttgtattccatatgtactggtggaaactcatatgtttgatgataatgagacagctgaataataaaggacaagttacagacgatgtccgatctgattctgaggatgaggagtaatgggagattcattctttgacatctgcaacgtggcatttcctcgtcaatacttttctatgcctgcttccagaattgattgcttttaatcttggcaagtctcgggaacgtataggaaagtttaatctctgtatattgccttatgatatcaaacatggctagaccgggaatggatctatacatgatgacgggcatagctagcaagcttacttcaaggttccttaaaaaattttggttcacctttatttgatatggggaaagacatgagagggtgtacagctttttcctgaagcttgcagaacccccctctgtaccatgatcaatatacttcacttgtgagtagatttagttctaattgatgataataaattgattcttttgattgggaatgaatctcacctgaaccttaatgatctcatctgatgtgtattgagcattatgatgctatataa

SEQ ID NO: 153772 - DNA, 93 bp, Zea Mays
gcattatctcattacctaacccagtgtgtatattgggttcctaccatttacgtcatatgtataagttttacgacacactcgtatacgcaatga

SEQ ID NO: 153773 - DNA, 3252 bp, Zea Mays
atatgtttcctgaaccaatccattaaagatcacaacagctagcgttctcccgctagcttccctctctcctctgccgatctttttcgtccaccagcatggagaagaggaacctgcagtggcggcgagggcgtgatggcatcgtgcagtaccctcacctcttcttcgcggccctggcgctggccctcctagtcgcggacccgttcggcctcagtccgctggccgaggtcgactaccggccggtgaagcacgagctcgcgccgtacggggaggtcatgggcagctggcccagagacaatgccagccggctcaggcgcgggaggctggagttcgtcggcgaggtgttcgggccggagtctatcgagttcgatctccagggccgcgggccgtacgccggcctcgccgacggccgcgtcgtgcggtggatgggcgaggaggccgggtgggagacgttcgccgtcatgaatcctgactggtcagaagaagtctgtgccaatggagtgaactcaacgacgaggaagcagcacgagaaggaggagttctgcggccggccgctcggcctgaggttccacggggagaccggcgagctctacgtcgccgacgcgtactacggtctcatggtcgttggccagagcggcggcgtggcgtcctccgtcgcgagggaagccgacggggaccccatccggttcgcgaacgacctcgatgtgcacaggaatggatccgtattcttcactgacacgagcatgagatacagcagaaaggaccatctgaacatcctgttagaaggagaaggcaccgggaggctgctcaggtatgatccagaaacaagcggtgtccatgtcgtgctcaaggggctggtgttcccaaacggcgtgcagatctcagaggaccatcagtttcttctcttctccgagacaacaaactgcaggataatgaggtactggctggaaggcccaagagcgggcgaggtagaggtgttcgcgaacctgccgggcttccccgacaacgtgcgctccaacggcaggggccagttctgggtggcgatcgactgctgccggacgccggcgcaggaggtgttcgccaagaggccgtggctccggaccctgtacttcaagttcccgctgtcgctcaaggtgctcacttggaaggccgccaggaggatgcacacggtgctcgcgctcctcgacggcgaagggcgcgtcgtggaggtgctcgaggaccggggccacgaggtgatgaagctggtgagcgaggtgcgggaggtgggccgcaagctgtggatcggaaccgtggcgcacaaccacatcgccaccatcccctaccctttagaggactaaccatgatctatgctgtttcaatgcctcctaatctgtgtacgtctataaatgtctaatgcagtcactggttgtaatcttgtttgtgtttggcaaattggcataataatggacagattcaatgggcattggtgctgtagtcgcatcacactaattgaatgggatcatgttgagctctcactttgctacaatttgctccagcttgtacggttgtaccctcttgctcgtctatagtaagggccatctaaaaaaaactcaaattagatctgcaatacaagtatgattgggccgaatttggattgtcacgggtccgcgaccgcgaattgggctcggtttgatttagccgacatagtagtgaccgacccgagccggcggcgagccaaaccgagcggacgccgccatggatcgcgagtggggctccaagcccggcagcggcggcgccgcctccgcgcagaatgaggccatcgaccggcgggagcgcctccgccgcctggccctcgagaccatcgacctcgccaaggacccctatttcatgcgcaaccacctcggcagctacgagtgcaagctgtgcctgacgctgcacaacaatgaggggaactacctggcccacacgcaggggaagcggcaccagaccaacctcgccaagcgcgccgcccgcgaggccaaggacgcacccgcgcagcctcagcccaacaagcgcaagcttgccccccgcaagtctgttaagattggcagacctgggtataaagtaaccaaacaatatgatcctgagatgaagcaacactcgtttctttttgaaattggttacccggaaatcgaagataattgcaagccaaggcaccgtttcatgtcatcatatgaacagaaagtccaaagttgggataagggttatcagtacctactttttgctgcagagccctatgaaattattgcattcaagataccaagtacagagattgataaatcagcgaacaaattcttctcttactgggatcctgacaagaaggaatatctactgcaactgtacttcaagccaagaccgccagaagctaataaaccaccaccagctcctccggggactttgcctaatgggactggggttcctggtgctccaacaaggccaccggcgcaagcccctccacccctgccacaagttccaccgcccccgcctcatgcacctcctcctgcacccatgggaatgccccctaggattcctccaccccctatgggtggtgttcaacctccgccgcctcctccaccgccagttgcaaatggtccgcggccaatgattccaccgccacctaacttcactcctggagcacccccaccacgccctccaatgcatggttttcctgggcaacaacagcagtagttaagtgcttagcaatgttccagtaattgacagtcggcaaaagtttcacgcttgcttgtgttgccttatgttttccaactcaaaactttgaatgttatcataggcttacatggtctctagactatactcagatttggtcgaccgatttggtcaaattgcaagaaattgagttacatcaaaatccaaggtacaaaggaagacaacaattaaaaccatcaaaatggtgaaagtgcaatggagtcagtacttgtttgaagaagccacatggtaagtggaagtcacgataggaagcaatatccatatctcttcgactcaagataactagaagccattgttttgtagcaaagtttagtttgggttcaaagggatagctaggagggaacgaaaattgctaatttctctcgattttgattttcaatgcataacacctattttggttaatctcagggcacattttttccccaaaggggaggttggtcatgaccctatcatgatagtcatttccatactcatcatgagaattatatgcatttgaatctcaatttgttt

SEQ ID NO: 153774 - DNA, 945 bp, Zea Mays
aacggcaacatatatgatggtgaagaacccaagcagcaatggagttctcacggcgaccgccttctccgacagcaaagccaggccggagcgcggcgtaggtggcgaggcggcggggaggccgtacaggggggtgcggatgcggagctgggggtcgtgggtgtcggagatcagggcgcccaaccagaagcgccggatctggctcggctcctacgccacgcccgaggccgcggcgcgcgcctacgacgccgctctgctctgcctcaagggctccaacgccgtcctcaacttccccgctgccgcctcctcctcatcctcctccacgtccgcgtcctcgtcccaccggcgtgctcacagccgcggccacccggacgacgacccgccggctgctgccggcggcggcatgtcaccgaggtccatccagcgcgccgcggcggcggctgccgcggcgatcgacgacgacgccggcatgggcgccagcgccgctgacgacaggtgctcctccagcgccggcgcgacgaccccgacgtctgcctctctgtcgacgcagggcagcaccgccgatcacgtcggccaggagcagcacgcgacgacaacatccgccgcggccagcaccggctcgccgcccgaggggaaggaggagctgtggacagacctggacctggaggcgttcgcctcgcccaagttcatggatctactaatggacaccggcgccgcgccgtactcgtcgacgtgggaggagcccgaggacgacggcgacggcgagttgatgaggctgtggagtttctgctaggcctctaaacagcattcggctagggtgcaatgcatgcattacagcatgacaggtattgcaaggagtacctagctagggcctaggtgcatgcatgcccagccagcttccaccaaagattctttttgcttttttgataagatcgaaaagataaattt

SEQ ID NO: 153775 - DNA, 493 bp, Zea Mays
tatcaccgtaacactaatactatattggtgatataaatatcaagaattccagtcctttaacaaagtggctacaggagtacatacggtaattttcagcaaactttgcatgggacacagctcacctgatgtcgaggacatgggatgtggggtccgtgaccgtcgcgccgatggcgaggcggtacgcgcggttgcgagaggcgccgttgagcatgtcgaagtaggaggtggcggcaaggagctgcttgtggtggcatcccgttccgcccgctccttgtcacttccgtttcccccgttgccgggggctagtagtcatgtcgtgttcccacctctccaccgcctggtcctcatcggcgctcgccagcggcgcctcctcaacccagcggcgctccgcctcgcgcacgggcctcgtggtgtggtgctccctccgcgagctccgcagccgcatcgactccgtcaggaacacgcagaagatcatacctatgtatatttctga

SEQ ID NO: 153776 - DNA, 3626 bp, Zea Mays
atgggtggcctggttgaagtcaggtgccggtgcagggacctggtgatgaggcaagtgacgccatggcctcctgaagtgtccggctcttcaagcaaacagaaacaatggcaggatcaatcgaacaaagatggagtcattttggttgatgaaagccctcagaaaaagcaacgtaaaggtagaaagcaagatgcaatactgaaggagcctaatgctagcagaaagcgttgcaagacatcggaagctcctgatggtcctggaagctgtcagcaattgcatatcagccagattgaagccagctcgcctgcagcagcgccagtaataattgacgttgatttgatgagtacgccttctaaagcaggacatgctaattcaatcgatcaggatatatcaccgttgaaagttgacctaaggtcagaggcgaagatagctgcagaggaaattcgaaggttatcatctggaaagaaaattcaccctttctttcattctcggaaattgaacaaatgtgctagccaagatcaagatgtcatcaatattgaaaacatgcatgggctttgtgattctgaaagggatccaccattttatcctattcatgttgtgtaccaatcagagatcaacgtggacacacagaacttgttgaggcctggtgctagttgccaagcttctcttcttgatctgaatgtagagccagaagatccacagaatggttgtcagcctgcctgttacctatggactgacaagtaccgacctgaaactgtggcccaggtatgtggaaatagtgagcacgtaaagtttcttgctgaatggcttaaaagctgggatgaaaaaggccacaagattggagttgctaacggggacactaatgataactcatatcaagatatatctgattcagattattcagagagtgcttctgattgtgaaaatacacttctaatcactggacctgttgggtgtggaaaatcagctgcagtttttgcatgcgccagagaacaaggcttcaatgtgatagaggtaaatacatctgacatgagaaatggagcttatgtaaggcagaagtttgaggaagcaactaaatcacatggccttgaaaaatggtcacaggaggaggttatcaatccactaagggatgattccttggatccagattcaggaactcctgataggactgaataccaatgtttgatgtcctgtgctacaagagtaatgattgactgtgatcaacagaaatcacctgtaggatactactcaggtttgaaggcctgtgatgaacctcctaaacaagttgctaacaagacactcatactatttgaggatgtggatactgtctttgatgaggatcgtgggtttatttcaactattcttaagatggcagagactacaaaatggccaatcatactaactagcaacaagaaggatccgtctttgccgaatctcttggatcaacttgttttggatttcaaatacccatcgacctcagagctactttcacacgttgccatgatttgtaaatctgagggagtgaatgtcactgttcctcagttaaaacatgtaattgatgtttgtctaggtgacattaggagggtggtgatgtttttgcagttttggtaccaagggcatcaattcacagagaggccaaaggaatgtttgtgtggtcctttctcacttgatttagatgcagtacattctacagtgccaaaaatgttgccatgggagttcccttgtaagttatctgaaacattatgcatggaggtagacaaaactatccttttggctgaagaaaagaaaaaacagatggaaatatcagatcttgaaggcctgcagttacatgtaacagcacctttgatcaagggaagaacttctaaaacaagaagggctaagaaatccaaattaaagcgtgctcactcgactgagcataatgatatttcaccttgtaagaatgaacttgatgatttccatgatcttccagatatatctcttccatctgataaacaaataaaaagaaatcggcatcgttcgctgctattatctgagtccgatgatgatccagctgatgtaggtactgaaaaacataacatatttactgttactgaagttggtttcttcccacaaccttcagaggtgcctcctatgcatgggcaagggatttctgatcagttccattttcccgttgaatcacgagagacatgtgaaattgctgattctttccaaaatccacctgaaagcaacatgtatgggtccatttcacaagtttgtgatacatttatgtcacaggacgtgtcatgtgtacccgagtcatccttaattttggacggcacatctgcatccataagtggtgatgaatttttgtcaagggcagtgtccaatggtttttctgccttttgtgagggtacatacactacctccagaatggtattagaagacagtgactgtgtgaagaatctaatggctgaacgacaaaaagatgttgaagatgtagttggtgagacaagtgagacttatatggaatcatttcggagaaatgaacaggcaagctgttcagctgctgggtttcaattaatggatgaatgtagtcgtgctgaaagcatctggctgctctctggcaaaaaatctaatgactcttgcaaggtggaactagtacaggacacttggaacaggctacggagttgtcgtcttgaatttaccagtgaggctaatcacaacagagcaacttctggagctttgaagcttgtctcagaagtgtctgatttaatatcagaatcagatcttatgcttttccgttgctaccctcttactaaggatacgttggatccgtctttaactccttgtgatgagccagttgattcttcttggtacagcaatcaggttgagatgggatctgtatatgcccagcatgctcttcgtattttatcgaggaattcccaaaaaatagatggtggttctgtcgatttgtcacaagagttgtttgccagtacagctgctgtatcctttggtaaaattacctgttcaggattcaggaatgattatggatctacggacctttctcatatgaaaaatccaactacctgtatttttaaaagaagggagcggcatgttcatctttgtgaaaccctgtctccagtggttcctccaaagttgttgcagtcattgagaggccctgcttttgttgattatttgtcttcaatcagccagatttccaaattagaaaacttgcgactctctgaaaataaagtcataaacaagcgaagaaggtcccgtcaggcaagacattacttgagttctggcgcacttcaactttcacatgaggatgttgtattattagaagaaagcggctgtttcagtagcagacgcgagagggttgaggttgtagagcaagcaccagtcagtacataagttaatgaactggtgctgatcatgagcggcagcattttgattttttttattagaaggcaatgtgactgggttggccgagccatttttatagttgcgtccgtgatcacggagcccggcggtggaggaaccggaatgtgtgcagttgattgctgtatctgttagataactagacattttaaagtttatttaaattttaaaattatttatagcaatcatgaatatggattaatcttagt

SEQ ID NO: 153777 - DNA, 2374 bp, Zea Mays
ccgaaaacccaaaagccccagccacggctacgaacccaaaaaatctccccccttgccgtctccccgcccccgcgtccccaagccgagctctcgctttcggcgctctcctcaatcctcgtccccgcgtctttcagagcgcccatgagctgaggccgccgccgatgggcccgccccccggtgcgcaggacccggcgccgtcgccgtcgggcggctccggctcttccaggcgccgcttccgccgcctcgaccgccgcaacgcatccaagcacatcgcctacgacgccaccaacttctgccagtacccgccgtccccgcaggccgcatccgcgccggggtcagggcgggcttcgctcgccagctccgctgcctgctccatcgatctcgtcaacagcttccgcatcggcggcagcggagacgggggcggggacctccgcttcctgtgcgagaacctcggcctctccgggcctgacgacttcgccgtcccgcgggccgactgggaggcacacaaggccgcccgatcatctgcctccgcttcgagctcccccaactccgcacgccccaactacgactcccctcagcggaactcaccgctctctcaggtgggtgccgaggagcccgcccaggcttcggacgccgagacggagctaccggccgcaacgggaagggacggcccaatcgaagccccggagcggccggcacgcttggatctaccgctcgagtccacctgtccggatgccaggagggcgcctgggcagggaggaatcaagggcgtgcgcccgccaccggtgctcaagccgccgccttcgatggccctaccagctgtctgcggcgtgggatccacgtgggatatcttgcggtcgttggcgccggatgagaaagatgacgcccccgctagcagatctggccgtcgttttggacacctggatgcagtggagaaggatgacgacgagcgtgcggcggttctgttaatgttggatgatcttaggctggaggagtcgtccgagagctttactggtacttcttcgctatcaacgaccaacgatgacgacacctcaagcaccaccacagaatccatgttctatatttcaccgaacgggaggtttaggaggaggatcaagtcatggagccgaggggtgctcctgggtagtggctcgtttgggacagtctatgagggcatcagcgatgagggtgtcttctttgctgtcaaagaagtgaacttatttgataaagggagcaatgcgaagcagtgtatctttcagcttgagcaggaaattgcacttctgagccagtttgagcatgagaatatagtgcagtactatgggacagacaaagaagattcgaaactttacatcttccttgaattagtgacccaaggatcccttgcattactatatcagaagtatcgcctgcgtgatactcaagtctctgcatatacaagacagattcttaatggattgatttacctccatgaaagaaatattgttcacagagacattaaatgcgcaaatattctggtgcatgcaaatggatctgtgaagcttgcagattttggactcgctaaggagattaccaaattcaatgaacttaaatcatgcaaaggaactgtttattggatggcaccggaggttgttaatccgcagcagacatatggacctgcagctgatatatggagtcttggttgcactgtcctggagatgttgacacgccagataccctatcctgaccttgaatgggcacaagctctatacaggatcggtaagggggaatcaccagcaattccaaacactctttcgagggatgctcgcgattttataagccggtgtgtaaaaccgaatccggaagacagaccatcagcatccaaactgttggagcatccattcgtaaacaagtccataagatcagtacggtctatgaggacgacaccttcacgctcgaattcatctactcgtggcatcaattaattggccgtccgtcatcatctattgggcagcggcagaatgatattggtccgcgcaaatcatgcggagctggccgagagggagtttgttttgactggagctagtattgtcaacgctcaacagcattgtcgtcaacctcttattggtgtttcattagttgattctttggcatacgcccgcgaggaagatgtcctcgttgagccgccggctaatgtatgttcttctgcctggatagagaatagtgggtgtgcatttgagcgcatgggttgtagagtgagaacgggctgtgtaaatagcttgtcctgatgccaaggatatgttattagttgtcacgagaaaaaagaaagaaaggaaaaaaggttcaaagctttggaactgtcaacagcggttgttagattggaatttgctgtcagctt

SEQ ID NO: 153778 - DNA, 1595 bp, Zea Mays
gtccaaaaccagacgcgcgttagagtctccaaagcttatccctccactccactctccgccgcaagccgcagcctccccttccggttatataacgcggccgcgtgctctgcctcctcctggcctacacaagatttaaataaacacacgcgctagctgcgccaacgtaagaagctatagcgccgtcactcgtcgtgccgtttttttttttggtcgtgacctgcagcactttctgagacaggtagctttgctataggctagtgtcacttgccgaggacaaacaggggagacatggcactgacagtgttggagaccaccgagcagcagctcctcccgtgccagcagtccgttgagcatggcgctggcgatggcggcaacggcaaggccgccgctgctggcgccgagaaggctaccgtcatgctgaaggagacgggccacggcggcgacgtcgaccggccggacagggacaacatatggagcatgattcaggcgcagaagccgccgcctgccgcgccaaggcaggcgcaggcgccggcgccgtacgtgcacccgctcgcacgccgctcgtccggtctgctgacgcagaagagcctggagacctgcaccgagagcctcggctcggagacaggctcggacggcttctccgacgccgacgactccgccaccgaccgctcgtgcacgggctgcggcgacgacgagcgcggggaggaggaggaggaggaggtggccccgcacgcggccccgcccaggtcgttcccgccgccgctgccgtcgctggcgcggcgcagggtggagcccaccaccatggagatgaggcaggagcgccaggacgggcgcctgctcgtcaaggtcgtcccggtggcgtcgtccaccctgctccgcgcgcagcgccgcgacggccgcctactcctgtcgttcgcggacacggtcgcccctgccttggacgagctggacaggaggagcggcgaccagccggagaccgagcagcaggccgacgaggaagacgaggaggacgaggtcgaggtcgtggacagggggacagtcttggaggtcaaggtgagcgcgcagccgcagcggcaggcgcgcagcgggagcggcccgcgagtgcaccgctccgcgctcgtcatcaacaagttcgtgggcgccgagccggtcatcacctcctcctgcgagatcgacggcggcgccccagccgcacagcacccggtggcgccggtgaagcccccgaggcgcgccactgggtccaccaccacagcggtcgcggccctgctggcagcggcctcagcgctgagcgcgaccgccgcgccgccgagcaatggcgacgacgccgccgtccccggcgccacgtgcggcgagaacaaactcctcatgacggcgaggcggcacagcagcaaggaggagctgatgatgcacatgcgccggtgcagcggccagctcagcccgtcgcttttcgtttgggaagggaccaagggtgcatcgcaattcgcaacctcctcatgaacgcgccattgccgatgatccattccatatttgcatgcatgctttcaacgagtgctctgtttgtttgcagcagccggtgctgctctaacgtccgtaac

SEQ ID NO: 153779 - DNA, 198 bp, Zea Mays
atgcgctcgcggcgcctgcgctcggcctcgctgtggctcttggacgcggccagcgccttggcgtccaagatctcctgcgcggtcatccgcccgacgaagtccccgaagggcgacgacgaggacgcgaagggcgggggcatcatcatcatcatccctgggccggcgtgctgctggtggtggtgcgggtgccccatgtag

SEQ ID NO: 153780 - DNA, 285 bp, Zea Mays
atggcccggggagtgaggctggcggcgggcggcgggctggtggtggtcggggcgccgtggctcctcatcgccgtcctcgtccactcctccttgctcggctccaccgtcctcacggccgtcgacgccgcccgcgcgtcgtcggcgttcgtggtgacgacgacgacggccccgctgcggacgtcgacgacgatggctcccgcgccgtcacccgccgacggcagcacgctcgggacggacgacagcaagaggaaagtgcccaccggctccaaccccttgcacaactaa

SEQ ID NO: 153781 - DNA, 789 bp, Zea Mays
ctgtgccttgcggaaggagcactcttcttccttagcagcagccagcgcccagcaggcaataccgtcactcggtcggctccttgccgattcccccacccccgcaagccgcggcgatggcctacgatctcccgttcactctcttcgtactcctcttcctcgtcctcctacagacgccgagctcctcatggcgaccggctgacgacgacgacgcgtcggtctcgaggtcggctttccccatggagggtgacgtcgcctgggtggtgcaggtcagcgacctccatatcagcacctacaaccctgagcgtgccgccgaactcgcgctcctcggcaccgcgctgcgcgcaatccggcctcaccttctcctcgtcaccggtgacatcaccggtgagccctgtgctctcatatgtctggatctgaaattttcggtgtcggattgcaacttgtattcaaacttgtcccgtgcccatggatatttatgagtcgatatttatttatttgaaatgctgtgcccatggattatattactacgaaaatactgggagcagtcagcatatcaagtacatggtggaaaattgacgagaagtacttcgaacaggccaaattggcatagcaccagaaacctactctatcggttaggcttgttcgttttgctcatgtgaattgggtgggattgagtcagatactcagatttaaatcatatcatgttttttttctaatctcacaaatccacatgggataggaataaccgaataaggccttgtatgttttgacttaccatgtgatataatt

SEQ ID NO: 153782 - DNA, 2384 bp, Zea Mays
ctgtgccttgcggaaggagcactcttcttccttagcagcagccagcgcccagcaggcaataccgtcactcggtcggctccttgccgattcccccacccccgcaagccgcggcgatggcctacgatctcccgttcactctcttcgtactcctcttcctcgtcctcctacagacgccgagctcctcatggcgaccggctgacgacgacgacgcgtcggtctcgaggtcggctttccccatggagggtgacgtcgcctgggtggtgcaggtcagcgacctccatatcagcacctacaaccctgagcgtgccgccgaactcgcgctcctcggcaccgcgctgcgcgcaatccggcctcaccttctcctcgtcaccggtgacatcaccgatgctaagaatcagcaaagaactagttcaaggcaggatgaatacgaatggattacctacaagaaaactattgatgcaattgttggaagcggtggcattgataagagcaggatatttgatattagaggcaatcatgatacatatggagtgccttatagaggaggaaaattggacttcttctcaacttacagcgttaactcacagtttaagcgattaagcaccatcagtagtatattgcttcaggcactgtagggagatagaagctaccaatttctgggtattgatgataccatgaatgttggcattcgttttcctgcaaatctttttggccattctactgataaaaggatagaagcggtaaattcagagcttcaatactggaccaatcattccaatgttccagttaccaaagtagtttttggacatttccctatgtcattcactgcatcatctgaaaaaggacagcgatatgaaagtgtgcttgcagggcagtctatttcagcatacctatgtggtcatctccatgcaaaagttagtaagcagctttggaggtatcatgaaatcagaacaacagaagatcacaagtcaagcttttgggaatgggaacttggagactggaaggactccagattgatgaggattttagcaatagatggtggtgcagtctcattcatagaccacacattgaaacatgcactccaaacttccatcttgatcacatatccaacagattcaagaagtatgaatatgttggattcagaaaagtggtcgatgagaaatgatataaatgtccttattttctctcatcaatttataagtaatgtgagtgctagaatctttgactctcattgtgagtttaagattgtcgaggagatacctctgcagcttgttaccagtacttctgctcacagacctttgttccatgccaaatggaatgctgaaaattacagaagttcatccgccactcgctactggttgcaggtgtttgttcttgattctcatggtgtaaaaatttcaagtgagcagagaccattttcagttgagggtaagatggcaattcccacaagtccatggaccaactatctgctctttgaagtccagtgggaaggcatgtatcaagttcttctgtggagtaatttggccttcaccattgtattgttgttcatccccaaactattgtatcactttgttaggagaagttcatcatatcaaaggtgggctgtgtcaattccgtcctcctctatccagcagagaaaaccttacttttggttggtttggtttttaatggagggcacaaggagtaaacctttctggttttctatggtaacatatgtgctctggctaattgaaatgccatggttttggggccatgcaacgtctgaaaatggagaaatcgctcaaatgtacttatctggatggagcgtgccaattcatgatgggggcttgacgggcaacaaactgagcaacccagatgtgcttgtcatcacactaccgttcctctatctggtgcttgtcccagtaatagtccttacatatggtctgtttgcagaaaaggctactgtgtttttgcagcacagaagaagagtagtatactctcttgactcaacaaatgtgcatgccgagtcaccaagattgctgccagttgctccaagggcttcactaatgaaattcgccgacaagatggtgtccatggtgatccaattttgtggtagctggacaagaagggctcttctacttgcatgcttgatcaccgcagcaatacatttgaagctctgttccaaactaatgtcagcatatggaactgtaccagtagcattgtcacccccattgacatggataccattgttgctattaggtggtgctgcctattgtacagttctccatgcagattagcgctcagtactctgcaatcctgaagtgtagtacttatttgcattggaggattagggctcataactgtgaattcctgaagtgaacgtagttgcgtttcgggtgcgtgct

SEQ ID NO: 153783 - DNA, 1314 bp, Zea Mays
cgagcaagccatcttcttcttcttcttcttccccgtccttctcactcaaccgagcaaaggtttgattttacataccagagtaatgaatccagcgccagctgaaacaacgaccaaagactccggcatccagtcgatcaacatacaatgggtttcatccaagggaggacctccaagcagacgagcagggttaagacccttctacggctcgccttgtcccgtcttgccgctgcccgccgtccccgcctcgctcgcaagtcgatttcccgcagcgatgttggacagctactagcactcggacacattgatcgtgctctccaccgtgcagagcagcttatagaggaggacaacatgctggaggcgttcaacataatagagctacactgtaatcgcctcatcgagtgcgcaaagcagctagacaagccccatgaatgcggtgatgacattcgggaggcagccgccgggatcatgtttgcagctaggaggtgcggcgacctgccggagctgacgtttgcacgaaccatactgacaaccaagtttggaggcgagttcgcagagatggctaaggagggcgctggcgtcgtcgaccccatgttggtatggaagctaactggcaacaaaggagacatggagctcaagaaaaaggtggtgaaagaggttgctgctgagaacaatgtgctagtggacttctctgagctccaagaggttgagcatggcggcagcggcaacgttccgcaccatcacaaggtcagccatgaaggcatataccaaactgacatggatggaagttcagagccatcgcacgacgaggatccatgtgatacttccaactctgatggagcaagcaatgggcatccgaaacaagagaacacgagaacttcggtgcgcacaagaagatgaactttcagagcatcccagctcagatgcaacaatccagaatgaggaagtgctatgtttagcttccaaacttaccaagttatgggtgtgcacatgctaaatctgtaactgtaaagcaactaacaatgtccaattaattgagttagcaaaactttgcgtttcttcgtgaacagacacagcagcagccaccagcaattatgatctacatgatcgctaaaaagagaagcccaccttgccacgtaatttacatacaacctaatacaggttcttgaccatagcgcctgttaaaatatgtgaaagatccccgcttcatgtggtttttaagctttgaaaattctgtgtgtggcatatatttgtaaaatctactttcttatgatgtacatgtacttgatggatcaatatgagatcgctacaaatgat

SEQ ID NO: 153784 - DNA, 1319 bp, Zea Mays
cgagcaagccatcttcttcttcttcttccccgaccttctcccttaaggcctcaaccaagcaaaggtttgattttacataccagagtaacggacccagcgccagctggaacaacgaccagagactccggcatccagtcgaccaacgtacaatgggtttcatccaaggaaggacctccaagcagacgagcagggttaagacccttctacggctcgccttgtcccgccttgccgctgcccgccgtccccgcctcgctcgcaagtcgatttcccgcagcgatgttggacagctactagcactcggacacattgatcgtgctctccaccgtgcagagcagctcatagaggaggacaacatgctggaggcgttcaacataatagagctacactgcaatcgcctcattgagtgcgcaaagcagctagacaagccccatgaatgcggtgatgacattcgggaggcagccgccgggatcatgtttgcagctaggaggtgcggcgacctgccggagctgacgtttgcacgaaccatactgacaaacaagtttggaggcgagttcgcagagatggctaaggagggcgctggcgtcgtcgaccccatgttggtatggaagctaactggcaacaaaggagacatggagctcaagaaaaaggtggtgaaagaggttgctgctgagaacaatgtgctagtggacttctctgagctccaagaggttgagcatggcggcagcggcaacgtttcgcaccatcacaacgtcagccatgaaggcatataccaaactaacatggatggaagtttagagccatcgcacgacgaggatccatgtgatacttccaactctgatggagcaatcaatgggcatccgaaacaagagaacacgagaacttcggtgcgcacaagaagatgaactttcagagcatcccagctcagatgcaacaatcaagaatgaggaagtgctatgtttagcttccaaacttaccaagttatgggtgtgcacatgttaaatctataactgtaaagcaactaacaatgtccaattaattgagttagcaaaactttgtgtttcttcgtgaacagacacagcagcagccaccagcaattatgatctacatgatcgctaaaaagagaagcccaccttgccacgttatttacatacaacctaatacaggttcttgaccatagcgcctgttaaaatatgtgaaagatccccgcttcatgtggtttttaagctttgaaaattctgtgtgtggcatatatttgtaaaatctactttcttatgatgtacatgtacttgatggatcaatatgagatcgctacaaatgat

SEQ ID NO: 153785 - DNA, 1316 bp, Zea Mays
cgagcaagccatcttcttcttcttccccgaccttctcccttaaggcctcaaccaagcaaaggtttgattttacataccagagtaacggacccagcgccagctggaacaacgaccagagactccggcatccagtcgaccaacgtacaatgggtttcatccaaggaaggacctccaagcagacgagcagggttaagacccttctatggcttgccttgtcccgccttgccgctgcccgccgtccccgcctcgctcgcaagtcgatttcccgcagcgatgttggacagctactagcactcggacacattgatcgtgctctccaccgtgcagagcagctcatagaggaggacaacatgctggaggcgttcaacataatagagctacactgcaatcgcctcattgagtgcgcaaagcagctagacaagccccatgaatgtggtgatgacattcgggaggcagccgccgggatcatgtttgcagctgggaggtgcggcgacctgccggagctgacgtttgcacgaaccatactgacaaacaagtttggaggcgagttcgcagagatggctaaggagggcgctggcgtcgtcgaccccatgttggtatggaagctaactagcaacaaaggagacatggagctcaagaaaaaggtggtgaaagaggttgctgctgagaacaatgtgctagtggacttctctgagctccaagaggttgagcatggcggcagcggcaacgttccgcaccatcataatgtcagccatgaaggcatataccaaactgacatggatggaacttcagagccatcgcacgacgaggatccatgtgatacttccaactctgatggagcaagcaatgggcatccgaaacaagagaacacaagaacttcggtgcacacaagaagatgaactttcagagcatcccagctcagatgcaacaatccagaatgaggaagtgctatgtttagcttccaaacttaccaagttatgggtgtgcacatgctaaatctgtaactgtaaagcaactaacaatgtccaattaattgagttagcaaaactttgcgtttcttcgtgaacagacacagcagcagccaccagcaattatgatctacatgatcgctaaaaagagaagcccaccttgccacgtaatttacatacaacctaatacaggttcttgaccatagtgcctgttaaaatatgtgaaagatccccgcttcatgtggtttttaagctttgaaaattctgtgtgtggcatatatttgtaaaatctactttcttatgatgtacatgtacttgatggatcaatatgagatcgctacaaatgat

SEQ ID NO: 153786 - DNA, 1302 bp, Zea Mays
cgagcaagtcatcatcttcttcttccccgtccttctcactcaaccgagcaaaggtttgattttacataccagagtaacgaacccagcgccaggaacaacgaccagagactccggcatccagtcgatcaacgtacaatgggtttcatccaagggaggacctccaagcagacgagcagggttaagacccttctacggctcgccttgtcccgccttgccgctgcccgccgtccccgcctcgctcgcaagtcaatttcccgcagcgatgttggacagctactagcactcggacacattgatcgtgctctccaccgtgcagagcagctcatagaggaggacaacatgctggaggcgttcaacataatagagctacactgcaatcgcctcattgagtgcgcaaagcagctagacaagccccatgaatgcggtgaggacattcgggaggcagccgctgggatcatgtttgcagctgggaggtgcggcgacctgccggagctgacgtttgcacgaaccatactggcaaacaagtttgaaggcgagttcgcggcgatggcgaaggagggcgctggcgtcgtcgaccccatgttggtatggaagctaaccggcaacaaaggagacatggagctcaagaaaaaggtggtgaaagaggttgctgctgagaacaatgtgctagtggacttctctgagctccaagaggttgagcatggcggcagcggcaacggcaacgttccccaccatcacaatgtcagccatgaaggcatataccaaactgacatggatggaagttcagagccatcgcacgaatgtgatacttccaactctgatggagcaagcaatgggcatccgaaacaagagaacacgagaacttcggtgcgcacaagaagatgaactttcagagcatccagctcagatgcaacaatccagaacgaggaagtgctatgtttagcttccaaacttaccaagttatgggtgtgcacatgctaaatctgtaactgtaaagcaactaacaatgtccaattaattgagtcagcaaaactttgcgtttcttcgtgaacagacacagcagcagccaccagcaaacatgatctacataatcgctaaaaagagaagcccaccttgccacgtaatttacatacaacctaatacaggttcttgaccgtagcgcctgttaaaatatgtgaaagatctccgcttcatttggtgttttaagctttgaaaattctgtgtgtggcatatatttgtaaaatctactttcttatgatgtacatgtacttgatgggttaatatgagatcgctacaaatgat

SEQ ID NO: 153787 - DNA, 1324 bp, Zea Mays
gagaaaatagaacggggagaccggagcggcggcgggggaggaggagacggaaggaggggatcgagaggggcgcgcgcgaacagaagagagaaagaggaggtggcaggtttggttccgcgcgcgccgacgtgagattccgggcccccgtgccagcaggttcaaataatggattaaaaacttaagctgacacttatggcggatgctcaattcaacccagtgaatccgaagctgacccatgaagaactaaaataagctttatgcttcagtgtcttctgaaatcatcctgaggtattgataagtcagcaacctagagcagaaaatgtcagctccggaattcaggacttcttaccagcaagtatcatcatcacagccccctgagaatgtcggtcaactcaaggtctgccgatgtgggtcgggagactctaactttcagatcactaataaatctgatgctggtgaaaattcaccgacaacttgtccaagctgtcaggttcttaagagtggaaatttattgctctcatctaaagggattggatggacagtatggaaaaaacggtggtttattcttacaaggacatcattagtgttcttcaggagcgatcctagtgtcccccctcccagaggaagtgaaccaattgttacacttggtggaattgacttgaataacagtgcaagtatgatagtcaaagaagaaaggaaagttataacagtcatctttcctgatggccgtgatggacgcacttttacccttaagtgactactgactagtggggcaacaggtgcgtcagtaggattggggttgcaatgcagaaactatagaggacctaaatgaatggagaagtgcattggagaatgctctggctcaggcacccagtgttgcgaatacagcggggcaacatctggcagtcagcactgatataacagaacctgttgaagctgctgttgaacaattggaggataagtctgtaattggcagaccagcagaatttgcacttgtcgatgctgatggcactacagcattcctggagaaggccttaaagttcatcgaagactatggtgtcaaggttgaaggaattctccgtcagtctgctgatgttgaagaagtcaaacgcagggttcaggattacgaaaagggtgatttcttgtagtttgaccattttactttttaagtaaagacagctaggcttggcgcttctcggtgtcttaccaagagcttattgtatgtagttctattaagttaattttttttattatatccatacatattttcatgaagctagtttgggaggatgtaagtttggataacccgagagttgtttttgct

SEQ ID NO: 153788 - DNA, 1778 bp, Zea Mays
gagaaaatagaacggggagaccggagcggcggcgggggaggaggagacggaaggaggggatcgagaggggcgcgcgcgaacagaagagagaaagaggaggtggcaggtttggttccgcgcgcgccgacgtgagattccgggcccccgtgccagcaggttcaaataatggattaaaaacttaagctgacacttatggcggatgctcaattcaacccagtgaatccgaagctgacccatgaagaactaaaataagctttatgcttcagtgtcttctgaaatcatcctgaggtattgataagtcagcaacctagagcagaaaatgtcagctccggaattcaggacttcttaccagcaagtatcatcatcacagccccctgagaatgtcggtcaactcaaggtctgccgatgtgggtcgggagactctaactttcagatcactaataaatctgatgctggtgaaaattcaccgacaacttgtccaagctgtcaggttcttaagagtggaaatttattgctctcatctaaagggattggatggacagtatggaaaaaacggtggtttattcttacaaggacatcattagtgttcttcaggagcgatcctagtgtcccccctcccagaggaagtgaaccaattgttacacttggtggaattgacttgaataacagtgcaagtatgatagtcaaagaagaaaggaaagttataacagtcatctttcctgatggccgtgatggacgcacttttacccttaaggcagaaactatagaggacctaaatgaatggagaagtgcattggagaatgctctggctcaggcacccagtgttgcgaatacagcggggcaacatctggcagtcagcactgatataacagaacctgttgaagctgctgttgaacaatgtaagctattggaggataagtctgtaattggcagaccagcagaatttgcacttgtcgatgctgatggcactacagcattcctggagaaggccttaaagttcatcgaagactatggtgtcaaggttgaaggaattctccgtcagtctgctgatgttgaagaagtcaaacgcagggttcaggattacgaaaaggggaagaatgagttctccccagaagaggatgcacatgttatcggtgactgtattaagtgcattcttcgagagatgccatcttccccaattccggcaccatgttgcactgccctggttagagcttaccgaactgacaagacaagaagacttgatgctatgaatagagtgatatatgaagtattcccagaaccaaatcgtcaattgttacagaggattctcaaaatgatgcagattgttggatcacacaaagctgaaaataggatgtctccgtctgctttggcagcttgcatggcaccgcttcttcttcgtcctcttcttcttggtgaatgtgaaattgatagtgaattcaatatggctggggatggttcattccagttgcttcaagctgctgctgctgccaaccatgctcaagctattgttattattatgcttgaggaatatgatcagatatttgatgatattgaagacggttcgtactcttcagatgcttatactgagtctgacattgacaaggaatattcgacagacaatgacatccctgaagacgatggttcctatggttgtggtgaagatgttgaagaagatttaaatgatgatactgaacactcttctggcattaggattgataatgcagatgataaggtacttcatctaatcactatgttcttttcttatattatcaaaagga

SEQ ID NO: 153789 - DNA, 1083 bp, Zea Mays
ctacatgagcgtcgtgtagcacttgaaaaagaagtggaaaatttacgagaccagctgcagaaggagagaaatttgagggcttcattggagtctgggttaatgaatatgcgaagaggacaagtgtccttcccatcaacgatagacaccaagactaaagctgatcttgaggaagttgctgctgctgaagctgatattatgaacttgaagcaaaaggtttctgatcttcgggggcaactcaactaccaagtccagttgagttccacctcgttatgtgaatcatgcaacaagcgggcaataaatgcagacaagcttgtcgaaggtgaacaaaatgctggcctttctccacagattggctcctcagtcgaagcaccaccaattcaagggtctaattctgtagttcctgacatgttatgggctacaaaccaaatggttcagaagatgttgtattcaaagggtgagattgcaaaggacggccaagatggatcacttacatcaaaatggaactttgcacagagaccacactcaaatagtccagttatgagcagggttcaaggttccaatgcctattcaagtactaaaaacgaggaatctggagccgcaccgtcctctgcattagccaagctgactactcgactcaactttttgaaagaaagaagggccttgctcgccagtgagatgcaaaacttagatctgggtcgctcccaggcccagaggcacacggctcctccgaaaactgagactccgaccgacaagtagaatcgttttattgttaggctacacaagcccacaaaagcattctgccatcggggtgtgacaagtccagctgccacgatcgatgctcatgtaggatcgcaggcagtgaagaaaagttcgattggacaatggataggctacctacctatagagtaacttgatttgtaaattgcagaggtaatcgtgtcttcgccatgatgattcatatgtcaagttttgtagcgacaccgacgaccaacctggtttgtactattatctccaattacacaataccctgaatactctggaacaaaaagccaaatggcgcttgcaaataatctgtcggtctgt

SEQ ID NO: 153790 - DNA, 2379 bp, Zea Mays
gccccacaccgcttcactcgtttccttccgatccatacacaccgcgcacgtacgcgtactccatcgtcccggtgcaggcgggttcacgtcacgacctcgggcgagacgagatggcgacgccgaacgggcttgctcggatcgagacgaacggggcgaccaagcccgacaacggcgtgtgccacgacgacagctcggcgccggtgcgcgcgcagaccatcgacgagctgcactcgctgcagcggaagcggtcggcgccaaccacgcccatcaaggacggcgccgcctcgaccttcgccgccgcgctctccgaggaggagcgccacaggcagcagctgcagtccatcagcgcgtcgttggcgtctctgacacgtgaaaccgggccgaaagtggtcaagggcgacccggcccggaggggcgaggcccccgcgacgggtgcaccgccgacgccgcaggcgcaccaccagcaccaccaccccgccgcccccaccatcgccgtcagcgacagctccctcaagttcacccatgtcctctacaacctctcgcctgctgagctgtacgagcaggccatcaagtacgagaaggggtcgttcatcacgtccaccggcgcgctggcgacgctgtccggcgccaagaccgggcggtcgcccagggacaagcgcgtcgtcaaggacgaggtcgcggcgcgggacctgtggtggggcaagggctcgcccaacatcgagatggacgagcacacgttcctgaccaacagggagagggccgtggactacctcaactccctggacaaggtgttcgtgaacgaccagtttctcaactgggaccccgagaaccggatcaaggtccgcatcatctccgccagggcgtaccactccctcttcatgcacaacatgtgcatccggcccacggacgaggagctggagagcttcggcacgccggacttcaccatctacaacgccggccagttcccctgtaaccgctacacgcactacatgacgtcgtccaccagcgtagacatcaacctcgccaggagggagatggtgatcctgggcacgcagtacgccggcgagatgaagaaggggctgttcggcgtcatgcactacctcatgcccaagcgcggcatcctctcgctgcactccggctgcaatatgggcaaggacggcgacgtcgccctcttctttggcctctcaggtaccgggaagacgacgctgtcgacggatcacaacaggcttctgatcggcgacgacgagcactgctggagcgagaatggcgtgtccaacatcgagggcggctgctatgccaagtgcatagacctatcgcaggagaaagagcctgatatctggaacgccatcaagttcggagccgtgctggagaacgttgtcttcgatgagcatactcgtgaagttgactacaccgacaaatctgtcaccgagaacactcgggctgcctacccgatcgagtacatccccaacgccaagataccatgcgtcggtccacaccccaagaacgtgatcctgctggcgtgcgacgccttcggcgtgctcccgccggtgagcaagctggacctggcgcagaccatgtaccacttcatcagcggatacaccgccctggtcgccggcacggaggacggcatcaaggagccacaggccaccttctccgcctgcttcggcgcggccttcatcatgctccacccgaccaagtacgccgccatgctcgccgagaagatgcagaagtacggcgccacagggtggctcgtcaacaccggctggtctggcggcaggtacggtgtgggcaagaggatccggcttccctacaccaggaagatcatcgacgccatccactccggcgagcttctcaccgccaactaccagaagaccgaggtctttggcctggagatcccgactgagatcaagggcgtgccgtcggaaatcctcgacccaatcaacacctggacggacaaggccgcgtacaaggagacgctcctgaggcttgccgggctcttcaagaagaacttcgaggtgttcgccagctacaagatcggggacgacagcaacctgaccgacgagatcctcgccgcaggccccaacttctgaactaaagcagtgggtccggatgaataaaacggtggtatgcgtgtgaagaagaagatgatgacgacgaaaatagtgtgttggatcgatgggccagcacagtgtagactagcttttgtatattatctcgggttggaaatctggtgttgttacctaaaatgttggtctgttctatcggcttgttgaaaacagtttgcgcgtgcttgcatcttggcccccctgtattctctgtggtttcagaatttgaacacgaaacagcttggtctcgggatcatgttggtttcatatgtca

SEQ ID NO: 153791 - DNA, 1350 bp, Zea Mays
cagcgaacgaccctccagcacgccatccgcttagccgccccggagcattgccatcgtcgccatcgtcgccgccaccttctatcccggtgtggagcgggagagaacccgtctgcactcagaagctggtttaatccggtgggagcacaagtcgtgtctaaaatattcagattgctaagatgttgggtcatggtctagtaactgatccctcaagaaccttacgatgtccagttaattcaagggtatcaagtgcacccttggggcttgtttcttcgttgaatttcaacaggggatgcaagggaaagaacaaaatattcaatgtggatagacacaccaagtatagtacttctttctgttatgcgccaagaaatgccagaatcacaccactagcaactgcatcatttggggatatggctgattcttcaactcctatctttccccgaatccatgtaaaagatccatatcagcgtctcggaatcagcagggaagcatcagaagaagaaattcgagctgctaggaactatctgataagcaagtatgcaggccacaagccaagtgttgatgcaattgagtctgcccatgacaggattatcatgcagagtttctttgataggaaaaaaccaaaaatgaatctcaagaaaaaatttagggaacttagtcagtcacgtgcagtgaaggctattcaaggcagatttcaaacaccacgtagcaaagtcatttggcagacagctattgcttttgtcttgcttggagtgcttacccttgctttccctaccgaagaagggccaaccctccaggtggccatctcttgtgcagcaaatatctatttcatttatcagagggtcaaaagtggatggcgagcattcttttatgggtttggttctttctttgcttcctggttccttggcaccttcttgatggtatctgtaattccccctatactccccggtccaagaaacttggaagtgagcaccgcgtgtgttacttatgtgctccttttcatatcgtcgaccttcttgaagtaagagatctttgtgtttccatgttagcgcaaagtcttgcaggagttataaacatggtatcatgcttcaaatagcttgtacaatccatcggctttttctttgcttgtttcacgtttatggagctggaaatgctagttctttagtgagttgatagtagttttcaggttgcaatgtgagatgtagaacgtttttttgcctaggcccgtgatatcttgagcagggtctaacacctcttgtgggtattttcagttgatgtattaaatacagttgtgttcgaatagatcatatgagataatatctcatcagtcttcttttggatggacatcacgtc

SEQ ID NO: 153792 - DNA, 195 bp, Zea Mays
atgtacccatttatttggcttttctcctttccacacgccggagcatcccacacgcgagatgctttgtggcatgccttgaatttgaatatacttcaggctccatccacggagaccattaccatttgttatgtgtgtcgtcaaagatgagggactcaatatcttgcaccacatgatcatctatctcaattcacaggg

SEQ ID NO: 153793 - DNA, 2008 bp, Zea Mays
aaaatacagggggaaaagcaagacgcgtgagcacttccttatcgtctcttcctttcaccccctcgaccccgatcgaatcgctcgaacaattccctgtgcatcgatcgatctaggcttgcgcgaggatccaattccatccggctctcctttgagctcgtgatcctcggagttggaggagttcttcgcgagtctctttttgccccgatttctttttggcttatttgtgcgagctttctcaggagcagaagggaagaggcagtttgcaattccgatgcacccaggcctcaagattcaactctgaggccttatccgaggcatccgcatcgatctccgcaagaggatgggtaacgtgggaagcaacggtggaggcgccgccactggtcaccgccgtcggagctccggccacggccatcaccagcaggcgccgccgcctccccagccgcaggagactgcgcccaaccgctacgtgttcgcggccgccacgccgtacccgccccagtaccctaaccccaatccgccgcagtactacccgcagtacgggaactactacccgccgccaccatcatccgtgccggtgccccttccggcgccgtacgaccaccaccacaggccacccaccgccgcccctggcgagttcccgcccccaccccccgtccacccccacaactaccccggctgggccgggcggtatccctcctacggaccgcatctgtctatgccgacgccttacgttgagcaccagaaggccgtcactatccgcaacgacatcaaccttaagaaggagacgcttcggatcgagcctgatgaagaacgccctggccgcttcctcgtcgccttcacctttgacgccacggtcgctggcagcatgactgtttacttctttgcaaaggaagagctcaactgcaatctaacaacagtgaaagaagacctaattaagcccattactgttagcttcaaagagggtcttggtcaaaaattcaggcaaccttcaggaacaggaattgacttttcagtgtttgaagaatcagatttattaaagcagggggacatggatgtatatccacttgcagttaaagctgaaacaacattgtctgttgatcacccaccagaaggggatgaccaaaagatgataactcctaactcacagatcacccaggccgtttttgaaaagaaagaaaatggggattatcaagtaagagttgtttgccagatcctctgggtcaatggaactaggtatgaactgcaagaaatatatggcatagggaactccatggaaggtgatgctgatgcaaatgatccagggaaagaatgtgttatttgcctctcagaaccaagggatactactgtcctgccatgtaggcatatgtgcatgtgcagtgagtgcgccaaggtcctgaggtaccaaaccactcggtgccccatctgcaggcagcctgtggagcgtctcctggagatcaaagtgaacaacaaatctgaagatcagcagcagacgccccaatcgccaccgcgcccagacctggctccgcagcaggaaggggtgtagccgtgatcaaagtcagttctgaggtattatatggctcgaatctgcggaccttcctgaaggtttgttctctcatttgagcaacgggggatgcaactggtacttttacctttagcatatgtaagcttctggcatcgcatggctttgccgacctctgctgtatctgcctatctggaggtcggagagcaggatgtcaaggagagtgtgtatcatatatacatcatgcatgcgtgtgccatggctaccttaagaagcgtatcgaggaggattcctgatgcctggttgacttcctccagggaaaaaggggaagagaactagagaagaggtggtctcttaaatctgtacaaaaatgactatttcaccttgattccataccttctctgttatggcctgaaaaggtcgatgagtattttacttggagttataaaacagtcagtgcataggtcgcctctcggccaattatttatt

SEQ ID NO: 153794 - DNA, 1838 bp, Zea Mays
cccgcgccgggcataaataaaaacgccctctctcgagtctcgactctgcttccacggttcctcagcttcgtctctctcgccggcgcggcaggcaactatcatcacttcattagctcatccaatctattccgatgacgaccgtgcccaagccacagcaggtggcgcactcacgggcacggctcgcaccccgcgcgatcggcgccttgctggagtttgccccagcctcctcctccctccgcttcgccgtgcaccgctgccgcactgctcgcctagaggtgaaggcatctggaaacacgtttggaaactactttcaggttgcaacctatggtgaatctcatgggggtggtgttggttgtgttatcagtggttgtccacctagaattccactcactgaggcagacctacaagttgaactcgatcgaagacggcccggacagagcagaataacctccacaaggaaggagactgatacatgcaaaattctgtcagggacacatgaaggggtgactactggaacgccaattcttgttattgtcccaaacacagatcaaataggcagtgatcaccgtgaaatagccaatgtgtaccgaccttctcatgcagacgcaacttatgacttcaagtacggtgttagagctgtacagggaggtgggaggtcgtcgggcagagaaaccgttggaagggtggctgcaggggccctcgccaagaaaattcttaagctcaaatgtggattagagatcttgtcgtttgtttccaaagtgcatcaggttgtgctcccagaagacgcggttgattatgggtctgtaactttggaacagatagagagcaacatcgttagatgtcctgatccagagtacgcagagaagatgatagacgcaatcgacagagtacgagttcgaggggattcggtcggtggagtgatcacatgcgtcgctagaaacgttcctcgcgggctcggttctcctgtgttcgacaagctcgaatccgaactggcaaaagctatgctttctattcctgcgagcaacgggttcgagattggcagcggattcgccgggaccgacttgacaggaagtgagcataatgatgagttttatatggataaggctggaagtgtcaggacacggactaatcgctcgggtggtgtgcagggagggatatcgaatggtgagattgtgcacttcaaagttgcttttaagccgacaccatctatcggggtgaaacagaacaccgtgtcaagggagcgtcagaacgttgagcttctagcaagagggcgccatgacccatgcgtcgcccctcgagctgttcctgtggtggaatccatggccgcgttggtcctcatggaccagctgatggcgcacgtggctcagtgcgagatgttcgcgctcaatactgcacttcaagaaccagttggctctttctagcagaggcagagcacacctgatgagctcgcgccaaattttatcatttatcatagtaataagtagctcaagcgtggcttggtttgcttgtctcttgcaccgtagttttgttttttttttcccgcaagtgtgatgcgatgaagtgaataaggcacttggtttcctgtgcatttgtacacgtttcatataatgtaatctacttcgaagatgatgcatttttatagatgtggcttgtgaaagactgcccttatcttgctctgtatatgccagcccgaagagcccgtcagtaatttcatcttgcgtgtgaatgtgaaaaataataataatccaaaattcagttgcaacagcgagactggacggtggtgagaaatctgcgtggaagaacatgcgaggtagcgattgttcaaaaaaaaaagaaca

SEQ ID NO: 153795 - DNA, 1757 bp, Zea Mays
cccgcgccgggcataaataaaaacgccctctctcgagtctcgactctgcttccacggttcctcagcttcgtctctctcgccggcgcggcaggcaactatcatcacttcattagctcatccaatctattccgatgacgaccgtgcccaagccacagcaggtggcgcactcacgggcacggctcgcaccccgcgcgatcggcgccttgctggagtttgccccagcctcctcctccctccgcttcgccgtgcaccgctgccgcactgctcgcctagaggtgaaggcatctggaaacacgtttggaaactactttcaggttgcaacctatggtgaatctcatgggggtggtgttggttgtgttatcagtggttgtccacctagaattccactcactgaggcagacctacaagttgaactcgatcgaagacggcccggacagagcagaataacctccacaaggaaggagactgatacatgcaaaattctgtcagggacacatgaaggggtgactactggaacgccaattcttgttattgtcccaaacacagatcaaataggcagtgatcaccgtgaaatagccaatgtgtaccgaccttctcatgcagacgcaacttatgacttcaagtacggtgttagagctgtacagggaggtgggaggtcgtcgggcagagaaaccgttggaagggtggctgcaggggccctcgccaagaaaattcttaagctcaaatgtggattagagatagagagcaacatcgttagatgtcctgatccagagtacgcagagaagatgatagacgcaatcgacagagtacgagttcgaggggattcggtcggtggagtgatcacatgcgtcgctagaaacgttcctcgcgggctcggttctcctgtgttcgacaagctcgaatccgaactggcaaaagctatgctttctattcctgcgagcaacgggttcgagattggcagcggattcgccgggaccgacttgacaggaagtgagcataatgatgagttttatatggataaggctggaagtgtcaggacacggactaatcgctcgggtggtgtgcagggagggatatcgaatggtgagattgtgcacttcaaagttgcttttaagccgacaccatctatcggggtgaaacagaacaccgtgtcaagggagcgtcagaacgttgagcttctagcaagagggcgccatgacccatgcgtcgcccctcgagctgttcctgtggtggaatccatggccgcgttggtcctcatggaccagctgatggcgcacgtggctcagtgcgagatgttcgcgctcaatactgcacttcaagaaccagttggctctttctagcagaggcagagcacacctgatgagctcgcgccaaattttatcatttatcatagtaataagtagctcaagcgtggcttggtttgcttgtctcttgcaccgtagttttgttttttttttcccgcaagtgtgatgcgatgaagtgaataaggcacttggtttcctgtgcatttgtacacgtttcatataatgtaatctacttcgaagatgatgcatttttatagatgtggcttgtgaaagactgcccttatcttgctctgtatatgccagcccgaagagcccgtcagtaatttcatcttgcgtgtgaatgtgaaaaataataataatccaaaattcagttgcaacagcgagactggacggtggtgagaaatctgcgtggaagaacatgcgaggtagcgattgttcaaaaaaaaaagaaca

SEQ ID NO: 153796 - DNA, 896 bp, Zea Mays
cgccctctctcgagtctcgactctgcttccacggttcctcagcttcgtctctctcgccggcgcggcaggcaactatcatcacttcattagctcatccaatctattccgatgacgaccgtgcccaagccacagcaggtggcgcactcacgggcacggctcgcaccccgcgcgatcggcgccttgctggagtttgccccagcctcctcctccctccgcttcgccgtgcaccgctgccgcactgctcgcctagaggtgaaggcatctggaaacacgtttggaaactactttcaggttgcaacctatggtgaatctcatgggggtggtgttggttgtgttatcagtggttgtccacctagaattccactcactgaggcagacctacaagttgaactcgatcgaagacggcccggacagagcagaataacctccacaaggaaggagactgatacatgcaaaattctgtcagggacacatgaaggggtgactactggaacgccaattcttgttattgtcccaaacacagatcaaataggcagtgatcaccgtgaaatagccaatgtgtaccgaccttctcatgcagacgcaacttatgacttcaagtacggtgttagagctgtacagggaggtgggaggtcgtcgggcagagaaaccgttggaagggtggctgcaggggccctcgccaagaaaattcttaagctcaaatgtggattagagatcttgtcgtttgtttccaaagtgcatcaggttgtgctcccagaagacgcggttgattatgggtctgtaactttggaacaggtcgacggatgtgcatgcatgctttgccacgcgccttcgttcttccactatgatacagccgccatgacagccccgacggtcatttaacaggattgtacctt

SEQ ID NO: 153797 - DNA, 1649 bp, Zea Mays
cgccctctctcgagtctcgactctgcttccacggttcctcagcttcgtctctctcgccggcgcggcaggcaactatcatcacttcattagctcatccaatctattccgatgacgaccgtgcccaagccacagcaggtggcgcactcacgggcacggctcgcaccccgcgcgatcggcgccttgctggagtttgccccagcctcctcctccctccgcttcgccgtgcaccgctgccgcactgctcgcctagaggtgaaggcatctggaaacacgtttggaaactactttcaggttgcaacctatggtgaatctcatgggggtggtgttggttgtgttatcagtggttgtccacctagaattccactcactgaggcagacctacaagttgaactcgatcgaagacggcccggacagagcagaataacctccacaaggaaggagactgatacatgcaaaattctgtcagggacacatgaaggggtgactactggaacgccaattcttgttattgtcccaaacacagatcaaataggcagtgatcaccgtgaaatagccaatgtgtaccgaccttctcatgcagacgcaacttatgacttcaagtacggtgttagagctgtacagggaggtgggaggtcgtcgggcagagaaaccgttggaagggtggctgcaggggccctcgccaagaaaattcttaagctcaaatgtggattagagatagagagcaacatcgttagatgtcctgatccagagtacgcagagaagatgatagacgcaatcgacagagtacgagttcgaggggattcggtcggtggagtgatcacatgcgtcgctagaaacgttcctcgcgggctcggttctcctgtgttcgacaagctcgaatccgaactggcaaaagctatgctttctattcctgcgagcaacgggttcgagattggcagcggattcgccgggaccgacttgacaggaagtgagcataatgatgagttttatatggataaggctggaagtgtcaggacacggactaatcgctcgggtggtgtgcagggagggatatcgaatggtgagattgtgcacttcaaagttgcttttaagccgacaccatctatcgggctgttcctgtggtggaatccatggccgcgttggtcctcatggaccagctgatggcgcacgtggctcagtgcgagatgttcgcgctcaatactgcacttcaagaaccagttggctctttctagcagaggcagagcacacctgatgagctcgcgccaaattttatcatttatcatagtaataagtagctcaagcgtggcttggtttgcttgtctcttgcaccgtagttttgttttttttttcccgcaagtgtgatgcgatgaagtgaataaggcacttggtttcctgtgcatttgtacacgtttcatataatgtaatctacttcgaagatgatgcatttttatagatgtggcttgtgaaagactgcccttatcttgctctgtatatgccagcccgaagagcccgtcagtaatttcatcttgcgtgtgaatgtgaaaaataataataatccaaaattcagttgcaacagcgagactggacggtggtgagaaatctgcgtggaagaacatgcgaggtagcgattgttcaaaaaaaaaagaaca

SEQ ID NO: 153798 - DNA, 844 bp, Zea Mays
cgacaccaacgactagacaaacttgtgttgtggcttagctcgtttggctcgcgagctagctcacgagctaacccgagctggctcattagagaaccgagctagaatgctagcttggctcgttacaaaattaaaacgagccgagtcgagccgagtcgagcgagttatcgagccacgagtattttgtccagctctacctgcaacatcgtcccacttgttccaggtgaaacagaacaccgtgtcaagggagcgtcagaacgttgagcttctagcaagagggcgccatgacccatgcgtcgcccctcgagctgttcctgtggtggaatccatggccgcgttggtcctcatggaccagctgatggcgcacgtggctcagtgcgagatgttcgcgctcaatactgcacttcaagaaccagttggctctttctagcagaggcagagcacacctgatgagctcgcgccaaattttatcatttatcatagtaataagtagctcaagcgtggcttggtttgcttgtctcttgcaccgtagttttgttttttttttcccgcaagtgtgatgcgatgaagtgaataaggcacttggtttcctgtgcatttgtacacgtttcatataatgtaatctacttcgaagatgatgcatttttatagatgtggcttgtgaaagactgcccttatcttgctctgtatatgccagcccgaagagcccgtcagtaatttcatcttgcgtgtgaatgtgaaaaataataataatccaaaattcagttgcaacagcgagactggacggtggtgagaaatctgcgtggaagaacatgcgaggtagcgattgttcaaaaaaaaaagaaca

SEQ ID NO: 153799 - DNA, 2027 bp, Zea Mays
aatggcatatagcgcagatggttcaaggttattttcatgtgggactagcaaggatggtgaatcacatctagtagaatggaatgaaagtgaaggagcagtgaagagaacatatcagggatttcgtaagcgatccatgggtgtcgtgcaattcgataccacacggaacaggtttttggccgctggggatgaattcatgattaagatatgggacatggacagcacgggtcttctaactaccattgatgcagatggtggcttaattgcaagtccacggatacgcttcaacaaggaaggaactcttttggctgtctctaccgttgacaatggcatcaagatcttagcaaatgctgatggacttcggttgctgcgcacgctggaaaatcgttcttttgatgcttctcgtaatgcatctgaggctgtaacaaagcctctaataaatcccttgactgctgcggcaaatgcagctgcagcaagcagttcaggagctggtgctccgtcagctgtaactgcaatgaatggggataccagaagtttggttgatgtaaaacctagaatagctgatgagtcactggacaagtcaaaggcgtggaagcttatggagataactgagtcaactcagtgcagatcaattaaactggcagacaacatgagaacgagcaagatctcgagattgatttacacaaattctggtcttgctatcttggctttaacttcaagtgctgttcatctactctggaaatggccacgcagtgatcggaattctggaaaggcaagcgcgagtgtgtctcccacactatggcaaccaccaagtggcattttgatgactaatgacacgactgacaacaatcctgaagaagctgttcactgctttgctttgtcgaagaatgattcatatgtcatgtccgcttctggaggaaaaatctctctgtttaacatgatgactttcaagacaatgacaacatttatgcctgcaccgccggcagcaacttttcttgcatttcacccccaagataacaacataattgcaattggaatggatgactcaaccatccaaatctataatgtccgaattgatgaggtcaaaagcaagctcaggggtcactctaagagaatcacgggtcttgccttttcaaatgtgctaaatgtcttagtctcttccggagctgatgctcaggttatttactgaactgtcaattcagatcatatctgacaaacttattgtattatattttcaccatttttaaccgtttccacttttagttatgtgtttggaacacggatggatgggaaaagcaaaagaacagatttttgcagataccgtcaggtcgccaatctaatatcttggacactcgtgttcagttccaccaagatcaaatgcactttcttgttgtgcatgaaacccagattgccatctatgaaactacaaaactagaaccagtgaagcagtggcctgttcgagagaattcacctccaatcacacatgctgcattctcgtgtgacagtcaactgatctatgcaagctttatggatgccactgttggcatatttaatgcatcgagtttgagacttcaatgtcggattcttccagcttcgtatctccccccaaatatcagtccgagtgttcatcctgttgtggttgcggcacacccttcggaagcgagtcagtttgctctagggctgactgatggtggtgtttttgtgttggaacctttggaatcagatagaaaatggggaaatcctccaccggtagaaaatgggtctgctagcaacttgtccgcaccgcctcctaatggagcttcaagttctgatcaacctgaaagatgattgagaagatggaactggtagatttttcgtggcatgagtctaaccaaggtatatcttaagttaatgaaacaaattggaactttattttaaatttcttgccatgtttgtatagagcatttataacgtattgatgcagtttagaagtttggccgataaactgctatgatttagataaaaacatgatcaatataatcgtgtgaacc

SEQ ID NO: 153800 - DNA, 2059 bp, Zea Mays
aatggcatatagcgcagatggttcaaggttattttcatgtgggactagcaaggatggtgaatcacatctagtagaatggaatgaaagtgaaggagcagtgaagagaacatatcagggatttcgtaagcgatccatgggtgtcgtgcaattcgataccacacggaacaggtttttggccgctggggatgaattcatgattaagatatgggacatggacagcacgggtcttctaactaccattgatgcagatggtggcttaattgcaagtccacggatacgcttcaacaaggaaggaactcttttggctgtctctaccgttgacaatggcatcaagatcttagcaaatgctgatggacttcggttgctgcgcacgctggaaaatcgttcttttgatgcttctcgtaatgcatctgaggctgtaacaaagcctctaataaatcccttgactgctgcggcaaatgcagctgcagcaagcagttcaggagctggtgctccgtcagctgtaactgcaatgaatggggataccagaagtttggttgatgtaaaacctagaatagctgatgagtcactggacaagtcaaaggcgtggaagcttatggagataactgagtcaactcagtgcagatcaattaaactggcagacaacatgagaacgagcaagatctcgagattgatttacacaaattctggtcttgctatcttggctttaacttcaagtgctgttcatctactctggaaatggccacgcagtgatcggaattctggaaaggcaagcgcgagtgtgtctcccacactatggcaaccaccaagtggcattttgatgactaatgacacgactgacaacaatcctgaagaagctgttcactgctttgctttgtcgaagaatgattcatatgtcatgtccgcttctggaggaaaaatctctctgtttaacatgatgactttcaagacaatgacaacatttatgcctgcaccgccggcagcaacttttcttgcatttcacccccaagataacaacataattgcaattggaatggatgactcaaccatccaaatctataatgtccgaattgatgaggtcaaaagcaagctcaggggtcactctaagagaatcacgggtcttgccttttcaaatgtgctaaatgtcttagtctcttccggagctgatgctcagttatgtgtttggaacacggatggatgggaaaagcaaaagaacagatttttgcagataccgtcaggtcgccaatctaatatcttggacactcgtgttcagttccaccaagatcaaatgcactttcttgttgtgcatgaaacccagattgccatctatgaaactacaaaactagaaccagtgaagcagtggcctgttcgagagaattcacctccaatcacacatgctgcattctcgtgtgacagtcaactgatctatgcaagctttatggatgccactgttggcatatttaatgcatcgagtttgagacttcaatgtcggattcttccagcttcgtatctccccccaaatatcagtccgagtgttcatcctgttgtggttgcggcacacccttcggaagcgagtcagtttgctctagggctgactgatggtggtgtttttgtgttggaacctttggaatcagatagaaaatggggaaatcctccaccggtagaaaatgggtctgctagcaacttgtccgcaccgcctcctaatggagcttcaagttctgatcaacctgaaagatgattgagaagatggaactggtagatttttcgtggcatgagtctaaccaagatgggcttcaaaaggtggtgcaactaaccttggcagatcggttccaagggactcggacaatgggctcaataaaaacaagctcaacagcagtttatccgttgcttatatatatttctattgactgtatcgagtgaagaggatagttctagtatttcattttgctttgtttactgtgctgtgaaaaggagttcttatcagtagataagctgtagacaactatcagtttggctcctacattttatgacttagtgaaagtatcttgtttcatttgcc

SEQ ID NO: 153801 - DNA, 2089 bp, Zea Mays
aatggcatatagcgcagatggttcaaggttattttcatgtgggactagcaaggatggtgaatcacatctagtagaatggaatgaaagtgaaggagcagtgaagagaacatatcagggatttcgtaagcgatccatgggtgtcgtgcaattcgataccacacggaacaggtttttggccgctggggatgaattcatgattaagatatgggacatggacagcacgggtcttctaactaccattgatgcagatggtggcttaattgcaagtccacggatacgcttcaacaaggaaggaactcttttggctgtctctaccgttgacaatggcatcaagatcttagcaaatgctgatggacttcggttgctgcgcacgctggaaaatcgttcttttgatgcttctcgtaatgcatctgaggctgtaacaaagcctctaataaatcccttgactgctgcggcaaatgcagctgcagcaagcagttcaggagctggtgctccgtcagctgtaactgcaatgaatggggataccagaagtttggttgatgtaaaacctagaatagctgatgagtcactggacaagtcaaaggcgtggaagcttatggagataactgagtcaactcagtgcagatcaattaaactggcagacaacatgagaacgagcaagatctcgagattgatttacacaaattctggtcttgctatcttggctttaacttcaagtgctgttcatctactctggaaatggccacgcagtgatcggaattctggaaaggcaagcgcgagtgtgtctcccacactatggcaaccaccaagtggcattttgatgactaatgacacgactgacaacaatcctgaagaagctgttcactgctttgctttgtcgaagaatgattcatatgtcatgtccgcttctggaggaaaaatctctctgtttaacatgatgactttcaagacaatgacaacatttatgcctgcaccgccggcagcaacttttcttgcatttcacccccaagataacaacataattgcaattggaatggatgactcaaccatccaaatctataatgtccgaattgatgaggtcaaaagcaagctcaggggtcactctaagagaatcacgggtcttgccttttcaaatgtgctaaatgtcttagtctcttccggagctgatgctcaggttatttactgaactgtcaattcagatcatatctgacaaacttattgtattatattttcaccatttttaaccgtttccacttttagttatgtgtttggaacacggatggatgggaaaagcaaaagaacagatttttgcagataccgtcaggtcgccaatctaatatcttggacactcgtgttcagttccaccaagatcaaatgcactttcttgttgtgcatgaaacccagattgccatctatgaaactacaaaactagaaccagtgaagcagtcaactgatctatgcaagctttatggatgccactgttggcatatttaatgcatcgagtttgagacttcaatgtcggattcttccagcttcgtatctccccccaaatatcagtccgagtgttcatcctgttgtggttgcggcacacccttcggaagcgagtcagtttgctctagggctgactgatggtggtgtttttgtgttggaacctttggaatcagatagaaaatggggaaatcctccaccggtagaaaatgggtctgctagcaacttgtccgcaccgcctcctaatggagcttcaagttctgatcaacctgaaagatgattgagaagatggaactggtagatttttcgtggcatgagtctaaccaagatgggcttcaaaaggtggtgcaactaaccttggcagatcggttccaagggactcggacaatgggctcaataaaaacaagctcaacagcagtttatccgttgcttatatatatttctattgactgtatcgagtgaagaggatagttctagtatttcattttgctttgtttactgtgctgtgaaaaggagttcttatcagtagataagctgtagacaactatcagtttggctcctacattttatgacttagtgaaagtatcttgtttcatttgcc

SEQ ID NO: 153802 - DNA, 655 bp, Zea Mays
ttttaaaatgaattaatttgaaaccaaatccagttacaataagagacactaataaaaaagttcctcatccagcacgcaggttttcccatcactgatggctagtttggcaagggatttctattttcacaataaattgcagctccagtggtcgtcgaatatcagctgtccccaaaaattgcagctccgtcctcctactgcaagtgaagtgagtcagagactcagagcacggggacgatcctcgcccgcccactgtagcgcgttccaccagtgcttgtcgcactcgatccgcacggtaccctgctgcccgcgcgccgggcgcatctgaatcctcttcagccgagggcaccccctcgtctcaaggagccgcagctccgggaacgcgcactcccccctcgacccggatggcctccacctccagcttcgacagccccagcagggccagcagcctcaaccgccccactcgccatgctcttcacgatcacctccgatccaggtccagctccccgcggcagttaccgcacgtcatccttgttgcgccgccgccgcggtaggtggacgttgatctccgcgaccagaaacctcgcgtagaatatgaagttgcttgcaatttggtagagaggattttatcaggtgtgtgctttgctttgagcgagat

SEQ ID NO: 153803 - DNA, 1503 bp, Zea Mays
atcagccacacctttgcttcgattagtatacaatgtttgaaaacttcacgttgaagggcacgcttggcaagttcctccaatgtcgccagccaaaccttctctatccagttccaaccctccctccctccctccctcctcctacaagcaacagcagcagcacaccaccctccaacctccaagaagaggaacgaagagggaggaaggtggggagttgcctccgaaagcaagccatcactggctaccaaatgcaggcatgcatgcatgcatatagcgaacaggacaagaagaagcagatgatgaggaggaagaataagtaggagcagagctgaaggacaccaataagaaacggttgctcgctgccaccaccatgtcctatgatcagatgctctcgccgcttttcggtgccggcgggcgatcggcgtggagagcggcccagcacggcggcggcgacgcggtggcgaggcagatactcaagtgcacgaggtggcagctcgaggagaccaccgacttcgtcacctgcccctaccactactactgcgacagctcctacccgggcgactaccccgccgccgtcggcgccctcgtcgccgccttcgccgcctactgctttctctccactctcgcgttcaccgtcctcgacctcgtgcggggcaacggtagcagcgcctcgtcgtcggcggtggccggcgtcaggggcatcaagaggaagtacctgctcccctcaggcccgttcctgctccccctggtgctgctcgcgctcgccagggggcagcgggtcaacgccgtgttcccgctcgcgcagctcggcccggcattgctcctgctgctccaggcctcggcgctggcgttccggaacgaggccgacggcgacgtccggtacgcggtgctggaggcgtccacggtgtccggcgtgctgcacgccagcctgtacctggacgccgtcgtgctgccgtactacacggggatggaggcgctccggtggtcccgcttctccggggagtgcgcgtcgtgcctgtgccggatggagcccctggtcgtgggcggcacggcggtgcagtaccggggcctgtccaagacggctctggcgatcatcttcgcgctatgctcgcggatggtgtgccgcatctacggcgaggagcggctcagcgcctggacgcgggccgcgctggaagccgtgggctgggtgttcgtggccgccgacgcggtgtacctcgtcggctgggtcgccgcggagggcggcggcgtcggcgtggcggcctacagcctggttgccggcctggtgttcctcagcgtcttcggcaaggtctaccggttcttggcgtgggtggaggcgaggcaatcgcagtggaaatccagcctctgccatagcgccgtttgattcatgaaagctaattctctcagaaaatctgtataaagaaagaaaggaatcgttgctttagttcatctccttcttggtgtacaatctacacggtggtaaagaaaaggtgcgatttttttttgttc

SEQ ID NO: 153804 - DNA, 1673 bp, Zea Mays
gactcacacggtacgcgcttctcctcctcgcttgccgccgccgccgccgccgcgatggaaaaggagaagctctcgttctccatatcctcctcgaagcagcggccccccaagcctcccgcacgacctgcggccgccgcagacgacgatgacctccgctccgcgcccgctccgggccagcagtacgtcaccgagttcgatccgtcccaaaccctagccgccgcctgcgcggcgcgcgccgtcatcgcgccgctccccaactccggcaacttcctcacccaccgcccacgcaaaccgtcctcgctccccacccctgaggaggaggccgccctcgccgcggaatccggcggctggggccccgccttcgtcctcgacacctcgaccgctcccgaagacccatcatccaaaatcggctacggcctcactcgccgcaacggcgccatcgacgctgctgctgccaaggaaccggagaaggcgccgccaccgtcaccgtcaccgcctcgggccactgatgctgcctccgctgccggcaacctcatgctgcagcggtacaaggaggacatggaaggccttccggagcaccgtggaatggacgagttcaatgagatacccgtggagggatttggcgcggctctccttgctggatacggctggacagaaggtaagggcattggtaggaacaataagatgggggataccaaagttcttgaataccaccgccgtgctggcacacaggggttagggtacaacccctctgaagcagaccctaggaagactcgttctggcgactggattgttggcaagaaggtgtcagagggcgggagtgcgaagagagatcgaggcagtagagataggatggaagagagcgattctagtgcccagaagaagagatataatgaggaaaggtctgagaaggagggccgtgaaaaggtgaggaatggccgtggtagccgagaaggcacaagtaatgcaagcggtactcatagcaatgtactgtggttgcagagccatatcagggttcggattgttagtcagaaactaagcaagaggctatacttgatgaagggtaaggttgtcgatgtggtggggcctacaaaatgtgacatcatgatggatgatggatcagagttggtgcagggggtggagcaagatatgcttgaaactgtacttccacggacgaatgggcgggtgcttgtgctttatgggaagcacaagggtttatatgggcacctggtagagaagaattccaaagaagagatcggattggtggaggatgcagatacaaaagatattgtacgtgttagatatgatcagatggcagaatacactggagatccagagttgcttggctactgattaagtttttttgggggaggatatgcttaccgggagccttctgctatgcttggtattatatttttcttctttacaaactgtcaagaattgctgcaatgtaaaaccttgaacaaactggcggttgctatgcatttcttacttgtctttgtaagcttgctacttatttgtcagccctcaagttagtaatcatctaggagtgaccactaatgttggagtggggctcttttgataaacagtggaatgtttctgagcgtaactgtttgtttctttgtacgcgaaagaagctgtagttttgtgttctattaacttcatgtcgaccg

SEQ ID NO: 153805 - DNA, 1535 bp, Zea Mays
cgacgatgacctccgctccgcgcccgctccgggccagcagtacgtcaccgagttcgatccgtcccaaaccctagccgccgcctgcgcggcgcgcgccgtcatcgcgccgctccccaactccggcaacttcctcacccaccgcccacgcaaaccgtcctcgctccccacccctgaggaggaggccgccctcgccgcggaatccggcggctggggccccgccttcgtcctcgacacctcgaccgctcccgaagacccatcatccaaaatcggctacggcctcactcgccgcaacggcgccatcgacgctgctgctgccaaggaaccggagaaggcgccgccaccgtcaccgtcaccgcctcgggccactgatgctgcctccgctgccggcaacctcatgctgcagcggtacaaggaggacatggaaggccttccggagcaccgtggaatggacgagttcaatgagatacccgtggagggatttggcgcggctctccttgctggatacggctggacagaaggtaagggcattggtaggaacaataagatgggggataccaaagttcttgaataccaccgccgtgctggcacacaggggttagggtacaacccctctgaagcagaccctaggaagactcgttctggcgactggattgttggcaagaaggtgtcagagggcgggagtgcgaagagagatcgaggcagtagagataggatggaagagagcgattctagtgcccagaagaagagatataatgaggaaaggtctgagaaggagggccgtgaaaaggtgaggaatggccgtggtagccgagaaggcacaagtaatgcaagcggtactcatagcaatgtactgtggttgcagagccatatcagggttcggattgttagtcagaaactaagcaagaggctatacttgatgaagggtaaggttgtcgatgtggtggggcctacaaaatgtgacatcatgatggatgatggatcagagttggtgcagggggtggagcaagatatgcttgaaactgtacttccacggacgaatgggcgggtgcttgtgctttatgggaagcacaagggtttatatgggcacctggtagagaagaattccaaagaagagatcggattggtggaggatgcagatacaaaagatattgtacgtgttagatatgatcagatggcagaatacactggagatccagagttgcttggctactgattaagtttttttgggggaggatatgcttaccgggagccttctgctatgcttggtctcctgttcgtcagctgaagatcatacttgctgtggagcttttgatcccttcagagggaccaaggattggagagcacattttcggttacacggtcagtacataatctatttaaaggttcatttgtctcactctcaccagtatttgtaatctgtctagctgtcctgatttatattcgtcaaactgtgcgaacatagtttttcataaagacagtgtttgtagcgattaatggtgttgtctgaatgaactcatacatgcattttcttcgat

SEQ ID NO: 153806 - DNA, 2920 bp, Zea Mays
gttcctcctccccacacttttgacagaagaacctccttcctggatttgattccccaaacctcgagagcacaatatgaggattagggttacatgggaattctgaagcagcagaggacgacgaaccaggagctccccattcaagaaccctacccgcaggagacttccctttcgtcgagctccctctgatccccagtctcggcaactccccgacctcctagcgggggcaaagagggatactccgccagccgccgcagaagttgacaaccgagtgcgtcggcaaatcccacaaacaggaaacgagaccggcgagatgagggagtgactgcgtgccaattaggtcatcagccccttctcacttgccaccatcgatcttcgatgcgtcggtctgtcgctatccgcgtccaccagacgatgggcctgggctcctgatcagcaaatggatctgatctcttctcccgttccttgattccacccgctgcactggtcaaaacaagcggcccgatgtggatgacgaactagcttgccttccgaagagaggggggccacatggcggagaggaagaaggggtagagtagagatggccaaacgggccgcctggcccggcccagcccgcaaggcacggttaaaaaaccgggccgagccgtctaagcccgcgggctcgattttctgttcgaacctggcccgcagcaggcctaaacgggccggcccgacctgtttagcatgaaaaaagcgggccgaaaacgggctaagcgagccagtaagcacgttttagtgcacaaaaaacgggcttaacaaatttagaggtaaacgggccgtgctgggctagcccaccgtgcctagtttcttgtccgaagccggcccgcttattcgtgataggccggtccgggtcgcatagaaccggatcgtgctgggctcagacaggacccaaacatcgggcttcgtgccgggctcgcggtcgtcgtgcttattggacacatcgccaattcttctcggttcctccgcccccgtagcaccccgcgcgcccagccgtcgccgcgatcgcgagactgcgagagccttccgcccttccccttccccttccccttccccggccctgccgcgctgttcggcccgtcctcctcggtccttccatccactcacgcgaagcttccagcagaggcgacctccgcatcgagtctcggctgccgaggagtcgagtcatggaagtggtggcgtcggcgccggggaaggtgctcatcgcgggaggatacctcgtgctggagcgccccaacgccggcctagttctcagcaccaccgcccgcttctacgccgtcgtccgccccctccgcgacagcctcccagccgactcctggacctgggcatggacggacgtcaaagtgacttcccctcaactctcgcgggtggccacatataaattgtccctaaataaaacgacgctgcaattgacgtcttcaagggaatcgacaaacccttttgtggagcaggccatacaattctccgtagcagctgctaaagcgaccattattgataaggagaggaaggatgtggtagataagttactgctgcaaggtctgaacattacaattattggtcacaatgatttctattcttatagaaagcagattgaagcacgtggtctccctcttactccggaggtactgctttcattgcctccattctcttcaattacatttaactcagaggttgctaatggaacaatgactggagagaaatgtaaacctgaagtagccaaaactggacttgggtcatcagctgccatgaccacatcagttgttgcagctcttcttcactatcttggtgctgttaacctctcatgttcaggacaatcttctggcgacaatgcaagtggacgagaacttgacttggttcacgctattgcccaaagtgcacattgtttagcacaagggaaaattggcagtggttttgatgttagtgctgctgtctatgggagtcaacgctatgtaaggttttctccagaaatactctcctcggctcaggctataggtgggactgtcttgccagatgtagtatcagatgttctaacacaaaggtgggatcatgagaataaacagttttcattacctcctctgatgacccttctccttggggaacctgggaccggaggatcatctactccatcaatggttggatctgtgaaacggtggctgaagtctgaccctgagaaatccagagatacatggagtaaactggccattgccaattcaacgctggagaaccaactgaggatcttaaaaggactttctgaaaatcaccatgaagcatatgagtccatggtgaggtcctgtagtcgtctcacatatgggaagtgggcagaggtggctactaaccaacatcaagaattaattataagatcattgttggctgcaagggatgcttgccttgagataaggcttcacatgcgagagatgggcatagcagctggtgttccaattgagccagattcacaaacacggctactagatgccactatgaatatggagggtgttttactggctggagttccgggagctggtggcttcgatgcagtgttctcagttgttttgggggatgcaagtaatgctgtagcacatgcttggagctctgttggcgttctgccacttcctgttcgagaagactgccgtggtgtttcattggaagacgctgacccgagaacaagggaggtgtcagcagctgtatggtccatccaaattaactgattctactgttaatagttctgtttatgcatggtgtaccaatatcatttattaacgatgttcgcattgctgcagttacaattcatagagacaacatagtataaatagtagaagccgttacggattaaagccaaactagcaggctctatcttttataagtacaaaattgtgccgaatgctctatc

SEQ ID NO: 153807 - DNA, 2768 bp, Zea Mays
gttcctcctccccacacttttgacagaagaacctccttcctggatttgattccccaaacctcgagagcacaatatgaggattagggttacatgggaattctgaagcagcagaggacgacgaaccaggagctccccattcaagaaccctacccgcaggagacttccctttcgtcgagctccctctgatccccagtctcggcaactccccgacctcctagcgggggcaaagagggatactccgccagccgccgcagaagttgacaaccgagtgcgtcggcaaatcccacaaacaggaaacgagaccggcgagatgagggagtgactgcgtgccaattaggtcatcagccccttctcacttgccaccatcgatcttcgatgcgtcggtctgtcgctatccgcgtccaccagacgatgggcctgggctcctgatcagcaaatggatctgatctcttctcccgttccttgattccacccgctgcactggtcaaaacaagcggcccgatgtggatgacgaactagcttgccttccgaagagaggggggccacatggcggagaggaagaaggggtagagtagagatggccaaacgggccgcctggcccggcccagcccgcaaggcacggttaaaaaaccgggccgagccgtctaagcccgcgggctcgattttctgttcgaacctggcccgcagcaggcctaaacgggccggcccgacctgtttagcatgaaaaaagcgggccgaaaacgggctaagcgagccagtaagcacgttttagtgcacaaaaaacgggcttaacaaatttagaggtaaacgggccgtgctgggctagcccaccgtgcctagtttcttgtccgaagccggcccgcttattcgtgataggccggtccgggtcgcatagaaccggatcgtgctgggctcagacaggacccaaacatcgggcttcgtgccgggctcgcggtcgtcgtgcttattggacacatcgccaattcttctcggttcctccgcccccgtagcaccccgcgcgcccagccgtcgccgcgatcgcgagactgcgagagccttccgcccttccccttccccttccccttccccggccctgccgcgctgttcggcccgtcctcctcggtccttccatccactcacgcgaagcttccagcagaggcgacctccgcatcgagtctcggctgccgaggagtcgagtcatggaagtggtggcgtcggcgccggggaaggtgctcatcgcgggaggatacctcgtgctggagcgccccaacgccggcctagttctcagcaccaccgcccgcttctacgccgtcgtccgccccctccgcgacagcctcccagccgactcctggacctgggcatggacggacgtcaaagtgacttcccctcaactctcgcgggtggccacatataaattgtccctaaataaaacgacgctgcaattgacgtcttcaagggaatcgacaaacccttttgtggagcaggccatacaattctccgtagcagctgctaaagcgaccattattgataaggagaggaaggatgtggtagataagttactgctgcaaggtctgaacattacaattattggtcacaatgatttctattcttatagaaagcagattgaagcacgtggtctccctcttactccggaggacaatcttctggcgacaatgcaagtggacgagaacttgacttggttcacgctattgcccaaagtgcacattgtttagcacaagggaaaattggcagtggttttgatgttagtgctgctgtctatgggagtcaacgctatgtaaggttttctccagaaatactctcctcggctcaggctataggtgggactgtcttgccagatgtagtatcagatgttctaacacaaaggtgggatcatgagaataaacagttttcattacctcctctgatgacccttctccttggggaacctgggaccggaggatcatctactccatcaatggttggatctgtgaaacggtggctgaagtctgaccctgagaaatccagagatacatggagtaaactggccattgccaattcaacgctggagaaccaactgaggatcttaaaaggactttctgaaaatcaccatgaagcatatgagtccatggtgaggtcctgtagtcgtctcacatatgggaagtgggcagaggtggctactaaccaacatcaagaattaattataagatcattgttggctgcaagggatgcttgccttgagataaggcttcacatgcgagagatgggcatagcagctggtgttccagtaagattgagccagattcacaaacacggctactagatgccactatgaatatggagggtgttttactggctggagttccgggagctggtggcttcgatgcagtgttctcagttgttttgggggatgcaagtaatgctgtagcacatgcttggagctctgttggcgttctgccacttcctgttcgagaagactgccgtggtgtttcattggaagacgctgacccgagaacaagggaggtgtcagcagctgtatggtccatccaaattaactgattctactgttaatagttctgtttatgcatggtgtaccaatatcatttattaacgatgttcgcattgctgcagttacaattcatagagacaacatagtataaatagtagaagccgttacggattaaagccaaactagcaggctctatcttttataagtacaaaattgtgccgaatgctctatcttttataagtacaaaattgtgccgaatgct

SEQ ID NO: 153808 - DNA, 2917 bp, Zea Mays
gttcctcctccccacacttttgacagaagaacctccttcctggatttgattccccaaacctcgagagcacaatatgaggattagggttacatgggaattctgaagcagcagaggacgacgaaccaggagctccccattcaagaaccctacccgcaggagacttccctttcgtcgagctccctctgatccccagtctcggcaactccccgacctcctagcgggggcaaagagggatactccgccagccgccgcagaagttgacaaccgagtgcgtcggcaaatcccacaaacaggaaacgagaccggcgagatgagggagtgactgcgtgccaattaggtcatcagccccttctcacttgccaccatcgatcttcgatgcgtcggtctgtcgctatccgcgtccaccagacgatgggcctgggctcctgatcagcaaatggatctgatctcttctcccgttccttgattccacccgctgcactggtcaaaacaagcggcccgatgtggatgacgaactagcttgccttccgaagagaggggggccacatggcggagaggaagaaggggtagagtagagatggccaaacgggccgcctggcccggcccagcccgcaaggcacggttaaaaaaccgggccgagccgtctaagcccgcgggctcgattttctgttcgaacctggcccgcagcaggcctaaacgggccggcccgacctgtttagcatgaaaaaagcgggccgaaaacgggctaagcgagccagtaagcacgttttagtgcacaaaaaacgggcttaacaaatttagaggtaaacgggccgtgctgggctagcccaccgtgcctagtttcttgtccgaagccggcccgcttattcgtgataggccggtccgggtcgcatagaaccggatcgtgctgggctcagacaggacccaaacatcgggcttcgtgccgggctcgcggtcgtcgtgcttattggacacatcgccaattcttctcggttcctccgcccccgtagcaccccgcgcgcccagccgtcgccgcgatcgcgagactgcgagagccttccgcccttccccttccccttccccttccccggccctgccgcgctgttcggcccgtcctcctcggtccttccatccactcacgcgaagcttccagcagaggcgacctccgcatcgagtctcggctgccgaggagtcgagtcatggaagtggtggcgtcggcgccggggaaggtgctcatcgcgggaggatacctcgtgctggagcgccccaacgccggcctagttctcagcaccaccgcccgcttctacgccgtcgtccgccccctccgcgacagcctcccagccgactcctggacctgggcatggacggacgtcaaagtgacttcccctcaactctcgcgggtggccacatataaattgtccctaaataaaacgacgctgcaattgacgtcttcaagggaatcgacaaacccttttgtggagcaggccatacaattctccgtagcagctgctaaagcgaccattattgataaggagaggaaggatgtggtagataagttactgctgcaaggtctgaacattacaattattggtcacaatgatttctattcttatagaaagcagattgaagcacgtggtctccctcttactccggaggtactgctttcattgcctccattctcttcaattacatttaactcagaggttgctaatggaacaatgactggagagaaatgtaaacctgaagtagccaaaactggacttgggtcatcagctgccatgaccacatcagttgttgcagctcttcttcactatcttggtgctgttaacctctcatgttcaggacaatcttctggcgacaatgcaagtggacgagaacttgacttggttcacgctattgcccaaagtgcacattgtttagcacaagggaaaattggcagtggttttgatgttagtgctgctgtctatgggagtcaacgctatgtaaggttttctccagaaatactctcctcggctcaggctataggtgggactgtcttgccagatgtagtatcagatgttctaacacaaaggtgggatcatgagaataaacagttttcattacctcctctgatgacccttctccttggggaacctgggaccggaggatcatctactccatcaatggttggatctgtgaaacggtggctgaagtctgaccctgagaaatccagagatacatggagtaaactggccattgccaattcaacgctggagaaccaactgaggatcttaaaaggactttctgaaaatcaccatgaagcatatgagtccatgtgggcagaggtggctactaaccaacatcaagaattaattataagatcattgttggctgcaagggatgcttgccttgagataaggcttcacatgcgagagatgggcatagcagctggtgttccaattgagccagattcacaaacacggctactagatgccactatgaatatggagggtgttttactggctggagttccgggagctggtggcttcgatgcagtgttctcagttgttttgggggatgcaagtaatgctgtagcacatgcttggagctctgttggcgttctgccacttcctgttcgagaagactgccgtggtgtttcattggaagacgctgacccgagaacaagggaggtgtcagcagctgtatggtccatccaaattaactgattctactgttaatagttctgtttatgcatggtgtaccaatatcatttattaacgatgttcgcattgctgcagttacaattcatagagacaacatagtataaatagtagaagccgttacggattaaagccaaactagcaggctctatcttttataagtacaaaattgtgccgaatgctctatcttttataagtacaaaattgtgccgaatgct

SEQ ID NO: 153809 - DNA, 2763 bp, Zea Mays
gttcctcctccccacacttttgacagaagaacctccttcctggatttgattccccaaacctcgagagcacaatatgaggattagggttacatgggaattctgaagcagcagaggacgacgaaccaggagctccccattcaagaaccctacccgcaggagacttccctttcgtcgagctccctctgatccccagtctcggcaactccccgacctcctagcgggggcaaagagggatactccgccagccgccgcagaagttgacaaccgagtgcgtcggcaaatcccacaaacaggaaacgagaccggcgagatgagggagtgactgcgtgccaattaggtcatcagccccttctcacttgccaccatcgatcttcgatgcgtcggtctgtcgctatccgcgtccaccagacgatgggcctgggctcctgatcagcaaatggatctgatctcttctcccgttccttgattccacccgctgcactggtcaaaacaagcggcccgatgtggatgacgaactagcttgccttccgaagagaggggggccacatggcggagaggaagaaggggtagagtagagatggccaaacgggccgcctggcccggcccagcccgcaaggcacggttaaaaaaccgggccgagccgtctaagcccgcgggctcgattttctgttcgaacctggcccgcagcaggcctaaacgggccggcccgacctgtttagcatgaaaaaagcgggccgaaaacgggctaagcgagccagtaagcacgttttagtgcacaaaaaacgggcttaacaaatttagaggtaaacgggccgtgctgggctagcccaccgtgcctagtttcttgtccgaagccggcccgcttattcgtgataggccggtccgggtcgcatagaaccggatcgtgctgggctcagacaggacccaaacatcgggcttcgtgccgggctcgcggtcgtcgtgcttattggacacatcgccaattcttctcggttcctccgcccccgtagcaccccgcgcgcccagccgtcgccgcgatcgcgagactgcgagagccttccgcccttccccttccccttccccttccccggccctgccgcgctgttcggcccgtcctcctcggtccttccatccactcacgcgaagcttccagcagaggcgacctccgcatcgagtctcggctgccgaggagtcgagtcatggaagtggtggcgtcggcgccggggaaggtgctcatcgcgggaggatacctcgtgctggagcgccccaacgccggcctagttctcagcaccaccgcccgcttctacgccgtcgtccgccccctccgcgacagcctcccagccgactcctggacctgggcatggacggacgtcaaagtgacttcccctcaactctcgcgggtggccacatataaattgtccctaaataaaacgacgctgcaattgacgtcttcaagggaatcgacaaacccttttgtggagcaggccatacaattctccgtagcagctgctaaagcgaccattattgataaggagaggaaggatgtggtagataagttactgctgcaaggtctgaacattacaattattggtcacaatgatttctattcttatagaaagcagattgaagcacgtggtctccctcttactccggaggacaatcttctggcgacaatgcaagtggacgagaacttgacttggttcacgctattgcccaaagtgcacattgtttagcacaagggaaaattggcagtggttttgatgttagtgctgctgtctatgggagtcaacgctatgtaaggttttctccagaaatactctcctcggctcaggctataggtgggactgtcttgccagatgtagtatcagatgttctaacacaaaggtgggatcatgagaataaacagttttcattacctcctctgatgacccttctccttggggaacctgggaccggaggatcatctactccatcaatggttggatctgtgaaacggtggctgaagtctgaccctgagaaatccagagatacatggagtaaactggccattgccaattcaacgctggagaaccaactgaggatcttaaaaggactttctgaaaatcaccatgaagcatatgagtccatggtgaggtcctgtagtcgtctcacatatgggaagtgggcagaggtggctactaaccaacatcaagaattaattataagatcattgttggctgcaagggatgcttgccttgagataaggcttcacatgcgagagatgggcatagcagctggtgttccaattgagccagattcacaaacacggctactagatgccactatgaatatggagggtgttttactggctggagttccgggagctggtggcttcgatgcagtgttctcagttgttttgggggatgcaagtaatgctgtagcacatgcttggagctctgttggcgttctgccacttcctgttcgagaagactgccgtggtgtttcattggaagacgctgacccgagaacaagggaggtgtcagcagctgtatggtccatccaaattaactgattctactgttaatagttctgtttatgcatggtgtaccaatatcatttattaacgatgttcgcattgctgcagttacaattcatagagacaacatagtataaatagtagaagccgttacggattaaagccaaactagcaggctctatcttttataagtacaaaattgtgccgaatgctctatcttttataagtacaaaattgtgccgaatgct

SEQ ID NO: 153810 - DNA, 294 bp, Zea Mays
atgtcgtcttggacctactgtgagaacgcgctgttcgagcgcgcgctggccacctacgaccgggacacgcccaggcggtgggagctcgtggccgccgcggtgggcggcgggaagaccgccgaggacgcgaggcgccactacgcccacctcgtgctggacgtcggcgacatcgagtccggcggctacgacaacccgaacccccgcgggcccgcccccaccaacagcggcggtgccagcatcagcgggaacggcaacaacaggggcggcggcagagccaaccggccccagacatga

SEQ ID NO: 153811 - DNA, 2581 bp, Zea Mays
accactggcacacgcccacactacacggacgcccagtctaacgaaacgaaagggacgagattcagcaaggccagaagccgcgccagccaaaggcgaccgccgcccgggcgccagcccactcaaaccctttggtctcctgtcctctcttcgtccaccgcgtcgtcgtctccctccctccgtccccgcacccaccgttatatacaacccccgtcgggactacactcaccaccgcgcctcgaatccatcgctcaactactcgaacccgactcaccggcgcctactcccgcctggctcccgggcccattcgtcgacccgtcgccgggcgaaagcgcgccactaaggtctccaacctccgcccgttgaagcgacggcgccgcatcggaggaactgtagctgttagtccgcctcttctcggcagcgcggggcggagatccgaccggacttgggatcgattccttcccttttctcgggaggcagtaaatagtgggctgtttgtttcccgaaaatttgaagggggttcagctgaacccacgagttccctcacgttaagcccgccgcacccggttcggcgaccgatctggctgattgaaactgcttggtttgcagattcagggcgctaacagttcctgagggaagcttctggggacatggacatggcattgcccgttgtgaatgccacagcggcggtgctcgcccgtgtctcggctgccttcaatggcccccttgcccgcgcagtcgtctttggggtccatattgatggtcacttggtcgtggaagggcttcttattgcagtcatagtgttccagctctccaggaagagctacaaaccaccaaagaagccactcactgaaaaggagattgatgagctatgtgatgagtgggagccagagccactatgccctccaatcaaggagggggccaaaatagatgctccaacattggaaagtgccgctggaccacatacgattgttgatggtaaagaagttgtgaactttgcatcagcaaactacctcggtttaattggcaacgaaaagattattgattcttgcatcagttcattggagaaatatggtgttggttcttgtggtccacgtggcttttatggaacaattgatgtccatcttgactgtgagtcaaagatagctaaatttttggggactccagactccattctttattcatatgggatttctacaatattcagtgtgatacctgccttctgtaagaaaggagatatcatagtcgctgatgagggtgttcactgggcagtgcaaaatggtctccatctatcaagaagcactgtggtgtacttcaagcacaatgatatggcttcacttgcaagcactttggaaaaacttactcgtggaaataaacgtgctgaaaagattagacgctacattgttgtagaatccatctaccagaattctggccaaattgcccccttggatgagattgtcaggttgaaggagaaatatcgattccgtgttattctggaggagagtcattcttttggggtgcttggcaagtctgggcgtggccttgctgaacattatggagttcctattgaaaaaattgatatcatcactgctggaatgggaaatgcattagctactgatggtggcttttgtacaggaagtgtcagagttgttgatcatcagcgtctaagcagctctgggtatgttttctctgcatctctgccaccttatcttgccagtgctgctgtttctgccgttaactatcttgaggaaaatccctcagttcttgcaaacctaaggagcaatattgctcttttgcataaagaactatcagatactccagggcttgaaatttccagccatgttctgtcacctatcgtcttccttaagctgaagaagtcgactggttctcctaccactgatctagaccttcttgaaactattgctgacaaggccttgaaggaagactcagttttcgttgtgacatcaaagaaatcaaatctggataggtgcaaacttcccattggaatccgcctgtttgtatcagctggccatactgaattagacatctccaggctttcctcatccttgaagagggtttctgcatcggttctttcagattacttttgatccacatcggattcccttaagacgaaagccatccattttctacgcgctttgtactctaggccgtgtgtgtttggtaaatgtacataacctgtacatttctacatgttatgaattgaccttgttgcaaaataaaattttgtagaatggttatactccctccgttcttttttatttgttgcgttttagttcaaaaatcaactagcgagcaacaaatattcgagaacggaggtattatgttgaagtatagtgcgtttgtgctgtacatcttgctcttttccatgtagtgatgatttccctgaatccacatacgagcttgttctcttttttatcggaagatgaacggacttacttttaaacaaatacaacacccacctttgttgtgttgttagttgactcatttgaatccacaaacaagcatgttcatgcacatttcttattactatataaagcatcagttttcagtcttgctgtcacct

SEQ ID NO: 153812 - DNA, 2478 bp, Zea Mays
accactggcacacgcccacactacacggacgcccagtctaacgaaacgaaagggacgagattcagcaaggccagaagccgcgccagccaaaggcgaccgccgcccgggcgccagcccactcaaaccctttggtctcctgtcctctcttcgtccaccgcgtcgtcgtctccctccctccgtccccgcacccaccgttatatacaacccccgtcgggactacactcaccaccgcgcctcgaatccatcgctcaactactcgaacccgactcaccggcgcctactcccgcctggctcccgggcccattcgtcgacccgtcgccgggcgaaagcgcgccactaaggtctccaacctccgcccgttgaagcgacggcgccgcatcggaggaactgtagctgttagtccgcctcttctcggcagcgcggggcggagatccgaccggacttgggatcgattccttcccttttctcgattcagggcgctaacagttcctgagggaagcttctggggacatggacatggcattgcccgttgtgaatgccacagcggcggtgctcgcccgtgtctcggctgccttcaatggcccccttgcccgcgcagtcgtctttggggtccatattgatggtcacttggtcgtggaagggcttcttattgcagtcatagtgttccagctctccaggaagagctacaaaccaccaaagaagccactcactgaaaaggagattgatgagctatgtgatgagtgggagccagagccactatgccctccaatcaaggagggggccaaaatagatgctccaacattggaaagtgccgctggaccacatacgattgttgatggtaaagaagttgtgaactttgcatcagcaaactacctcggtttaattggcaacgaaaagattattgattcttgcatcagttcattggagaaatatggtgttggttcttgtggtccacgtggcttttatggaacaattgatgtccatcttgactgtgagtcaaagatagctaaatttttggggactccagactccattctttattcatatgggatttctacaatattcagtgtgatacctgccttctgtaagaaaggagatatcatagtcgctgatgagggtgttcactgggcagtgcaaaatggtctccatctatcaagaagcactgtggtgtacttcaagcacaatgatatggcttcacttgcaagcactttggaaaaacttactcgtggaaataaacgtgctgaaaagattagacgctacattgttgtagaatccatctaccagaattctggccaaattgcccccttggatgagattgtcaggttgaaggagaaatatcgattccgtgttattctggaggagagtcattcttttggggtgcttggcaagtctgggcgtggccttgctgaacattatggagttcctattgaaaaaattgatatcatcactgctggaatgggaaatgcattagctactgatggtggcttttgtacaggaagtgtcagagttgttgatcatcagcgtctaagcagctctgggtatgttttctctgcatctctgccaccttatcttgccagtgctgctgtttctgccgttaactatcttgaggaaaatccctcagttcttgcaaacctaaggagcaatattgctcttttgcataaagaactatcagatactccagggcttgaaatttccagccatgttctgtcacctatcgtcttccttaagctgaagaagtcgactggttctcctaccactgatctagaccttcttgaaactattgctgacaaggccttgaaggaagactcagttttcgttgtgacatcaaagaaatcaaatctggataggtgcaaacttcccattggaatccgcctgtttgtatcagctggccatactgaattagacatctccaggctttcctcatccttgaagagggtttctgcatcggttctttcagattacttttgatccacatcggattcccttaagacgaaagccatccattttctacgcgctttgtactctaggccgtgtgtgtttggtaaatgtacataacctgtacatttctacatgttatgaattgaccttgttgcaaaataaaattttgtagaatggttatactccctccgttcttttttatttgttgcgttttagttcaaaaatcaactagcgagcaacaaatattcgagaacggaggtattatgttgaagtatagtgcgtttgtgctgtacatcttgctcttttccatgtagtgatgatttccctgaatccacatacgagcttgttctcttttttatcggaagatgaacggacttacttttaaacaaatacaacacccacctttgttgtgttgttagttgactcatttgaatccacaaacaagcatgttcatgcacatttcttattactatataaagcatcagttttcagtcttgctgtcacctttctcctttctgttttatacaaaaataagataaa

SEQ ID NO: 153813 - DNA, 2165 bp, Zea Mays
agattcagcaaggccagaagccgcgccagccaaaggcgaccgccgcccgggcgccagcccactcaaaccctttggtctcctgtcctctcttcgtccaccgcgtcgtcgtctccctccctccgtccccgcacccaccgttatatacaacccccgcgaccgatctggctgattgaaactgcttggtttgcagattcagggcgctaacagttcctgagggaagcttctggggacatggacatggcattgcccgttgtgaatgccacagcggcggtgctcgcccgtgtctcggctgccttcaatggcccccttgcccgcgcagtcgtctttggggtccatattgatggtcacttggtcgtggaagggcttcttattgcagtcatagtgttccagctctccaggaagagctacaaaccaccaaagaagccactcactgaaaaggagattgatgagctatgtgatgagtgggagccagagccactatgccctccaatcaaggagggggccaaaatagatgctccaacattggaaagtgccgctggaccacatacgattgttgatggtaaagaagttgtgaactttgcatcagcaaactacctcggtttaattggcaacgaaaagattattgattcttgcatcagttcattggagaaatatggtgttggttcttgtggtccacgtggcttttatggaacaattgatgtccatcttgactgtgagtcaaagatagctaaatttttggggactccagactccattctttattcatatgggatttctacaatattcagtgtgatacctgccttctgtaagaaaggagatatcatagtcgctgatgagggtgttcactgggcagtgcaaaatggtctccatctatcaagaagcactgtggtgtacttcaagcacaatgatatggcttcacttgcaagcactttggaaaaacttactcgtggaaataaacgtgctgaaaagattagacgctacattgttgtagaatccatctaccagaattctggccaaattgcccccttggatgagattgtcaggttgaaggagaaatatcgattccgtgttattctggaggagagtcattcttttggggtgcttggcaagtctgggcgtggccttgctgaacattatggagttcctattgaaaaaattgatatcatcactgctggaatgggaaatgcattagctactgatggtggcttttgtacaggaagtgtcagagttgttgatcatcagcgtctaagcagctctgggtatgttttctctgcatctctgccaccttatcttgccagtgctgctgtttctgccgttaactatcttgaggaaaatccctcagttcttgcaaacctaaggagcaatattgctcttttgcataaagaactatcagatactccagggcttgaaatttccagccatgttctgtcacctatcgtcttccttaagctgaagaagtcgactggttctcctaccactgatctagaccttcttgaaactattgctgacaaggccttgaaggaagactcagttttcgttgtgacatcaaagaaatcaaatctggataggtgcaaacttcccattggaatccgcctgtttgtatcagctggccatactgaattagacatctccaggctttcctcatccttgaagagggtttctgcatcggttctttcagattacttttgatccacatcggattcccttaagacgaaagccatccattttctacgcgctttgtactctaggccgtgtgtgtttggtaaatgtacataacctgtacatttctacatgttatgaattgaccttgttgcaaaataaaattttgtagaatggttatactccctccgttcttttttatttgttgcgttttagttcaaaaatcaactagcgagcaacaaatattcgagaacggaggtattatgttgaagtatagtgcgtttgtgctgtacatcttgctcttttccatgtagtgatgatttccctgaatccacatacgagcttgttctcttttttatcggaagatgaacggacttacttttaaacaaatacaacacccacctttgttgtgttgttagttgactcatttgaatccacaaacaagcatgttcatgcacatttcttattactatataaagcatcagttttcagtcttgctgtcacct

SEQ ID NO: 153814 - DNA, 1599 bp, Zea Mays
agcatggggagcgtcgcgcccgccgaactggtcctgaaggcggcgtgcgagcgctgcggtgcagcgtcgggactctacgcgacgtcgtgccggcacaccacgctctgctccgactgtggcatgaccttggcgctcgcccgcgggcgttgcaccgtgtgcagcgcccccgttaccaggctcatccgggagtacgatgtccgggtggatacctccgcggagaaggagaagacccactacatcggcaggttcaccaccggcttgccgcccttatcgaatgagaggagcgcagggaatagatggactcttcgcaaggatgtcccccatggacagcagcttactgggaatatgcgggacaagcactacagcaagatgccatggattctggaggatgagacgggggaacatcagtatcagggccaaactgaggatccacctgccacatactattcgcttacgcaaaaaggcaatgacatgattgctgttcaagttggttcctggtacaacttcagtaaaattgcacagtacaaacagctgaccttggaagaagctgaagagaaaatgaatagaaggagaagcagtgcatctgggtatgaacgatggatgatgaaggcagctacaaatggacctgatgcctttagttcagttgtgaagaggcttgatgatgtaaatagaggggcaacaaacggtgttcaccccaagaaaggagataggaatgagaatggaaatcaatctgacaaagttgatgacaaagaagaagagggagctgcaaggaaaaacaggcttgggcttactatgaaggacatgggcgaggattatgaggatagtggaaacgacatagaatttgatttggatgatgaaattgagaaaggtgatgattgggagcacgaggagatcttcactgatgatgatgaggttgtggatgttgatatagagcaaagacctgagttagctgatcctgaggctgctcctcctgaaattaaacaggatgacaacgaggatgaactaggctgcagtgacaacttgagcaagtccggccaggagctaaagaggctgctccgccgagctgctggggaaaatgagtctgatgttgacgacaaaagcacatatgaagatgacctaccctcgccaaaacctgctccaaaacttgtacccaaaagtgaaccagatgatagcagccctgctaaaccaacaccatcagggcacgctcagagcgctacaccttcatccaaatccactcaaaagaggaaatcagggggtggtgatgcaaatatttctaatggtgcaccctcgaaaaagataaagatggaacatgaaaccggaacattggctgtcaaggatgaaaatccgtcttatttggaaccaacttcgaaagcatctctttcagcaagaagagaatcatcacccattacagaggaagaagtcaggacagtacttcgtgcaatttcacccacgacaagccaagatctggtgtcgaggttcaagactcgtctaataactcaagaggacaagaaagcatttttgggcattgtgacgaaaatatctcgcatacttaagcacaacggcggtaggtatatcgttcttcggcacgaacatatgtga

SEQ ID NO: 153815 - DNA, 2044 bp, Zea Mays
aacaggcccgtcgaaagcaaatcgaaaccatctcgactcggaaaaaacggcagcagcaaaaaggtcccgcaaacccaagcgccgccgtggacccaatcgcccccagccccagccccagcctcagtccccccgagacgagacgagatccggggaccagccgcattgccgcggatcgaagggatggcgccgcagctgaccggagtgcccggttcgggggccgcggcgggcggtgcggcggccgtcaaaccgcagttccaccactaccaccaccgcctgcccccgcgccaccaccactcctcgccggcctcgctcctctccaagctcgccttctggtccgtctgctccctctcgctcctcctcgccttcctcctcctctcccccgcggcgcccgccccgcgggccgcgcccgagtccccgcgccgctccctccacgcgtccccctcgtccaccacctcctggggcggcgccgcctgggagaagaaggtgcgcgcgtcggcgcgcatcaggcgctccgggggccactccgtcctcgtcacgggcgccgcggggttcgtcggctgccacgcggctgccgctctccgccgccgaggggacggcgtgctcggcctcgacaacttcaacgactactacgacacggctctcaagcgcggccgcgccgcgctcctcgcccgctccggggtctacgtcgtccacggcgacatcgccgacgcggagctcctcgccaagctgttcgacgtcgtgcccttcacgcacgttctccacctcgccgcgcaagccggcgtgcggcacgcgctcgtggaccccatgtcttatgtgcgcgccaacgttgccggtctcgtggcgctgctcgaggcggcgcgcgcggccaatcctcagcccgccgtcgtctgggcatcgtcgtcttcagtgtacgggctcaactcccatgtgcctttctctgagcacgacaggacggatcgaccggcctctctctatgcagccaccaagaaggccggtgaggagatcgctcatgtctacaaccacatctatggtctgtcactcactgctctcaggttcttcactgtctatgggccatgggggcgtccagacatggcgtacttcttcttcaccaaggacatccttgctggtcggccaattacgatctacgagagtgccggtggaggttcacaccagactaccatttcccgggatttcacctacgttgatgacattgtgaaggggtgtgtagcggcactggatacagcaggtcggagcacaggcagtggaggcaagaagcgaggtacagcaccgttcaggacgtacaatttaggcaacacttcacctgtgcctgttacacagctagtggatttgctggagaaattgctcaaagtgaaggctgtgaggaaggttgttaagatgccaaggaatggagatgtgccatacacgcatgccaacgtaagccttgcgcagcgggagcttggttaccggccatccacagatctgcaaacagggctcaagaagtttgtgcggtggtatcttgaatactaccatcctgagctggctgagaagcacaaactgcgtaccagcagcaatggcaagggttcacgtggtcggaatggcagctcaagtagcgcaagatgactgtctattctgtgtctttgttcctgacggtgtgtatcagaattctacctccattccttaattcatcgggctcattttgctcagcaaattgtgaaagtggaacacaagttaagaaacactcactaggtagtcatcataattcaaaagcctggtgcttctctttgctgcgtcctagttgagcatttaattcctagttccattagttggttattagggtgacactgttccgaagattttttatgtcatgggttttgggggatggcactctgttgcatagactaccatagattcttttagtgacttttttgtaccacgggagagaactaagtatatcatgacttgcttttgttcaattgaagtagcaatggtcagcaatttgtctatgctaatatgcttgttttgctggagtgcatactctttatct

SEQ ID NO: 153816 - DNA, 447 bp, Zea Mays
ctgatgaagttcttctagagcaagaactgatgcttcgaagaattttgcacatgactcattagatggtgtatgaagtattgaagccagtgagcaacaaaggccacagttcagcaatattccaaggtatgactgatcagcacaagtagacaaaacttctcgtacacaagttgatttgctcaaacttttcataaggtcactttcctcaaagacttgtacttccttatggcgatcttgtactcgatgtaaaacctctttaaacttctgatcttgtctaatcccataacttggacgaggctaatctcactgcaatcagaagcatatatgcacattttccattccccctaccacatcggagagcttcaccttcctaaaaggaaaatcaacatctgcaacattctcctcagttaccagagatcatttaatcttgaaaataagccaaccaaaata

SEQ ID NO: 153817 - DNA, 1387 bp, Zea Mays
atggatggcatccccacgaccccaccccacctgcctgcgatagagaggcggagacaagggtacattaataattggctaaaagaaatgtcgctcgctggtacacccatgcggccatgcgccatggttcagcttgaacaggggaggagagcagagcgagagggccactcgggttggttagaagaacccaatgcaagtgtgagtgagctgacggcacggcggacgcgctcgcctctcctctcctctcctctcctctcctcttcttccggctctccctctccgcatgccattccaacgcattaccggtatttttagccgccggaggagacgggtagctgcgtagccactagcgagagagagagggaggggagaaaccatagctcctggccgttctgcctgcccatccaccgcggcgccggccgtccgtctcccgtccacatccctcctcctctcctgcaaggttcctgtgcggtatggtatgctagctcggctccctgtggattcccccctcatccggaatgtgatggcgcggtggatggtgttttgatctgtgttcgcttttggcggatctggtcgcgcgcagtagcgcagaggggtcggagtcggagtcggagtcggagaagatgatgggcgggttcctctccagggtcctcctgtaagcgctcccttgctccgaatcttgtaacgtcggtgttctttgtagattgacactttgaggttggagccttatcagaggcaccagtgttccggttttaataaatctgttttttttttcaaatttggatttgtggggacccattcggagagttcagcagcctctctcttggtttaacttcactcattcgctcctccttaatatgttgctttcttcaaaacaaaacaaaacaaaacaaaaagaggaggagatgcgttcgttattgtcgatttgcccaccctggcctcttcgccggaaaatgaggctgagagcacgcaaccattcggaagtattttattcttctcgaggagcatatgggggcaagtttttaattcattgcacaacggtcaatggttctgttcgtttattcttccggtccgactcattctttttgaagatgatgttctaacaatcatatctcttcaaatggttaagatcggaggatactctcgtatgagttaagataggtcaaactgctatgctcttttttaaaaaaaaatctttggcctgcttcatcaagaactagatttgatcctgttcatctctgtgttgatgaattatctacagtttagctataaacgcgtctgaaatgttagtctattgaaggatactttgatactgaagccatgcagctttaaattgccagcttttcttttttgtggtttattacggatgaataaaaggggaaaaacaaaa

SEQ ID NO: 153818 - DNA, 1980 bp, Zea Mays
atggatggcatccccacgaccccaccccacctgcctgcgatagagaggcggagacaagggtacattaataattggctaaaagaaatgtcgctcgctggtacacccatgcggccatgcgccatggttcagcttgaacaggggaggagagcagagcgagagggccactcgggttggttagaagaacccaatgcaagtgtgagtgagctgacggcacggcggacgcgctcgcctctcctctcctctcctctcctctcctcttcttccggctctccctctccgcatgccattccaacgcattaccggtatttttagccgccggaggagacgggtagctgcgtagccactagcgagagagagagggaggggagaaaccatagctcctggccgttctgcctgcccatccaccgcggcgccggccgtccgtctcccgtccacatccctcctcctctcctgcaaggttcctgtgcggtatggtatgctagctcggctccctgtggattcccccctcatccggaatgtgatggcgcggtggatggtgttttgatctgtgttcgcttttggcggatctggtcgcgcgcagtagcgcagaggggtcggagtcggagtcggagtcggagaagatgatgggcgggttcctctccagggtcctcctgttggcttttggctatgcctatcctgcctacgaatgctacaagactgttgaactgaacaaaccagagattgcgcagctcatattttggtgtcagtattggtaaggcgtttcaataaattattatgcggtcgcaatattgacttccgtgaacaatctgccaaatttaggtttgtttcctgtgtctaggattttagttgccctgttgacagttttggagagattcggagatttcacaatatcatggctaccgttctactcggaagcaaagctgatgttctttgtatacttgtggtaccctaagacaaagggaactacgtatgtttatggaactttctttaaaccatatatttctcagcatgagaatgaaatcgaccggaatctccttgagctgagagctcgagccaccgacacggttgtactttattttcagaaggctgcttcggcaggacaaagtactttctttgacgttttaaaatatgttgctgcccagtcaccttctcagaaatcaaggcaacgccttcatcaggattcacagcagccgccacaacaacaacaaccacaagtgcaggtgcagcaggcgcaaccacaaaaacaagcagcacctgttatgcgcagagcatcatctattgctgctcggcaagcagcaatggcacagcaatctcaggagactaaacccgtttcatcttcgcccaagatcaagcgtcaaacatcagcgagatctggttcagtggcatccacaaagcctccggtagctgcatccgcgctaaaacctggtggtagcccaaagaaaggcgaggtcaaacctgctgccgacccagttcaaactccaaccacaggtgccgattcaccgaaacccgagcctagcgccccatcactccctggagccgaaggggtggacaagatggccatcgacgaggccagtggtgacgccccagagggcgcagaagagcttgaccctgcgctcgaagaggagacgccgatggaggagacgatccgtgtgacgcgcgccaagctaaggaggcgcacggccaccgaagatcctgctgggaattagctgtaggccattgtttttcctttccctgcacattgtgttgatctttttttgggttttaggctgtcatgttgtttggtggaatggagatgtgttgttgaattggttctttgtgacacagttgattatcttgtttctgtgcttttttggtgcccttttcttgttatttaagttgtaagtaacactttctctccgcatgtgaatacaggttagcggcacgagcaaagaacgcatgcaattgcaacattatacacttcaatctggtcactccctgagt

SEQ ID NO: 153819 - DNA, 1624 bp, Zea Mays
cactcgggttggttagaagaacccaatgcaagtgtgagtgagctgacggcacggcggacgcgctcgcctctcctctcctctcctctcctctcctcttcttccggctctccctctccgcatgccattccaacgcattaccggtatttttagccgccggaggagacgggtagctgcgtagccactagcgagagagagagggaggggagaaaccatagctcctggccgttctgcctgcccatccaccgcggcgccggccgtccgtctcccgtccacatccctcctcctctcctgcaaggttcctgtgcggtatgtagcgcagaggggtcggagtcggagtcggagtcggagaagatgatgggcgggttcctctccagggtcctcctgttggcttttggctatgcctatcctgcctacgaatgctacaagactgttgaactgaacaaaccagagattgcgcagctcatattttggtgtcagtattggattttagttgccctgttgacagttttggagagattcggagatttcacaatatcatggctaccgttctactcggaagcaaagctgatgttctttgtatacttgtggtaccctaagacaaagggaactacgtatgtttatggaactttctttaaaccatatatttctcagcatgagaatgaaatcgaccggaatctccttgagctgagagctcgagccaccgacacggttgtactttattttcagaaggctgcttcggcaggacaaagtactttctttgacgttttaaaatatgttgctgcccagtcaccttctcagaaatcaaggcaacgccttcatcaggattcacagcagccgccacaacaacaacaaccacaagtgcaggtgcagcaggcgcaaccacaaaaacaagcagcacctgttatgcgcagagcatcatctattgctgctcggcaagcagcaatggcacagcaatctcaggagactaaacccgtttcatcttcgcccaagatcaagcgtcaaacatcagcgagatctggttcagtggcatccacaaagcctccggtagctgcatccgcgctaaaacctggtggtagcccaaagaaaggcgaggtcaaacctgctgccgacccagttcaaactccaaccacaggtgccgattcaccgaaacccgagcctagcgccccatcactccctggagccgaaggggtggacaagatggccatcgacgaggccagtggtgacgccccagagggcgcagaagagcttgaccctgcgctcgaagaggagacgccgatggaggagacgatccgtgtgacgcgcgccaagctaaggaggcgcacggccaccgaagatcctgctgggaattagctgtaggccattgtttttcctttccctgcacattgtgttgatctttttttgggttttaggctgtcatgttgtttggtggaatggagatgtgttgttgaattggttctttgtgacacagttgattatcttgtttctgtgcttttttggtgcccttttcttgttatttaagttgtaagtaacactttctctccgcatgtgaatacaggttagcggcacgagcaaagaacgcatgcaattgcaacattatacacttcaatctggtcactccctgagt

SEQ ID NO: 153820 - DNA, 1619 bp, Zea Mays
cactcgggttggttagaagaacccaatgcaagtgtgagtgagctgacggcacggcggacgcgctcgcctctcctctcctctcctctcctctcctcttcttccggctctccctctccgcatgccattccaacgcattaccggtatttttagccgccggaggagacgggtagctgcgtagccactagcgagagagagagggaggggagaaaccatagctcctggccgttctgcctgcccatccaccgcggcgccggccgtccgtctcccgtccacatccctcctcctctcctgcaaggttcctgtgcgtagcgcagaggggtcggagtcggagtcggagtcggagaagatgatgggcgggttcctctccagggtcctcctgttggcttttggctatgcctatcctgcctacgaatgctacaagactgttgaactgaacaaaccagagattgcgcagctcatattttggtgtcagtattggattttagttgccctgttgacagttttggagagattcggagatttcacaatatcatggctaccgttctactcggaagcaaagctgatgttctttgtatacttgtggtaccctaagacaaagggaactacgtatgtttatggaactttctttaaaccatatatttctcagcatgagaatgaaatcgaccggaatctccttgagctgagagctcgagccaccgacacggttgtactttattttcagaaggctgcttcggcaggacaaagtactttctttgacgttttaaaatatgttgctgcccagtcaccttctcagaaatcaaggcaacgccttcatcaggattcacagcagccgccacaacaacaacaaccacaagtgcaggtgcagcaggcgcaaccacaaaaacaagcagcacctgttatgcgcagagcatcatctattgctgctcggcaagcagcaatggcacagcaatctcaggagactaaacccgtttcatcttcgcccaagatcaagcgtcaaacatcagcgagatctggttcagtggcatccacaaagcctccggtagctgcatccgcgctaaaacctggtggtagcccaaagaaaggcgaggtcaaacctgctgccgacccagttcaaactccaaccacaggtgccgattcaccgaaacccgagcctagcgccccatcactccctggagccgaaggggtggacaagatggccatcgacgaggccagtggtgacgccccagagggcgcagaagagcttgaccctgcgctcgaagaggagacgccgatggaggagacgatccgtgtgacgcgcgccaagctaaggaggcgcacggccaccgaagatcctgctgggaattagctgtaggccattgtttttcctttccctgcacattgtgttgatctttttttgggttttaggctgtcatgttgtttggtggaatggagatgtgttgttgaattggttctttgtgacacagttgattatcttgtttctgtgcttttttggtgcccttttcttgttatttaagttgtaagtaacactttctctccgcatgtgaatacaggttagcggcacgagcaaagaacgcatgcaattgcaacattatacacttcaatctggtcactccctgagt

SEQ ID NO: 153821 - DNA, 1654 bp, Zea Mays
cactcgggttggttagaagaacccaatgcaagtgtgagtgagctgacggcacggcggacgcgctcgcctctcctctcctctcctctcctctcctcttcttccggctctccctctccgcatgccattccaacgcattaccggtatttttagccgccggaggagacgggtagctgcgtagccactagcgagagagagagggaggggagaaaccatagctcctggccgttctgcctgcccatccaccgcggcgccggccgtccgtctcccgtccacatccctcctcctctcctgcaaggttcctgtgcggtatggtatgctagctcggctccctgtggattcccccctcatccggaatgtgatggcgcggtggatggtgttttgatctgtgttcgcttttggcggatctggtcgcgcgcagtagcgcagaggggtcggagtcggagtcggagtcggagaagatgatgggcgggttcctctccagggtcctcctgttggcttttggctatgcctatcctgcctacgaatgctacaagactgttgaactgaacaaaccagagattgcgcagctcatattttggtgtcagtattggattttagttgccctgttgacagttttggagagattcggagatttcacaatatcatggctaccgttctactcggaagcaaagctgatgttctttgtatacttgtggtaccctaagacaaagggaactacgtatgtttatggaactttctttaaaccatatatttctcagcatgagaatgaaatcgaccggaatctccttgagctgagagctcgagccaccgacacggttgtactttattttcagaaggctgcttcggcaggacaaagtactttctttgacgttttaaaatatgttgctgcccagtcaccttctcagaaatcaaggcaacgccttcatcaggattcacagcagccgccacaacaacaacaaccacaagtgcaggtgcagcaggcgcaaccacaaaaacaagcagcacctgttatgcgcagagcatcatctattgctgctcggcaagcagcaatggcacagcaatctcaggagactaaacccgtttcatcttcgcccaagatcaagcgtcaaacatcagcgagatctggttcagtggcatccacaaagcctccggtagctgcatccgcgctaaaacctggtggtagcccaaagaaaggcgaggtcaaacctgctgccgacccagttcaaactccaaccacaggtgccgattcaccgaaacccgagcctagcgccccatcactccctggagccgaaggggtggacaagatggccatcgacgaggccagtggtgacgccccagagggcgcagaagagcttgaccctgcgctcgaagaggagacgccgatggaggagacgatccgtgtgacgcgcgccaagctaaggaggcgcacggccaccgaagatcctgctgggaattagctgttagcggcacgagcaaagaacgcatgcaattgcaacattatacacttcaatctggtcactccctgagtatcttcgggatgtcacatccagccgcaattttcagccggcagggaaacaagaacagctgtttttctatcattctctgtgtacatgtatctgtttgagtccctggtacacgctgcagttagtctggc

SEQ ID NO: 153822 - DNA, 1730 bp, Zea Mays
actcgggttggttagaagaacccaatgcaagtgtgagtgagctgacggcacggcggacgcgctcgcctctcctctcctctcctctcctctcctcttcttccggctctccctctccgcatgccattccaacgcattaccggtatttttagccgccggaggagacgggtagctgcgtagccactagcgagagagagagggaggggagaaaccatagctcctggccgttctgcctgcccatccaccgcggcgccggccgtccgtctcccgtccacatccctcctcctctcctgcaaggttcctgtgcggtatggtatgctagctcggctccctgtggattcccccctcatccggaatgtgatggcgcggtggatggtgttttgatctgtgttcgcttttggcggatctggtcgcgcgcagtagcgcagaggggtcggagtcggagtcggagtcggagaagatgatgggcgggttcctctccagggtcctcctgttggcttttggctatgcctatcctgcctacgaatgctacaagactgttgaactgaacaaaccagagattgcgcagctcatattttggtgtcagtattggattttagttgccctgttgacagttttggagagattcggagatttcacaatatcatggctaccgttctactcggaagcaaagctgatgttctttgtatacttgtggtaccctaagacaaagggaactacgtatgtttatggaactttctttaaaccatatatttctcagcatgagaatgaaatcgaccggaatctccttgagctgagagctcgagccaccgacacggttgtactttattttcagaaggctgcttcggcaggacaaagtactttctttgacgttttaaaatatgttgctgcccagtcaccttctcagaaatcaaggcaacgccttcatcaggattcacagcagccgccacaacaacaacaaccacaagtgcaggtgcagcaggcgcaaccacaaaaacaagcagcacctgttatgcgcagagcatcatctattgctgctcggcaagcagcaatggcacagcaatctcaggagactaaacccgtttcatcttcgcccaagatcaagcgtcaaacatcagcgagatctggttcagtggcatccacaaagcctccggtagctgcatccgcgctaaaacctggtggtagcccaaagaaaggcgaggtcaaacctgctgccgacccagttcaaactccaaccacaggtgccgattcaccgaaacccgagcctagcgccccatcactccctggagccgaaggggtggacaagatggccatcgacgaggccagtggtgacgccccagagggcgcagaagagcttgaccctgcgctcgaagaggagacgccgatggaggagacgatccgtgtgacgcgcgccaagctaaggaggcgcacggccaccgaagatcctgctgggaattagctgtaggccattgtttttcctttccctgcacattgtgttgatctttttttgggttttaggctgtcatgttgtttggtggaatggagatgtgttgttgaattggttctttgtgacacagttgattatcttgtttctgtgcttttttggtgcccttttcttgttatttaagttgtaagtaacactttctctccgcatgtgaatacaggttagcggcacgagcaaagaacgcatgcaattgcaacattatacacttcaatctggtcactccctgagt

SEQ ID NO: 153823 - DNA, 1318 bp, Zea Mays
ttagaagaacccaatgcaagtgtgagtgagctgacggcacggcggacgcgctcgcctctcctctcctctcctctcctgttggcttttggctatgcctatcctgcctacgaatgctacaagactgttgaactgaacaaaccagagattgcgcagctcatattttggtgtcagtattggattttagttgccctgttgacagttttggagagattcggagatttcacaatatcatggctaccgttctactcggaagcaaagctgatgttctttgtatacttgtggtaccctaagacaaagggaactacgtatgtttatggaactttctttaaaccatatatttctcagcatgagaatgaaatcgaccggaatctccttgagctgagagctcgagccaccgacacggttgtactttattttcagaaggctgcttcggcaggacaaagtactttctttgacgttttaaaatatgttgctgcccagtcaccttctcagaaatcaaggcaacgccttcatcaggattcacagcagccgccacaacaacaacaaccacaagtgcaggtgcagcaggcgcaaccacaaaaacaagcagcacctgttatgcgcagagcatcatctattgctgctcggcaagcagcaatggcacagcaatctcaggagactaaacccgtttcatcttcgcccaagatcaagcgtcaaacatcagcgagatctggttcagtggcatccacaaagcctccggtagctgcatccgcgctaaaacctggtggtagcccaaagaaaggcgaggtcaaacctgctgccgacccagttcaaactccaaccacaggtgccgattcaccgaaacccgagcctagcgccccatcactccctggagccgaaggggtggacaagatggccatcgacgaggccagtggtgacgccccagagggcgcagaagagcttgaccctgcgctcgaagaggagacgccgatggaggagacgatccgtgtgacgcgcgccaagctaaggaggcgcacggccaccgaagatcctgctgggaattagctgtaggccattgtttttcctttccctgcacattgtgttgatctttttttgggttttaggctgtcatgttgtttggtggaatggagatgtgttgttgaattggttctttgtgacacagttgattatcttgtttctgtgcttttttggtgcccttttcttgttatttaagttgtaagtaacactttctctccgcatgtgaatacaggttagcggcacgagcaaagaacgcatgcaattgcaacattatacacttcaatctggtcactccctgagt

SEQ ID NO: 153824 - DNA, 1018 bp, Zea Mays
aagtcctcctggatcacactccaccacgattgccaagtgtcaaatcagcaggcgtgggcgtacgatctggacacggcagcaggagcctttgggccgtcgttacacgcacctatccatctcatctccgcggcacacggcacgacacgatcgtggttggtgttggttacacgcgcctatatcgccggttcggccgcacgtccgcctcctcctctcctcccctcttctcactcagctcaccagtgctcgctcacctttcccctccctttcctttcctttgctttcctatccttgtgccctcgaactcgaatcggaaacccagccagccatgtcgtactacggcgaccggcgcgcggagtcgtcgatcgtggaggcgttcacgctgtcgccgctgccgtacccggtgatcctggtgctgctgatggtgacgctgctgctgggcgcctcgtggttcttcacgtacgacgacttcatcgaggaggcgtcgcagcagctgagctgggcgctgctgggcgtgcccatcgcgctcgtcctcctcatccgctggatctcctccgtcgactccttcgagggctacctgggcttctacccgagggagagccgctggaagggccgctacgagcggggccccgccgagggcagctcgccctggggcgtcgccttgctcgtcctcctcctcctcgtgctcgccagcttccactccaccatccacgacatgtgggggccgtgaacggccggatgtgggtcctgctcctgttcgattccacgcgcgcacgtatgcgattgtactgctggttgctgcttgatcgatcgatggatcgatgattccatgtacatatttgatagggggatgctgctgctaggctattagctgcaggctatagagtttgagggtgatatacttatcagtttgctgcctgtaagactggttttggttttgctataatcgtgatgtattcagatgtacagtaccctctttgctttggtttccctgtcttggaattgactgctggaaccgtct

SEQ ID NO: 153825 - DNA, 435 bp, Zea Mays
aaagattactgaatcaaaatttcaagttgaacaggccatagatcagacaaacagctaacatagaattataggggggaagaagtcttgtatgctaataataactcaaaatctctcttgcgagcacacagggagcacaaagaaaaagattgtcgatgacattgctgaacttcacgtccttacacgtcggcaatggtcacctcaacctcaacaccgggctcaattgtgatggaggtgatctgcttcaccacatcaggggagctgattaggtcaatcaccctcttgtgaatgcggaactcaaaccgatcccatgtcttgataccttcaccgcaaggggacttgcgagtggtgatgtggagaaccttagtagggatcctgacaggtcccttaaccctcaaatgcttgtccttggctccctttaccaaatccgcacaaact

SEQ ID NO: 153826 - DNA, 918 bp, Zea Mays
gggaggggcaacatggtctaaagaaaaccttaacgactctcagtgaggcttaaagccgcgctatgccgtgctggagatcgtcacatgtcacaggaatccggaggtagcttctggggagaagaagatcagatggtcatcaagggctgtgcggtcttttgcgatggcagagctggaggcccggaagatgaggtaccctaccacaggcaccgaggggctcctcatgggcattcttgttgaaggaactagtggcgcagcaaaacttttgcgtgctaatggaaccacacttctcaaagtgcgtgaggaggcagcgaatgttcttgggaaatcagaaatgttttactttagtcccatgcatccaccattgacagaagctgcacaacgagcccttgattgggctgtcaatgaaaaattgaaatcaggtgaggatggagaagtaaccgccaatcatttgctactggggatatggtcagataaagagtcggctggtcataaaatcctgtattcgcttggatttgacgatgagaaagccagtttactggccaaaacggctggtgaagaggctgcaatgagtcttagagagcaaggagagcacctaatttattcgtcaacttaagttggtattgtgcactagcttttatgcacttcttggtgcctcgagacgttgacctggagaggctgcctctacaaactttagaacttattatggagatatgttaggtcagatacgatatttgtactctcacgattgccgatgcctgtgaaaacgttgcgctttgtttgtcacggtgaatgcttgtgttcctttatcagctggatttgggaactgctcgtagaaaacaagtcaacaacaacaaaacttgtagggtccagtgggcctgacgagtccttaaaaaaatttgttcacttgcagcctaaatc

SEQ ID NO: 153827 - DNA, 1121 bp, Zea Mays
attccaaatttctcgatcaaacatgctctattgccctgtatctatcctctatcgaagccggagaccccagaaagagtccgtaaacaactcccggccatggcgaccgcagaccgggtcgccgccaccttcctctcctctttccccactcaccatccccgccccttttcctccgtttccctcgtgacaaaccctgtcctacccgtctcccttcgggccgctgtcacaggtggcccacggctcgcctcccgtctccgggtccaccgcgtcggcgccgccgtcgcccagcttcccaccacgaatccggaggtagcttctggggagaagaagatcagatggtcatcaagggctgtgcggtcttttgcgatggcagagctggaggcccggaagatgaggtaccctaccacaggcaccgaggggctcctcatgggcattcttgttgaaggaactagtggcgcagcaaaacttttgcgtgctaatggaaccacacttctcaaagtgcgtgaggaggcagcgaatgttcttgggaaatcagaaatgttttactttagtcccatgcatccaccattgacagaagctgcacaacgagcccttgattgggctgtcaatgaaaaattgaaatcaggtgaggatggagaagtaaccgccaatcatttgctactggggatatggtcagataaagagtcggctggtcataaaatcctgtattcgcttggatttgacgatgagaaagccagtttactggccaaaacggctggtgaagaggctgcaatgagtcttagagagcaaggagagcacctaatttattcgtcaacttaagttggtattgtgcactagcttttatgcacttcttggtgcctcgagacgttgacctggagaggctgcctctacaaactttagaacttattatggagatatgttaggtcagatacgatatttgtactctcacgattgccgatgcctgtgaaaacgttgcgctttgtttgtcacggtgaatgcttgtgttcctttatcagctggatttgggaactgctcgtagaaaacaagtcaacaacaacaaaacttgtagggtccagtgggcctgacgagtccttaaaaaaatttgttcacttgcagcctaaatc

SEQ ID NO: 153828 - DNA, 968 bp, Zea Mays
attttgagctgttatttttttcttagtcttacatctcttggaagttagcacaatgataggctactacttcccttcgagtcttttttattattgttttactggacaatttggtgatattcatcccggaattattgtgtctttaggaatccggaggtagcttctggggagaagaagatcagatggtcatcaagggctgtgcggtcttttgcgatggcagagctggaggcccggaagatgaggtaccctaccacaggcaccgaggggctcctcatgggcattcttgttgaaggaactagtggcgcagcaaaacttttgcgtgctaatggaaccacacttctcaaagtgcgtgaggaggcagcgaatgttcttgggaaatcagaaatgttttactttagtcccatgcatccaccattgacagaagctgcacaacgagcccttgattgggctgtcaatgaaaaattgaaatcaggtgaggatggagaagtaaccgccaatcatttgctactggggatatggtcagataaagagtcggctggtcataaaatcctgtattcgcttggatttgacgatgagaaagccagtttactggccaaaacggctggtgaagaggctgcaatgagtcttagagagcaaggagagcacctaatttattcgtcaacttaagttggtattgtgcactagcttttatgcacttcttggtgcctcgagacgttgacctggagaggctgcctctacaaactttagaacttattatggagatatgttaggtcagatacgatatttgtactctcacgattgccgatgcctgtgaaaacgttgcgctttgtttgtcacggtgaatgcttgtgttcctttatcagctggatttgggaactgctcgtagaaaacaagtcaacaacaacaaaacttgtagggtccagtgggcctgacgagtccttaaaaaaatttgttcacttgcagcctaaatc

SEQ ID NO: 153829 - DNA, 1368 bp, Zea Mays
ctcccctctctcgctccctctctctctgccttgccttcccttccccagttgccctcgccattgtttatcccggcctataactagtataagcccaacccccggccactggaccacagcagggtcgcagtgccacggagggaaaaggatcgagatagataaaaaaggtagtcgtccgtcctccagggcagctagcgccggcgcacctgaggggcaatgagcgctggaggcggcgccggcgccagcacgctcggcggtgggggcccgagcggcagcggcagcggcagcggaggctctggagctggagtaatcggcggcggcggcggcggcggcgccggcgggccctgcggcgcgtgcaagttcctccggcgcaagtgcgtcagcggctgcatcttcgcgccctacttcgactcggagcagggcgcggcgcacttcgcggccgtgcacaaggtgttcggcgccagcaacgtgtccaagctgctgctccagatcccgccgcacaagcgcctcgacgccgtcgtcaccatctgctacgaggcccaggcgcggctccgtgaccccgtctacggctgcgtcgcacacatcttcgcgctccagcagcaggtggtgaatctccaggccgagctgacctacctgcaagcgcacctcgcgacgctggagctgccgtccccgcctccgctgccggccccgccgcagatgccgatgccaggcccgttctccatcgccgaccttccgtcgtcgaccagcgtccccaccaccgtcgacctgtccacgctcttcgacccgccgccgcagtgggcggtccaccagccgcaccaccaccaccaacagctgcagcagcaccagctccggcaaccggcgccgtatggcgcgcccgtcaggccgggcggcggcatggccgcagagagctcaggcggcggcagcggggacctgcagtcgctggcgagggagctcctggaccgccaccgctcaggcggcgtcaagctcgagccgccgccgccgcactcgagatgagctggatgaagggtggtagaacgatcaaacaccgtggatcggagaacgaggtgagggagtttggcgcgcgcgcggcagtggcgagggagataggggtcggtgacgggcgatggccagcaggagtagccgagtaggtaagcagcattggccgggttttcgcgtatccatcttgttgttaaccagctggggtgcaatggcgccccaccactttcatatatgctccagtttgattatattttctccatgacaaaacaagagtgctagctggggcatcgagagtagtactagaattgacatgtattagtaacattattacctttgtcaccgttccattaattgcaagatttttattaagag

SEQ ID NO: 153830 - DNA, 824 bp, Zea Mays
caatttactgttggtgcatgaataatgtcacgtacgtccggcctttggatccccaggtggtgaatctccaggccgagctgacctacctgcaagcgcacctcgcgacgctggagctgccgtccccgcctccgctgccggccccgccgcagatgccgatgccaggcccgttctccatcgccgaccttccgtcgtcgaccagcgtccccaccaccgtcgacctgtccacgctcttcgacccgccgccgcagtgggcggtccaccagccgcaccaccaccaccaacagctgcagcagcaccagctccggcaaccggcgccgtatggcgcgcccgtcaggccgggcggcggcatggccgcagagagctcaggcggcggcagcggggacctgcagtcgctggcgagggagctcctggaccgccaccgctcaggcggcgtcaagctcgagccgccgccgccgcactcgagatgagctggatgaagggtggtagaacgatcaaacaccgtggatcggagaacgaggtgagggagtttggcgcgcgcgcggcagtggcgagggagataggggtcggtgacgggcgatggccagcaggagtagccgagtaggtaagcagcattggccgggttttcgcgtatccatcttgttgttaaccagctggggtgcaatggcgccccaccactttcatatatgctccagtttgattatattttctccatgacaaaacaagagtgctagctggggcatcgagagtagtactagaattgacatgtattagtaacattattacctttgtcaccgttccattaattgcaagatttttattaagag

SEQ ID NO: 153831 - DNA, 1627 bp, Zea Mays
tgtcagatggatttaaggatatccgagggttcgggtactaataccaccttggatgaccaatcggtacaatcgccgaccagaagggcaaaggtttgggagtattttcaacaagagttagttgaggttgatggagtgatgaaggctgtttgcaaatactgtgggactaagctgacaagtaaaaggaattcaggaacaaatagccttagaaaccatgttgcagatacatgtcctaaaatttcagttgaggatcgcaagcgattcattgctacaatgagaaaaaagccaggagaaggttcatttgtgtttgaccctcgaaagactcgtgagtgcatggttaagtggtgcatcagtgccgaggtcgcattcaacaagtttgatgatcctttctttgccccgtggatggagtcattgcaaccatcgttcagcggtgttgggcgtcagacaatgagaaatgattgtattgccagattcaagatgatgaggcaagagctaaggaatgagctacagagtcttaactctcggatttgcttgacatctgatctttggacctcaaattagaagttgggttatctttgcttgacagcccactacattgatgcaaactttatcttgaaaaagaagactattgcattcaaagatgtcaaatatccacacacgggcctagcaatcgaagaagtaattacgaagtgtctcatagagtgggggataaaagagaaggtgtttactatcacattggataaatgagaagatgattatggaggccattgagtacaaagttgtcttaaagagatatgctgaggaacaacttgagccttcaccagatgatgaagagtggacaaattctgaggcgattggagagtttcttggggcatttgaggaagctacaaaagcattctcagcacatagaagtccaacatctcatttgtttttgcataatgtgttatgtatccatcaagctctaagaaatgaaaattggcaaaccagttgtgtgcttgaggatttggcactagcaatggattctaagttcgataaatactgggagaagggcaagtataatatggcacttgtcatagccactatacttgacccatcaaagaagatggattttttggactttttttatgagaagacgtgtcaacagtttatcgacatgtccttggccaaaacaatggttcaccaatttttttggtgaatatgcaaaaattgttcaaaaagatactacagtctcacctattgttgctacaaatactagtactttgggcttaccgattcttggaaaaagaaggttggataaagaattttctcagtggtcccaaacaagaggaagacgtcttgcaaagtctgagcttgacgcatacttagaagaagaatttgtgagaacagatgaaagatttgaaattctaagttggtggaggacaaatgcaaacaaatacccagtgctttcagctatggcgcgtgatttattagcaatacctttgagcactgttccttcggagtttgcttttagcgccggtggtcgcattcttgctgataatcgaagctcaatgacaccagaaacacttgaatgccttgtatgctgcaaggattggttgtatgaatacccaaatattcaaggtacttgataagt

SEQ ID NO: 153832 - DNA, 88 bp, Zea Mays
cgttcttcatcaggaaactcttgaagcgacctggtgtttgcgaatgaccgctcgtgcatcagggcacatcaaagctcactgattttgc

SEQ ID NO: 153833 - DNA, 2830 bp, Zea Mays
cgggaagaaacctgtcaacgccgcccgccaaccaaccctatagcgccgccgtcttctcgtcgtttggaatgaaagaacaggcaggtcaatcaaaaggtctgcgggcgagaagcaaaaacgcagcacgctagtcgccccgccgtccactggcaccggcaggccagcgcgctcgtcggctccctcgcggtctctctcgccctgctgcgcgggccgcggcatgccgcgccagcaggcggatcctgtacgcgtccacctgtgcctgtgcctgtgcctccttaattccaagtggttgagcgtcctccagtaaccaccatcattaataggccaccctccccaccccacctctcgcccttcccagttgcttggccccacctgacatgtcttggtcttctgaattctgatgatggagctcccagtcgtcaatcatgtcgtgtctggctccctcggcagcagggcaagagtagccgccgtaacacggtcggattacgctgatgttacggagcagtggtatacgggtttcccactcgctcgtagtacttgaaccactcgtgtacggcatacggttcgaagaagagtggttgcctcgcgtgcctacaaatttgactgctccggcagctggatacgccacaagtttcaacgggcaggtgcttccattcccctccgtctccctatatatatttggagttgcccgcgtgaccaactcacacataagaggcgacatcacatcgcgttccgccgcctcacacgctagttggagctgtagtattagccaaccagccagcctccgatctccatccatatggaggaggctgcgcccgcggcggtcatggagcgggagcgcctcacggccgagatggccttccgcggcgcggacgaagctcggcgggaaggcggcgacccggcgcccagcatcgtcatcaagatccgccgccggctcccggacttcgcccgcaacatcaagctcaagtacgtgaagctcgggatccgccacggcggcagccccacgtcgctgctgccggcgctctgcgtgccggcggtcgccgccgccgcctactcgttcgtccgcctcgacgtcatctactactccgtcgacctgctcacctgcgtcgcctggctcggcaccgcgctgctgctgctcaccgtctactacctcaagcggccccgccccgtgtacctcgtcgagttcgcgtgctacaagccggaggagcggctcaagatctccaagtcggccttcctcgagatgaccgagagcaccggctccttcaatgaggcggctctggacttccagaccaagatcaccagccgctccgcgctcggggacgagacgtacctgcccccgggcgtccaggcgcgcccgcccaggctaaacatggcggaggcgcggaaggaggccgaggcggtcatgttcgggtgcctggacgcgctgttcgagtccacggggatcgacccgcgccgcgacgtgcgcatcctcatcgtcaactgcagcctcttcaacccgacgccgtcgctggcgtccatggtcatcaaccactacaggatgagggaggacgtcaagtcgttcaacctcggcggcatggggtgcagcgccggcctcatcgccgtcgacctcgccaaggacatgctccaggcgaaccccggatcgtacgccgtggtgctcagcaccgagaacatcaccctcaactggtacttcggcaacgaccgctccatgctcctctccaactgcatcttccgcatgggcggggccgcggcgctgctgtccaacaggcgcgcggacgccgggcgcgccaagtaccggctgctccacacggtgcgcacccacaagggcgccaccgacgagtgcttcaactgcgtgtaccagcgcgaggacgaggccggcaaggcgggcgtctcgctggcgcgggagctcatggcggtggccggcgacgcgctcaagaccaacatcacgacgctggggcccctggtgctgcccctgagcgagcagctcaagttcctcaggtccctgatgatgcgccgcgtgttccgcgtagggggcgtgcgcccctacatcccggacttccggcgcgcgttcgagcacttctgcgtgcacgccggcggccgcgcggtgctggaggaggtgcagcgcagcctgagcctgcgggacacggacatggagcccagcaagtgctccctccaccggttcggcaacaccagcagcagctcgctgtggtacgagctggcgtacgccgaggccaagggccgggtaaggcgcggccaccgcgtgtggcagatcggcttcggctccgggttcaagtgcaacagcgccgtgtggcgcgctctacgcgacgtgccgccgctgccgtcgtcgcccggcgccgcggcggggccgggggccaggaaggggacctgctgcaacccctgggtggacgacgtggacaggtaccctcccaaggcgtacgtctgatgggccacgtcacgtggccacaacaactgcatgatcccaatcccattcggatttcctcacgacgaattaatgaagaagggcgtgtgagtgtgagggagaaagttatacttgtatgtattttttttttcagttttattttgtcgtttcgttttcctttctttttcccagtaggttgccgtacgtgagtagacaatgctggcttttggaattcagagatgtagtatgtggtgtaaaatgaattccaaaaggtagcagtgcctaccctatttgttgtctagttcttttatctcccttggcgttctagacgcccgtccggggaggtagaacggacagacgaacccaacagtgtgcaagatcacatgactagagaatcatcgaccaatgcaagtg

SEQ ID NO: 153834 - DNA, 1249 bp, Zea Mays
acaagcacaaaacacacagagcccttccagctccacctgcagagagcagcgcacaggcacacgccgcgagtggcgagacccaaaccagcagccatgcagatgcagctcagcgttccgccgcaggttgtcgtgtgtctcgcgttagcctttctgctcccgtgccacgccacggcgacggccccggccggcacgatacggcgcgtgaccaagcagcagatcctggcgagcatcccgccgcactgggacgagaaccccgtgctgttcctgacgtcgccgtcggggaagtacgcggcgtacttcatgcgcagccagaccgagccgggcgccggaggcctgggcgccgacttctgctacgtcgaggtgctcgacacgacggcgccgggcgccgagggccggagcgtgtgggagtcggagtgcatggccgtgagcaccgtgaacacgtgcgcgctcgtgttctcgtggaacggcctggaggtgttcgacgggagcacctcggtgtggcacacccacgacgcgcagtccgacgaccagaacttcctgcagacgctgcagctggtggaccagggcgacatgcgcatcctcgacaagggcggcgagctggcgtggaaggccagcgacgagccgcgcgccgcgcagcgctgcgggatgcccggctcgcccggcctcgcctccgctctgcccccgttcgccgaaccgataggccacgggagcagcgacctgccgtttggacagggagacgcttacggcaacggcgtcggagtcggagtcggtgttggtgctggcggcgcggcgcaacccgaggcaccgcttgcggcgcctttgccgcagcccgagtcgttgccactggcgccgctacctcaggaagccgatcagttcggtggcgccgccgccgccgccgcggggcagggacagaccgtgcaggatgtggggcagacgttcggattcggcaaccagccgctggtggacaacagcccgtacgacagtggggcgctcaagcatggatgcagcctggtggggaactcggttgctttgggtctcagcgttgccgtcgccatgggtctgggcctctgagttcgagacatgccagcgtgcaaacggttgtggtgtgctaaactcttgttattatctccggcacaagaagccggtagatgtattgtgtttgggggtggttcttgtttggtgatgtcagtggggtattgtcgttgtagtctaatcttgagactgcaaattgtttgttagaaagctcagc

SEQ ID NO: 153835 - DNA, 1100 bp, Zea Mays
atcatccagactcaccgccttccgttcctcatcaaatatacgcatctctcccgacgaagaaggtgcagcaaccagctgcagggctccgacatgggcgctctagttccccagcaagctgcggttcttttggctgcgctcttggtcttggccgtcagcttattaggcaagacggcttggaaggccgaggcggcagcgccgccggcggtcgtggttggctccgtcaagtgcttggactgctcccccagcgatgtcgatgccttcaaagacctgcaggtagcgatcaagtgcaagtccggcgccgacgagggctacgagacgaaggcgcgtggccccctggacgacacgggcgtcttccgcatcccactcgccgccgagctcctgcgcgacgacgggagcacggaccgcgactgcttcgcccagctccgcagctcgcccgacgacacgccgtgcgtcggccaggccccgcccaggatgatcgcgcccgccagccaagtagacggcagcagcagcacgaacacgacctacctcgcggccgcggccgcggccgacacggcgctctcccccgtcgcgtgcgcctgcggcaagaagaagaagaagcacttcatgttcggcccgccgccgccgccgccgaggccgacgccgacgcccacgccagccccgacgccgacgtacgggcccccgacgccgacgcccacacccgtgccggagcccaggcctccggcgcccgaggagcccgagccgttcttcaagaagaagccgaagctcaagttcatgcgcaagaagaaaccgtgcccgccgctcgccgacgacgacacgacccggcggcctgcggcagcaggcgggcaggggcaggagaaggttcccatgaaactgaactaggggatcggagctggctcgtgcggggacagcagcagagctctaagatgttgcagtgtcagtgacgttcgtttcgtttcggttcggtgatgatgttgctgtgttgtcagtgattgtttttgttcggttcgtgtgcccgtatgtgtcgcgcggcggcattggtgtttcagcccgtttgcttgcttgtatgtgatttgagaaataaagatagaagttttcgttca

SEQ ID NO: 153836 - DNA, 1234 bp, Zea Mays
agtcctcacccatccacatcttctccttcctcaacaacaactccggtccgaacaagtggtagagatggagatcaaagcacgacagctactgctggctgtttttggcattgtaatagcgataggtttcgccaatgccgtgcaaggggagacagcgccgccggttgttgtcggcttggccaagtgctccgactgcgccaggaggaacatggacgccgaggcagctttcaaaggtcttcaggtggccgtcaagtgtaagaacagcaagggcgagtacgagagcacggccgtgggacaggtgggcaggtccggcgccttccgcgtcccgctggcggccgccgacgtcgttggcgaggacggggagctcaagtcggaatgcttcgcgcagctgcacagcgcgtcgagcgcgccgtgccccgggcaggagccctccaagatcgtcgcggcgccacccggccacgacgccaacggggagaagacgtacgtcgcgctcggcggcaaggtctaccgctcgtcgcccgagtgcgcttcggctttcctttgccaccctttcttccacagcattatgcaccaccaccacgtagggacccacaagcatgtggttattcctcacctgcctgtgcctgatcacggtcacggccattctggcgtgccagtgccacctgtcaccaagccgccggtagacgtccctgagcacaaaccggcgccggtgcccgtgccagagcacaagcctccgtcgtcgacgccggtggacactcctccgtcgacgccggtgggcactccaccatcgacgccggtggacccagcgccgtcaacgccggtgtattcgccgccgaagccaacccccagctactaccacccgccggcgcagcgcgacgctgccactggcccgtagctcttcaagaagctgctcccgtgcttcaagaagttgccttcctttcctcctgctgcgatggagactcggcactagaatgtctggtcagtgtttttttagcttttgcaggttatgctgtttcctcagaataaggctgtgaccttgattagtacacatgaagattggatcagttttaagagtgtgcgttctatctattggagatagtttgatccttatgcaatttcctgtgagctgtttttattcagtataactctgtcaagaagttgggaatgttaaattatgattgccatcaacatggtcgttgaacagtttcttgtgaactgtttttttatctagtataaa

SEQ ID NO: 153837 - DNA, 276 bp, Zea Mays
atgagccagcgtttcatcgaacaggttctcagtgcattggaggcgaccagcggaatgcgtaccagaatcggaaaggagacgctctccggaggcgcagctggctccagagcgggcgccggtgccgcggcgctaacatattgcggcgcggcggctcccccgaggcgaccccgtctcggccaaatcaaggggcgcgacaaggtggtgctgggtggccgcatcgagagcatctctactacagcagcggatagtttcgacttcgacaactgcgcggcttga

SEQ ID NO: 153838 - DNA, 2483 bp, Zea Mays
gccaagcgacgaaacctaagacggcaacgccacagcccacaacacagcacaccggcggccacaccaaagccaagcaagcagcttaggaacccacgcgcccgacgccccggccttgctgggcgtgcggcggttcgttactggctgcatttctctgccgccgtcttggcccatctgcccttcggcgccgtgccaacgccgcgggagctatagcccccgatttaaagttcagttcgtggtggtgataccagacccagcacgctctccgcccaaaattcgcctgcaaccccgagcgacgaggatgggtgaggggtcgaaggcgatgctggccaagcccatccagctcgcggaccaggtagcgcagcaggcggggtggcagtgcctcagggcggactgcacggagctacggtcccgcgccatgaagctcgccgagctcctgcggcaggcggcgcgggtggagctgtacgagcgccccgccgcgcgcgtcatggccgacacggagcgggcgctccacaaggccgcgggcatggccgcgcgctgcttccagagccactcccgcctccgccgcttcttcacgctcaacccggtgtccgggctcccgcgcactctcgccctgctcgacaccgcgctcgaggacatcgcctggctcatccgcgtctcgtccccgcaggacgacgacggcgacgacgacggcgacctgcgggggctccccaacatcgcgcagaacgagcccgtgctcggcatggtctgggacaacatcgcgcgcctccacaccggcggcctcgccgcgcgggccgacgcggccgccaccctcgcctccctcgcccggggcaactcctacttcgccaagtacatcgtcgaggaggacggcgtcgcgcccctcgtcaagctgctcaaggaaggcaccgacgacgggcaggaggccgcggccacggcgctcggcctcctctgccgcgacgaggacagcctggacaagctcctccactccggggtgtgctccgtcttcgccgctgcgctcaaggagccgccgatgcgcgtgcaggccgcggtcgcggacgccatcgcgtcgctggcgcgccacagccacaagtgccaggacctgttcgcgcagagcaacgccgtcaggcatctcgtcactcacctctcttccggaaccatcaaggagcatagcaggtattccatcggcgtgaacggctcccggaacgccgttactgcggcagcggcgaccacgacgtcgctcgacaatcttcactccgttgtgcttgccaaatcgcgaagcgtgcgccaagacgagcctggttcctcaaccaatgtgccgccgaacccgttggaaacttctactggccaacagcgggcaagagcgaaccagatgcaatcggtggtgcaatccgcgatggcggcgaccaacacgacaacgaatggagtcacgccgccgggtgcaagaccccagctgagcctcagctcaaacggttctagtggccgcggatcgcgcgaggccgaggacccggccaccaaggcgcagatgaaggccatggcggcaaaggctctgtggatgcttgcgcgcggccacgtcgaagtctgcaagagcattacagagtcccgcgcgctcctctgcttcgccaggctcctcgagggcggcggcggcggcagcgcgggaacggagctgcagttctactccgcgatggcgatcatggagatcacccgtgtcgccgagcacaacctggcgctgcggcagtccgcgttcaagcccagctccccagcagccaaggccgtcgtggagcagctcgtccgcatcgtgcgcaagggggacgacgacgacctcctgcgcccttgcgtcaccgccctgggctgcttgtcccgctcgttcaccgcgagcgagacccgcgtgatcggcccgctggtgcagctgctggacgaccgcgacgttccggtcatgaaggaggccgtggttgcgctgaccaagttcgcctgcaccgagaaccacctgcacgtgaaccactgcagggccatcgtggacgccggcggcgcgcggcacctcgtccagctagtgtacctcggagaccagctgcagatcgaggcgctcatattgctctgctacatcgcgctgcatgtcccggagaacgaggaactcgcgcaggccggcgtgctcgccgttctcctgtgggcgtcgaagcaggcacacatggtgcaggacctgcgcgttgaggcattgctcccggaagccaaggctcggttggatctgttccaatccagggcatctaggtgatgattgcagcaaccacgggtgaggatgaattttgctttgcacaatcagattaggatcgtgtccattgttctttgtcattttcaaattccagttatgttgttgttagagtgtacagatcacggtttcaaattccagttatgttattgttagaatgtacagatcacggttatacggagtatgtctcaaatgaaaaatactgattgatgtagtgcttattctt

SEQ ID NO: 153839 - DNA, 1998 bp, Zea Mays
tcggaatcatcatcaacggctagctagacacctttctctgtgtagccgagccggcggcggcgagcagcatgcacagcgccaactgtgctcatcagacgtcccgaaatcacattggtggggtggactgtgacactgtgccaactgctaattgccgtccagccgatttcccatccgaaacaggcaatcaggcattctgtccgtgtgtgaggccgatttcctaccggtcctatcaaaaccccaactgccgctttgttgaatacaacacgaaaccgatttcaggaactcaaaggttaagatcgctacttcaaggaaaaccccccctgacgtaaaccgtccgtgccaagacaacgacgtctgcgtagtagatgtagatgtagattggtccctatcgccatcgcggccaaaagtcatcgaaacagaaacagttggaccgcgtgcacttcgcgccatttcgggtaaacagcaaccttcggattcggggcttatgaaacttagtacaagggaaaccttggcttttggaaagagtttacctggtggtgctcgggcagaaggtgatggcgtatccgatgccggtggcgcaggtgaaggtggaggtggagtcgtcgtaggcgtagctgtaggcgcgcgggcaggcgttcttgaagaactgcgagtacgtcgacggccggcacgtgctggggttcccataagcgccgctgcagcagtactgcggcgtcccgaacgcctcgcacgcgctccggcacgccacggccccgccgccgccgccgccggacgacgacgcggccatgaccctcaggtcagcggggcacgcgccgttgaggtccacgaggcagcctgtggccatacacttgctcgactcggcgccggcggatccgttgcctccgcctccgccgccgccgcccgcgccctgcgggacgatgagcatcgggacgttgtagccgtcgacgaggctgacgtcgaagaagtccaggccgccggagccgtccagcgtgaactcggccagcgtggcgggcggggcggcgccggctccgccgcactggacgccgcccgagccgcagtcgcccgtggcgcaggcgaacctgccggtggcgccgtccgtggcgcagagcgtgcgcgcccacatccgccccgaccagcccgccggcgcgtccaccgccgccgacgcgccgcgcgccagcgcgaaccccgtcgtcggcagcggggccgtgccggcgcccgacagcagccccggccacaccgtgtacccgcagttgttggtcagcgtgaacgtcgccgatcgcgcggctgcaataggtcagttcagcggaggcctcagcaccggatcacggggacagcgtgcgttgctcgctcagtgcggacaagcgggaacagagcaggttagaggtgcactcacctgtaagcaggaggagcagagcaagcgagcagagagcaacatgagctgggcttcgcgccatttccatctttcacacgaggacttagctctaagctctccggctcactctgctggcttccgctgcctttgttgtaatggtaatgggccgcaacgggatggaagggggacgaccgatctttgacggcggccacttgaatttgtataggagagggacgaagcgaaggggagtttgtatctgcccgtcctggaccgactgacactaaggcccagatgtcagcctctcagccaacgtcggcacgggctcagttccctcaccgacttccaaaatatatcaacgccggtgagctaccgatcggagctggtattacctgctcgtcgggacctccatttttatagatggtagtgcgggacgggaaatattgggctacctgagcaggggggttattgacgcgggaagaaacctggaagctgaactgagcaggaaaagagaagttcgctcgtggggtttggttacgtgatgtgcttgtctcaccggtctttgagttttgagattttccatcgtctacggaaatcctcgctagcggagtaggagctgaaaaaaaaaa

SEQ ID NO: 153840 - DNA, 1879 bp, Zea Mays
caggacctgctgaccctgatcattggcaaaccaagcccaggcagcatgatcggtttcgttatgttatctactactggtcctagcagccccgacaggcccacacacacgcacagcacagagacgttggttcagccatgcctatcgccctcccactaaatctcatcgcgttcgcgacacctttctgcgaaaagatacggacatcatcaccgagcaccaagccaccatgttcgatgtttcccgtctatccaagaaactgcagaagcgcaattagcctagagattgcaggagaacagaattcaatcaggccgtcttccatctccaccttcctcgcctctctctctctctctctctaaccactgtactagaactatcattacctgagcaagattgcttctacctgtactgtgctgacattatacacctcttcccttcttgcccgtgccaatcgccattgccaggcaccacgtagagctgcattgcttcgaggccatggccatgggagttgcaacaagaatttgcttcgtagttcctgttctgatctgcacatcttccagaggagggagggccgcgacattcacgttcgtgaacaggtgcgcggcgacggtgtggccgggcatccagtcgaacgcggggagctcgaggctggacccgacgggcttcgcgctgcccgcgggcgcgtcgcgcgcggtgccggcgccgtcggggtggtccggccgggtctgggcgcgcacgggctgcgcgcaggacgccgctagcgggaaggtggcgtgcgccacgggcgactgcggctcggggtccctggagtgcgacgggcggaacgcggcgacgccggcgacgctggccgagttcacgctggaccccgccggcggcaacgacttctacgacgtcagcctcgtggacggctacaacctgccggtcgtggtggagcccgcagggggcggcggcggcggcgccacgacgacgtgcgccgcggccgggtgcgcggcggacctgagcgagcggtgccccgcggagctgcgcgccgagggcggcgccggctgccgcagcgcgtgcgacgccttcggcaggcccgagtactgctgcagcggcgcctacgccagccccagcacctgccgccccaccgcctactcgcagctgttcaagtccgcgtgcctcaggtcgtacagctacgcctacgacgaccccaccagcaccttcacctgcgccggcggccgcgactacaccatcaccttctgtcccgtcgcgccaccaagcctgaaatcgtcgagcggccctggagcaacggcggcggcaccggcaggcccgacgccgcagatgccgcggctggcaggtgggcaaggcggcggcccggacgggcagggcgtgatgctgggcgacagctcctggctcgccagcctcgccacgggcgccgcgccgccggggccggcgctccgggcctcgcccctcgtgccgctcctgctcggagtcggcggcctgctgctggtgctgtagtgccagcggcagcaacccacccccgtcacggacacgcacgcacatgcgcgtgaggcgaaagctctggtcaaagaacagcgcagcgcgggggcactggcgcacagcgaagccgtgcgctcgggttgccgccggccgtgccgacgcggacgccgatctgcccccatggaatggaagggtggtgccgtggtggctggtgtcgcgcgcgctggatgggggctgcccgtgctgggtttgtgcggggagtcgatatggtgccatttgtaaaatccgccattccttgtttttcttcttcttcttcttctttcttattgggtttgtaccgttgtgtttcacaaaagaaaggaacgtttcgcagattacagaagactagaagcaatgattatgcacg

SEQ ID NO: 153841 - DNA, 1684 bp, Zea Mays
actgggcccaaaagtgctgtgctaagttgaattacgaaagggcccgcattcggtggtctgttacctgctaccactgtgcatcaagcgaatttctcgcggtcgggcgtctaggagagagagctcacctgagcctttcccaagttgtttctcttctcttgctccgcaaaccagcgcaagcccttccctgacagcggcggcgacatggtgctcgaggcgacgatgatctgcatagacaactcggagtggatgcggaacggcgactacgccccgtcgcggttccaggcgcaggccgatgccgtcaacctcatatgcggtgccaagacccagtcgaacccggagaacacagtaggcgtgatgacgatggccgggaagggcgtccgcgtgcttgtcactcccaccagcgacctcgggaagattctcgcctgtatgcacgggttggaagttggtgctgaggcaaacttggctgcggcaatccaggttgctcagcttgcgctaaagcatcgccagaacaagaggcagcagcagaggattatagcattcatcggaagtcctgtgaagtacgacaagaaaattttggagacaatcgggaagaagctgaaaaagaacaatgttgctcttgacattgttgactttggtgaatctgatgatgaaaagcctgagaaactggaagcattgatcgctgctgttaacagcagtgatagcagtcacattgttcatgtccctcctggtgaaaatgctctctctgatgtcctcctaagcactcctatatttactggtgaagaaggtggaagtggttttgctgcttccgcagcagctgccgtagctactggagcatctggatttgaatttggtgtggacccaaatgtagatccagagttggcactcgccctgcggttgtctatggaagaagaacgagcaaggcaagaggctattgcaaaaaaggctgcagaagatacatctaataccgaaaatatcaatgcctcaagctcaaacagcgattctgttatggctgaagcagaacttgcctcaaatgctgctgctggtgacaagcaagaacagccaaaggatgatgacgatctactacagcaggcacttgcaatgtcaatggagggcggtgcttcaggatctgcagctgtgactgactccgctatggcagaagctgctcttcaaatgtctgtccaggatgcaaacatgtccagtgacactgatatgagtaaggtgtttgaagacagaacgtttgtgtcatctatccttaattcgcttcctggtgttgatcccaatgatccatctgttaaagatttgctggcatcattgcacagccagggagagcaagagaagaaggaagacaagtcagacaaaacagaagacgagaagaactgatgtagccatgttcatgcttccatgctcacaaagaaattgaacattggtctgcattggctgcgcttactctcttggctatgaaatttgcttatcctcatgtaacagtgctttgtttataacttaatgccgagggaatttgtattgtgactgcaacaatcttctcgtcataaatgttcaagtgatttcgtgtttcaagctctatttgcttgtgtttatttcaagctgtaaccaggccattcgatctcgtgtatgccgtatgcggcggatctgctcggttataagcgttgccctagaattttacagc

SEQ ID NO: 153842 - DNA, 1715 bp, Zea Mays
actgggcccaaaagtgctgtgctaagttgaattacgaaagggcccgcattcggtggtctgttacctgctaccactgtgcatcaagcgaatttctcgcggtcgggcgtctaggagagagagctcacctgagcctttcccaagttgtttctcttctcttgctccgcaaaccagcgcaagcccttccctgacagcggcggcgacatggtgctcgaggcgacgatgatctgcatagacaactcggagtggatgcggaacggcgactacgccccgtcgcggttccaggcgcaggccgatgccgtcaacctcatatgcggtgccaagacccagtcgaacccggagaacacagtaggcgtgatgacgatggccgggaagggcgtccgcgtgcttgtcactcccaccagcgacctcgggaagattctcgcctgtatgcacgggttggaagttggtgctgaggcaaacttggctgcggcaatccaggttgctcagcttgcgctaaagcatcgccagaacaagaggcagcagcagaggattatagcattcatcggaagtcctgtgaagtacgacaagaaaattttggagacaatcgggaagaagctgaaaaagaacaatgttgctcttgacattgttgactttggtgaatctgatgatgaaaagcctgagaaactggaagcattgatcgctgctgttaacagcagtgatagcagtcacattgttcatgtccctcctggtgaaaatgctctctctgatgtcctcctaagcactcctatatttactggtgaagaaggtggaagtggttttgctgcttccgcagcagctgccgtagctactggagcatctggatttgaatttggtgtggacccaaatgtagatccagagttggcactcgccctgcggttgtctatggaagaagaacgagcaaggcaagaggctattgcaaaaaaggctgcagaagatacatctaataccgaaaatatcaatgcctcaagctcaaacagcgattctgttatggctgaagcagaacttgcctcaaatgctgctgctggtgacaagcaagaacagccaaaggatgatgacgatctactacagcaggcacttgcaatgtcaatggagggcggtgcttcaggatctgcagctgtgactgactccgctatggcagaagctggtgcagttgaccctgacttagcgttggctcttcaaatgtctgtccaggatgcaaacatgtccagtgacactgatatgagtaaggtgtttgaagacagaacgtttgtgtcatctatccttaattcgcttcctggtgttgatcccaatgatccatctgttaaagatttgctggcatcattgcacagccagggagagcaagagaagaaggaagacaagtcagacaaaacagaagacgagaagaactgatgtagccatgttcatgcttccatgctcacaaagaaattgaacattggtctgcattggctgcgcttactctcttggctatgaaatttgcttatcctcatgtaacagtgctttgtttataacttaatgccgagggaatttgtattgtgactgcaacaatcttctcgtcataaatgttcaagtgatttcgtgtttcaagctctatttgcttgtgtttatttcaagctgtaaccaggccattcgatctcgtgtatgccgtatgcggcggatctgctcggttataagcgttgccctagaattttacagcgaca

SEQ ID NO: 153843 - DNA, 949 bp, Zea Mays
gatgagagagaggagagaagagaattttaggctgcttgccgcactctttttataaagccaaaaggacccgcagcaaggggggtgactgcatgcgagataggattaggaggcagagaataccacggttccgtcgccagggcgtccatccgatccgcgacgatccacaggccacagccatggcgatggcttacaagatggtaaaacccagcgcgcccccggccgatcatgcgtgtcggcggcggcggcgcacgcagccgcttctctgttctcgtgaaattaaccacgcatgcaagcagccatggctgatgacgctgtgcgcgtgcgtctgcgctcgtggttttgatttgcaggcgacggaggggatggacgtgaaggaggagtgccagcgctggttcatggagatgaagtggaagaaggtgcaccgcttcgtggtgtacaggatcgacgagcggtcgcgcgccgtgctggtggacagggtgggcggccccggggaggggtacgaggagctcgtggccgcgctgccaggtgacgactgccgctacgccgtcttcgacttcgacttcgtcagcgtcgacaactgccagaagagcaagatcttcttcatcgcctggtacgtacgtacgtacgaattcctgagctgctcgcgccttcagtttcccgtccatcgccttcgacttcgaccatgtcctgtcgtttgtctgaaggaaaagaaacctgtcctctcgatccttacaagtgcaggaaggcatgcatcacacagctcacaattgactactagaaaactgcagatccaatggctgttcaatcagtagtgcttgttgcttgcggcaatcatcccagctgcctttaagtcggtcgggatcatgacggggggaccaaaagctttcctgataagccctccctatatcactgttgcctcgagcgctctctgcacgcatcattttttttt

SEQ ID NO: 153844 - DNA, 1814 bp, Zea Mays
gatgagagagaggagagaagagaattttaggctgcttgccgcactctttttataaagccaaaaggacccgcagcaaggggggtgactgcatgcgagataggattaggaggcagagaataccacggttccgtcgccagggcgtccatccgatccgcgacgatccacaggccacagccatggcgatggcttacaagatggcgacggaggggatggacgtgaaggaggagtgccagcgctggttcatggagatgaagtggaagaaggtgcaccgcttcgtggtgtacaggatcgacgagcggtcgcgcgccgtgctggtggacagggtgggcggccccggggaggggtacgaggagctcgtggccgcgctgccaggtgacgactgccgctacgccgtcttcgacttcgacttcgtcagcgtcgacaactgccagaagagcaagatcttcttcatcgcctggtacgtacgtacgtacgaattcctgagctgctcgcgccttcagtttcccgtccatcgccttcgacttcgaccatgtcctgtcgtttgtctgaaggaaaagaaacctgtcctctcgatccttacaagtgcaggaaggcatgcatcacacagctcacaattgactactagaaaactgcagatccaatggctgttcaatcagtagtgcttgttgcttgcggcaatcatcccagctgcctttaagtcggtcgggatcatgacggggggaccaaaagctttcctgataagccctccctatatcactgttgcctcgagcgctctctgcacgcatcattttttttttgtccgaaaccctgcagcgctagttaaggtcgccggttattttatcaaatctgatctagcctgaatccacctgttgcctagatctgtcagcccaccgaaagcacgcagcgcccacgatgacagttgacagctatataggcaaaactgtccaataatccgccagccatacaattttttttttttgacaataagttagtagcaacccgtcagcagaaatgagagcaactatattttatatacatctacctttcttgatctgtccgtgtccggcaacaagagcagcagcaaacaaatcaggatcccatcgctacgagcaagcagtaccgataccgaccgagttattctactactgctagcttgtcaactcgctccagtgtccacttgttaaagcgctatgattctgctggtgcgcaggcagttaggtgttctgacgggtgggattcgtttgctcggcggttggtgccgccgcgccttttttttccttcttctttcgcgcaggtcaccggcggcgtcgaggatacgggccaagatcctgtacgcgacgtcgaagcagggcctgcggcggctgctggacggggtgcactacgaggtgcaggccaccgacccctccgagatgggcttcgacgtcatcagaggccgcgcgcaatgagagcgtgattggcgttggtgtgatgagctgagcctcccgatgatgccggtctgacgaggcttcgcgtgtgtttgctttccccccggttcttccgagagatggtgcagtgcaggggcgtggtgtgctgatgctgatgggtggagttactggagtagaagctgagggagtggcagcggattaatgaaacgtccatctccgcgacgtagaattccactgaacaatgctccagtgcaccataagctgctgcttcagatttgtttagaaagcaacgcctctctacgtacaattccgaccagagttgttatgggcttgtgaatgatccgttttttttttttgttcgaagaatatatgtcggagtttgtgtgttct

SEQ ID NO: 153845 - DNA, 1263 bp, Zea Mays
gatgagagagaggagagaagagaattttaggctgcttgccgcactctttttataaagccaaaaggacccgcagcaaggggggtgactgcatgcgagataggattaggaggcagagaataccacggttccgtcgccagggcgtccatccgatccgcgacgatccacaggccacagccatggcgatggcttacaagatggcgacggaggggatggacgtgaaggaggagtgccagcgctggttcatggagatgaagtggaagaaggtgcaccgcttcgtggtgtacaggatcgacgagcggtcgcgcgccgtgctggtggacagggtgggcggccccggggaggggtacgaggagctcgtggccgcgctgccaggtgacgactgccgctacgccgtcttcgacttcgacttcgtcagcgtcgacaactgccagaagagcaagatcttcttcatcgcctggtcaccggcggcgtcgaggatacgggccaagatcctgtacgcgacgtcgaagcagggcctgcggcggctgctggacggggtgcactacgaggtgcaggccaccgacccctccgagatgggcttcgacgtcatcagaggccgcgcgcaatgagagcgtgattggcgttggtgtgatgagctgagcctcccgatgatgccggtctgacgaggcttcgcgtgtgtttgctttccccccggttcttccgagagatggtgcagtgcaggggcgtggtgtgctgatgctgatgggtggagttactggagtagaagctgagggagtggcagcggattaatgaaacgtccatctccgcgacgtagaattccactgaacaatgctccagtgcaccataagctgctgcttcagatttgtttagaaagcaacgcctctctacgtacaattccgaccagagttgttatgggcttgtgaatgatccgttttttttttttgttcgaagaatatatgtcggagtttgtgtgttctaatttcataaaacggacaggtaaagtagtagggaggggcgccagtctcaattcctgaggtatgcagagaataatctgctctccgaccgaaaggatgcaaagtgttcagatctgaagagaacagtgaacacaacagcaactatttggcgaccaacgcagcatgtatgtagggccatactcgccgttgcagtcttcaccagcgatggaatcgccataggcaccaatgcagcatgtatgtagggccaatttggcacgaggaaagtatggtggagcacgggatcaaaaca

SEQ ID NO: 153846 - DNA, 1557 bp, Zea Mays
ggtggagggtcgagggtgtccattccctcgctctctacacttgatcaggaggaggaagataacatctccacagaaatagatatagcttcttctccctttcttggttttcttccttctccctttttttctttcttttttcgatctaaactctcgccatggatcgatcctagcatccttgctgtttttcttcccaaggattttgttagccttcctattgcagatttcttcacttcaaactaatacgacttctcccaacgactttagctttgagttctcccttttagcacttcccttccattcagcaatcaatatcgatcgaaaacctccttcttgaacaaaatagataagaggtctttgtcctacagatcaacgaaaacaagatggaaaacgttctcctggatcgatcatctagaagcctcgagtacccgagaagggcgccccttggtcgcagccggcgggggccagctggtggcgctaggccggcggtgccgggcggctcgcatagtagctccttcccgatggtccagccattcaatcacctgcggacgaaaggtggcgcgtgggcgtccgctcccgcgcttattccatacgcgaggccatccgttcctctcctaccgtccaaccaaccgccgctcctgccgctcccacccaccgccatggagtacgtcacttttcccggtctaccagcagctgctcaacccccacccccgccggcgccacgcgccggcagggcagcagcggcaaccgctacagtttccgttccggcagcagcaccagctgctcctgcgccgcgacagagggacaggaggaggaggtcggcaaggccgccgccggcggcgatggagaggtctacagcgcagaagaagaagaagccgctggagcgggcgacgcctctgccgcccgcgccagtggtgacggaggcactggacgacctcgagcaggaggtggccaggaacttcgtcgaggacctgctgcacgtgctggcgccgccgccaagcagcctgccgctgcccaggttctccgtcgtcgtgaaagcgtcccccgccaaggacgccagactggtggcgcgggcggccgcgccggcctgcaacgtggaggccgccaccgccgacagcatccgcggccttctccgtctgtaggacagcatgcaggagagagggcgtaatatatttccctccaatattatttctttggtaggggaaattaattaaatgcgtactaaaaaggtagaaaaatagtggaagaaaatatgtgacgctcgggctatggtcggtcgagttgtccacttgtccgtagtgtgactgtgatgttggcgttggaggcttggaggcggtgcaaacagcgagagggaagacgacgacgatgtcaccgacgtatagtttgtgtgagacgtcgtgtggtagatatctagggttttacataatgtctaccgtcgtattttccactatattatactgcaggtgataggtttttgaattaccttatatcaagagatagctgcatatatatacgatgtaataatgatgtatgcaagtgtgtgacttaattttccatata

SEQ ID NO: 153847 - DNA, 106 bp, Zea Mays
tgttttagttactgtaggatattagagaaattatcatatttatattctagattaatgatcttgattgaactaccaaatgagtatttggtatgtcaacttatgttgc

SEQ ID NO: 153848 - DNA, 464 bp, Zea Mays
aatggttgcttgaggaggaatcgatcgaaagtactgccacattctgatatgagtactcaactttaaattaatcaatctaccgtaagtcacaacttttggataaaatttcttcctagctgataaccatttttatgtcacattctagatgaaccacttccagagttccagttacttactcttatcgggatgggactggacaccaatggagaattcctgatggttatgcaacaacagcttgtccatgaaattcgtgaagtatggacaacttcagttgagaatctactttatatgaaggaagaccttatcatccctcatggatgtgtgcattctcttgtaatctacaaagttttgttaaagttagtcgatcattatctgattctatgttctctcatttgtttgacaacaacacatcttttatgaattaattattaaacaaaacgaggcgcaagactagattggtaatt

SEQ ID NO: 153849 - DNA, 2212 bp, Zea Mays
tacgcgtcgttcgcccccttccttcctcccaaagtcttctcgtcttatcggcttgccggatccgctgccaccaccatctccgcacccacatctgtgccccaggtgtggttcggtttgagaaacggtaccagcctgccgacggccaacgggcagaagtctccgcgtccctgagcgccacagcaaccgtcgccttcaccacttggttctttccgtaataaaatcccacctctcccatttctgtttccccacttcccctcgctcgactcgatccgcagcaagctaagcgcaaccgaccagctacgcaaccatggctttcgcttcctcgaatgccaagcagagcctctacccggatgtggaccagtcccaccctgatctcaatacccctttcttctccgcacccaccacctccacctgcgccggcgccggcgccgccacgggcaactccctctaccccaccgtcgaccccaacgagctcgcacagaacctcttccccgagacggtcgaagaggacgcggcaccgccaccgcccaccacagaggagaccatcatcgctgtccctggggcgcagctccacctcatcgaccccgaccgcagcgtcgatctcggcgctggcacgctctccatcgtgcgcctccgccagggggaccactccgtcgccgtcctcgcgcgcctgatccacgagaagccccaccaccgccgcggcctcttccgcttgttcagcagcgggcggtctgacgctggcgccgagcaggagcccgtccagtggccgctggcccgcgatgtcgcggcggtcaagctcgaccccgcgcactacttcttctcgctccatgtcccacacacggaccacccggacgacaaggatgacgcggacggtgccgaagcggacgcggaggcggcgctgagctacggcctcacggtcgttgggaaggggcaggaggaagtattggcggagctggacagggtcctcgaggagtacaccaccttctcggtgaagcaggtggagacggcggcgaaggagaagtcagaggtcatggacgcgagggcagtggccgagatcacgccggaagaagctgtcggggataagaaggaggttgttgaggagaagtccgcggcgttctggacgacaatagcgccgaacgtggacgattacagctcgtcggtggcgcggctgatcgcccggggatcggggcagctagtgaggggcatcatctggtgcggtgacatcacggcggggggcctgcggcgtggggaagaagtgatgaagaagagcgtgggtcccagcacgaagccgacccaggtgaagcccagcactctcagaaggatgaagagggctaggagggttacaaagatgtccaacagggtggcaaactcaatcctgtctggtgttctgaaagtcactggctttgtcacaagcaccgtgttgaactccaaaccagcacaaaagtttttcaagttaatgcctggcgaagttattcttgcttcacttgatggatttgggaaaatatgggatgctgtggaagtgtctggcaaaaatgtgatgcagacatcctcagttgtgaccacttctgttgtaacacacagatacggtgaacaagcaggtgaagccacacacaattacctccacgctacaggaaatgttctcggagctgcgtgggctgtattcaagattagaaaagccctcgaccctaagggtaatatgaagaagtcttttgtcagccaagcagcgcacgccgtagctaaagaatcagttgcgaggcaaaagaagaagtgaactggcctggtcggtggttccattgtacctgtaatttgatatgtttgatgttgcagtatgttagcaatataggaactaagttgctgtttggtttatatgtttgtaatgtaatagataacaaataacgtttgatcatgtttgtttaagtctaaccgtaatcggataccacactagaaattgttaccagcctattcaaatttgttaccgctggtaatcgaatgcaaatcattaccgttaccatttacgttacattttgggaaccaaacgacacctaggaagctaggtcttagtgagtttgtggtgtcgtcattagattttgatcttctttacttctttttttgggccgtgttcgtttttttaaacagtgatgttctacgtacgtgtaaaatccttacgtttggtctgttactaacaatttcttaattccacctgtgcattcca

SEQ ID NO: 153850 - DNA, 1757 bp, Zea Mays
acgcgtcgttcgcccccttccttcctcccaaagtcttctcgtcttatcggcttgccggatccgctgccaccaccatctccgcacccacatctgtgccccaggtgtggttcggtttgagaaacggtaccagcctgccgacggccaacgggcagaagtctccgcgtccctgagcgccacagcaaccgtcgccttcaccacttggttctttccgtaataaaatcccacctctcccatttctgtttccccacttcccctcgctcgactcgatccgcagcaagctaagcgcaaccgaccagctacgcaaccatggctttcgcttcctcgaatgccaagcagagcctctacccggatgtggaccagtcccaccctgatctcaatacccctttcttctccgcacccaccacctccacctgcgccggcgccggcgccgccacgggcaactccctctaccccaccgtcgaccccaacgagctcgcacagaacctcttccccgagacggtcgaagaggacgcggcaccgccaccgcccaccacagaggagaccatcatcgctgtccctggggcgcagctccacctcatcgaccccgaccgcagcgtcgatctcggcgctggcacgctctccatcgtgcgcctccgccagggggaccactccgtcgccgtcctcgcgcgcctgatccacgagaagccccaccaccgccgcggcctcttccgcttgttcagcagcgggcggtctgacgctggcgccgagcaggagcccgtccagtggccgctggcccgcgatgtcgcggcggtcaagctcgaccccgcgcactacttcttctcgctccatgtcccacacacggaccacccggacgacaaggatgacgcggacggtgccgaagcggacgcggaggcggcgctgagctacggcctcacggtcgttgggaaggggcaggaggaagtattggcggagctggacagggtcctcgaggagtacaccaccttctcggtgaagcaggtggagacggcggcgaaggagaagtcagaggtcatggacgcgagggcagtggccgagatcacgccggaagaagctgtcggggataagaaggaggttgttgaggagaagtccgcggcgttctggacgacaatagcgccgaacgtggacgattacagctcgtcggtggcgcggctgatcgcccggggatcggggcagctagtgaggggcatcatctggtgcggtgacatcacggcggggggcctgcggcgtggggaagaagtgatgaagaagagcgtgggtcccagcacgaagccgacccaggtgaagcccagcactctcagaaggatgaagaggtaggatggtggacatgttactactactcgcatttattatggctattgtaactgttaatttcgttttaagtcggttgctccaaaaattagaaaatttgcagatggataggaaatctatttaccgcgaattagattattatcttgttaatttagtgcgatcgttcctttcggattgcagtattttagacactaatcatagataggagttaaatcaccgtgctgttaatattgtatgtcatggtaactcgtagagtcagacaacttactggtagctcttacttagtaaatgtttcttaattggaactccctttgcatttcatgttttgatagattttaatttatcagagcaggggatcttttgcttgagcagccatgtttttctttctgaatgcaaagcagatgtcccattcatgtatgatcatgtcaact

SEQ ID NO: 153851 - DNA, 1105 bp, Zea Mays
gtccatatggtgtatcatacatataagaatgaaacaggactttaaaaacaatttagatcaaattcaaataataattcaataaccagaagagattagaaatgcaagagatccaagaaaaaatgttcttttagaaaaatggcaatggacccatgaactaggaagtactgctcttatgagataacagcatgcgggaaatgtttcttctgtttctttagaaaaccttgttccataacatgattttacacctacttatgcgtagaaacggctcggctcttgtctggttgccacctggctattagtcaatgaaaaactaagttccagtgaactatatggttgatactagaactctagaagggggcatttagctatttgccgtccttcgtgtgtcactaacacataagtcactaacggcaaaaattttgccacccacttaatttttccctctagaagagtttaatggttcgattgatgcagatacggtgaacaagcaggtgaagccacacacaattacctccacgctacaggaaatgttctcggagctgcgtgggctgtattcaagattagaaaagccctcgaccctaagggtaatatgaagaagtcttttgtcagccaagcagcgcacgccgtagctaaagaatcagttgcgaggcaaaagaagaagtgaactggcctggtcggtggttccattgtacctgtaatttgatatgtttgatgttgcagtatgttagcaatataggaactaagttgctgtttggtttatatgtttgtaatgtaatagataacaaataacgtttgatcatgtttgtttaagtctaaccgtaatcggataccacactagaaattgttaccagcctattcaaatttgttaccgctggtaatcgaatgcaaatcattaccgttaccatttacgttacattttgggaaccaaacgacacctaggaagctaggtcttagtgagtttgtggtgtcgtcattagattttgatcttctttacttctttttttgggccgtgttcgtttttttaaacagtgatgttctacgtacgtgtaaaatccttacgtttggtctgttactaacaatttcttaattccacctgtgcattcca

SEQ ID NO: 153852 - DNA, 607 bp, Zea Mays
atattaaggtccggcaaaaatgttgccctgggttgtaaagaaggcttctgctgcaccattggatggatcggcactgaactatcagtagctctgctttgaaccatgatagcatcggagttccttttactgctgaacagccagtcttcatcaccaagatctgaaccttcattctctatcaataccggattccagtatcctgcacttgaacagcttctgcattcctaccagagaagcagggctcttcttttgaggaagaggtcctgatctcctgctgcttgatagaaggcaagtccttgggtttttgaagaacagtaggccgggcagcttctggtggaggatcaaatcttctcataactctagcaggcgaagggtccacacttcccgaaaacttcagagacagggatgaacctgatcccatttgttggaccaatggttgctcaagaacccttggtttctccagaacagctgattggggatcttgactacttttaatcttgaagcgaagaatgtttcctgtaaaatcaagttgggatgaataaaatcctgaacaagtgattgatttcttctataataataaatcaatcagaatagcaaaaacaagagaata

SEQ ID NO: 153853 - DNA, 2553 bp, Zea Mays
atgcatagtagccattccccattcccacataggagtattttccaatccataacccacgtcttgaaccatcaaaacgtttccctttcccgttccgactcccatccaaaatccattcaccgcctgccttttcttctcccgtccaccgtgtgcgggctgcggggagcgctctcctgccgctactaggcgaccgccgccgccgtcctacgtgctcgggtccttcctcggctatcaacacctaccagttatagggcgtacatgtgcacacgcatgtccttcaccgggtccgcccctgagtcttccgatcccaataagcaacctgcaaaaaagcagactcgacaatgggcagcgtggacacaccaagaggaggagaatttcttcaatgcactgcggcaagtagggaaaaacttcgacaagattacacaccgtgttcagagtaaaaacaaggatcaggtcaggcattactattatcgtcttgttcgacgcatgaagaagctattgggtcctaggttctcacttgatgcaaaaaactccaaggataccattgctgctatgcttcgctggtggtctctgcttgagaaatttagctgcagtgcatcaaagctgcacctgaagcctcggaggttcaaaacatttgtagaagcattgggaaaacaactgctgaaggacagaaataagtccaggaaaaagcattcacgagtggatatgtgcatatcttctccatctccagttatcagcaaggctcctggggatgagactcctcctgtaaagttcttgtcaatagattctcaaaatggtagcagagtagcatctcctaaagggacaattttcaagcggattgcagaaccaatttctaacaagtcaggaacaactaaaggggacctctctgccacaagaaccgtgaaacagaaaaggaaggcaggtggtgctgttgcatctgccgcatataaaaaatgggagagagcggccatggctggtgtttctttagttgctgatgcggctgaggagctcgagcgcaacacgattaacccaggcatgttatgtaatgttgatgcaagaacactgacttcatcatcagacagactttctactggtgatggcattagcacaaatcatatgaaggaaacagattcacaagcacctgtgaagctgaagctacagttatttccaataaacgaagctactcgaaaggcattggagaaggatgaccataatcctcatttagagctcacattaagctctaggaagaaaatatcatctgtgctagaacatctaaaccgaaaatggggtaactcaaacatcgcatctggagagcttattctttttccgtattgtgctaatcaagaggatttggctacatatcagagatggacaacaagagatactgttgcagtcgctgatgtgtttctttctgtgaatagcccttctgttttccgtttaaggtatggttggttttcccttgttgagcttggagcaggagtaagtgacatatctttaacacattttgaagattgcatgagaccggaagtcatccaagtcaaatcaccatcaggagataaggcttgtgtgcaaaaggatggtactttgctcagtaattgcactcatgagtcatatccttgcagttcaatgttattgcatatgacaccatccagtacaggcaagaactctgagcttccggatcagccggctaatgtgccccactctcggtttggcagccaaaagcaagtgcaggttcctgtaacccaagcttttgaggatgatcagggaatgaattgtgtggcaatatctgaagtagagtgggcagatacccttacagatatcagtgttgagcacttactgacagaagcatccaaagatttagattgcgtggggactagtgtaaaagatcctttgtttcttgagaatccatgcagctatgactcgtttgatgctgttgttgcccttcatgcttctcgttatcaagcatcagaacagccagcccatgctccccattcaaacatatggggagcagaagaaacatgtgatgagttcagttttaatttgtcagcctccaggaagcaagaagggtcaaacacttctagcagctctcctgatactgacaatgaagttcatccttcaaattcagaaggatttcgaggttttcttcaggacttgactggacgagagactgatgctgataatccttgtaatgatgacgccaaagacgaagaggagttttatgctaaatcaccacctcgaaatgacaaaactaatgagttgaaggatcaacctttagctgacatatattgggtacttgatgaaattataatgttcttttgtactggcattatcttagctgagcttacatttttttcttttcttggcagcctgattcactcggaccactggacttggacataccggccgtgagatatcaaaccgatgacatactgataggggacagtcaaagtagttggaattggaaccgcctgatggcaaatagcctcgatgcatttcgaaacctgtcattcttctcggataagaatgactcgattccgtcgatcatgtagaactggg

SEQ ID NO: 153854 - DNA, 2708 bp, Zea Mays
ttccctttcccgttccgactcccatccaaaatccattcaccgcctgccttttcttctcccgtccaccgtgtgcgggctgcggggagcgctctcctgccgctactaggcgaccgccgccgccgtcctacgtgctcgggtccttcctcggctatcaacacctaccagtctatttttatttttattttccaaaagttatagggcgtacatgtgcacacgcatgtccttcaccgggtccgcccctgagtcttccgatcccaataagcaacctgtttttgcgctgtgtctgattcatgtagcaaaaaagcagactcgacaatgggcagcgtggacacaccaagaggaggagaatttcttcaatgcactgcggcaagtagggaaaaacttcgacaagattacacaccgtgttcagagtaaaaacaaggatcaggtcaggcattactattatcgtcttgttcgacgcatgaagaagctattgggtcctaggttctcacttgatgcaaaaaactccaaggataccattgctgctatgcttcgctggtggtctctgcttgagaaatttagctgcagtgcatcaaagctgcacctgaagcctcggaggttcaaaacatttgtagaagcattgggaaaacaactgctgaaggacagaaataagtccaggaaaaagcattcacgagtggatatgtgcatatcttctccatctccagttatcagcaaggctcctggggatgagactcctcctgtaaagttcttgtcaatagattctcaaaatggtagcagagtagcatctcctaaagggacaattttcaagcggattgcagaaccaatttctaacaagtcaggaacaactaaaggggacctctctgccacaagaaccgtgaaacagaaaaggaaggcaggtggtgctgttgcatctgccgcatataaaaaatgggagagagcggccatggctggtgtttctttagttgctgatgcggctgaggagctcgagcgcaacacgattaacccaggcatgttatgtaatgttgatgcaagaacactgacttcatcatcagacagactttctactggtgatggcattagcacaaatcatatgaaggaaacagattcacaagcacctgtgaagctgaagctacagttatttccaataaacgaagctactcgaaaggcattggagaaggatgaccataatcctcatttagagctcacattaagctctaggaagaaaatatcatctgtgctagaacatctaaaccgaaaatggggtaactcaaacatcgcatctggagagcttattctttttccgtattgtgctaatcaagaggatttggctacatatcagagatggacaacaagagatactgttgcagtcgctgatgtgtttctttctgtgaatagcccttctgttttccgtttaaggtatggttggttttcccttgttgagcttggagcaggagtaagtgacatatctttaacacattttgaagattgcatgagaccggaagtcatccaagtcaaatcaccatcaggagataaggcttgtgtgcaaaaggatggtactttgctcagtaattgcactcatgagtcatatccttgcagttcaatgttattgcatatgacaccatccagtacaggcaagaactctgagcttccggatcagccggctaatgtgccccactctcggtttggcagccaaaagcaagtgcaggttcctgtaacccaagcttttgaggatgatcagggaatgaattgtgtggcaatatctgaagtagagtgggcagatacccttacagatatcagtgttgagcacttactgacagaagcatccaaagatttagattgcgtggggactagtgtaaaagatcctttgtttcttgagaatccatgcagctatgactcgtttgatgctgttgttgcccttcatgcttctcgttatcaagcatcagaacagccagcccatgctccccattcaaacatatggggagcagaagaaacatgtgatgagttcagttttaatttgtcagcctccaggaagcaagaagggtcaaacacttctagcagctctcctgatactgacaatgaagttcatccttcaaattcagaaggatttcgaggttttcttcaggacttgactggacgagagactgatgctgataatccttgtaatgatgacgccaaagacgaagaggagttttatgctaaatcaccacctcgaaatgacaaaactaatgagttgaaggatcaacctttagctgacatatattggcctgattcactcggaccactggacttggacataccggccgtgagatatcaaaccgatgacatactgataggggacagtcaaagtagttggaattggaaccgcctgatggcaaatagcctcgatgcatttcgaaacctgtcattcttctcggataagaatgactcgattccgtcgatcatgtagaactggggatgttacggtttctacgacttgctgtgttggttaggaaggaacctccaattctgcatttcgctgaagaatatccaacagatgcggatttgatgcatacgtgaggtgctcgtgctgttgtaagataacataacggatgtgctaaccactccatgtaattgtgttgtccttgtacataaagcacatacaagcacttggatacaagtaaagcttctggggttcgtgtataagatcagtttgcctaatgtccatcaaa

SEQ ID NO: 153855 - DNA, 255 bp, Zea Mays
acacaacatatatccacgtatagttctaaaaaacatttggactataaaatccacaagatgctagtgtttcttccattccacttccacttattgcatgagtcacacgtgcaatcactttatgtatctaagtttcaacataatcaatactccacttatcattttcatgtggggacttgaggttatcttcgaatagaatgtttattagttttggtaacttttttgcaattttgggtcgaaactagtgtattttatgaa

SEQ ID NO: 153856 - DNA, 1366 bp, Zea Mays
gcggaggaggacgggcctgcgaaggacagcatggtcgggccagggtccgtcgccgccgcgctccacgacggagacccgaaagccgctgcccagtccatgccgccgccggccaagaaggaaaggagcacctccgccctccaagccccaaatctggccgtcgagcgcgggctccggtgcccccgcgcgcccagcctcctccgacgaagaggaggcggcgcccgtcggcggcaaccctagctcatcgtctgaggcctcgagtaggaagcccagctctggctgctgccccggatgccggcgccggcgtctccgcggcctcgtcgaagctggctatctcctcctacaggctccgcatgaccgacggtaggtcgccgaccgcgcccgtgtcggtgtcgtcatccagcatgtcgagcaggtcctgcggccgcagcctcttggcgtcggcctgcggcgagccctcctctccgcagcctccggcggcgaggtcggccgcctcccgcgtccgcttgtgagaagagttctccatggaacgagctcagaggaaagggggatgacttgatttttttctctctctctatttccttgctcctccttctcgctgcgttcgcgtacgccgagcaaggcaaggcacgagccagccaggcgagcgagacgaggcgataacgcgagggcagacggaagagtacaaaaagtgaaagtgaggtgttctgcggacgatgtttctcgcagggggtttgccgcaaaaatcgctcgtgcgcgccgctgcccagtccatgccgtcgtcggccaagaaggaaaggagcgcctccgccctgctcctaaacaagaaaccttcaagacggcggggacaagttcaggaaaaaattcctctgcaagaaacaaacaactaggcaagagacgagcatccacgcaagaattccactgcagctcgggaaaccgatcggttgcggcatcctgtgctgggtatataacggtagaaagggcagtctacagcagggtggaaagaggcagtgagagtgattgacgtcgtgtgcagtttttttttgttctttcttttgttttgacctgtacactgtttacggattcctagatttttttaagcggatatggctttaggatttgcatgcctatccctgtaaaactcttcgttaagcccttcaaagagaattttttacatgagcattaccttgtagatttgtagttgtagagagtgaggtaaatgatccaaaggtgaagtttttactactctatgagagagcaaagtaggtgtccataatataacatacatttgtacataagctatcacgatattattagtgtgattggttgcccaaatgggcacggccagactcggcgacacgtgcgttga

SEQ ID NO: 153857 - DNA, 2026 bp, Zea Mays
gaaaaggggggaaaagaaaaaaagaaaaagttcccgtcttcggtcttcccaaacccccaacatccatgatccatctcatcgacaccccctccgctctccttatcccttccattcgcccaaacccccgccgccgtgacccctgccagcccgcggccttcccctcgttctaggcttcaactgccggcctcgtgtcttctgggcaagtgaagagagagatggcgtcgccaataccgcgcgagtgggtcgggctgcagcagtttcctccggccacccagaccgagctgcacgagctcctcggcaagctcaaggaggaggatgtgagcacattgacaattctggtgatggggaaaggcggagtggggaagtcatctactgttaactccatcgtcggggagaggatcgccactgtcagcgctttccagtctgagggtctgagaccgatgatgtggtcgcgcacaagggcagggttcaccttgaacattatcgacactcctgggcttattgaaggtggatacattaatgagcaggctgttgacatcattaagagatttcttctgggcaagactattgatgttctcctgtatgtggatcgtttggatgcgtacagaatggatacacttgatggacaggttataagagccatcaccaattcatttggaaaagatatttggcgaagatcattggttgtgttgacccatgctcaactctcaccacctgatggaatcgagtataatgatttctttacaagaaggtcagaggcacttttgcgatacatccactcgggagcaggaatcaagaaacgagaatatggggatttccctttgccaatagcattggtagagaacagtggaaggtgcaagactaacgagcatggggagaagatacttccggatggaactccgtgggttccaaaactgatgaaagaaattactgttgttatctcaaacgggagcaagcccattcatgttgatcagaagttaattgatggtccaaaccctaacaatcgctggaagatgttcataccaattatacttgctgtggagtacttcttggtagtaaaaggaatccggagggcgatccatgcagatatcgcaaatgggaaggtggatgactgggagcagcgttaccgggacttggttggaagcagggaccctgtggagcagaaaggttctaccacccggaaccgcaaagcctaagttggtgtagcagaaatgattttattcgtgttgtgacccactcgatctgcttgctgttccttttcctaattatgtgttgagggctttatagagttcgctggttctacttgaaaaataattgctcgtgttgtagttgataagaatatcttttccattttatgatgcttggccctcttcgcaattttgaatattgttatcaaacccctgctattatgtttagcaagttgttaaatagctattggagtaaaaattagcatatttaggagtagttcagttttgaatctagttttggtatgcttgctcctgtcagaaaaggttggcaatggagtcaagagaagagggcgtcgagggcatagaaggttggtcggaacgacctatagtgtagcggtggttcaatggttaggagaaacttgtgttatgcatattggacctgactatctcgctgcacgagaaaggggaaaaaagagtgtctgattgtagcggtggttcaatggtaaaggagaagcttgtgttatacatattggatcttactatctcgctgcacgagaaagggggaaaagagtgtcagatttggttactcgctatacgggaaaaggaaaaaaaatgagaaaaggaaaaaaatgagaacatgagtgtgaagaaattgacatcaactatatttaagaaacatctatcgagttgctaaatctgaatagattgctaaatctggaaagtaaatgaaatttgatagtaagtaactaaatttaacaagtctatttagagaattattggagaagccttttttctcaattatttttaaaatttaaaatttagggagttatttagagaac

SEQ ID NO: 153858 - DNA, 641 bp, Zea Mays
cttcaacaccccactcctcttcctcactttgccctctctctctctctctctctctctctctctctctctctctctctctctctctctctctcggagccgtagccatggcctgagcagagcctgctgcttcctcttcctaggcaaccgtcttcttcaggcctggctccgatggagtggagcggtgcacggagttctgcttgcgggtggtagtggtagaggtaattccgccgcctttcgctgtagccagcaattctcttgtttctcgggagcttccctcgagttcttggcgcatgcagagttcatgtccaccgtagtcttctatccaccgtctcggttctctgaatagccatccagttctctctctgggcatgattcgtttcgagcccccagattgttccatcgagttaataaaacctctcctttatcaataaagaaaagtaatggtactggaattctgatgtggaaccactttgctcggttggtgtctactatgctaaagcatgcttgcatgttagtctcgtctaagttccgtcatggtttctgtctccttccttccttcctatgcttggtcacataagattactttaatctctggtccagatgctttcgctaatgtaccaagccaaaacaaggtaaatttg

SEQ ID NO: 153859 - DNA, 1112 bp, Zea Mays
cttcaacaccccactcctcttcctcactttgccctctctctctctctctctctctctctctctctctctctctctctctctctctctctctcggagccgtagccatggcctgagcagagcctgctgcttcctcttcctaggcaaccgtcttcttcaggcctggctccgatggagtggagcggtgcacggagttctgcttgcgggtggtagtggtagaggcgagacagagaaaccaagtgacgtgcgggtgaaaagactgttgcgagatgaacgacaaggagatgatgtgccaggagcagtgcgacgagctgtccgagaccgagatcagcagccaggaggcgtccaactcctccggcccggtcagcctcgacctctcgctctccgttaccgacaacagcaacggtaacaacagcaacagcggcggcgcgcaggccgacgccgcccgcgagccgtcccgcgtgttcacgtgcaactactgccagcgcaagttcttcagctcgcaggcgctgggcgggcaccagaacgcgcaccggcgggagcgcacgctggcccggcgcgcgctgcggctcgacgcagcgggcccctactacggctacggctacggctactacgccgacgtggcgtcgctgccgctgtacggctcctgcctgtaccccatcggcatccaggcgcacgcgtcggcggcagcgctcccggagcacgaggacgcgcgcgccggcgccgacgagctgaggaggcccgcgcgggggctgctgagccccatgccgttcctcgtggccgacgacgaggagatgctcttcggctggcccggtagcttcaggccagacgccgctgcgccggcggactcggccggcggcgtcgccgtgcacgcccgggaggagcccgatctgacgctcaggctgtgaactgcgaactgatccgtcgactagactggttaatccgtcaggctgtttcttttctttttttaaactgatcggtccatgtctggcgctggtcagatcgcggcggtctcttgcttgaccggattattcttattgtttcgtgggtgcgtgcaagaatttttgtacagcagttggatgtgcaagagctcgagatctctctttgttcgatga

SEQ ID NO: 153860 - DNA, 1024 bp, Zea Mays
aattgaacccatgcgtctgtgtttctgccttacctaacctgtcatgttcacagaagaatcgtgatcagatttttagatcggggcatcttattcgtgccagcggcattcacacggaagtgcttgcatgtaggcgagacagagaaaccaagtgacgtgcgggtgaaaagactgttgcgagatgaacgacaaggagatgatgtgccaggagcagtgcgacgagctgtccgagaccgagatcagcagccaggaggcgtccaactcctccggcccggtcagcctcgacctctcgctctccgttaccgacaacagcaacggtaacaacagcaacagcggcggcgcgcaggccgacgccgcccgcgagccgtcccgcgtgttcacgtgcaactactgccagcgcaagttcttcagctcgcaggcgctgggcgggcaccagaacgcgcaccggcgggagcgcacgctggcccggcgcgcgctgcggctcgacgcagcgggcccctactacggctacggctacggctactacgccgacgtggcgtcgctgccgctgtacggctcctgcctgtaccccatcggcatccaggcgcacgcgtcggcggcagcgctcccggagcacgaggacgcgcgcgccggcgccgacgagctgaggaggcccgcgcgggggctgctgagccccatgccgttcctcgtggccgacgacgaggagatgctcttcggctggcccggtagcttcaggccagacgccgctgcgccggcggactcggccggcggcgtcgccgtgcacgcccgggaggagcccgatctgacgctcaggctgtgaactgcgaactgatccgtcgactagactggttaatccgtcaggctgtttcttttctttttttaaactgatcggtccatgtctggcgctggtcagatcgcggcggtctcttgcttgaccggattattcttattgtttcgtgggtgcgtgcaagaatttttgtacagcagttggatgtgcaagagctcgagatctctctttgttcgatga

SEQ ID NO: 153861 - DNA, 895 bp, Zea Mays
tagatgtccaacggggacgtgtacgagcggacgcacgacgagcttgacttcgagttcctcgggaacgtgcgcggcaaggagtggcgcgtgcagaccaacgtgtacggcaacggcagcacggcggccggccgggaggagcgctacggcctctggttcgaccccacggaggacttccaccgctacgccatccactggacccgcgacaggatcatattctacatcgacgacacgccaatcagggagatggtgcggacggagtccatgggcgcgcagttcccgtccaagcccatgtcgctgtacgccaccatctgggacggctccagctgggccacctcggggggccgctacaaggtggactacaagtacgcgccctacgtcgccgagttcgccgacctcgcgctccgcggctgcgcggccggccccgccgcggcgtgcgcgacgtctggcggcgacgacgacgcgtacggccacgctgctgccgcgatgccgcccgcgcggcgttcggcgatggaggcgttccgggcgcgctacatgacgtacggctactgctacgaccgcctccggtaccccgcgccgctgccggagtgcagcgtcggcgcggaggccgcggcgttcctcccgtcaggggacgcgcgggcggcgttgcataggcacggtaggcgcagccggatgcgccgcggcgccgactttgccgtctgatccaccggcagcgctggtgtgtgtgtgtgtgccgtgtgcccgtgtcgactgtgatgtgatgtcatctgatatatgattagggttcttgattagcgctaccattgtagggtgacagtaaccggagttccacacttcaactgattataaacctcgtcgcctcgactcgcaccgctgctgcagccatccaagttcagcg

SEQ ID NO: 153862 - DNA, 759 bp, Zea Mays
aaagtctatagctttgacaatgtctgccgatctccagttcttaaaaactgaacatatgtcagtagatagacgactgattctacatcgacgacacgccaatcagggagatggtgcggacggagtccatgggcgcgcagttcccgtccaagcccatgtcgctgtacgccaccatctgggacggctccagctgggccacctcggggggccgctacaaggtggactacaagtacgcgccctacgtcgccgagttcgccgacctcgcgctccgcggctgcgcggccggccccgccgcggcgtgcgcgacgtctggcggcgacgacgacgcgtacggccacgctgctgccgcgatgccgcccgcgcggcgttcggcgatggaggcgttccgggcgcgctacatgacgtacggctactgctacgaccgcctccggtaccccgcgccgctgccggagtgcagcgtcggcgcggaggccgcggcgttcctcccgtcaggggacgcgcgggcggcgttgcataggcacggtaggcgcagccggatgcgccgcggcgccgactttgccgtctgatccaccggcagcgctggtgtgtgtgtgtgtgccgtgtgcccgtgtcgactgtgatgtgatgtcatctgatatatgattagggttcttgattagcgctaccattgtagggtgacagtaaccggagttccacacttcaactgattataaacctcgtcgcctcgactcgcaccgctgctgcagccatccaagttcagcg

SEQ ID NO: 153863 - DNA, 760 bp, Zea Mays
atggggttcaatagatttccaaaaacccaccttgttgaagttgaacaaccctctgcccgtggccgtgcatcctgcagattctacatcgacgacacgccaatcagggagatggtgcggacggagtccatgggcgcgcagttcccgtccaagcccatgtcgctgtacgccaccatctgggacggctccagctgggccacctcggggggccgctacaaggtggactacaagtacgcgccctacgtcgccgagttcgccgacctcgcgctccgcggctgcgcggccggccccgccgcggcgtgcgcgacgtctggcggcgacgacgacgcgtacggccacgctgctgccgcgatgccgcccgcgcggcgttcggcgatggaggcgttccgggcgcgctacatgacgtacggctactgctacgaccgcctccggtaccccgcgccgctgccggagtgcagcgtcggcgcggaggccgcggcgttcctcccgtcaggggacgcgcgggcggcgttgcataggcacggtaggcgcagccggatgcgccgcggcgccgactttgccgtctgatccaccggcagcgctggtgtgtgtgtgtgtgccgtgtgcccgtgtcgactgtgatgtgatgtcatctgatatatgattagggttcttgattagcgctaccattgtagggtgacagtaaccggagttccacacttcaactgattataaacctcgtcgcctcgactcgcaccgctgctgcagccatccaagttcagcg

SEQ ID NO: 153864 - DNA, 644 bp, Zea Mays
gtacaacactgtgaccaaggaatcgggctttagggatccctatgtccagtaccaccacctcgcctccgccgccggccgccggggaccatccccgcgttctgctccgaggtttcctctcccgtgagacatgcaaggagctggagttcgtgcaccggagctgcggcgcagcggggtaccgcccctcggtgatatcgacatctctgccgcacctggcggccaccggctgcggccacctcctgctcccgttcgtgcccgtccgcgagcgcctccgcgacgctgtggagtccttcttcgattgccacttcgatctcttcatcgagttcaccgggcttatcagttggtgcaagggagcttctattggatggcacagtgatgacaacaagccttatcttaggcaaagggcattcacagcagtttgctacttgaacaatcatggagaggactataagggtggaattttgcagtttcaggatggtgatccttcctgtattgttccagttgctggtgtaagcaaatctaattttactttgcatccatgtggtttcaaaatacttcttatgaagcacacatttgttgttagtaaaatgttctgggtaattttggtaagttttatgagaaacatttttgtccaggatgttgtcata

SEQ ID NO: 153865 - DNA, 341 bp, Zea Mays
gaattggactctaaaggcggagcatgtaagcttatatgggcagtgatcatgcccattgatgtagaagaagtcgatgctgttgatctggaatggactaaacttattatcaaaagatgcttttttttttgtattttggaggctaatattgtggctgcttccgagcaaccttgggccttgttgtttggttagaagaggattgagggggatttgttacttcgcgctgttaaaaaacattatactttgcgctctactgaaagggcagcaaacaaagacgtcgtgtatgccatatgctccttgcctgtgaaaaaagaaaataaagtttgtacggtccagtgtttagt

SEQ ID NO: 153866 - DNA, 1492 bp, Zea Mays
catgctagagaaccaaaagcaagcggaggttctctggccgcggctggtggccaacaagctcttccggaagacctcgggcagccacgccttcgtcgccgatttcccggccaccgatggcgacggcgatgtcgtctttggtggaacggagttcgacggcggcgggtgcagccccgaccccgacgacgcggacgccagccgctgcgtgaagcgggcgcggccgcagccgcagccgcaggagcgcaacaagaagaccctcaagtacaagctgttcgcgagcacgtggaacgtcggcggcgtggcgccaccggacgagctggacctgtcggactggctggacggcggcggcggcgacgacgacgacgggccctacgacatgtacgtgctggggttccaggaggtggtgccgctgcgcgcgcgcaacgtgctgggtgccgacaagaagcgcgtcgggatgcggtggatcgagctcacccgcgccgcgctcaaccggtcgtcgtcatcgcacgcgcagcgcgggggagggagcggcggcggatcaggctcaggcgacggcggcggcggcggcaggcagaaggtgcacccggtgcgggacggcggcggcggcggcgggctggcctgcagggactaccggtgcgtggtgagcaagcagatggtgggcgtcctgctcacggtgtgggtgcgctccgacctccgccgcttcgtccgccgcgccagcgtctcctgcgtcggctgcggcgtcatgggctgccttggcaacaagggtgccgtgtccgtccggttctggctgcatgaaacgagcttctgcttcgtgtgctgtcacctcgcgtcgggcgggcgcgacggcgacgaggcgcaccgcaacgccgacgccacggagatcctctcccggacggccttcccgcggggccaagcgctcaacttgcccttgccgcacaagattctagaccacgaccgggtgatccttctcggggacctcaactacaggatctcgctgccggaggccaagacgaggctgctggtggagcggcaggactggaagacgctgctggagaacgaccagctgcgcgccgaggtgcgccgcggcggcgcgttccagggctggagcgaggggcccatcgccttctccccgacctacaagtactgccccaactccgacgcctactacggctgcgccaccgccagcgccaccgccgacgcccgccggcacaagcggcgcgcgccggcgtggtgcgaccgcatcctgtggcgcggcgaggggatccggcaggcccggtacggccgctgcgagtcccggctgtcggaccaccgccccgtgcgcgccgtcttcacggtggaggtgggcgcgcccgcgcccgggagtaacctcaactcgctcaggagcttcttcatgtccgagaggttcgacggggctggcagcaggagccccgccgccgaccagctactccgcagggacgacgacgtcaacagcgccagattcagcgacgcgctttga

SEQ ID NO: 153867 - DNA, 107 bp, Zea Mays
ctagccataaggacatgtacaatggtaattaatgtagaggctcttaaggtgtttaaaaagttatttgcaaaaaaatcgtagagtcatctctctgtgaagagacgcag

SEQ ID NO: 153868 - DNA, 951 bp, Zea Mays
atttctgtgcgcaattgtctctccgaggatcggtgacgtgctgacggcaaactccttggacaactacacggccgaagcaagcaaggacggccctcgtcaagaactcaagacgcgcgtttcaagccctgcctgttggtgtggggggcatgacctcgggagacagcgcgcggccatgcagccggatccggaatggccggtcgcgccgtgcgccggtgcccatccccacgcccgccgcatgctgcctccatctgccctcgatcgggaactgaggccgtgaggcgtacgaaatgcttaatcaaacacagtgatgcgcgggcgctcatccataggcgtacagcgtactgatgcagcatccatggacgtcctgaccacgccatcaatcaagcaaaaatgaaaccagcaacggtagtcaggtgtagtgctgctgcggccacagtgctcggcgctcgctcgtgctgcctgctggtgctctgtgctcgagtgctcgacggccgctgcccgctgcgctgggagcttgcgacgagccaacgggtcaccggtcgacggccacccgcgcgccaccgcgccagactgggcgcgccctcctcgccgtgggtcctccactccgggatccggcggcggcggcggcctccctgcggccctgcctgcgccgtgcagtgccgcccctcgccggcggtcggctcaactccctgtccaccacagtgccgagccggcatccacctcctgcttccaccgccagtttgccacagtgccgcgccggcctcccgtccctggtcgaaggccgccaccgccacctactgaattgtgataatctggaggctattcttcagaagcctggtgtagaaatgttacaggaatagcaaaaaaactgacatttttagattaagaaacactagaacattttgtcagacttgatttctcacacagaaatagtaattttatttgatgttt

SEQ ID NO: 153869 - DNA, 1251 bp, Zea Mays
attgtctctccgaggatcggtgacgtgctgacggcaaactccttggacaactacacggccgaagcaagcaaggacggccctcgtcaagaactcaagacgcgcgtttcaagccctgcctgttggtgtggggggcatgacctcgggagacagcgcgcggccatgcagccggatccggaatggccggtcgcgccgtgcgccggtgcccatccccacgcccgccgcatgctgcctccatctgccctcgatcgggaactgaggccgtgaggcgtacgaaatgcttaatcaaacacagtgatgcgcgggcgctcatccataggcgtacagcgtactgatgcagcatccatggacgtcctgaccacgccatcaatcaagcaaaaatgaaaccagcaacggtagtcaggtgtagtgctgctgcggccacagtgctcggcgctcgctcgtgctgcctgctggtgctctgtgctcgagtgctcgacggccgctgcccgctgcgctgggagcttgcgacgagccaacgggtcaccggtcgacggccacccgcgcgccaccgcgccagactgggcgcgccctcctcgccgtgggtcctccactccgggatccggcggcggcggcggcctccctgcggccctgcctgcgccgtgcagtgccgcccctcgccggcggtcggctcaactccctgtccaccacagtgccgagccggcatccacctcctgcttccaccgccagtttgccacagtgccgcgccggcctcccgtccctggtcgaaggccgccaccgccacctactgaattgtgataatgtgagtgattctcctctccccaatggcccaattcctccccttttcgggaaaaatttctgtctcatgcaaacactttttttatagtctatcacatccaccacttccgaacaaaaaatagattaaaatttacagcttaactcttcgataatttatttttttctatttatatggaccactgtatatgataggctgtcaaagagattctttgcatcccatacaaagaaattttccccttttcgctatctatccattggattgttgaatgttgtattgttaattttaaagatcttagagagtttaagtgatcattaatttgtatagtggctcggggcgtcactttcaccttgcatcccatgcaaagaattttttccccttttcgctatctatccattggattgttgaatgttgtaatgttaattttaaagatcttagagagttaaagtgatcattaa

SEQ ID NO: 153870 - DNA, 1440 bp, Zea Mays
aacacagtgatgcgcgggcgctcatccataggcgtacagcgtactgatgcagcatccatggacgtcctgaccacgccatcaatcaagcaaaaatgaaaccagcaacggtagcaaagtggcaatggtttcacttccagtccaatcaattccttcgtttgacgttctatccctgactcaggtagtcaggtgtagtgctgctgcggccacagtgctcggcgctcgctcgtgctgcctgctggtgctctgtgctcgagtgctcgacggccgctgcccgctgcgctgggagcttgcgacgagccaacgggtcaccggtcgacggccacccgcgcgccaccgcgccagactgggcgcgccctcctcgccgtgggtcctccactccgggatccggcggcggcggcggcctccctgcggccctgcctgcgccgtgcagtgccgcccctcgccggcggtcggctcaactccctgtccaccacagtgccgagccggcatccacctcctgcttccaccgccagtttgccacagtgccgcgccggcctcccgtccctggtcgaaggccgccaccgccacctactgaattgtgataatgaacgtgacggcggcgaggcagcggaggctgcccccgctcgggccacggcggccactcccgccgccgcgcctcctcgccgctgtcatcgccttcgccttcgcgctcctcttcctgctcctcgtgcttctctccagctcctcccctcactcgccgccgccatcccaccacgccgtcgtcgcaagatcatcctcgtcctcggcaccgccgtggcctcgctgcagcagcgcggcggcgagcctcggggagctcggcgacgcgatggtgtccatgctgcccaaggacctcccgttcaccgtcttcgtgccctcagtggactctttcacccgcgtccttaggctgcaggggtccaagtccaacgccagcactggagatcaggaagcggccaccgacaccgacaccaacacctacgccatcctatcccgcgtgctcggcttctccgcggtccctcgccgcctgctcgccgcggacgtgccggtgccgccgcgcggggccggggcggtgcgcctcctggactccgtgtccgggctgaggctgtacgcctccagggacgcgcgcggggcgctcgtcgtgaacggcgtgcggtcggagtgcgtcgatattatcaggggcgagaccgtggtgcatgtcctggcgggtgtcctcatggacgccgaatttgagcgttcgttcggtggaatttgacggccgatcatcaagtcatcaaccctttgagtttgacgtggctcatttctttattctggagaggatttgcaagacaatgcatttggaaaattttaaattgcggcgaaaacaagttgcgacttgcctcggatgaggttagatggatcttgaataaaaggttatcacttatcagc

SEQ ID NO: 153871 - DNA, 343 bp, Zea Mays
agacctttttttggatttacatatatgtataacgacacaacactaaataaaaaagaccacatgcaagcatggagagaagtttccaatgtatcactgtgcctaaatcatgtctgcccaagaagaacgaagggaactgaaaaggggaaaacaaaatgctctacaagtagacgacactatagctaggtagcagttatcacgggacacatgcatgcatgcagatcaatcggtgtggcgagatagggagaatagtgctcgatctctcatgatcccgtccgtcgatatgatctcaaagaaaccctaattaaaacaagcaaacaaaggcttgataaaaagctgcccatcc

SEQ ID NO: 153872 - DNA, 1638 bp, Zea Mays
acacaaacacaacgacgatatatgcaccttgagctttccaccccataaagacgagccagcagggccagacacttggtagtgtgtgtgtgcgtgtgacaccttaattagcttgcttggccaggcattcactgatcgatggcactactggtcaagagccaccagcaaatgttggtctcctcctccaccacctcctcgtcgtccccttcgtcggcgtcccagcagcggcacccgccgccacctcctcctccctcctcctcctgcctcaccgaccagcaacagccgtccccagccaagcgcaagaggcgccctcccggcacgccggaccccgatgcggaggtggtggcgctgtcgccgcggacgctgctggagtcggaccggtacgtgtgcgagatctgcgggcaggggttccagcgcgagcagaacctgcagatgcaccggcggcggcacaaggtgccgtggcggctcgtgaagcgggcgccgccgcctgctggcggcggcgaggacagcgccggcgctaataatagtagcacagctggtacaggcgttggcggcggcggcggcggcccccggaagcgcgtgttcgtgtgccccgagccgagctgcctccaccacgaccccgcccacgcgctgggcgacctggtgggcatcaagaagcacttccggcgcaagcacggcgggcggcggcagtgggtgtgcgcccgctgcgccaagggctacgccgtgcagtccgactacaaggcgcacctcaagacctgcggcacccgcggccactcctgcgactgcggccgcgtcttctcacgggtggagagctttatcgagcaccaggacgcgtgcaactccagccggatacgcggcgaggccgtggcggtagccgtgccggcgccgccgtcggcgctcccggtcatccgccccgccgtcccgcggcaccagcccacggtggcaccggcaccgccgccaccggagctccagctcctccccgcctccgcggcggcatcagcgccgctggctagcacaccgaccgcctctctgtccaccaccacaaacgcgtcacaggagcaagaaccccacgcggcggcggcggcgacgacgacgacgaagctgcagctctccatcggccccaccgtcatcgcgccgggcgccgacgctgctgcggcgaccgcctccgccgtcggcgaggaggacgactccgaggcgaaggagctgcggcgcgcgatgaaggagaaggccgcagcggacgcggcgcgggcgcgggcgcgcggggaggccgccgcggcggagcgcgcgctggacgaggcccgccgcgccaggcagcgcgcccgggccgacctcgagaaggcgtgcgcgctgcgggaccacgccgcgcgcctgctcgcgcaggtcacctgccacgcgtgccgccagcgctcgctcgccgtggccggcggccccgcggtggcctgcgactccattatcaggggaggaggaggagaagcaggcatctagctccaccacccgtgctcgtgtgcatgcattgcatataccgtatgcactgccttgtagatctagctaagctaattcgtaatgtaggacggccttgtcggtcgtgtcgtgtggccattactgcattgaatgcaaccatatgcgcccgcttggtttcta

SEQ ID NO: 153873 - DNA, 1255 bp, Zea Mays
acagtaacataccactcggagtcgcgcagccagatatagctcgctctgggagaggttaatggcggctagtcttcagctcgccattttcatgtccgccgccatcgcgctcgggttcgccggcgtccaggccggcgcggcgcagctgtgcagcgagtactacgaccggacgtgccccgtcgtgcaccgggtcgcgcggcgggtgctgaagaaggcgcacgagtccgacgtccgcatctacgccagcctcacccgcctccacttccacgactgcttcgtgcaaggctgcgacgggtccatcctgctggacaacagctccagcatcgcgtcggagaagttcgccacgcccaacaacaactcggcgcgcgggtaccctgttgtcgacgccgtcaaggcggcgctggaggaggtctgtccaggcgtcgtctcctgtgctgacatactggccatcgccgccaagatctcggtccagctgtccggcgggccacggtggcgcgtgcccctcggccggcgcgacggcaccaccgccaacaacctcccaagccccttcgacaacctcaccacgctccagcagaagttcggagccgtcggcctggacgacaccggacaccgaccttgtcgccctctcaggggcgcatacgttcgggcgcgtgcagtgccggttcgtgacggcgcggctgtacaacttcagcggcacgaaccggccggacccgacgctggacagggggtaccgggcgttcctctccctgcggtgcccgagggccggcggcaacgcgtcggcgctcaacgacctcgacccggccacgccggacaccttcgacagcgactactacaccagcatcgaggcgcgccgcgggacgctgcagtccgaccaggagctgctgtcgacgccctccgcgcccacggcgccgatcgtccaccgcttcgccggcagccagaaggagttcttcaggagcttcgccaggtccatgatcagcatggggagcatccaggtgctgacggggagccagggtgagatcaggaagaactgtagagtggtcaatggaagctagactcgtcgaagacgcaagtagtagcttttgtaatgtggtgtgtgcctaagttactggtgaattgaaattgaaagcacttctgctatgtacgatgctgcaaacatgtacgtgtagacgtgtagtttgagtgcatgatgcaccgatgcatttgtttatgtcaaaaggtgattcaataaagtggtgtctgaatttttgttcaataaaca

SEQ ID NO: 153874 - DNA, 1401 bp, Zea Mays
acccgattcaaacggtttcaaaagcgcgaccccaccgcagcccgcagggtccacggctctcgtttccgcccgcgccacccgccatgtcgtccccgccgcgggggcagcccgccaccgccgccgtgccggcggtcgcggccgccacgtccccgcagttgcctgcggcgtcccacacgctcccccgcgcgttcctcgccacatcctctccccgtgccatagtggcagcaccggcgcccccgctattcaccggtcggccgctgaaccctaacccaccggcccacggctcctccgtgccccacggcatcctctaccccgtcctgaaatccgcctccacgtccaactccgcggccgcggccgtgacagcgcagctccgccgcgttcctcccatggccgtggggtaccctcggacccacgccgtcgccatccctattgcacagcagcagcagcccctggtgcacgcgcaaccccggtccttcgcggccgtgcctcgggcccttgtgactggcgtgtcgacggggtccgaacagcctccccgaggagttcctataggctcgcagcccaaggttaatccagtaccacctgttggcccatccaatgagcagagtaacccaaaagacagggaaaagagcagagaagaacctacagttgtggtgattaatgaccgcaaagttaacctgctggatagtgagtcgggatccttttatgctctctgtcgatcttgggttcgtaatggtgttccacatgaaagtcagccaagctttggaaatggtgaaccacttcttccaagacctttgcctgcttcagttgtagattctagaatatcagacaaggacgataatgatgttgcaggtgaagattcagatgaagagccacagaagaatgccaacggtgaatacaatacaagtgatttattgaagcagcatgtaaagcgtgcgaaaaggatacgtgctgggttgcaaaaggatcggcttcgtcggattgaaagatacaagcaacgccttgcacttcttttgtagaatcggcctgtgactgtataaagctgaaaccataggtgtttgtcttgcaggttttaacttccgtattggaatttgttaagatgttttattgactagcattgtatgttaggaccatctggatgttttattgccaacgttatctaataaaatgtgaaaaagcctttagctaagttggttggatgatctgagtagcactattaaagttttgagtatggtgccactgtgcatgggtgagacaaaggttcgaagttcgaaggttttctcgagctgcatgagaagatcttaaatgtaatgtaggtcttcttaaaggtaatgccgttgaggtggtcttaccatatatgtggattttttttatctagtgaaatgaaactgaaatcatagtcat

SEQ ID NO: 153875 - DNA, 1801 bp, Zea Mays
ggccacaaacacccgcgctcgtcgctgtctcctcctcgccttttgccccgcatcgcgtctcgctgaaaccctctcggtcaccgccgctgtcgatcagacccggctgtagctcagggaccccgtcgctgcagtatcctccgagggtcgttggcgggggagtcgtcgtcgtcgtatttggctgccggaattcgatgcgccacggagcgggcgagaggacctagttgagttgaatacggcagcgacgggaggacgtgatgccgggggtggcgtccgcagcgggatcggggatctggtcgcgccggcgggacgagatcacgttcgatcgccttcagaagttctggaatgacttgcttcctcaagcacggcaggaactcctcaaattagataagcaaactctcattgaacaagcacgcaagaatttctactgctcaaggtgcaatgggttgcttctggaaagttttgcacaaattgttatctatgggaagtcactgcagcaagaagcttcagatattggtcatctgaggacagctattgaattaagaattacacatggagagcaagatggcgctcaggacccatcaatccatccctggggaggcctttcaaccacaaaagatggcttccttacgcttcttgactgctttataaaagcaaaatcattacgggtgcttcagaatgtctttgacaatgcacgggcaagagaaagggaacgggaaatgctttatcctgatgcctgtggtgcaggtggcagaggatggatcagccaagggatggctaactataggggtcatggaataagagaaatgtgtgctctacacactgcccacctttcatgtactacactggtggatttctggtcagcgcttggtgaaggaactagatcatctcttctgcggatgaaggaggaagatttcattgaaaaacttatgtacaggtttgatagtaagagattttgccgagagtgtcgaaggaatgttatccgtgaattcaaggatctgaaggaactgaagcgcatgcaaagggaacctcgctgcaccagttggttttgtgttgcagatactgcttttaagtgtgaggtgtttgaggatgctgtcgtaattgattggcaccagtgcttatcagagccagatgaatcttatgaccactttgaatgggctattgggacagatgaaggagaatccgatatttttggctttgaaaatgttggaatgaatgcacaagtccacagaaatggaatcgatcttgatcagtttgaggactacttcataacgttgcgagcttggaggcttgatggccagtgcacagagctgtgtgtaaaagcacatgcattgaagggtcaatcatgtgctcaccacaggctagtggtgggtgatggctttgtgactatgacaaagggtgaaagtattagaaatttctttgagcatgctgaagaggccgaggaagaggatgaagacgatgccatggacagggatggaaatgattttgatggtgatgatgcccattcacagaagcatgccaagagccctgaactggcaagagaatttcttttggatgctgctgctgtgatattcaaagaacagattgagaaggccttcagggaaggtacagcacagcaaaatgcacgtagtgtttttgtgacccttgctttaaaacttttggaacagcgagttcatgtagcatgcaaagaaataattacgttggaaaaacagaacaaacttcttgaagaagaggagaaagaaaagcgtgaagaacatgagcgcgggatgaagaggagaacaagagagagagaaaagaagaacag

SEQ ID NO: 153876 - DNA, 1412 bp, Zea Mays
ggacagctgtttcttgccaacagttagatctgtcagagagatgaagatagcaagaaaatcaggagttgagaaacctaaggtgcagtacaacagatgctatacattggatagctttatagtgccaaaaggaaaccatgctggttgtacacagaaaaatgctatcccaaagcaagtatgggagcctatggatgctcgaaggaagactaacttacacaacacagttcatgattcaggttcaattaacgatgttgatccactgaaacatgtggtttttgataacagcggatctcataagttcagtgtaagatgtgaatcacagcctcaggcttctgaaagttccagggatgtttgtaattcagatcaaagatgtgcaaatggtgggagaaatcaaactacttcctgtgctagtactcttatggtaaataaacaaaattgttactcagaaaatgatgaaggctccaggcatgatgtagagctgatgacgaactctgctagttctgatagcacctcgtcatgcatgagccagggagatagggaaagcagctccagcagtacaacctcttcgagcgctcaaaatccggaatcatcttctgaatctgaggaatcaccggagagaataaacagcacagtaggtacaccatcatcaagagctgcttcacggtctttgcttgaagcatgtgcaggaaatggtttcagagaataccaacccaagacaacccgcccagctcacaatgacatgtttgggtacaatgtatcccctgtccaagaccagctgctgcattaccaaatcacgcatccacctcaacaaccgccaataacaatgggatttcatgaccgttcttgggctgcaccaacgaatggaaactttcaccatatacctccagagcctattcacaaggccgcaggcagctttagagccgtgcctctgtcactgccttttcaaaacggacatcggcaggttgctgagcatactcagagagacatgaatctagagaggcacccttcgaagttgactatgctgacaggcaaggatcccccagaagacaagaacaagtcgggactaaagtatctcccagaagacaagaacaaatcatgggaggcggatgcatccttctcgttgttccaattcaacttgccaatagcttcgcctgtaacaccatcatcgaaagataagagcggaaagttggctgcaaggacgccactggttgaggttcaacctcagctttgcttgagggaacaggcagatgtgaagcagtataacctcttctcctcgaaagataatggtatattttcgtttatgtagataaattaaaaactgtgacaaatctgttatccttcgtttctgctgtctcttgctgcacttcgtgaatgatttgtgttctccggagaaaaataaaggctgttggcatttt

SEQ ID NO: 153877 - DNA, 1988 bp, Zea Mays
ccgctcctctagtctccacaatccagtccttctccagtctgcccgctcattctgtcgaacacctcgtcctctacatcctcatcgacgtcttcccaattcaaaactcctaaaccctagcccttcttcccgacaccaccatccatccaaaatcactgggtgatgcggaagaggtagcctccgccgatggcctgctgcttcgtccgcgtcgctgcggcgccccgcctcctcatctaccgcgccgccgctccgcggcagctcccgtcgccgctcaacgtattcaggaagggtttttccgagcagtcagttctgccagtcacagattcgattgagtgtttccaaggaccatcagtgccgaatactccacggattccactgtatgatgacagcgtatcctcaagcatattggatacattgtcgaatccgactgggggtgtccctcatgctgatccttcaaagagcagaataatgctagttgatggaacgtcgatgatgtatagatcctactacaagatattagcacagctgcagcacggccagttggagcatgctgatggaaatggggattgggttttaactatattcaaagctctatccctgcttcttgacatgctggagttcattccatctcatgctgcggttgtgtttgaccacgatggagtcccatatggtcattatactgccatgccatctaaagaatgtcacatggcaaaaggaatgacctttcgtcatatgttgtaccctgcttacaagagcaaccgcactccaacacctgacaccgttgttcagggcatgcaatacttgaaggcatccattaaggcaatgtcaataaaagtaattgaggttccaggcgttgaagctgatgatgttattggcaccctggccataaacagtgtttcggctggttacaaggtacggattgtctctcctgataaagacttcttccaaattttatcaccttctttgcgtctgctcaggattgctccacgtggatcagggatggtttcatttggagttgaagacttcgtcaagcgatatggaccattgaaaccctcgcagtttgtggatgttgttgcactttcaggagacaaagctgacaatatacctggagttgaggggattggagatattaatgcagtaaagctgatatctaagtttggttccttggataatctactgaaatccgtggacgaagttgaggatgaacgaattaaacaggctttgatttctcactcggaacaggcaatcctttgcaaaaacctggccacgctgcgttctgatcttcctcattatatggttcctttcaagacagccgaccttgtatttaagaagccacaggatgatggagagaaattcataaaactcttacgagcattggaagcatatgcagaaggttcctcagtaaatccaatcatcagaagagcagcctatctttggaacaaacttaaatcatgatgacactgatgttttcagcgttgaataaaaaggaattttgtcaaggctgagagtttgggttcaaagcttggtgtcgtagtgctcaatactggcggcattgacttctgtggactcggcggccagctacactcacatcgcaacgcaaaatcaaattgttgctggcagaagtgcataaattgaaggtgccgatgcttaagcaaagcagctcagtgtttatacctcggaacttagctctgtagataagaaatgcacaacattgcccatgtattccgccttttttgagaggaaagctcgtggaatctatttgattttttttctctgtactaccaattacaaagggttgtaggtggagctgtggaggccagagcgggcaaccgtgtggcttaacattctaccacgcctagcactctagcaggtttcatgaagtctactacggtggtgaatcagatcgcacaactgttgtgttgtaggagcgagtatgtgctcgttttgtcgcacaaagatgttgtaaggctgagtccaatccttgtcgatcc

SEQ ID NO: 153878 - DNA, 3029 bp, Zea Mays
cctaggtttgctcgcgtaccctccccggtctatatgttgcctcggtctagaaatcgacgcgttcttctcgcttctcgtctacatctaagcatgcctacacctgcggtttccagatagggtgtttggtacgatcgagcaacggtgaatctcgctctgttatttgtttgttcgaaacgcgtggttttgtttttgagatgatgtgcaggttccgatctgattggtttgattgatgagtggcgaatcggattgaagcgagacgaggctgcatggtttccgtgctccgaggcttctgatctgcgtgtttgctccgagactattggtgcctgacccggcaaattgcaatctgccgaccttcagagccgggtcgttctggcgagatctagacgtcgaagggctattaaagcgtggctggatctctttctgcaccgcgcctctcgatgatgtctctgtgttgataattattggatgaaatttcgataattattagatctgagagatgttggtcggagcgatccgcgcctaaatggcaaggtaagttaaacacatgtaactacagagttgcgtgtgtgaagtcaaaagagggggaaagatactgagaagggaggaaaaaatatgaaagaagtgaggtgtgacatcttgaaggcctttgccattgtgggtgcgctcgcatggcaggccaccataataaagatgctggttttgtgtgctgggtgggagatcgcacggggagttttcatccctgggttctgccacccttttgtgtccctgtgccctgcttacgattcatcacggcgtgtttcaaatgaatggagctacagcgcaacacaaaggtacaactggatctaaattttcaattcaattgcaatttagaacgcatatatttatttaaatccatgtatgcacagctgcctgaagttactgaaatcatcatcaatcgttaaaaccgtacacgcctacactgctccttccatgctttttcattcacccaacgttgctctcccaaaggccataaaccactgacacatgagggaggtgttctctatagagtatcgacgacgataacgctgaactgcataaatttggttatatcatctgaaatatagaaatcgggtgcaaatgaaattagttactatttgttcattcaaactatgatgtctgaaaattcaggcaattacagattctcacacgagattatgaggttgtgatccaaatcgacaattatctgttgatttgttcaatgtcttatggctgatcctgttggagtttattgggtttggtccatttactcaacaacttttaaaggccccctctgtttctgaccttaccttgtgcgttgagttcataattgaatccatgaaatcgtggataccgtaaccgaactaaatccatggataccgtgactgagttagtttcagttttctatcttttgtgtctggttattatgagtaatttttctgtgtaaagacgattctctcctcgaaagatatgagaaataaccaacctgctatgtggtatggttttaggcaaaaggagcattcggtgttgtgtgattttaggctcctgtcaacactagtgtgacgacgaaaacagtctttgaaatcttactctgctgaagaacctgaagggttattgcttgtcgagttgtgatttgatgatctgtagtgttacgtcaatggacttgaacaatatcgtgaactcatatttgattgtttggagcaatctctgttgtgagtaataatgattttatcgcttttggttttgttagatacatttaagatagattttactcttatttgctatgcgtggtttatccattgtttatatagtggttgtcttagaaattactttaatccttaaaaaggtgtgcaatcttccaacacatcatgtggactcaaaattactctctagttgatttgtctaaatatactgcagctgttcttgttggtttgtcagctatcatcattcttccattattaattattatcaattaaggtttcacaaggtattatgaaagattgttctttcttagtttgtactctatccattctaaattataagtcattctaatattgtttgagccacaagtttgattaaagctatagagaaaattatgaagattcatatcaaatgtaaaatctaaattaataagaatctagtgacatttagtatcataaatgttattattttaatgtacaacttaggttagacttaatatttctttgactcctcaagaaagttggactgacttaccatttaggatggagtatgatttattattgtcttataaaagcctggatcggtatactctgaatatctgagtacctacatgatgagtatttgtaagatgtgtgaaggtcgactgctaggtatacattgtcagtatgaaatggctatcgtcttcagctttctttcctggtcagtggacagtgaaatatttatacgatgtgttaatgtggactgctctgtataaatcgttggtacaaaatggctatggtcttcagcttcatttcctggtcactggacagtgaactgctcaagcacacttagtagatactaggcacaatcagagcttatcgaacttgtgcgatatagttcgtttcagtactccatggttatgatgttattgatcactattgagctgaagcactacaatctgtgacaaaaaaatttgatacagcagcaaccaccgctgaagcttggcagaagggatgaaattaggaatacgaaacccattaggcctgtttggttgttcggtcgattatgtgtttatgttgattttgaatggattttaccaggtcaattcttatagaagcaagctcagaagctgaaaaaagctgaggcccaatatgccatagatgggagatctgttttctttttgttcccgggcaaatatgctttgctctaggttcagcttcttgtcttctatattccaaatttttttgtataataattctctttgggtttaaccatttactctgaagcttctgtttatatatatgcgagtctattcttgagcagtttttttttca

SEQ ID NO: 153879 - DNA, 697 bp, Zea Mays
aaaatagaagattttgatgttgagtctacagagacgggattgaggagttgaggacaggacacatgagatttctggtgactgcattctttgattgcaaaaaaatatctacagttttggttcaagaagaacaaaacaaagtaccaaatctgcatgctccaagagtgttagatagcagcaaagtctctaacaaaaatgaacagcggacaatgatccgactgatggctcaacgggacgcgacgaaaaaggctgcacgcaccgtgccagggatggagattgtcacgctgttcgtaccgtcgcacagtgttttcgcccatagacaacctacgcccaagcgttcgagacttcgggggtggatcccgagcttccgcttgctacggagcagagagccacgacaggggtggatcccgagcttccgcttgctgcggagcagagagccacggcagagcgagctcaacaagagggcccctatcatgccttttgatggaagctatcctccatattgtgctgctaatataacatctagatattttttactgtaagaaccctcagtgtagtctccaagcggtaagcaccactgcagtctgcagttaaaatgcgtgtttcctctacattggttctgcatttatttaagtttggcaatgttgtgctcaacaaatttggttaacatatcagcaacaataccgtttggaagacaatt

SEQ ID NO: 153880 - DNA, 112 bp, Zea Mays
gtgctgtgacaactgtcaattatggtgaagcaaagttttctttagtaactcgtcttttggtcgatatattgtattgctaccataaacttgttaaaatattttacatgttgtt

SEQ ID NO: 153881 - DNA, 1544 bp, Zea Mays
gtgttgtcatgcatggagcggtggttttggactctggtgtgctttgtgtgaggtgtcagctgagggatttacggggcctcaccagttcacctccaccaaaaaaagatccctagtagtagtaggatatagtggagaaattcttcgacagaactgaagaactgaacgaggagagacaccaaaggaggagaggcatctctcaggcatggagctcaatccgaccgaagactctgtgatctccgagttcgtgatcgttcagagatgaaacatatagtccactctttctgtcatgtgagtgaacaatttagcccccaaaaatttactctctgaaacatgggtgaccttcccgagccagaagctgccatggccgtgccggagccgtcgtccagcctagcactccgagtcttctacctgcgggtgagcaggtgcgaggtcgacgagtccatgctggatactctcgccctcacccacaccccgctcacccctgacaccatcctggacgtgagcggcgccgagcaccagccaggcatgggcaagggcaacggcagcgtgtccttctgcctccgccgagaccgcgtcgacaagagatcgggggaagccaccttcgtctgcacggcgaccgtcagggtgtcgggcagcgtgcggttcgaggtccagagcaaggacgagaggatcgtcgtcgggatcctggaggcgtgcgacgtggacagcaagggcaccaagagctgggcgatgaagtgccaggcggcgacgcagcgcggctcggggttcctcaggtgcggcggggagaagagggacacgaagccgccggtggtggaggtgtacgttgcaggcgtgttccggggcacgcccgtcgtgttcaccaaggccacgcagctgcggttcaggcggcggcggcaggtgagggcgttcatggacccgatcccggagtgccgcgagcaggtggaagaaacgcatcacccagaggaatcgggataccggtgctacaagcccgatccgaactgggacgacgacgacgtcgacgacgacagcctctacatgagatccgacgggaccgacgacggcgaggagtacagcgagctgtcatggttcaccgccggcgtgagggtcggcgtcggcatcagcctgggcatctgcctcggcgtcggcatcggcgcgggcctcgtggtccgttcgtatcagtccacctcgaggaccctgaagcggcgcctcatctcaaacctgctctgaaacgaccacactgtgagcgcttatccggtggttcgaaaactttcctactgatgatgatgaaaaatatatgtatgtagatgctgcaacgttgtgcgctgtgccgaatgcatttgatttatagatcgaggaaaacaatctcttctccctgtaaactgttgatacggaggtgttgagcactaaaaatgccaccagaaagtccgcggtccggatgatccgcgttgccaatacgaacggttcatgcgtgcacaaaattagttaggttttatgtatttgttactgcaggattaattgtgaaactgacttttaataggtccaga

SEQ ID NO: 153882 - DNA, 2226 bp, Zea Mays
agatgtcaattagtacgtggtatgccatgcatcgttgagtagtagttgcgctgctgtttaaaacgccataaaacagagcgggctgccgcccgcgcgacacgctccgcttccctcccactccctcaccatccctgccctgctctgctttgcttgcctaacgggtcggaggcggggacggccccaccgccccgagctctcaaccgccgatggacgccgccgggccgccatcggcagccagtggctccggctccaactccaagacctccctcctcggcatgccggttcccatcgcgatggccgccgccgcggcactcgtcgtcctgctcgtcctctccgcggttgtcgccgctgttctactcgcgcgcaggcggggcgccaggccgccctcgctgtcgcgcgtcgagcacgcgccgtcctccgcctccgcctccgcctccggctcctcccgcgccgcgtcgtccgcgcgcagggagaaggtcggcgcggaccaggtcgccggggcgggcgccacctcctcttctggcgttgccagctcctccgcggccgcgagctcgctcgagtcgccggtgaagaggaaggcggaagcggtcagggccgcggcgggcgtggacatggagatggagatggggtgggggaggtggtacgacctcacggagctggacgtcgccacgggcgggttctgcccagagaacgtggtcggggagggaggctacggcaccgtgtaccgcggcatccttgccggcggcgaggtcgtcgcggtcaaggacttgtttgatcacaagggtcaggccgagaaggaattcaaggtggaggttgaagccatcggcaaagtgaggcacaagcaccttgtcggtctcatcgggtactgcgcagaaggccctaaacggatgctcctttacgagttcgtcgaaaacgggaacctggagcagtggctgcacggcgacgtcggtccggtcagccctttgacctgggaaatacggatgaagatcgccgtcggaacggccaaaggcatagcgtacctgcacgaaggcctggaaccgaaggtggtgcaccgcgacatcaagtcgagcaacatcctgctggacaagaagtggagccccagggtgtcggacttcggcatggccaaggtgctggggtccgggtccagctacgtgacgacccgcgtgatgggcacgttcgggtacgtggcccccgagtacgcgtccacgggcatgctgaacgagagcagcgacatctacagcttcggcgtgctgctcatggagctcatctccgggcgcagccccgtggactacaaccgccccgccggcgaggtcaacctggtggagtggttcaggggcatggtgggcagccggcgcgtggaggacctggtggacccgcgcatcgccgcgccgccgccgccgcgggtgctcaaccgggtgctgctcgtctgcctccgctgcatcgacgccgacgcgcacaagcggcccaagatggggcagatcgtgcacatgctcgagggcgacgagttccccttccgcacggagcaccgctcgccgagggcgtctcaccggacgtcgatggccacgcggccgtcgcttctgtcggagaacgtaggtgccactgacgactcagacaagtccatgtggagatgaaggatctaaccctgcacgaacacacctggcgcggcatgcgaggagccggagctggggcttgggggatggactgactttttctcaactggtgtaattttttgttgttgatccacggcgggatgagcgttctaatttgctatgctgctcgtttggtttgatggtgtttaccgtaatgtatgatttggcacagacgcacagatcttcttttttgttgttcattattactaggctttggcgaccccgcgaagctttcttcgaccggcgccgctcccttggccacatgctcggatagtcggatactcgaatcgcatccgggacgacgagagatcccggtgaacaggaagggcggaaccagggacagagccctaaaaaaatcactatagtatctacattattatgtgtacactaaaaatcttaggtaagactttcgtggagttttataggctcgacagcgatagcaggtgctcgagcctcgtccgctccactgctgcctctaccctaggcggaacaacaatgtactgtttggtttagcaaggcatattcatttagatatacactaatataaaaataatacaccctttgtaccaaaataaaa

SEQ ID NO: 153883 - DNA, 1233 bp, Zea Mays
gaagctgtgttagctttcaagggaatcaaatgcatgcacgggtcaggccgagaaggaattcaaggtggaggttgaagccatcggcaaagtgaggcacaagcaccttgtcggtctcatcgggtactgcgcagaaggccctaaacggatgctcctttacgagttcgtcgaaaacgggaacctggagcagtggctgcacggcgacgtcggtccggtcagccctttgacctgggaaatacggatgaagatcgccgtcggaacggccaaaggcatagcgtacctgcacgaaggcctggaaccgaaggtggtgcaccgcgacatcaagtcgagcaacatcctgctggacaagaagtggagccccagggtgtcggacttcggcatggccaaggtgctggggtccgggtccagctacgtgacgacccgcgtgatgggcacgttcgggtacgtggcccccgagtacgcgtccacgggcatgctgaacgagagcagcgacatctacagcttcggcgtgctgctcatggagctcatctccgggcgcagccccgtggactacaaccgccccgccggcgaggtcaacctggtggagtggttcaggggcatggtgggcagccggcgcgtggaggacctggtggacccgcgcatcgccgcgccgccgccgccgcgggtgctcaaccgggtgctgctcgtctgcctccgctgcatcgacgccgacgcgcacaagcggcccaagatggggcagatcgtgcacatgctcgagggcgacgagttccccttccgcacggtattgtttcgctttgttctgttctgttctcttcgctcgccggtattgactgactgactgactgacacgcgcccgtccgtccctgtttttgcttttgcgcgatgcaggagcaccgctcgccgagggcgtctcaccggacgtcgatggccacgcggccgtcgcttctgtcggagaacgtaggtgccactgacgactcagacaagtccatgtggagatgaaggatctaaccctgcacgaacacacctggcgcggcatgcgaggagccggagctggggcttgggggatggactgactttttctcaactggtgtaattttttgttgttgatccacggcgggatgagcgttctaatttgctatgctgctcgtttggtttgatggtgtttaccgtaatgtatgatttggcacagacgcacagatcttcttttttgttacataaaaatcaaaagataaaacg

SEQ ID NO: 153884 - DNA, 1921 bp, Zea Mays
ttaattcttggtttcaataggactccttacgagcgttctttctatctactattatctaaaaataatcaagttattaatgactggacgaaaccaagaaataaccccttatgtgcgaaattatagaagatcccctttaagatcaaacaattccatcgaattgagtatgactgtatgtgtgatagcatctactataccaggaatatcaatgaaccccattcttgcaattgctcaggataccctcttttagctgctaggtctatttcttagttcaagatccctcttactaactggaataaaagaattagtagatctgttccgcccaaaatgggaatgggtgctagggttaatatatagaatgcccttaaagctctctcgcgtgggccggcgttcgaatctgattcctcgtgggccgccacaggctcctcaatcctcatggtctgcgggcggcagcatgccgatcggtcggaccggccgaccggaggatttccggcactccactagccccacgcgatctgcctgtcccacgaggcgaatcagtagcttcgctccggcctccgggggctccgcggctccgctagtccgctccggcgccacggcccggctcggaggggcgtttcggggagggcgaagcggacgccagcgtttccgtttggttggcgtggaggcgaagctgctgctggagcgctacccgggtttcctccgttcactagcgctcgcgatctgatgatcgttggctagttgctctgccagagtcccagccagcgctcctccgccatgatccaggcggtgatggtgatcagcacccaggccaagccccgccttctcaagttctacagtttccagccacccgagaagcatcaggacctcgtccgctgtgtcttccaattactctctgcaaggcccgagagcgcgagcaattttgtcaaggtggactccatctttggcccgggaacaaaaatggtctacaagcatttggccacactatactttgtttttgtctttgatagctctgagaacgagcttgccatgctcgacctcgtacaaggtaacccaatggcttattgatgaaagaggaaagctttctcacttttctaagagaacggattatattcatgccattcacctgttcggcctgtcttactgcataaatattagctatttattgtgcttatttcagtattcaatcacccttgtatttaacatttttattctgtatttgatgcattattttttctgttatgaagtacctacgaattttgatgtaactacactagcatgttctcaactttcttctctgtccatcaattcttatagctactgaaaattttcactttggacttcactataactgaagacttattttgtcttccttttgtctaaaaggacttatcagctctggttctaggagattgatcactctatactaactttgtctcgtgcacagtgtttgttgaaacattggacagatgcttcaagaatgtatgcgagcttgacatcgtatttaacttcaacaagctgcacaccattttggatgagatgatatcggggggacaggtgatcgaaacaagttcagaacagataatgaaatctgtggaagagattgaaaggctggagaaacaatcgagcacaaccagcttcatacccaagtcgattacagagcgttttacccgttgagcttccactcgtttccagaacaatgtgacatttaaggtgtgaacagaactgagatatactattcagtctcattttagttctccgataagaccttgtatgcccccgccccccggctgtattctgtaagcctgtaacctggatatgaatgcggcatctgcagtccaataatactgcctgcgttatatgcttgatcgtctgacagtgctcgctaaggtttagacatgccccagtaacaaattagcaatat

SEQ ID NO: 153885 - DNA, 2035 bp, Zea Mays
gcgttcgaatctgattcctcgtgggccgccacaggctcctcaatcctcatggtctgcgggcggcagcatgccgatcggtcggaccggccgaccggaggatttccggcactccactagccccacgcgatctgcctgtcccacgaggcgaatcagtagcttcgctccggcctccgggggctccgcggctccgctagtccgctccggcgccacggcccggctcggaggggcgtttcggggagggcgaagcggacgccagcgtttccgtttggttggcgtggaggcgaagctgctgctggagcgctacccgggtttcctccgttcactagcgctcgcgatctgatgatcgttggctagttgctctgccagagtcccagccagcgctcctccgccatgatccaggcggtgatggtgatcagcacccaggccaagccccgccttctcaagttctacagtttccagccacccgagaagcatcaggacctcgtccgctgtgtcttccaattactctctgcaaggcccgagagcgcgagcaattttgtcaaggtggactccatctttggcccgggaacaaaaatggtctacaagcatttggccacactatactttgtttttgtctttgatagctctgagaacgagcttgccatgctcgacctcgtacaagtgtttgttgaaacattggacagatgcttcaagaatgtatgcgagcttgacatcgtatttaacttcaacaaggcagcagaaaaggtgggacacagaagctgcatcaccatttttgacagcagttgggttatctgtatcaaattacgcctttttatgcacatgtcatatgcagtgctgtgcaaatctgaaagtttgagtataacaaatgcctgaatccaagaatccctgttatgcagaatagctataccattatctatccatctaattaattattgtggttgtaataggcaatatagataggcttcaaatggataattttcttaggagctgggtggagtttggatggcagctgccttaaatgatggagggcactgggcacccctgtgagagaggctttggctaagcagagagatagagttaagaacttgagatacataggactcctttttttaattccattgtctgctttggctctgcactgcgcacatcgttatgttgaagagaattctcactcttcagaaatctaagttaacatagacagaaacaatctaaacaataaagatggaatcatgtatatattacacagtacttcaaatagggaatctgcaccatccttcctgctgcctacccattgtggctgctgcccgtgttagtttggcaccacctcccagtggtgtagaaattgaaaaacaaggaagaagtgaagaacgagtctactggagcatattttcatgccgtggcaatagaattttgttagtatgcaggtagttgtagctctacgccaaacttttgccccttagcactgaacctgtggatgcatatggtgctggttttcccttgttctttgaattctcaacttaagtgttggcaatgaaatgctcaatcttaagacaaaatgccctgatgattcattccactattcttgtgtttcttcatgttcctttatttaattgtcaatatctgatgcagctgcacaccattttggatgagatgatatcggggggacaggtgatcgaaacaagttcagaacagataatgaaatctgtggaagagattgaaaggctggagaaacaatcgagcacaaccagcttcatacccaagtcgattacagagcgttttacccgttgagcttccactcgtttccagaacaatgtgacatttaaggtgtgaacagaactgagatatactattcagtctcattttagttctccgataagaccttgtatgcccccgccccccggctgtattctgtaagcctgtaacctggatatgaatgcggcatctgcagtccaataatactgcctgcgttatatgcttgatcgtctgacagtgctcgctaaggtttagacatgccccagtaacaaattagcaatat

SEQ ID NO: 153886 - DNA, 1200 bp, Zea Mays
gcgttcgaatctgattcctcgtgggccgccacaggctcctcaatcctcatggtctgcgggcggcagcatgccgatcggtcggaccggccgaccggaggatttccggcactccactagccccacgcgatctgcctgtcccacgaggcgaatcagtagcttcgctccggcctccgggggctccgcggctccgctagtccgctccggcgccacggcccggctcggaggggcgtttcggggagggcgaagcggacgccagcgtttccgtttggttggcgtggaggcgaagctgctgctggagcgctacccgggtttcctccgttcactagcgctcgcgatctgatgatcgttggctagttgctctgccagagtcccagccagcgctcctccgccatgatccaggcggtgatggtgatcagcacccaggccaagccccgccttctcaagttctacagtttccagccacccgagaagcatcaggacctcgtccgctgtgtcttccaattactctctgcaaggcccgagagcgcgagcaattttgtcaaggtggactccatctttggcccgggaacaaaaatggtctacaagcatttggccacactatactttgtttttgtctttgatagctctgagaacgagcttgccatgctcgacctcgtacaagtgtttgttgaaacattggacagatgcttcaagaatgtatgcgagcttgacatcgtatttaacttcaacaagttgcatgttttaggcagcagaaaaggtgggacacagaagctgcatcaccatttttgacagcactgcacaccattttggatgagatgatatcggggggacaggtgatcgaaacaagttcagaacagataatgaaatctgtggaagagattgaaaggctggagaaacaatcgagcacaaccagcttcatacccaagtcgattacagagcgttttacccgttgagcttccactcgtttccagaacaatgtgacatttaaggtgtgaacagaactgagatatactattcagtctcattttagttctccgataagaccttgtatgcccccgccccccggctgtattctgtaagcctgtaacctggatatgaatgcggcatctgcagtccaataatactgcctgcgttatatgcttgatcgtctgacagtgctcgctaaggtttagacatgccccagtaacaaattagcaatat

SEQ ID NO: 153887 - DNA, 1231 bp, Zea Mays
aatcctcatggtctgcgggcggcagcatgccgatcggtcggaccggccgaccggaggatttccggcactccactagccccacgcgatctgcctgtcccacgaggcgaatcagtagcttcgctccggcctccgggggctccgcggctccgctagtccgctccggcgccacggcccggctcggaggggcgtttcggggagggcgaagcggacgccagcgtttccgtttggttggcgtggaggcgaagctgctgctggagcgctacccgggtttcctccgttcactagcgctcgcgatctgatgatcgttggctagttgctctgccagagtcccagccagcgctcctccgccatgatccaggcggtgatggtgatcagcacccaggccaagccccgccttctcaagttctacagtttccagccacccgagaagcatcaggacctcgtccgctgtgtcttccaattactctctgcaaggcccgagagcgcgagcaattttgtcaaggtggactccatctttggcccgggaacaaaaatggtctacaagcatttggccacactatactttgtttttgtctttgatagctctgagaacgagcttgccatgctcgacctcgtacaagtgtttgttgaaacattggacagatgcttcaagaatgtatgcgagcttgacatcgtatttaacttcaacaagctgcacaccattttggatgagatgatatcggggggacaggtgatcgaaacaagttcagaacagataatgaaatctgtggaagagattgaaaggctggagaaacaatcgagcacaaccagcttcatacccaagtcgattacagagcgttttacccgttgagcttccactcgtttccagaacaatgtgacatttaaggtgtgaacagaactgagatatactattcagtctcattttagttctccgataagaccttgtatgcccccgccccccggctgtattctgtaagcctgtaacctggatatgaatgcggcatctgcagtccaataatactgcctgcgttatatgcttgatcgtctgacagtgctcgctaaggtttagacatgccccagtaacaaattagcaatattcttatcctgagaactagtgtatccatggtgtccgagaaagaactagtgtatccatggtgaccagaatagaactcttcggaattaactaccatccttggggcatggtgctatcatcctgagaactattttggtc

SEQ ID NO: 153888 - DNA, 2213 bp, Zea Mays
gtcatttctatacttctccatcaagtcacctccccaaaacagccaggagctgagcggcaagataattttctacggttaataaggacgccgcttgggcggtcggcggagacacagatcaaaacaaagagcacgcacgcttccgaaccgacgtcctcgccgacgtcgcctcgaacgtgtccctcaccgcctcacgagacctctctccccaaaatcctgaacctatataaatttcccgcgccaccaccggcagcccgcctgaccccgagtccccgagcccccctgatatacggcaggcacgcagcagatcggccgggctcggcgccaagcgcgatggactgctcatccggcgacgtgaaggcggagaccacgcggcccgcggctgttgctgccgctgccgctgccgccgccggcggcggcacgccttcgctgctgcgggggtggcgggagttccggcggagcgccgtgccggcgaggttcctctgctttgaggacggaaagtgggtcgatgtcgccggagaggcggcggcgcagctgcggcgggcgttccaggagaggagggtgatggccgacgcctcgtgcgggggcaaggcgtacctgttcgacttcctccgcatggtcaggatcgacgaggccacgggcgaggagaccgggctggcgtggatcgaccaccgcggcggctgcttcttcccggcgcccgccgcttgcggcgggggcaggaagcgcgggagggacgacgacggcgcgccggcggaggacaaggccgaggccgagtcgtcctcggccgcctcgggcgtggacgaccgctcagggggggagagccgcggggcagacgccaagaggaggaaggcattggggaacgcggcggcgagcctcggggagaaggacaggtcctaccaggtcgtcagcaagctgttcctcgaatacgggatggcgcaacgcggcgcggcggtcacggcggtgcgcaaggtcgcgtgcggcgcgagggccgcggcgttccgggaccaggggcggctcctcgccgacgcgcgcggcgccgcggccggctccgccaagttcgcgtggtacggcgcctccgcggacgacgtggccgccgtggtggaccgaggtttcgcgagcaacaacgcgccaaggctcggcgctcacaagcatggcgatggcgtccacctttccccgccgcattgcccttacaggagtgccacgctggccaaggccgacgggagcggcgaggcgcacatcgtgctgtgccgcgtgctgatgggccggccggaggctgtcccggcagggtcttctcagtcctgccccagcagccacaactacgacagcgccgtggacaagctggacaatacacagtggtacgttgtgtggaaccaggacatgaacacgaggatccttcccgaatacgtggtcagcttcaagtgctccaagctgcagctgacgcaagaattatcagaagcgacctcaaagctgaagaagccgtcacgagtggctcgcgacatgttcccgacgcttcttgcagagatcgagaagatcgtgccagacaagtgcgatctgttgcaggagtcatacagcagattcaagatgggtcggattaagaaagaccagttcatccgattcctccgcaattacgtcggagacaaagtgctgaccaccgtggccaagaaactacgaggatgctaaatttctagtgcgcgtgtctccttggtttcgccgtcttggtggtggcatacgtggtggctctgactacagcgattcaagcttgtctacgtgctagatgtctgcagtagtaccaaatagagatgaggagctttacttctgtttctgtttattcaagtttctgccaagggcgtatgcgtatagaggctttgcagcgatgctcttccattaaccaacacaaaggataggtgcagtttctgatcatgagacgtttcagttcttctgtgtcctgcagcctgtggatataatctgtgcagactgaaatgatttgatgaaaccattgttgaaccgcccaatcgcttcaaagttttgccgttcagagtgagcttgtttgggcttgtcagggagaagaatattctctccctttcttgttttttctaagtttaacttctctatatctctgaatattgacaattctaatattcagtcagcataagaaaatctagtgaatctcaccaggcatgtactctcaggcaaggttcacagtttcgttttgggtc

SEQ ID NO: 153889 - DNA, 1728 bp, Zea Mays
ctcctcaaatattctcgcccgcccggcctcccctttcctccatcctcatcaaccatttcattccttcctgacttcctcctcccgcacgcagcgcagcttgcaacccgcaacgaaccaaggccgcgccgcgcgcgccctgccggccgtcagagggaaacccagctctaactgaagtgccggctacatatactgctgtgctagctagctagctagctactcttctggtcctgagcgcacgtacgccatggctcaggaggacgtccacctggacgatgccggcctggcgctgggcctgtccctcggcggcggcggcggcggcggagcctccgccgcggcgcgccacggtaccagcagaagccggctgagcacggaggcgccgcgcacgctggagccgccgtcgctgacgctgagcatgccggacgaagcgacggcgaccgcgaccggcgggtccggcggcagcggcggggccgcgcgcagcgtgtcgtcgcggtcagtggagggcgtgaagcgggagcgcgtggacgacgccgagggcgagcgggcgtcgtcgacggccgccgcggcgcgggccggcgccggcgccgaggacgacgacgacgggagcacgcggaagaagctgaggctgaccaaggagcagtccaagctcctggaggaccgcttcaaggaccacagcaccctcaacccgaagcagaaaatcgcgttggcgaagcaactgaagctgaggccacggcaggtggaggtgtggttccaaaacaggcgagcaaggacgaagctgaagcagacggaggtggactgcgagctgctgaagcgctgctgcgagtcgctgagcgaggagaaccggcggctgcagcgggagctacaggagctccgcgcgctcaagcagctcgccggcccgcacccacatcaggcgccgtcgtcgtcgcccgccgccgcgacgcagggcgtgccggtgccggtgccggtgccgccgccgttgtacgtgcagatgcagatgcagctgccgatgccggccgccacgctgagcctctgcccgtcctgcgagcgcctgcgcggcgggcccaaggccgagcccgacaggccccaggcagccacccaccgcttcttcaaccccttcacccactccgccgcctgctgaatgatgattttgcttgcgcgcgcctgcgctgcagctgcgcaccagcacgcgcatctaccttggcgtacgtgcgcgtgcatgatgcatgagcaagcaacacgcagcggcggcagcgcgcgaacagatagcggcaccgcccaccaccgtaccgcagatactagctaccacgtacgtaggtatacactcctccgacgatccatccacctcgcgtacgtcacaagtaacatgtgatcctccgatcctctagctattttatttcttgatccggaggggttaaagttacttgtcagtgttcccatcagctaatcgatcgatcgatcgatcaatcataggcttgataggaggaggtagtagtcaaaatagccggtccgtccatccatccatccatgtatatttttgcgcatgcatgctgtaattcggtccctctcgatcggccggtctacttgctcatcatccctccccttcccttctcgataggagttctacgtagcttcttcatttgtcttctttttttttggtcttgtctcacacagacacaggttagtataataataatcgtccgagcgagggcagtagttgattaagtggtagta

SEQ ID NO: 153890 - DNA, 248 bp, Zea Mays
ctcggaagttagtaggttctcggaagttagtagcttcacgccgtcagcgccatcagctgattaacttcctacgactagctttctacggctgactgtagattcctacggctgactgtagcccttaggaagttagcttcctacggctgactatagcccctaggaagttagctagctaactttctacggcccaataagcctctaggaagttaatttgaccaacattataaatgttgtttatttttatttta

SEQ ID NO: 153891 - DNA, 782 bp, Zea Mays
atcctcacctaatgccacaacaacagctctactgaacattaccgctcatcatcaggtatacagagagatcgaagaaagagagagagagacctatacagagatggcctccggcggtggctccaagcagctgaaggctagtcttctcatggtggtagcagctctgctcctcctcatctgcacctgcactaccagggggcaagcggcaaggccggagccaggatccgagggccacacgccacagcagctgcgcgctgatgtatccatctccgtcgttgctggtcatgagaagaagagtggctcatcagtggccgtggtggaaatgcgtcgagaagatccggatcaggcggcgagagaatgtgaggacgacgacggagacgacgaacaggagtgcctgatgaggaggacgttgctcgctcacaccgactacatctacacccaggggaagcacaactagctagtcactgctcactagcctgtgctgctggctcatgctcatgtcatgtcgaggaaacaagttcaagggacaaaaacaaaacaaaaaagctcgcatggttcacgagctagcctagccaacctgaagttctacagtgccgtacgtcaactgtgtggattgttttaaaatatatacctagtctttttctttctgcagttctgctagctgtggattattttcatatatatatatatacctcgctaattaccccctgtgatttcccatcggctttctcgagatcatgtacaatatactatctatccatatagatatcatggattagacctta

SEQ ID NO: 153892 - DNA, 1293 bp, Zea Mays
agccacccgcgcatcctcagtcctcatccgccactccgtcgaacgcccctgcgcacgctccagctgctatgctcctccgcccgcgcccctccttcttccgagccgtcgtgccgccgccgctcacccgtgcctgtgtcccctcccgtcgcacgctttcagcttctgcagaggcgggaacagcctccccgaaggatgcagcgtcagcgccggttccggcggccacgcgcaagaaccccaggaaggccgggtcgccacctatggggatcgtgaagacggcgctgtttctgccgcccggggtggagcgggatgcgttggtgcccgcggacatggtcataccggggtcgaacatcgtggtcggtccctacgcaggggacgcgagggtgaagggtgctgagttcgtcaagagcagcgcgcgcgcacgggactgccccaatgacgaccggcccgagttcgccgtccttggccggtccaacgttggcaagtcctcgctcatcaacgccctcacccgccgcaaggaagccgcgctcacttccaaaaagcctgggaagacccaaacaatcaatcactttttggttaataagagttggtaccttgtggatttgcctggttatgggtttgcagctgcatcccaatcagctcgaatggactggtcttcatttaccaagggttacttcttgaacagagataccttggttggcgtacttcttcttattgatgccagtattccaccacagaaaattgatctagactgtgctaactggctcggtcgtaacaatattggattgacgtttgtgttcaccaagtgcgacaaagtgaagaaaggtaaaggagggcggcctgacgagaacatcaaggagttccatgaaacgatcagcgggctttatccagatccacccccatggatcatgacaagcagcgttaccggattaggccgcgacgggctactcctccatatgtcgcagctgaggaactactgggataatgaagcagtctaggtagagctacatagatcaagtgccactagcaacggtagcagtacgtgtatgggaacagtcatatggcctaaactttcatcgatagatgtcgcttctcatggggcttcttgttcagttttgcttccgtttttttttttttggccttttgatgtatagttgaaatgcagttgctcctagtttctgtttcactcaccctgtacaatgcccagtctcagcgggagcttcatgacattgttactaagattcacaggtattgaagacagtacaaacaagttacatcctcgtaaaacttatgaaa

SEQ ID NO: 153893 - DNA, 863 bp, Zea Mays
cccgcgcatcctcagtcctcatccgccactccgtcgaacgcccctgcgcacgctccagctgctatgctcctccgcccgcgcccctccttcttccgagccgtcgtgccgccgccgctcacccgtgcctgtgtcccctcccgtcgcacgctttcagcttctgcagaggcgggaacagcctccccgaaggatgcagcgtcagcgccggttccggcggccacgcgcaagaaccccaggaaggccgggtcgccacctatggggatcgtgaagacggcgctgtttctgccgcccggggtggagcgggatgcgttggtgcccgcggacatggtcataccggggtcgaacatcgtggtcggtccctacgcaggggacgcgagggtgaagggtgctgagttcgtcaagagcagcgcgcgcgcacgggactgccccaatgacgaccggcccgagttcgccgtccttggccggtccaacgttggcaagtcctcgctcatcaacgccctcacccgccgcaaggaagccgcgctcacttccaaaaagcctggtgataccaaagaacaatatttaagctttatcttctgattccttcgaaagttcgaagtgctcttagtttatcgatatcttctccctgtttgacctttaattagcttatcagagacttttatgtcactgtaatgtcgtaatggcgctctagatcgcattatgtaattcccctccaccttggttctggggcgtgaggggatattctggttagggtcacagtctttacagatcccagcggtagtcaggttttccagtgggcactgggagaataaatcccagctaggaaatatataaattcaaaagtagaatttggaatttaaatgaat

SEQ ID NO: 153894 - DNA, 2536 bp, Zea Mays
atggcgttccacagaacaatggcacggtgcctatgggcaggcaagaacgcggccgctagcggcgcggccattcccaagcctccatctccccacctcccggcacggcggtctctgccggccgtggacgactgtcagacgctcgcattcctgcggccgaggccgaccgcggtcgggtacgccaccgcgaccgtcccgctcccggcgcactgcttccccgccctccccgtcggcgaccacctcttccgccgcctccagctcgacgggcttatacctcccgtgagcacggtagcgcggccgccggaggatgtcggcgtgacggtggagcaggcgaggaaggtggcgagggcggccgagatggaggtggcgcgggcgaggctgaggtctaacgcgcagagcgtcgtgtccgggtcggagttcgccgcgctctgcgtcgacattgccggcggcgtcgagggcggccgcaggctggcccgtgcgctcgacgagtccggcggcgtcatcgtcctcggcgacgtcgtcttcctctgccccgacatggtagcgaaggccatcgggagcatcctccccgggaaacagcagcagctgcaggcgccgcgagccggagacgggagcgaggcgcgcaagcgcgagctggaggcgatggaggcgcagagggcggcgatcgacgcggccgcggccgcgcaggtgcgccgcgagctgtggtgcgggctgggcctgctggcgacgcagacgctaggcttcatgcggctcaccttctgggagctgtcgtgggacgtgatggagcccgtgtgcttctacgtcacgtcgctctacttcatgtccggctacttcttcttcatgcgcacggccacggagccgtccttcgagggcttcttccggagccgcttcgcgtccaggcagcgccgcctcatgcgggcgcgcggcttcgacgtcgaccgctacaacgccctgcggaaggggcaggggctgggtcctctcggcgaccccgacgcgtgtaggcacgtcagccatgcacaataacagcgcgtcggcccagactaggttgcttggcttgtggtgccaggagggcacatgagataaacgtggcaggcatggtcgactcaccgtctaatcgtgaagcaacaactctcccgtatcggttcaggagcacaagctattgtagaagaaggcttatcgctcttcagaacgggaagtgttataattaactaacgtgtggcacccgcccctgattcacacgatctcacacgcgtgtttgattcaagaagagaaacgtatcaagcactcgaggttacctgtttgagcaaattaggttacgatcctagtggcttaggtcaggcacaccaaagccgtggcgtatgtgtcgtgtgtatgcacggatggcgtgaaaaacatgtcgtcgacacacacaagcacaagcataaaacaagagttcgttaaaagccccacggctttctatgctctagtaataagtctagaagcaaatgcaaattagaaagcatctttttaagacataagatgaacagaacgatcaacgggcacggacacaactccgcccactactggcgacccgggcagaaggtgacgaggtactgcgcgccggtgccgcacgtgaaggtgctggtggggtcgtcgtacgcgtagctgtaggccgcggggcaggccgccttgaacagcctcgagtacttggtgggcccgcaggtgttcggcccaccgtgcgcccccgtgcagcagtactcgggcgacccgaacgcctcgcacgcgctccggcacgccaccgccggcgccccctcgccgcccgccgccgcggccgtccgcagctcgggcgggcacagcgcgttcacgtccccgacgcagccggcgtacccgcacgtggcgcggttgaccctggcgcccgccgccgccacgccgatgccgacgttgtacccgtccaccaggctcacgtcgtagaagtccttgccgtcggcgccgcccagggtgaactccgccagcgtgacgggcggcgccccgcccagggagcagctcgcggcgccgctgcagtcgcccgtggcgcacgagaggcggccggcgggggacgacgacgacgcgacgcagcccgtgcgcgcccacaggcggcccgaccagcccgccggcgccgggaacgagacggtggcgccgggcgacagctcgaagcccccgcccccgacggccgccgcgctgttcccggacagtgtggccggccagaccgtgtgggtgcagttgttgtgcagcgtgaacaccgtcgtgccggcggcctccgcgccgaacatcgcccgcgacagccagattacccctgcgtatagtatatgcagacatcagcagttcagcacggcgtgcgacaacgttttgtttgcggtatggatacggcagatgagcttgcgaatgtaccagcgaggagtagaaggcttgcaactcgtatggctcccatggaaacgggttggttggagctagggcttgacgagaggaaccggcaatgggccaatggcagacgtggacaatgtgcggtggaaatagctggagc

SEQ ID NO: 153895 - DNA, 2484 bp, Zea Mays
cccagccttccccaattccggccacacccgctacgcctgtggtgccgcctgccgcctccccttcctcttcgcttcccgtgcaagcttcaccgccgccatctcgtcctctcgttgcgatgcttccctttccgcgccgcggttcctctatccccgccttccctgcccgctccggctcttgcacctgaccaagtccgccaatctgttccccttttccgtacgagggtactatcgccggccatttcgattcggggttgatcggatcagcgtaggctgatgggtcgcgatgctgagaagacctctccgccggtgccatcgtcggaattggaacaggaagaagacgacgactgctacctaagcgatcaggaggacgatgccctagaagagtccgttctccatgtcctcgaggacgagcacctcgaggactgccattggtccgcctcatgcgtgatcaccaaggaatccctcttggcagcgcagaaggaggatcttaggaaggtgatggagctgctagggttgagggagcaccatgcccggacgctcctcatccactaccgctgggacgtggagaggatttttgagcttctcgatcagaagggaagggatagcctcttctcggaggctggtattcctcttcagtacaccaataatgctggtccaacctcctcagcggaggtgacctgcaatgtttgttatgatgatgtgccaccctcgtgtgccttggagatggactgcggccacagctactgcagtgattgttggactgaatatttcattgtgaaaattaatgagggtcagagccggcgtgtcagatgcatggctccaaagtgcaatgctatttgtgatgaagcaataattcggaaactagtcattgcgagacacccagatattgcagaacgttttgaaagatttttgctggaatcatatattgaggataatgatacagttaagtggtgcccaagcacaccacattgtggaaatgctatacgcgtcaaaggtgatatttattgtgaagtggaatgcacatgtggatgccagttttgttttaattgctccttacaaacacactcaccatgttcctgcatgatgtgggagctctggattaagaaatgccatgatgaatcagaaacagtgaattggataactgtaaatactaagccctgtcccaagtgtcacaaacctgtggagaagaatggtggctgcaacctggttgcatgtatatgtggacaagcattctgttggttatgtggtggtgctacgggtagagatcacacgtggtcaagtattagtggccacagttgtggccggttcactaatgatcagactaagaagaccgaacaagcaaggagagacctctatagatatatgcactaccacaacagatacaaggctcacaccgactctcttaagcaggaagcaaagcttaagaatgagatccaagggaagatatccatttcagaaaataaggagtcaaagataaaagattattcttgggtcataaatgggttaaacaggctattcagatcaaggcgtgttctatcctattcgtatccgtttgcattctacatgtttggtgatgagattttcaaggatgagatgactcctcaggagagagaactgaagcagaatttgtttgaggatcagcaacaacaattagaatttaatgttgaaagattgtctggtttccttgagaaagattttcaactttttaccgatgatgaggtcatggatacaatgaagcatgtcatcaatctttccaatgtggttgataggctctgcaaacaaatgtatcagtgcattgagaatgatttgttatatcctctacgcacacctcacaatatcgctccatacaaatctaagggccttgacagggcctcagagctcaatattagctgggatcctgctgaacaaagttcacagtcaacaaaacatagtcaggaggatgaacacaggaaccaaccagcatcgattagtctggggaaacgaactcatgagttgcatggctcgagttctggtaataggggggataatagggggcaccgatctaacaagcgagaccgggtagatgccaatggcggtggtgatgcactttttgatctcaatgtgccagccgaattggtggacaagatctgaagcttcattatctgatgggtgatggcacatccctttgaactgtacagctgacttaagcttcctcaccaacataaaggcaaaaaatactgttcttcttagcccccttgccaccatagagtatacctccatgtcaaaaaaaatttaccctggtgttaggatcccaagatatagagtagcttttaagttctatatgtcgcatttcatgacgtgatttgaagccaatgttcataattctgataaaactagttctactcctcaagcaagatggggatattttggaatgtaacttgaccatgcatgtgttgcggattccagatataatgtatgcagcatggtgaagggaattgtttgttg

SEQ ID NO: 153896 - DNA, 2537 bp, Zea Mays
atggagttggattggatcacaatttctaccgacaggaaaagaggctgcagtggaggtggggttggtggtccgggtttgatcaagttcatcaccctcgtcaggccccagccctcgatcgcactcctcacttgtcctctcacctcacctcacctcacctcgcctcgacctcgagcagcgaaagggaggaactctggaccgagaaacaaaaggcaaaagcaccagcaggtgatcaactcccctcggcaacaactccggcctccactcgctgcggatgtttcactcacctgtgacgtgaggcggcacggcaggtagagcgattgcgattctatcggagcgctcatcaggatggatagcgccgcggactcgtcttcaccgaggtgccaccacggtcagtatcgacaggatgccggagaactcgaggaccagactagcaccagcaagatgccgtccagtgcttctgagcttccatgctccttgaagcgtgaggtccgagtccttgaaaagcgactggatgatcaattcgtcatgcgccgtgctcttgagaaagcactaggttacaagccttgtgctgttcatgcatcaagtgtgaactgcattccagagccgactgaggagctaatcaaggagatcgcagtgctcgagctagaggtcatatgcttggagaaacatctcctgacactataccgaaaggcatttgagcaacaattgtcccctgtgaactctgcttgtgacgcggaaaataacaagcagccagcaaggtctttttcaggcatactatctgaagcttcagtgctcagtttctcgaccccaaggaagcatcagccagtccagtccagtcgaatggtcctggcacgcaagtccacgcctacagcttctacaagcgaggctagcagtgaaaagatcaacatcggacgcagccattcctcgctcctgcaccgttctgtcagggtgtctccatccgcaaacaatcttgctagagctctgaaaccatgtcatacttcacctctatcttttgttgaggaagggaagtgcatggagcctggagttgtgagcttggcggacatcttggggaccagggttgcggaccatgttcctcaaacgcccaacaagatatccgaggacatgatcagatgcatcgcggccatatacataaggctgagagacgtcccttccgccgccgcgcagcatgccttcttcccctcaccgtgctcgtccttctcttcagcaagcggactgtcttccaaatacactgcagatgtatggagttggagccccaggtgcaggagagagagcttcactgaggcgtggcaggtgcaggacaacgagctaggcctaggcggtggtgaagcaagggactcggggctgcagtacgattctgtgatagaggtgtctgctctttgcaagggcgatcagaggtccgctgacgttaaggacatgctgcgcaagtatatgtcacttgtacagcttctagaaagtgtcgacctcggtggaatgaaaaacgaggagaagcttgctttctggatcaacgtgcataacgcgatgatgatgcatgcccatatagagtacgggatcccacagagcaacagcaaaaggatactgcttaccaaggtatcctacatcgttagtggccagagagtaaacgcggagctgatagagtaccagatcctgtgctgccgagcacactcttctggacaggtctgttccttccgccttctgcctccctctccctcctgtatgatgtttatcctaacacccggtcagtcgattcatgctgtgatttcttctgaatgaaccatacagtggcttcggctgctgctccacccgaaatggaagtccggcagggacagggacgaggagctgcaaggcttcgccgtggatcggcccgagcctctggtgcacttcgcactgtcctccggtagctactcggatccagtggtaggtagcacgtaggcaggcttcatcaaacgcacacccagtagtacggccggtacccaccaaattccaacgagacgcgcacatacatcacgtacggcacgaaaactccgatgcattcatctccttcaatccaactgtacccttccaggtgcggctctacagccccaagagcctgttccagcagctggaggcggcgaaggaggagcacatccgcgccaacgtcgccgtcggcgtgcgcgggcgggggcagcgcaagatcatcctccccagggccctggagctgtacgcgagggacgccgggctgggtgcgcaggaggtggtggccgcggtcgcgtgccacctgcccgacggcctccgggacgccgtgcgccggagcccgccggccgggcgggcgcgcggcggcgtggagtggaagccccacaacctggcgttccggtacctgctggccaaggagctggtcggcgggtcgcccgcgtgcgggcggcagcaacttaagaaatgcggccccccgatcggtgcgccgctgcgtgctgatcggtgatccgtcagcagatcgccgtgggtccgtggccgtgccgagccgagcccgaggtgcggtgcgg

SEQ ID NO: 153897 - DNA, 2887 bp, Zea Mays
ctctcacctcacctcacctcacctcgcctcgacctcgagcagcgaaagggaggaactctggaccgagaaacaaaaggcaaaagcaccagcaggtgatcaactcccctcggcaacaactccggcctccactcgctgcggatgtttcactcacctgtgacgtgaggcggcacggcaggtagaggtagacgctgcgtctccctttctagcctctacctgtacccatataccatctgctcgatctcccgtcagttctttatcctccaacgctggcgacagatttcagcgttctttcgcaatatcgcaatggcgacggcctgcttgagctccgtctcagctcagctcccggcggagaagctgtagacctgtagcccccgcccccctgctaaccagccatgtctcgcaaccgctccaagaggtggctcctccctgtttctgccgtgttcagtctgacgaaccttaattaacttcactgtgcttgcaaaaccttgtttggagcgttgccgctgtctcgcgtcacaggaattagtcttagccaagaaagacggggttcttgtgttttagaagcggttccaggctaacgcccttggggattttgcactgcaagcgattgcgattctatcggagcgctcatcaggatggatagcgccgcggactcgtcttcaccgaggtgccaccacggtcagtatcgacaggatgccggagaactcgaggaccagactagcaccagcaagatgccgtccagtgcttctgagcttccatgctccttgaagcgtgaggtccgagtccttgaaaagcgactggatgatcaattcgtcatgcgccgtgctcttgagaaagcactaggttacaagccttgtgctgttcatgcatcaagtgtgaactgcattccagagccgactgaggagctaatcaaggagatcgcagtgctcgagctagaggtcatatgcttggagaaacatctcctgacactataccgaaaggcatttgagcaacaattgtcccctgtgaactctgcttgtgacgcggaaaataacaagcagccagcaaggtctttttcaggcatactatctgaagcttcagtgctcagtttctcgaccccaaggaagcatcagccagtccagtccagtcgaatggtcctggcacgcaagtccacgcctacagcttctacaagcgaggctagcagtgaaaagatcaacatcggacgcagccattcctcgctcctgcaccgttctgtcagggtgtctccatccgcaaacaatcttgctagagctctgaaaccatgtcatacttcacctctatcttttgttgaggaagggaagtgcatggagcctggagttgtgagcttggcggacatcttggggaccagggttgcggaccatgttcctcaaacgcccaacaagatatccgaggacatgatcagatgcatcgcggccatatacataaggctgagagacgtcccttccgccgccgcgcagcatgccttcttcccctcaccgtgctcgtccttctcttcagcaagcggactgtcttccaaatacactgcagatgtatggagttggagccccaggtgcaggagagagagcttcactgaggcgtggcaggtgcaggacaacgagctaggcctaggcggtggtgaagcaagggactcggggctgcagtacgattctgtgatagaggtgtctgctctttgcaagggcgatcagaggtccgctgacgttaaggacatgctgcgcaagtatatgtcacttgtacagcttctagaaagtgtcgacctcggtggaatgaaaaacgaggagaagcttgctttctggatcaacgtgcataacgcgatgatgatgcatgcccatatagagtacgggatcccacagagcaacagcaaaaggatactgcttaccaaggtatcctacatcgttagtggccagagagtaaacgcggagctgatagagtaccagatcctgtgctgccgagcacactcttctggacagtggcttcggctgctgctccacccgaaatggaagtccggcagggacagggacgaggagctgcaaggcttcgccgtggatcggcccgagcctctggtgcacttcgcactgtcctccggtagctactcggatccagtggtgcggctctacagccccaagagcctgttccagcagctggaggcggcgaaggaggagcacatccgcgccaacgtcgccgtcggcgtgcgcgggcgggggcagcgcaagatcatcctccccagggccctggagctgtacgcgagggacgccgggctgggtgcgcaggaggtggtggccgcggtcgcgtgccacctgcccgacggcctccgggacgccgtgcgccggagcccgccggccgggcgggcgcgcggcggcgtggagtggaagccccacaacctggcgttccggtacctgctggccaaggagctggtcggcgggtcgcccgcgtgcgggcggcagcaacttaagaaatgcggccccccgatcggtgcgccgctgcgtgctgatcggtgatccgtcagcagatcgccgtgggtccgtggccgtgccgagccgagcccgaggtgcggtgcgggggtatcagggtctgtatgtacagagggagatggacaggaagatgatctgaatagtgtgcgctctgctgtagctagtttggatcattctgattggatgggattgaaatgaatatgagtgtatcctaacttgccctcaatcccatgaaaaataagtgtatccaaattagccttcaagtgtgaatagtgccacatgaattcttaccttaggacttgtttaggagctgtttaggagctagaggaatgaagagaattaaaaaggctaaaatcattttgatatttaattttaaataaagagaggattttaatctctct

SEQ ID NO: 153898 - DNA, 2407 bp, Zea Mays
gcttgagctccgtctcagctcagctcccggcggagaagctgtagacctgtagcccccgcccccctgctaaccagccatgtctcgcaaccgctccaagaggaattagtcttagccaagaaagacggggttcttgtgttttagaagcggttccaggctaacgcccttggggattttgcactgcaagcgattgcgattctatcggagcgctcatcaggatggatagcgccgcggactcgtcttcaccgaggtgccaccacggtcagtatcgacaggatgccggagaactcgaggaccagactagcaccagcaagatgccgtccagtgcttctgagcttccatgctccttgaagcgtgaggtccgagtccttgaaaagcgactggatgatcaattcgtcatgcgccgtgctcttgagaaagcactaggttacaagccttgtgctgttcatgcatcaagtgtgaactgcattccagagccgactgaggagctaatcaaggagatcgcagtgctcgagctagaggtcatatgcttggagaaacatctcctgacactataccgaaaggcatttgagcaacaattgtcccctgtgaactctgcttgtgacgcggaaaataacaagcagccagcaaggtctttttcaggcatactatctgaagcttcagtgctcagtttctcgaccccaaggaagcatcagccagtccagtccagtcgaatggtcctggcacgcaagtccacgcctacagcttctacaagcgaggctagcagtgaaaagatcaacatcggacgcagccattcctcgctcctgcaccgttctgtcagggtgtctccatccgcaaacaatcttgctagagctctgaaaccatgtcatacttcacctctatcttttgttgaggaagggaagtgcatggagcctggagttgtgagcttggcggacatcttggggaccagggttgcggaccatgttcctcaaacgcccaacaagatatccgaggacatgatcagatgcatcgcggccatatacataaggctgagagacgtcccttccgccgccgcgcagcatgccttcttcccctcaccgtgctcgtccttctcttcagcaagcggactgtcttccaaatacactgcagatgtatggagttggagccccaggtgcaggagagagagcttcactgaggcgtggcaggtgcaggacaacgagctaggcctaggcggtggtgaagcaagggactcggggctgcagtacgattctgtgatagaggtgtctgctctttgcaagggcgatcagaggtccgctgacgttaaggacatgctgcgcaagtatatgtcacttgtacagcttctagaaagtgtcgacctcggtggaatgaaaaacgaggagaagcttgctttctggatcaacgtgcataacgcgatgatgatgcatgcccatatagagtacgggatcccacagagcaacagcaaaaggatactgcttaccaaggtatcctacatcgttagtggccagagagtaaacgcggagctgatagagtaccagatcctgtgctgccgagcacactcttctggacaggtctgttccttccgccttctgcctccctctccctcctgtatgatgtttatcctaacacccggtcagtcgattcatgctgtgatttcttctgaatgaaccatacagtggcttcggctgctgctccacccgaaatggaagtccggcagggacagggacgaggagctgcaaggcttcgccgtggatcggcccgagcctctggtgcacttcgcactgtcctccggtagctactcggatccagtggtaggtagcacgtaggcaggcttcatcaaacgcacacccagtagtacggccggtacccaccaaattccaacgagacgcgcacatacatcacgtacggcacgaaaactccgatgcattcatctccttcaatccaactgtacccttccaggtgcggctctacagccccaagagcctgttccagcagctggaggcggcgaaggaggagcacatccgcgccaacgtcgccgtcggcgtgcgcgggcgggggcagcgcaagatcatcctccccagggccctggagctgtacgcgagggacgccgggctgggtgcgcaggaggtggtggccgcggtcgcgtgccacctgcccgacggcctccgggacgccgtgcgccggagcccgccggccgggcgggcgcgcggcggcgtggagtggaagccccacaacctggcgttccggtacctgctggccaaggagctggtcggcgggtcgcccgcgtgcgggcggcagcaacttaagaaatgcggccccccgatcggtgcgccgctgcgtgctgatcggtgatccgtcagcagatcgccgtgggtccgtggccgtgccgagccgagcccgaggtgcggtgcgg

SEQ ID NO: 153899 - DNA, 746 bp, Zea Mays
tcacacccaacctcccactgtaaaaaagagcagcggaacgtgcgtgcatccatccatccatccatttccaatcccaatcccaatcccaccagtgtccagtgctcggggaaccgacacagctcctcagcagagtagccagcacgacaagcccgatcagcagacagcaggcatggcactcgcggaggccgacgacggcgcggtggtcttcggcgaggagcaggaggcgctggtgctcaagtcgtgggccgtcatgaagaaggacgccgccaacctgggcctccgcttctttctcaaggtcttcgagatcgcgccgtcggcgaagcagatgttctcgttcctgcgcgactccgacgtgccgctggagaagaaccccaagctcaagacgcacgccatgtccgtcttcgtcatgacctgcgaggcggcggcgcagcttcgcaaggccgggaaggtcaccgtgagggagaccacgctcaagaggctgggcgccacgcacttgaggtacggcgtcgcagatggacacttcgaggtgacggggttcgcgctgcttgagacgatcaaggaggcgctccccgctgacatgtggagcctcgagatgaagaaagcctgggccgaggcctacagccagctggtggcggccatcaagcgggagatgaagcccgatgcctagtagtggcgattgcgaccagtgtttaacccatgacgcagcgccgtcacagatgtcccgtgtggtcttgcgctttagcaat

SEQ ID NO: 153900 - DNA, 900 bp, Zea Mays
tcacacccaacctcccactgtaaaaaagagcagcggaacgtgcgtgcatccatccatccatccatttccaatcccaatcccaatcccaccagtgtccagtgctcggggaaccgacacagctcctcagcagagtagccagcacgacaagcccgatcagcagacagcaggcatggcactcgcggaggccgacgacggcgcggtggtcttcggcgaggagcaggaggcgctggtgctcaagtcgtgggccgtcatgaagaaggacgccgccaacctgggcctccgcttctttctcaaggtcttcgagatcgcgccgtcggcgaagcagatgttctcgttcctgcgcgactccgacgtgccgctggagaagaaccccaagctcaagacgcacgccatgtccgtcttcgtcatgacctgcgaggcggcggcgcagcttcgcaaggccgggaaggtcaccgtgagggagaccacgctcaagaggctgggcgccacgcacttgaggtacggcgtcgcagatggacacttcgaggtgacggggttcgcgctgcttgagacgatcaaggaggcgctccccgctgacatgtggagcctcgagatgaagaaagcctgggccgaggcctacagccagctggtggcggccatcaagcgggagatgaagcccgatgcctagtagtggcgattgcgaccagtgtttaacccatgacgcagcgccgtcacagatgtcccgtgtggtcttgcgctttagcaatttctctctggagggagcgtgtattgttatcttgtgatcgagagcctgtgtgctgcctttgcttcttgtgattatatagctactgaataaagatgtagcgttcttcagcctgttacatcgaattcaaaaagattctatttcgttactagaacaaa

SEQ ID NO: 153901 - DNA, 124 bp, Zea Mays
aaaagcaaaaaaaaaaaaaaagatacagtgcgtcaaattgacacgcctgtctcgcccccaactgcagatcgtcagggagggatttgatcgaaatatacaaaaaattaaaaaaaaaagaaggaaa

SEQ ID NO: 153902 - DNA, 104 bp, Zea Mays
tgttcgttagaatctaggtgtttggatacacagattctcagatttcagattctgtttgaacaaactatacacattaacaccgaaccaacaaaaggtcattacat

SEQ ID NO: 153903 - DNA, 297 bp, Zea Mays
atgttgttttcccaaccgttttgtccattttatttatttatttatttcttatttatctttcatccagatgagaggaggaagaataggattacctcgagaagaaaccagcatgtcaaggattgtagttgggagggaggagggagacgcttgaattggttggtctggtatggttacctgggtgagcagcaggagctcctccactccgaaggagcgtgcggcggcgagcgtgtcgagcgcgaggtcgacgacggcgtagtgtgcgtgcctgcatgcgcgctcaccgccgcccgggtgccg

SEQ ID NO: 153904 - DNA, 1299 bp, Zea Mays
atttgaaacttcactccaacctaaagttttttgtctatgactagcttcttgcacatatatactaaataccataatttgaggtactttatttccaaacaaatattgctaacaatgctgtaaaaaatactatagtttactttatttccaaacaaatctttactaactattaagaaggtaacatagaccacttttgtgcccccgcctccccctctgctcgactcaattgcgtgcaccctcgcctgtcccagcgtccccgcccctgtctcctgaagtcgtccgcgaccgccgccatgctcccctcgccccgtgccgcgtccgtcgtgacagggatccgagaacaccccatggatgtgtctgggattcgaggcctcccccctcccttcccctcccccacccccatcggcgatgcctggatccgcgaccgccaccgtccaaccccggcctccgtctatgaccgctccgtcgtggcgcaagcgctggaggcatccacagggggctactgatggctgggacgggttcgtgctcaccaccgatgactgggacgtccatcgggggaccttcctagcgtggatggtgtcttcacaaggaaacggcagctcgctggtgctgctgaacacccgtccgggtccggctgcggacagcgcaggcatggcagagcacctgaagctgcacctggggcaggtgagcctacggacctggtcgagttccgctggctgctgggtggcccgctggaccttcccgtccgactacagatccagcgccttcttctgcgaccgttttggcgtttgcacgagcaccggcacgtgtgcctgcgtcgacgaattcgagccttcgaaaccctgcgagtggcagcgcgggtactttgtggacgggtgcaccaccaggtctcacccgctgagctgcaccgcagacgatagtggccgccgcccgacgacggagcaggacgactcgttcctgctcctggacaacctgcgagggctcccttacagttccatcccccagcggagggccacggctggccgcgcttcttcacggcggccgcggcgtggggaggcatcagctggatctggtggtggatgaagagcggaggggcccgacgccgcgtcctctgctcctcgccgcttgactgtctcgctttctacaacaacattattgccaagaacatttttgatgatgtactgcattccatagcagcattattgtccgtagcagatgatggcaattcgctgctagcactagctgaagcttccttaacttgagcgggaatatcaatcttaactgaaggtctgattgctcgaa

SEQ ID NO: 153905 - DNA, 1790 bp, Zea Mays
gccggtgccactgccagtgcgacacggatcacgcaatgcctcccaccatgctcgcgccggtgcccaccaggccgcgctccaaccccttccgccggcgcagaggagctgctccgctgcttctcgatcagacttcggcgaagcggcccgctgagtcgtccacctcagcctcatcctgcttctacagtgaggtgatctccaactcctccacatccctcgccccgtatcagcgcctggagaagaggcatcgacgccaggacacagacgcgggcgaggcgcggccggctggctccgagtgctcggaggtgatcggcggcgcgagggtgcgccccgccgaggtcgaggtctccgaatcgtcctgccctgtctccgtgctcgagtccgacctcgcctgcccgaagcagctcgccgacgacgctgaggcgatcgagaaatcctccgcgtgcgatgagctgaccccgtcgtcggagcccgatgaggaggaggtgctcagtgatcccagccactcggggtactcccccagtcccctgatcagctccccattgaccgaagatgacagcgacgacgcgccctctgcgaccttctccctctttctcgacttcgccaagcagttcgtcccctgcttgcaccccaaaccgtgcaccgtcaccagttccactctcgatctcctgacggggaggcggtttgaggacttggacgacgaggagagctacgagcgcttccggcggcgcgagcgacgcgaggcagttgcgcgcgacttcactgaggtgtgcagctccacctccatacccgacagctaccgccctctcgtcgtggagcaacgtgtcatcatggtgaactggatcatccagcattcacgtctgatgaagctccagccagttacaatgttcatgggaattggattgatggaccgcttcttgacacaagggtatatgaagggtttgagaaaccttcagttgttgggcattgcctgcatcaccttggctacacgcatcgaagagaaccagtcatacaattgcgttcttcgaaagacttttcaagttgggatcaatatctacagccagagtgaggttgttgccatggagtggctggttcaggaggtcctcaacttcaagtgttttgtcacaacaacccatcatttcctatggttctatctgaaggctgcaaatgctgatgacagggtagcggacctggcaaactacctggccttcatctcacttcggaaccatgagcagctctccttctggccctcgactgtggcagctgcagtggtagttcttgcttgccttgccacaaacaaggagtcctcatgccatttggtgacggaggtgaacacccagactcacatcaggacgcaggatgatgatctaccagaatgcctaatgagcctcgagtggctgatcaagtacgtctcgtgatacccagagctcccaggtgatagcagtgttttcacttttttctgtatggggacgtgaaatcttagcattgacaaatagtctgcctgtagtgtagataagatagccatgcggcatgaaacgtagcttgtggattttgattttgcagctttctgattaggagcacgacaaggacgaggaatttggtattgagcttggcctttaggaataactgaacttctgtatcgggggatgtctatctttacatcggttagtcgctctttttagaaggacggctaaggctgggcgttgttgtactcgttgatctatttgtttaaccaatgtattgctgatggatgatataccactgaaatctgttgttctggtgtgacaagcggc

SEQ ID NO: 153906 - DNA, 1665 bp, Zea Mays
gccggtgccactgccagtgcgacacggatcacgcaatgcctcccaccatgctcgcgccggtgcccaccaggccgcgctccaaccccttccgccggcgcagaggagctgctccgctgcttctcgatcagacttcggcgaagcggcccgctgagtcgtccacctcagcctcatcctgcttctacagtgaggtgatctccaactcctccacatccctcgccccgtatcagcgcctggagaagaggcatcgacgccaggacacagacgcgggcgaggcgcggccggctggctccgagtgctcggaggtgatcggcggcgcgagggtgcgccccgccgaggtcgaggtctccgaatcgtcctgccctgtctccgtgctcgagtccgacctcgcctgcccgaagcagctcgccgacgacgctgaggcgatcgagaaatcctccgcgtgcgatgagctgaccccgtcgtcggagcccgatgaggaggaggtgctcagtgatcccagccactcggggtactcccccagtcccctgatcagctccccattgaccgaagatgacagcgacgacgcgccctctgcgaccttctccctctttctcgacttcgccaagcagttcgtcccctgcttgcaccccaaaccgtgcaccgtcaccagttccactctcgatctcctgacggggaggcggtttgaggacttggacgacgaggagagctacgagcgcttccggcggcgcgagcgacgcgaggcagttgcgcgcgacttcactgaggtgtgcagctccacctccatacccgacagctaccgccctctcgtcgtggagcaacgtgtcatcatggtgaactggatcatccagcattcacgtctgatgaagctccagccagttacaatgttcatgggaattggattgatggaccgcttcttgacacaagggtatatgaagggtttgagaaaccttcagttgttgggcattgcctgcatcaccttggctacacgcatcgaagagaaccagtcatacaattgcgttcttcgaaagacttttcaagttgggatcaatatctacagccagagtgaggttgttgccatggagtggctggttcaggaggtcctcaacttcaagtgttttgtcacaacaacccatcatttcctatggttctatctgaaggctgcaaatgctgatgacagggtagcggacctggcaaactacctggccttcatctcacttcggaaccatgagcagctctccttctggccctcgactgtggcagctgcagtggtagttcttgcttgccttgccacaaacaaggagtcctcatgccatttggtgacggagactcacatcaggacgcaggatgatgatctaccagaatgcctaatgagcctcgagtggctgatcaagtacgtctcgtgatacccagagctcccagctttctgattaggagcacgacaaggacgaggaatttggtattgagcttggcctttaggaataactgaacttctgtatcgggggatgtctatctttacatcggttagtcgctctttttagaaggacggctaaggctgggcgttgttgtactcgttgatctatttgtttaaccaatgtattgctgatggatgatataccactgaaatctgttgttctggtgtgacaagcggcatgatcttttgatccc

SEQ ID NO: 153907 - DNA, 700 bp, Zea Mays
ccttttccttgtttctgttaagctcaatgtacaacattaatttcactgcttgatccctttcagcgttcttcgaaagacttttcaagttgggatcaatatctacagccagagtgaggttgttgccatggagtggctggttcaggaggtcctcaacttcaagtgttttgtcacaacaacccatcatttcctatggttctatctgaaggctgcaaatgctgatgacagggtagcggacctggcaaactacctggccttcatctcacttcggaaccatgagcagctctccttctggccctcgactgtggcagctgcagtggtagttcttgcttgccttgccacaaacaaggagtcctcatgccatttggtgacggaggtgaacacccagactcacatcaggacgcaggatgatgatctaccagaatgcctaatgagcctcgagtggctgatcaagtacgtctcgtgatacccagagctcccagctttctgattaggagcacgacaaggacgaggaatttggtattgagcttggcctttaggaataactgaacttctgtatcgggggatgtctatctttacatcggttagtcgctctttttagaaggacggctaaggctgggcgttgttgtactcgttgatctatttgtttaaccaatgtattgctgatggatgatataccactgaaatctgttgttctggtgtg

SEQ ID NO: 153908 - DNA, 821 bp, Zea Mays
ccttttccttgtttctgttaagctcaatgtacaacattaatttcactgcttgatccctttcagcgttcttcgaaagacttttcaagttgggatcaatatctacagccagagtgaggttgttgccatggagtggctggttcaggaggtcctcaacttcaagtgttttgtcacaacaacccatcatttcctatggttctatctgaaggctgcaaatgctgatgacagggtagcggacctggcaaactacctggccttcatctcacttcggaaccatgagcagctctccttctggccctcgactgtggcagctgcagtggtagttcttgcttgccttgccacaaacaaggagtcctcatgccatttggtgacggagactcacatcaggacgcaggatgatgatctaccagaatgcctaatgagcctcgagtggctgatcaagtacgtctcgtgatacccagagctcccaggtgatagcagtgttttcacttttttctgtatggggacgtgaaatcttagcattgacaaatagtctgcctgtagtgtagataagatagccatgcggcatgaaacgtagcttgtggattttgattttgcagctttctgattaggagcacgacaaggacgaggaatttggtattgagcttggcctttaggaataactgaacttctgtatcgggggatgtctatctttacatcggttagtcgctctttttagaaggacggctaaggctgggcgttgttgtactcgttgatctatttgtttaaccaatgtattgctgatggatgatataccactgaaatctgttgttctggtgtgacaa

SEQ ID NO: 153909 - DNA, 1332 bp, Zea Mays
caaagccgcaaaggcagggcgcgggcggagatgcaaccgcacacccgccaccgaactccacccgtctctcactcccgcccattgtataaagacgctccttctcgtggcagtgttttgcctcccctcttcacccaactctgtctccgagtccaacaagccaatggctgtcgtccgccagcgccgccagctgccgcaccttaccctcccgctcgaccacttcgtcctgcgcttgccgccgcagcctcagcccaccgccgcgccgtccacctccacgtccgacgcccgcctctcggactacgaaaggctctccgttctcggccacggcaacggcggcaccgtctacaaggcgcggcaccgccggtcctcgcagccgctcgcactcaagatcttcgcggacggggacgcctccgcggcgcgcgaggccgagatcctcatgctcgccgcggacgcgccccacgtcgtgcgcctccacacggtgatcccgtcggccgccgccggggaggcgcccgcggctctggcgctggagctcatgcccgggggctccctcgcgggcctgcttcgccggctgggccggccgatgggggagcgccccatcgccgccgtggcgcggcaggcgctcctcgggctcgcggcgctccacgcgctccgcgtcgtgcaccgcgacctcaagccgtcgaacctgctcgtcggcgccgacggcgaggtgaagatcgccgacttcggcgcgggcaaggtgctgcggcggcggctggacccctgcgcgtcgtacgtcggcacggcggcgtacatgtcccccgagcggttcgacccggaggcgtactcgggagactacgacccctacgccgccgacgtgtggagcctcggggtggtcatcctggagctgtgcctgggccacttccctctcctgcccgagggccagcgcccggactgggccgcgctcatgtgcgccatatgcttcggcgaggcgccggagccgcctgccgctgcgtcggacgagttccgggacttcgtggcgcggtgcctcgagaagaaggcctggcggcgcgcgtcggtgactgagctgctggagcacccgttcctcgccgagccggacgccgccggcgcacagcacgcgctcgctgcgctcgtcgcagaggcggagcagcgcggccaataatagacaagacacactactaggagatttattaggacgagctggggtgtgcataaattacagcaagtgtgtagcttctctttttgttccttttatccctcattcgttcgttcattgagttcatcaagcaaatatcaaatctcaagaggtaaccagttcatgaaatccaaaattccctc

SEQ ID NO: 153910 - DNA, 198 bp, Zea Mays
atggcgcagccatttgaggaattgattggacgactgttgagtgatctttttgatgagggtaaggaggctattgatgaagaatcaaaaaatgaatctctgacacattttgaggagtcagatgaacttggacatgagattcaagtttttttcaacctcgatattgtcacctgcatagtggaggatgaagacgtagcctag

SEQ ID NO: 153911 - DNA, 2249 bp, Zea Mays
gtagtgctcacaccatttcttgtccattgacatcagcgctccacgcctgcgcccccgaattcccaaatcctgcggcgcctccgccccaaccccgctcgtcgactcctctcttccgaacacgccggaggaatccttctccgactcgtcttccacctctctgccgggctggcgtggattggtctcttcttctgctgtggatttcctttcctagcatcaccacatgtaaaacaggggagatttaagatccaacacatcagcgaagtggcgcccttgctgacacaagaatacgtccaggtctcgtagaacacctaacgctggattgtgcagtgatctagggattgcgtattaggatattgaggatgggattttcacaaattgctatagtccaattattttcttcccttctaccctgatacatgccagatcatctgttataatggtgtttgctgctggaggcacatcccgattcgtcgatagggctgagtgcacctgcctcattcacaagataaacgacgctccgcgtcagcatcctccccgttcgcgattggctcgagcggcaccgatggagcgacgactctgtttcccagaaggcgaaaggacgatgagatcgacagacgattcgtgccgatcgcacaccggtaggcggtggcgagccgcgtgagatctctcgcgtcctcccggttctcagggaccacgacgtccgcgccgacgcgcacctctacaacgcgctaatgaaggcgaacgtcgcggcggacgaccccggtgccgtcctcagggtgttccggtttcagttactggtacattcttggtgaataaagaacatgtggaaagtcacaggtggtcatgtatgtttggggatgttgaagtaccagctgaggttttgaccgatggcacgctacgctgctatgcaccagcacaccaatcaggaagagttccattttatgtgacctgttcaaacatggtggcttgtagtgaagtgcgagaatttgagtatcgtgattctgaagctcattacatggagacttctcgttcccaagccaatggtgtaaatgaaatgcatctacacattcgtcttgagaagctactcactttggggccagatgaccatcaaatgcttgctataaattccttaatgcttgatgggaaatggtcaaatcaagaatcttctgtcaaggaagtagtttccactgctagggtccaaagtttaaagaaactggtgaaagagaagctgcatcaatggctcatctgcaaagtaaacgatgatggaaagggtcccaatgttctgtgcaaggaaggacagggtgtgattcatttagtagcagcactgggttatgattgggctataagaccgataataattgctggtgtcaatgtgaacttccgggatgctcatggatggactacactccactgggttgcgtctttgggaagagagcggacagttagtgttctcatagcaaatggacacaagatcccgatgcggcagtggcggacagcaacgggcgctcaacgccatcgcgcctcctgcgaacccatggtgagatgtgtggtctcgatctagagtcgaaggacttccccaacaccctttcctccatcggcgcgacatcggccagctcatctgcgacgatgaggcatcttcgaccgacttcccaacaccccatcctccatcaatgcggctccagtaccccttcctccatcggcgcgacagcatccagttcatattgaatttcctctcaattgtttttaactttctaatttattaatcgctggtgttagaacaggtaggtggcggctaagaaaaatgaagatggtggcagctaagaaactctaaagccacttctgattcacatatgatgcgaccacagaaattgaagatgtcgtgacctgggaatagattcggcagaagtggattatttgcatgctcaatctatgttcattgctgaagttacctttcaaattcaaattctcgggtagagccacctttaattgtgatgtacagagatatcagtatcattatctaaaatattatcacagaactgaggaaggagaaaaaaggtgctatcttttctttttttctttttatctcgtgctatctatgaattaatgagaagaacaattagtacatcatgaagatattaatgaaatgcatgtgatatctcagtcgaataacaagggaaaggactgttttttctaaataaagtatagcaaaccagcacaactattaacttgtccaaagaaaaaaatcataa

SEQ ID NO: 153912 - DNA, 1495 bp, Zea Mays
aattttaaaacctaaaatcttgaaccacattacatgcggcaccacctgcatattgaagaaagccaagttgcagacatgtgcctggacctgtacaaggaatatggcaccacaatggctggccttaaggcattaggctacgaatttgacaacgatgagttccatgcaactgttcatggtaccttgccatatcacaatctaaggcctgaccctgttttgaggaccctcctactttcaattcgacagagaaaatagtacgaataccaaccagctagttttgttttctgttttcttgctgtattctgagatgatatgcttgaaaaaatggtcacggagaccattttttatcaacctaaaacctggttaccgcaggtgttcacaaattctgacaaagctcacgcggaggaagctctatgcagacttggtttacagggttgcttcgatggtgtgatctgctttgagacactgaatccctgcaatggtccgagcgcgttcggcatgctgttcccagatgaaacgttccccgacttggctgatctgaatgaatccgatgggttcagacccatatcacccatcctctgcaagtctgcaagccctccgttgaagccatgtaagctgtaactcggattgcaaatgttgataccaagaaaacaatattttttgacgacagcactcggaacatagcttcgggaaaggcagcaggcttccatactgtgattgttggcaggccgacacttgttccaggggctgaccatgctttggagagcattcacaacatgaaagaagctctacccgagatatgggacagccaggatcaatattaggaaagtaatagttgtcaatttgtgccaagggatgaagattcgaaaggttgtctgtaatcttaaaaaatagcatacctcctatggttttggtagaagttaccaagttcataatagacaaaaatagactgcttcatatcctctataacctggaaagagtaatttttcagcaaagaaaattgtgataaatctgatagaagatgtatgctatagctaaaagtttgctccaactttataatcttctaaataaattgttaaattacgcgagcttgtcgggaggatggtgggaggtgcgggcatggcgatgctgggaggcgtggtcggcttcgctgggacgggaagcgaaaatccttggtcacggtcggcagaactctaatcttgatttgcctttcaagtttattgaaaatgggagcagttcctgtgaagaagcaaactattgtgagggatcacagcgacacttgtcgaacaatgaggagaccattccaccttcagaatctcatgctgttttagatgaaggatctctgggtattcaagttgaggacaaggatgtcagctcttcacaagcacttggtggcacacaagatttatcttctaagaagccccaggaagacaatgttaatattgtgcccatcgaacctgtctatgtaaatgatggtttaatgatgcctaatgatttg

SEQ ID NO: 153913 - DNA, 420 bp, Zea Mays
atgggcgtggcaccttctaagcttgaagataacaaggtgctagagagggcagtcaggacattgaaaatgctgatggcgttagggccacttaggcatcttcgagaaatggggatttttttttcagagtcagaagatgatttcgaccatccatccactgaaactctggtgcagaccaattctcgcaatggcaacagcgaaaatgagatggcaatgactggcagatcttcactggatgttcttcttgtggatggggaattgaagaaaccttacaatgatgttgcattcctcaacgatggcaccgggcaccagctgcccctgttcgacgtcgccgggtaccggagccctagcggcgcaaggggagacgtctgcttcttccggtacggcctcaaggcacctgggccaacgacgacaacggcatag

SEQ ID NO: 153914 - DNA, 1518 bp, Zea Mays
atggggagcacgagcagcgcggcgcagcggcgtaggcggcaatggacgttagcactggtgaccgcggcggcgctgctggagctcgcggacgaggcgctgctccccgcggtgtacagggaggtaggcgaggcgctggccgcgtcgcccacagcgctgggctccctcacgctgtgccgcgcgctcgtgcaggccgtgtgctacccgctcgcgacgtgcgccgcggcgcgctacgaccgagcgcgcgtcgtcgccgcaggggcattcctctgggccgtggccacactgctcgtcggcgcctcgggcacatttctccagcgattcctacacgtgcgcgcgcgctacctgaacgctagctatgttgaagagctctcttgcagatggcgttggccaggggcttcaacggcgtcggtctggcgctcgttgtgccgggcgatctactccctggtggccgactacagcgacgacggcacgcgtggctcagcgttcgcgtgggtgttgatggcgcaatgcatgggccaagtcgcggggaactccctcggcgtgctgctagcggctacgagcttcctcggcgtcccaggctggcggctggcgttctacgccctcgcgctcgtcagcgcatcgatcgccgccctaacgtgggtcctcggcgccgacccccgccctgtctgcgtgaagtccacggttgcggccacgctggcccaactcgccggagaagccaaggacgtggtgaaggtgccgacgttccagatcatcgtggcgcagggcgtggctgggacggtgccgtcgtcggcgctcagcttcgccgccatgtggctagaactcgtcgggttcacgcactggcagaccaccgtgatcaccaacctgaacagcctcgccaacgcgctcggcgcgctgttcgcggggttcgtcggggacccactggcgctgcggttccccaacacggccaggatcgctcttgcgcaggtgtgcaccgcgtcgaccatcccgctcgccgccgtcctgctgctcgcgctccccgtcaacccctctgcgggggccgcgtacgccgccacattcttcatcttcggcttcgtcgcgccctggtgccccgtctccacaaacaacccaatttttgcagagatcgtgccggagaaggcgaggacgacagtgtacgcactggacaggtgcttcgagtcggtgttcgcctcgttcgcgccgcccctcgtgggcatcctggccgagcacgtcttcgggtaccaaccggccgcggccggcacgagcgtggaggctgacagggagaacgccgccgctctcggcaaggcggtcttcgcagaaatcgccgtgccgattgccgtctgttgcctcacctacaccgcgttgtactggacttaccccgcggacagacagcgcgcgcagatggcctctctgcaggcggctgcgggggatcacgactgcgattgcgaagcaactttagttgcccatgctgcaggagtcgagggcatgaaccagacactacttgccgggacaagaacggagtaa

SEQ ID NO: 153915 - DNA, 712 bp, Zea Mays
ccgccgcagccgccgcccgatgtgccctcatgcacgagacctctcgaaccctctcagaaggcggtgcgatccggtttgggtcgccatgccgagcccgatgtgcccgacgcgtgcgcggctgagtcgaagccgaaactagcgcatggagatgacgacgataggccgccccttgaggagaagcgccgctgcagcggtgagggcggattcgtcttcctctgcgcccttgctggacacaccgaggctatcggtgggatttctctgccgtctggttcgaacaagctctactccggcagcgtcgacggatctgttcgcatctgggactgcaattccagcaaggtagcttggttctcggctcccgatgatgtatctgattatgcatgggttaccaacaatatctctgatatgcacgggctaccaacaatctctttgattatggacgagtaacgggctgcttccacggaggttccagtgaggaggttgtcattattcgtggtggttcatgtgctgattagcaatgtgtgcaccctatggaaccaaccataaccgaatggtgactcctgttttttttctgattggttgtgcctaaatcaccaatcgtcggtggatttcttatgattagttgggtgatcctgtgctcctggtttggattggatgctatctgtcaggctagccttgttgctatatattggaggctcttcgcctgcttcggtta

SEQ ID NO: 153916 - DNA, 721 bp, Zea Mays
atgtactgtttattttataatgaataaaaactattaactactttttatcttatgttgaataatatatttcagcacaaataagcttggattcacaccagagtttctagggcgtgtgaagcttgtaacctcctttgcatccctgctcggtgttgggctctacaactattttctgaaggaagttcctctaaggaaaatatttctcgtgacaaccattataggttcagctcttgggatgacacaggtgcttcttgtaactggattaaatcggaagtttgggattagcgacgagtggttttctattggtgattcattaatcatcacagtccttggtcaggcttcatttatgccagtcttggtgttagctgcaaaactgtgccctccaggaatggaagccactttatttgcaactttgatgtccatttctaatgctggaagtgttactggtggtttggttggtgctggtctaactcggatatttggggtcaccagggacacctttgggaacctacctctattgattgtcatctgcaatcttagttcgctgctgcccttacctcttttaggtctcctgctagaggaatcaggtgacacagacaatggagaaacaaagaatatctgacttgctgagggtttcatctcttgcgcagcttcaactcagatatgatccatccagttgaagttcaaaagatcagtggggaaatatggaaatcatactggagat

SEQ ID NO: 153917 - DNA, 2807 bp, Zea Mays
ccctccagatcacaccactgccgcctccgcctgcaaatccatttctagactcaagctgttgctgcgagcgagctagggttggtgctcaggtctccagggtttcgcctccccgctcccggtgcccatcgccttggaccttggcctgccgggttagggttgggtcgcagctgcgggggccgtggggcggggatgcggccgatgcggcgatcgcgggcgatcgggaggctgtagcggcggcggggcagggtatctcttgggtggattctccggcgatggccgcagacgcactatccatcatcccgggcgccgtgcttcgcaacctctctgacaagctctacgagaagcggaagaacgccgcgcttgagattgagggaattgtgaagcagcttgcaacgtttggggagcatgagaagatatcagcggttatctcgctgctcaccaacgatttcacatattcgccacaggcgaaccatcgaaagggtgggttgattggccttgcagcagttactgttggactcaccagtgaggcagctcagcatctcgagcaaattgtacctcctgtgcttacttctttcctggaccaagatagtagagtgcgttactatgcttgtgaagcgctatacaacatagcaaaagtggtaagaggggatttcatcatctacttcaacaaaatttttgatgctttatgcaagctttctgcagattccgatgctaatgttcaaagtgccgctcaccttcttgataagcttgtcaaggatatcgtaactgagagtgatcagttcagcatagaagaattcataccgctcttgagagagcgcatgaatgtgttgaacccttatgtaagacaatttttggttgggtggataacagtgttagatagtgttcctgatattgacatgcttggttttcttcctgattttcttgacggtttgttcaatatgctgagtgattccagtcatgagataaggcagcaagctgatgcagcactttctgagtttcttcaggagataaagaactcaccaaatgtagattatggtcgtatggctgaaatactcgttcggagggcaggctctactgatgaattcactcggttgacatctatcacatggatcaacgagtttgtgaagcttggtggggaacaacttgttccctactatgcagatatattgggcgctgtcttaccatgcatatctgacgaggaggagaaaatccgagtggttgcacgcgaaacaaatgaggaactccgtgctataaaagctgatccagctgagggatttgatatcggagcaattctttcaatcgcaaaaagagaattgaacagtgaacatgaggccactcgaatcgaagcattgcattggttcttcactttgctggatcgatattgtgctgagttcttggcttacctgaacgatatttttgatccactcctaaatgcactttctgatccttcggacgcggttgtcctattagtattggaggttcatgcacgcatagctgaagaatctcaccacttccatcatcttgtatcctacctgatccgcaccttccacaacaaccattttgtactggagaaacgtggtgctttgatagtccgtcggctctgtgttcttctaggtgctgaaaaagtatatcgagagttctccactattcttgagagtgaagttgatcttgatttcgcatccgtcatggttcaggttttgaatttgattttgctcacatcaactgaacttggtgagctccgctctcctcttaagaagtcgttagtggattcttgtggcaaggacttgtttcagtctttatatgcttcatggcgccactctccgatggctacgataagtttatgtttacttgctcaggcatacaatcacgcaagctgtgttattcagtcactgggagaagaagacataaatgtgaattttttggttcaattagataaattgatccgtctcttagagactccagtatttgcttacttgcgtttacagcttctcgagcctggaaaacacacttggcttctgaaaactctttacggtctcctgatgcttttgcctcagcaaagtgcggccttcaagatcttgaggactcgactgaagactgtgccattcagtgaaaatcttaagcgcacatcttcagcgaatccatactctcagattctgcaagtgacggaagatggcaatagaaaccaagatatgcagaactacagtgcaatcaatttcccattccttctccagcaatttgagaacatgcagctgcagcatcgtaaccatttgaaggatcaactgcaatcccgtaaatctgcttcgactttaacattatctcaggagatacaaagatacgaagaagcgcattcctcatcgctgtcagagattaacaggcccccttcaagaacatccaaaggcattttatgatgcatttgttcttgcgatgtatgatatatttgccggaagcatcaccacatatatgttggggctttggttagtctcctcgttttttttcaaaggaggttgcatagggtacatagtgtaatcttttctatttcgttcctagattttgtcaagagatggcaattatttgttggagaaagctcgttgccacattctagtcattcttttcttagtggtttcactgctcatctggtttctgtaatttttcaattgaaggccaaatgagcaaagtagtaattggagatagaaatatgttactactgtcctatctatcgatctccaataaattagcgttgcaatgtaaattcctgttggctcgtatgatatatttattatattatttatatgccttatctttacccc

SEQ ID NO: 153918 - DNA, 3042 bp, Zea Mays
atggccgcagacgcactatccatcatcccgggcgccgtgcttcgcaacctctctgacaagctctacgagaagcggaagaacgccgcgcttgagattgagggaattgtgaagcagcttgcaacgtttggggagcatgagaagatatcagcggttatctcgctgctcaccaacgatttcacatattcgccacaggcgaaccatcgaaagggtgggttgattggccttgcagcagttactgttggactcaccagtgaggcagctcagcatctcgagcaaattgtacctcctgtgcttacttctttcctggaccaagatagtagagtgcgttactatgcttgtgaagcgctatacaacatagcaaaagtaagcatttagtttagtgatggaacataaattgtatgtttgctttacactaattgaatttctctctttaggtggtaagaggggatttcatcatctacttcaacaaaatttttgatgctttatgcaagctttctgcagattccgatgctaatgttcaaagtgccgctcaccttcttgataagcttgtcaaggatatcgtaactgagagtgatcagttcagcatagaagaattcataccgctcttgagagagcgcatgaatgtgttgaacccttatgtaagacaatttttggttgggtggataacagtgttagatagtgttcctgatattgacatgcttggttttcttcctgattttcttgacggtttgttcaatatgctgagtgattccagtcatgagataaggcagcaagctgatgcagcactttctgagtttcttcaggagataaagaactcaccaaatgtagattatggtcgtatggctgaaatactcgttcggagggcaggctctactgatgaattcactcggttgacatctatcacatggatcaacgagtttgtgaagcttggtggggaacaacttgttccctactatgcagatatattgggcgctgtcttaccatgcatatctgacgaggaggagaaaatccgagtggttgcacgcgaaacaaatgaggaactccgtgctataaaagctgatccagctgagggatttgatatcggagcaattctttcaatcgcaaaaagagaattgaacagtgaacatgaggccactcgaatcgaagcattgcattggttcttcactttgctggatcgatattgtgctgagttcttggcttacctgaacgatatttttgatccactcctaaatgcactttctgatccttcggacgcggttgtcctattagtattggaggttcatgcacgcatagctgaagaatctcaccacttccatcatcttgtatcctacctgatccgcaccttccacaacaaccattttgtactggagaagtgctgaaaaagtatatcgagagttctccactattcttgagagtgaagttgatcttgatttcgcatccgtcatggttcaggttttgaatttgattttgctcacatcaactgaacttggtgagctccgctctcctcttaagaagtcgttagtggattcttgtggcaaggacttgtttcagtctttatatgcttcatggcgccactctccgatggctacgataagtttatgtttacttgctcaggcatacaatcacgcaagctgtgttattcagtcactgggagaagaagacataaatgtgaattttttggttcaattagataaattgatccgtctcttagagactccagtatttgcttacttgcgtttacaggtaacttggtctgataatccgttcctgcaaatttatctttctgtttctcaggcacatttgaattccgaaacttggagagttctacctggcttttttaatttgatttctagtgctacattaatggcatgataagcctggaccaatctttgtctcatgctgtttatctgtagttctgtacatttactgtatgctcgccttttggtacaatgtttccagactattgctatcccctaatgattccacattcagtttggatgctgtaaaactaacatgttggggtttatgtgacgcaacatgatatgaaaactgtgatgacttgttggcaaaaaaaaactctagtacagagacttttgttgttatatcttcttactgatcattttggcatggaaattccacaacatgctcttaaaaatctgcagcttctcgagcctggaaaacacacttggcttctgaaaactctttacggtctcctgatgcttttgcctcaggtcaaacttctaaccagactctgttgggagagattatacatcgtggggtttatatgtttacacagcaaagtgcggccttcaagatcttgaggactcgactgaagactgtgccattcagtgaaaatcttaagcgcacatcttcagcgaatccatactctcagattctgcaagtgacggaagatggcaatagaaaccaagatatgcagaactacagtgcaatcaatttcccattccttctccagcaatttgagaacatgcagctgcagcatcgtaaccatttgaaggatcaactgcaatcccgtaaatctgcttcgactttaacattatctcaggagatacaaagatacgaagaagcgcattcctcatcgctgtcagagattaacaggcccccttcaagaacatccaaaggcattttatgatgcatttgttcttgcgatgtatgatatatttgccggaagcatcaccacatatatgttggggctttggttagtctcctcgttttttttcaaaggaggttgcatagggtacatagtgtaatcttttctatttcgttcctagattttgtcaagagatggcaattatttgttggagaaagctcgttgccacattctagtcattcttttcttagtggtttcactgctcatctggtttctgtaatttttcaattgaaggccaaatgagcaaagtagtaattggagatagaaatatgttactactgtcctatctatcgatctccaataaattagcgttgcaatgtaaattcctgttggctcgtatgatatatttattatattatttatatgccttatct

SEQ ID NO: 153919 - DNA, 2578 bp, Zea Mays
caacatagcaaaagtaagcatttagtttagtgatggaacataaattgtatgtttgctttacactaattgaatttctctctttaggtggtaagaggggatttcatcatctacttcaacaaaatttttgatgctttatgcaagctttctgcagattccgatgctaatgttcaaagtgccgctcaccttcttgataagcttgtcaaggatatcgtaactgagagtgatcagttcagcatagaagaattcataccgctcttgagagagcgcatgaatgtgttgaacccttatgtaagacaatttttggttgggtggataacagtgttagatagtgttcctgatattgacatgcttggttttcttcctgattttcttgacggtttgttcaatatgctgagtgattccagtcatgagataaggcagcaagctgatgcagcactttctgagtttcttcaggagataaagaactcaccaatcaacgagtttgtgaagcttggtggggaacaacttgttccctactatgcagatatattgggcgctgtcttaccatgcatatctgacgaggaggagaaaatccgagtggttgcacgcgaaacaaatgaggaactccgtgctataaaagctgatccagctgagggatttgatatcggagcaattctttcaatcgcaaaaagagaattgaacagtgaacatgaggccactcgaatcgaagcattgcattggttcttcactttgctggatcgatattgtgctgagttcttggcttacctgaacgatatttttgatccactcctaaatgcactttctgatccttcggacgcggttgtcctattagtattggaggttcatgcacgcatagctgaagaatctcaccacttccatcatcttgtatcctacctgatccgcaccttccacaacaaccattttgtactggagaaacgtggtgctttgatagtccgtcggctctgtgttcttctaggtgctgaaaaagtatatcgagagttctccactattcttgagagtgaagttgatcttgatttcgcatccgtcatggttcaggttttgaatttgattttgctcacatcaactgaacttggtgagctccgctctcctcttaagaagtcgttagtggattcttgtggcaaggacttgtttcagtctttatatgcttcatggcgccactctccgatggctacgataagtttatgtttacttgctcaggcatacaatcacgcaagctgtgttattcagtcactgggagaagaagacataaatgtgaattttttggttcaattagataaattgatccgtctcttagagactccagtatttgcttacttgcgtttacaggtaacttggtctgataatccgttcctgcaaatttatctttctgtttctcaggcacatttgaattccgaaacttggagagttctacctggcttttttaatttgatttctagtgctacattaatggcatgataagcctggaccaatctttgtctcatgctgtttatctgtagttctgtacatttactgtatgctcgccttttggtacaatgtttccagactattgctatcccctaatgattccacattcagtttggatgctgtaaaactaacatgttggggtttatgtgacgcaacatgatatgaaaactgtgatgacttgttggcaaaaaaaaactctagtacagagacttttgttgttatatcttcttactgatcattttggcatggaaattccacaacatgctcttaaaaatctgcagcttctcgagcctggaaaacacacttggcttctgaaaactctttacggtctcctgatgcttttgcctcagcaaagtgcggccttcaagatcttgaggactcgactgaagactgtgccattcagtgaaaatcttaagcgcacatcttcagcgaatccatactctcagattctgcaagtgacggaagatggcaatagaaaccaagatatgcagaactacagtgcaatcaatttcccattccttctccagcaatttgagaacatgcagctgcagcatcgtaaccatttgaaggatcaactgcaatcccgtaaatctgcttcgactttaacattatctcaggagatacaaagatacgaagaagcgcattcctcatcgctgtcagagattaacaggcccccttcaagaacatccaaaggcattttatgatgcatttgttcttgcgatgtatgatatatttgccggaagcatcaccacatatatgttggggctttggttagtctcctcgttttttttcaaaggaggttgcatagggtacatagtgtaatcttttctatttcgttcctagattttgtcaagagatggcaattatttgttggagaaagctcgttgccacattctagtcattcttttcttagtggtttcactgctcatctggtttctgtaatttttcaattgaaggccaaatgagcaaagtagtaattggagatagaaatatgttactactgtcctatctatcgatctccaataaattagcgttgcaatgtaaattcctgttggctcgtatgatatatttattatattatttatatgcctta

SEQ ID NO: 153920 - DNA, 2249 bp, Zea Mays
caacatagcaaaagtaagcatttagtttagtgatggaacataaattgtatgtttgctttacactaattgaatttctctctttaggtggtaagaggggatttcatcatctacttcaacaaaatttttgatgctttatgcaagctttctgcagattccgatgctaatgttcaaagtgccgctcaccttcttgataagcttgtcaaggatatcgtaactgagagtgatcagttcagcatagaagaattcataccgctcttgagagagcgcatgaatgtgttgaacccttatgtaagacaatttttggttgggtggataacagtgttagatagtgttcctgatattgacatgcttggttttcttcctgattttcttgacggtttgttcaatatgctgagtgattccagtcatgagataaggcagcaagctgatgcagcactttctgagtttcttcaggagataaagaactcaccaaatgtagattatggtcgtatggctgaaatactcgttcggagggcaggctctactgatgaattcactcggttgacatctatcacatggatcaacgagtttgtgaagcttggtggggaacaacttgttccctactatgcagatatattgggcgctgtcttaccatgcatatctgacgaggaggagaaaatccgagtggttgcacgcgaaacaaatgaggaactccgtgctataaaagctgatccagctgagggatttgatatcggagcaattctttcaatcgcaaaaagagaattgaacagtgaacatgaggccactcgaatcgaagcattgcattggttcttcactttgctggatcgatattgtgctgagttcttggcttacctgaacgatatttttgatccactcctaaatgcactttctgatccttcggacgcggttgtcctattagtattggaggttcatgcacgcatagctgaagaatctcaccacttccatcatcttgtatcctacctgatccgcaccttccacaacaaccattttgtactggagaaacgtggtgctttgatagtccgtcggctctgtgttcttctaggtgctgaaaaagtatatcgagagttctccactattcttgagagtgaagttgatcttgatttcgcatccgtcatggttcaggttttgaatttgattttgctcacatcaactgaacttggtgagctccgctctcctcttaagaagtcgttagtggattcttgtggcaaggacttgtttcagtctttatatgcttcatggcgccactctccgatggctacgataagtttatgtttacttgctcaggcatacaatcacgcaagctgtgttattcagtcactgggagaagaagacataaatgtgaattttttggttcaattagataaattgatccgtctcttagagactccagtatttgcttacttgcgtttacagcttctcgagcctggaaaacacacttggcttctgaaaactctttacggtctcctgatgcttttgcctcagcaaagtgcggccttcaagatcttgaggactcgactgaagactgtgccattcagtgaaaatcttaagcgcacatcttcagcgaatccatactctcagattctgcaagtgacggaagatggcaatagaaaccaagatatgcagaactacagtgcaatcaatttcccattccttctccagcaatttgagaacatgcagctgcagcatcgtaaccatttgaaggatcaactgcaatcccgtaaatctgcttcgactttaacattatctcaggagatacaaagatacgaagaagcgcattcctcatcgctgtcagagattaacaggcccccttcaagaacatccaaaggcattttatgatgcatttgttcttgcgatgtatgatatatttgccggaagcatcaccacatatatgttggggctttggttagtctcctcgttttttttcaaaggaggttgcatagggtacatagtgtaatcttttctatttcgttcctagattttgtcaagagatggcaattatttgttggagaaagctcgttgccacattctagtcattcttttcttagtggtttcactgctcatctggtttctgtaatttttcaattgaaggccaaatgagcaaagtagtaattggagatagaaatatgttactactgtcctatctatcgatctccaataaattagcgttgcaatgtaaattcctgttggctcgtatgatatatttattatattatttatatgccttatct

SEQ ID NO: 153921 - DNA, 869 bp, Zea Mays
cctaatattatctgtcagtacgaattggactaactattatgtagtttcatttctgctttaagttgggtctgcctgaatttgccacctctatcgtaacttcgcataatagtgtgttcttttaagatttcgcctccgaaactctgatttactattggaagttttggctgaagctgctttcagctggaaaacagattttgctggctggaaaactctagacaagtaacctgtcaccactagagaagtccatttattctttggtagcagacctcttgcacttgtactgctagttttcttcaacaatatgacaggaacctcgttaaacaatgttttcttgacataaaggtgcttgtcgcctaagcagaagaataatatctaactttcaacgtacaggagatacaaagatacgaagaagcgcattcctcatcgctgtcagagattaacaggcccccttcaagaacatccaaaggcattttatgatgcatttgttcttgcgatgtatgatatatttgccggaagcatcaccacatatatgttggggctttggttagtctcctcgttttttttcaaaggaggttgcatagggtacatagtgtaatcttttctatttcgttcctagattttgtcaagagatggcaattatttgttggagaaagctcgttgccacattctagtcattcttttcttagtggtttcactgctcatctggtttctgtaatttttcaattgaaggccaaatgagcaaagtagtaattggagatagaaatatgttactactgtcctatctatcgatctccaataaattagcgttgcaatgtaaattcctgttggctcgtatgatatatttattatattatttatatgccttatct

SEQ ID NO: 153922 - DNA, 1350 bp, Zea Mays
accatccactgcgatacttcagacagctcttcttgcgttgcctactaagatctctctctctctctctcttgtgttcttgccttctgcctactacgagtgatggccagcctcactgacctcgtcaacctcgacctgagtgactgcaccgacaggatcatcgccgagtacatctgggttggaggatccggcatagacctcaggagcaaagcaagggtgatgtgtgactgctacacgccacaaggcgagccaatccccagtaacaagaggtacaaagctgccacggttttcagccaccccgatgttgcagctgaggtgccatggtacggtattgagcaggagtacactctccttcagaaggatgtgagctggccccttggctggcctgttggtggataccctggtccccagggaccatactactgtgctgccggtgccgataaggcctttgggcgcgacgtggttgacgcccactacaaagcctgcctctacgccggcatcaacatcagcggcatcaacggcgaagtcatgcctggacagtgggagttccaagtcgggccgtccgttgggatctctgccggcgacgagatatgggtcgcccgctacattctcgagaggatcactgagatggccggaatcgttctctccctcgacccgaagccgatcaagggtgactggaacggcgccggcgctcacaccaactacagcaccaagtcgatgagggaggccggtggctacgaggtgatcaaggaggcgatcgagaagctggggaagaggcacagggagcacatcgccgcgtacggcgagggcaacgagcgccgcctcacgggccgccacgagaccgccgacatcaacaccttcaaatggggcgtggcgaaccgcggcgcgtccatccgcgtcggccgcgacaccgagaaggagggcaagggatatttcgaggaccgcaggccggcttccaacatggacccctacgtcgtcaccggcatgatcgccgacaccaccatcctgtggaagggaaactgataaaaccactgttcttctcctgcacgcatgcatccgccccgtgctgtcactttttgtttttcaaatttcgattcccgtcctaaagtttgttagcacttattatttcgctctccagtgtactgctcggaaagtccgaataaaaacggctctaatgattttgtttttttttttaattttgccttcgccataggtgtacgattggctgcgcttcccgtttattgggtactagatatgaatcaattgtcattaacgaaacatctcaagacctcagacatatcggcaatgcaacaataatgaaatctactctaggattagaataaaaaacaataa

SEQ ID NO: 153923 - DNA, 1413 bp, Zea Mays
ctgcgatacttcagacagctcttcttgcgttgcctactaagatctctctctctctctctcttgtgttcttgccttctgcctactacgagtgatggccagcctcactgacctcgtcaacctcgacctgagtgactgcaccgacaggatcatcgccgagtacatctgggttggaggatccggcatagacctcaggagcaaagcaaggacggtgaaaggccccatcaccgatccgagccagctgccaaaatggaactacgacggctccagcaccgggcaggctcccggagaggacagcgaagtcatctccctcaagccattttcaaggacccgttcaggaagggtaacaacatccttgtgatgtgtgactgctacacgccacaaggcgagccaatccccagtaacaagaggtacaaagctgccacggttttcagccaccccgatgttgcagctgaggtgccatggtacggtattgagcaggagtacactctccttcagaaggatgtgagctggccccttggctggcctgttggtggataccctggtccccagggaccatactactgtgctgccggtgccgataaggcctttgggcgcgacgtggttgacgcccactacaaagcctgcctctacgccggcatcaacatcagcggcatcaacggcgaagtcatgcctggacagtgggagttccaagtcgggccgtccgttgggatctctgccggcgacgagatatgggtcgcccgctacattctcgagaggatcactgagatggccggaatcgttctctccctcgacccgaagccgatcaagggtgactggaacggcgccggcgctcacaccaactacagcaccaagtcgatgagggaggccggtggctacgaggtgatcaaggaggcgatcgagaagctggggaagaggcacagggagcacatcgccgcgtacggcgagggcaacgagcgccgcctcacgggccgccacgagaccgccgacatcaacaccttcaaatggggcgtggcgaaccgcggcgcgtccatccgcgtcggccgcgacaccgagaaggagggcaagggatatttcgaggaccgcaggccggcttccaacatggacccctacgtcgtcaccggcatgatcgccgacaccaccatcctgtggaagggaaactgataaaaccactgttcttctcctgcacgcatgcatccgccccgtgctgtcactttttgtttttcaaatttcgattcccgtcctaaagtttgttagcacttattatttcgctctccagtgtactgctcggaaagtccgaataaaaacggctctaatgattttgtttttttttttaattttgccttcgccataggtgtacgattggctgcgcttcccgtttattgggtactagatatgaatcaattgtcattaacg

SEQ ID NO: 153924 - DNA, 989 bp, Zea Mays
aaagttatcaactgttcggtgtattttttatttaatttttttggcagggaccatactactgtgctgccggtgccgataaggcctttgggcgcgacgtggttgacgcccactacaaagcctgcctctacgccggcatcaacatcagcggcatcaacggcgaagtcatgcctggacagtgggagttccaagtcgggccgtccgttgggatctctgccggcgacgagatatgggtcgcccgctacattctcgagaggatcactgagatggccggaatcgttctctccctcgacccgaagccgatcaagggtgactggaacggcgccggcgctcacaccaactacagcaccaagtcgatgagggaggccggtggctacgaggtgatcaaggaggcgatcgagaagctggggaagaggcacagggagcacatcgccgcgtacggcgagggcaacgagcgccgcctcacgggccgccacgagaccgccgacatcaacaccttcaaatggggcgtggcgaaccgcggcgcgtccatccgcgtcggccgcgacaccgagaaggagggcaagggatatttcgaggaccgcaggccggcttccaacatggacccctacgtcgtcaccggcatgatcgccgacaccaccatcctgtggaagggaaactgataaaaccactgttcttctcctgcacgcatgcatccgccccgtgctgtcactttttgtttttcaaatttcgattcccgtcctaaagtttgttagcacttattatttcgctctccagtgtactgctcggaaagtccgaataaaaacggctctaatgattttgtttttttttttaattttgccttcgccataggtgtacgattggctgcgcttcccgtttattgggtactagatatgaatcaattgtcattaacgaaacatctcaagacctcagacatatcggcaatgcaacaataatgaaatctactctaggattagaataaaaaacaataa

SEQ ID NO: 153925 - DNA, 2630 bp, Zea Mays
aatcctccaaccaagctccagtaagagccacctgcagcggctatcattaaagcaatcaggccaggcgttaagccaatgagctctccgaatcccacctttaatcagctcctccagctcccaaaccttccattataacgcataaatccgtgctcactctatttctactgcttctagtactctccccacaagcatccccctccatgatagtgcttcctctgagctaaggctctctcacctaaacacccgctcaccccaagtccacgccggcgattgccgcaatgccggcgccggcagcgggcttgtccgtcctggtgctcttcgtcttcgccgccgccctgccggccctttctgccgatgacctcaacaccgacgcgcaggcgctgcaggcgctacgctcggcggtcggccgctccgcgctgccatcgtggaacagcagcacgcccacgtgccagtggcagggcgtcacctgcgagagcggccgcgtcgtcgagctccgcctccccggcgccgggctcatgggcaacctcccttcgggcgtgctcggcaacctgtcggcgctccgcacgctctccctccggtacaacgcgctcacggggcccattccggacgacctctcccgcctgtccgagctcagggccatctacttccagcacaacagcttctccggcgaggtcccggcatcgctgttcgagctcaagaacctcgtgaggctggacatcgcggggaacaagttcagcggcaagatctcgcaagacttcaacaagctgatccgcctcggaacgctgtacctcgacgggaacagcttcaccggcgagatccccaagctgcagctgcctgcattggagcagttcaacgtgtcgtacaaccagctcaacgggtccatccccaacacgctccggaagatgcccaaagactcattcttaggcaacacgggcctctgcggcggtccactcggcctgtgccccggcgagtccgcgcccacgccggccggagcgccggagtcgcagccaggcgcgggcggtgcaggcgacgtcggtggcggcaagaagaagaagctctccggcggcgccatcgctggcattgccatcggctctgtgttcggcgtgctgctcttgctcgccctgcttttcttcctctgccggaagaggtccagcgcgccacggtcggcggcggcggcggcggagaaggggcgggaactcggcatggggccgatggatgtcgagccaaagggacagaacggctcagcaggcggccacaacggcgttgcggcggccgtcgcagttcctaccgccgccgctgccgccgctgtggctacggcggcagcaaagaccggcgggtcgaccgggtccaagaagctcatcttcttcggccccatggcggcggccccgccgttcgacctggaggacctgctgcgcgcctcggcggaggtgcttggcaagggcgcgttcgggacggcgtacaaggcggtgatggagaacgggtccgccgtggcggtgaagcggctcaaggacgtggacctcccggagccggagttccgggagcgcatcgcggccatcggcgccgtgcagcacgagctggtggtgcccctccgcgcctactacttcagcaaggacgagaagctcctcgtctacgactacatgtccatgggcagcctctccgccctgctgcacgggaaccgcgcctccggccggacgccgctggactgggagacgcggtcggcgatcgcgctggcggcggctcgcggcgtggcgcacatccactccacggggcccacggcgtcgcacggcaacatcaagtcctccaacgtccttctcaccaagaactacgaggcgcgcgtgtcggaccacggcctccccacgctcgtcggcccctccttctcgcccaccagggtgtccggctaccgcgcaccggaggtcaccgacatccgccgcgtctcgcagaaggccgacgtctacagcttcggcgtcctcctgctggagctgctcacggggaaggcgcccacgcacgccgtcgtcaacgaggaggggctcgacctgccgcgctgggtgcagtccgtcgtgcgggaggagtggaccgccgaggtgttcgaccaggagctcctcaggtaccaaaacgtcgaggaggagatggtgcagctcctccagctcgccatcgactgctccgcgcagcaccccgacaggaggcccgccatgtccgaggtggccacgcggatcgacgagatccgccgctccagcctcggcgaccggcaggtggccgacagcgccgaaggcgacgagccatctctataaccgccgtagcagtagctcctcccctgatccaccaccacacgtactgtgtcaatctcagtgaatgaaaattgcttagttctttgcatggatcgatattgctcttgcttcacatcagcaacttgtgcatgtatgctttttctctttttcttctcttctttatcttttttttttggcctctttctcacgggctttgatgattctattctatagcacatgtcactgtactcttttattcttggaaagcaacatttggtgatgccttacttgtatctaagaccagcaccattgccagctgcattagtgctgtattgtttgctatactaaaaaatacgcgcgaaatga

SEQ ID NO: 153926 - DNA, 1579 bp, Zea Mays
tgccagtgcagccatggcgcggcgtagttgctgtgtcgctgcgaacgaaccaactgtttgctagcaattggttatagcggcattggcagctagcccagatagtcgagtttaaggccagacgtgacaaccatgactggtcctggagaccgccgtttcgaggccagctcctccacccacccacccctgccttgcttggtcctttgaacatctctctatagtttctactttctaaatgctgagcactgaaccggtagtagattcgtggaggcaaagtcccagggcaagttgcgcatgtgagccggtgtccggagttgcaggccgggccggctagggtagtttcgctgatccatgtgacattagttggcgccactgttcctcttcctcgggattccttcctctctcttcccgcgccaattattagcctcgcgtatgtacgtacggtacgggattttaaagaagcattcaaaaagtccggaccgccggccagatggcaccgggtgcgtgagacgtgtaaccgaagcaatctgtacgcgccggagtaattggcatcgaccgtgaattttatcgagcagctgacattcctgtggcgtggtgccgatctcgtggttatgttatgtttcttcctcttggtgtgacgcagggaaccgcgcctccggccggacgccgctggactgggagacgcggtcggcgatcgcgctggcggcggctcgcggcgtggcgcacatccactccacggggcccacggcgtcgcacggcaacatcaagtcctccaacgtccttctcaccaagaactacgaggcgcgcgtgtcggaccacggcctccccacgctcgtcggcccctccttctcgcccaccagggtgtccggctaccgcgcaccggaggtcaccgacatccgccgcgtctcgcagaaggccgacgtctacagcttcggcgtcctcctgctggagctgctcacggggaaggcgcccacgcacgccgtcgtcaacgaggaggggctcgacctgccgcgctgggtgcagtccgtcgtgcgggaggagtggaccgccgaggtgttcgaccaggagctcctcaggtaccaaaacgtcgaggaggagatggtgcagctcctccagctcgccatcgactgctccgcgcagcaccccgacaggaggcccgccatgtccgaggtggccacgcggatcgacgagatccgccgctccagcctcggcgaccggcaggtggccgacagcgccgaaggcgacgagccatctctataaccgccgtagcagtagctcctcccctgatccaccaccacacgtactgtgtcaatctcagtgaatgaaaattgcttagttctttgcatggatcgatattgctcttgcttcacatcagcaacttgtgcatgtatgctttttctctttttcttctcttctttatcttttttttttggcctctttctcacgggctttgatgattctattctatagcacatgtcactgtactcttttattcttggaaagcaacatttggtgatgccttacttgtatctaagaccagcaccattgccagctgcattagtgctgtattgtttgctatact

SEQ ID NO: 153927 - DNA, 1281 bp, Zea Mays
gtttctactttctaaatgctgagcactgaaccggtagtagattcgtggaggcaaagtcccagggcaagttgcgcatgtgagccggtgtccggagttgcaggccgggccggctagggtagtttcgctgatccatgtgacattagttggcgccactgttcctcttcctcgggattccttcctctctcttcccgcgccaattattagcctcgcgtatgtacgtacggtacgggattttaaagaagcattcaaaaagtccggaccgccggccagatggcaccgggtgcgtgagacgtgtaaccgaagcaatctggaaccgcgcctccggccggacgccgctggactgggagacgcggtcggcgatcgcgctggcggcggctcgcggcgtggcgcacatccactccacggggcccacggcgtcgcacggcaacatcaagtcctccaacgtccttctcaccaagaactacgaggcgcgcgtgtcggaccacggcctccccacgctcgtcggcccctccttctcgcccaccagggtgtccggctaccgcgcaccggaggtcaccgacatccgccgcgtctcgcagaaggccgacgtctacagcttcggcgtcctcctgctggagctgctcacggggaaggcgcccacgcacgccgtcgtcaacgaggaggggctcgacctgccgcgctgggtgcagtccgtcgtgcgggaggagtggaccgccgaggtgttcgaccaggagctcctcaggtaccaaaacgtcgaggaggagatggtgcagctcctccagctcgccatcgactgctccgcgcagcaccccgacaggaggcccgccatgtccgaggtggccacgcggatcgacgagatccgccgctccagcctcggcgaccggcaggtggccgacagcgccgaaggcgacgagccatctctataaccgccgtagcagtagctcctcccctgatccaccaccacacgtactgtgtcaatctcagtgaatgaaaattgcttagttctttgcatggatcgatattgctcttgcttcacatcagcaacttgtgcatgtatgctttttctctttttcttctcttctttatcttttttttttggcctctttctcacgggctttgatgattctattctatagcacatgtcactgtactcttttattcttggaaagcaacatttggtgatgccttacttgtatctaagaccagcaccattgccagctgcattagtgctgtattgtttgctatactaaaaaatacgcgcgaaatgaaatgattcgttca

SEQ ID NO: 153928 - DNA, 745 bp, Zea Mays
cgccgcagaggcccgtgttgcctaagaacgagtctttcggcatcttccggagcgtgttggggatggacccgttgagctggttgtacgacacgttgaactgctccaatgcaggcagctgcagctttgggatctcaccggtgaagctgttcccgtccatgtacagcgtcccgaggcggatcagcttgttgaagtccggcgagatcttgccgctgaacttgttccctgcgatgtccagcctcacgaggttcttgagctcgaacagcgacgctgggacctcgccagagaagctgttgtgctggaagtagatcgcccggagctcggacaggcgggagaggtcgtcggggatgggccccgtgagcgcgttgtaccggagggacagcgtgcggagcgccgacaggttgccgagcacgcccgaggggaggttgcccatgagcccggcccccgggaggcggagctcgacgacgcggccgctctcgcaggtgacgccctgccactggcacgtgggcgtggtgctgttccacgatggcagcgcggagcggccgaccgccgagcgcagcgcctgcagcgcctgtgcgtcggtgttgaggtcatcggcagaaagggccggcagggcggcggcgaagagcaccaggacggccaagcccgctgccggcgccggcattgcggccatcgccggcggggactggggtcagggtgagcgggtgggtaggtgagagcaccttagctcagaggcagcactatcatg

SEQ ID NO: 153929 - DNA, 1485 bp, Zea Mays
atgccgaccggcggcgtgttctccgggtcggtgaacctgaagcacgtcaagctggggtaccggtacctgctggaccacctcctgacgctgctgctggtgccggtcatggccgccacggcgctggagctggcgcgcctgggccctggcgagctgctgtcgctgtggcggtcgctggagctggacctggtccacatcctctgctccgcgttcgtggccgtcttcgccggcaccgtgtacgcgatgtcgcgccccaggcccgtgtacctggtggactacgcctgctacaagccccccggcagctgccgcgtgcccttcgccaccttcatggagcacacgcgcctcatcagcgacgacgacaggagcgtgcggttccagacccggatcctggagcggtcggggctgggcgaggacacgtgcctcccgcccgccaaccacttcatcccgcccaaccccagcatggaggcctcccgcgccgaggcgcagctcgtcgtcttctccgccatcgacgacctcctccgccgcacggggaccaagcccaaggacgtcgacatcctcgtcgtcaactgcagcctcttctccccgacgccctcgctgtccgccatggtcgtcaacaggtacaagctccggagcaacgtccggagcttcaacctgtccgggatggggtgcagcgccgggctcatctccatcgacctcgccagggacatgctgcaggtgcacccaaactcgaacgcgctggtggtgtccaccgagatcatcaccccaaacttctaccgggggagccggcgcgacatgctgctccccaactgcctgttccggatgggcgcggcggcgatcctgctgtccaaccggcggcgcgaggccccgcgcgccaagtaccggctggtgcacgtggtgaggacgcacaagggcgcggacgaccgcgcgtacaggtgcgtgtaccaggaggaggaccagcaggggttctcgggcatctcgctgtccaaggagctcatggccatcgcgggcgacgcgctcaagtccaacatcaccaccatcggcccgctggtgctgcccatgtcggagcagctgctcttcttcttccgcctggtggggcgcaagctcctcaacgggggatggaagccctacatcccggacttcaagctggcgttcgaccacttctgcatccacgcgggcggccgcgccgtcatcgacgagctgcagaagaacctgcagctgtcgccgcgccacgtggaggcgtcccgcatgacgctgcaccgcttcggcaacacgtccagcagctccctctggtacgagctcgcatacatcgaggccaagggacgcatgcgccgcggcgaccgcgtctggcagatcggcttcggcagcggcttcaagtgcaacagcgccgtctggaagtgcctccgcagcgtcaacacgcccaccagcgggccctgggacgactgcatccaccgctaccccgtcgacgtgccggaggtcgtcagcctctga

SEQ ID NO: 153930 - DNA, 925 bp, Zea Mays
agattttttgggacagaggaataggagttgaagaaatcaaactttacggtgctgaagaagataatgaaatgattgcagattctacagaaagtaactttgaagatcttgaaaacgtgattgcaaatatatttccgaagaggggaaaatgtcatttactgtcagcagctagatacgaaaggggggaaaagtctatttactgcttatcctgtttaatttctcttattgagcagtcacgataccttcgattccgtgactgtcctgtggaatggggatggtgcagggatctgcaatcctttatttttatatttagaagccataataggatagttcttgagcgtcctgaatatggttatgcaacatacttctttgaggtggtccaatcaaggccaatagaatggcagatccgtaggctggttgttgcaatgaagcttagtggctgtggaaggacagctcttattgaaaacaggccgttactggttggtacagatttaacagaaggcgaggcacatgttttggaaggatatggctggctaagaaacactgggcttggcacaatggtcaactaccgtgatcgtgtggtccatgacaggtggactgagaaatctgtttctgattggaggtcgaagatagggaaacttctaatggttggttatgctgagggccaatcaatcacaactcttggcccgaagaaaatactggacatgctggaagctactggggatgctgaatttgaagtgaagttggaggatccttattgagagatccgacgtgtataggtacaatatgtacgtgtagttctgaatgcgtccagataaacttagggtaggagctctctgatgaaataacgtggcacttgtattctaaattctaaatcacaaattcgttcgtgattattttaatttcacggaagttagcattatctcca

SEQ ID NO: 153931 - DNA, 1757 bp, Zea Mays
ccgtgtcttctttccttcccttataccctgccgcacacaccttttccgtttgcagtggtgcaggtcttttcggtcctcaggcttcatccctgtgcaagtgcagggataattgcttctgatctcccgaggctgcataacctgattcagaggcagagcaagggggcgtgagggagatgagggagatcatcagcatccatatcgggcaggcaggcatccaggtagggaattcttgctgggagctctactgcctcgagcacggtatccagcctgacggcctcatgcccagtgacacctctgtcgggatcgcgagggatgcgttcaacacgttcttcagtgaaacgggcgcagggaagcacgttccaagggccctgtttgtcgacttggagcccactgtgattgacgaggtgaagactggggcttaccgccagcttttccatcctgagcagctcatctcacacaaggaagatgcagcgaacaacttcgcccgtggacattacacagttggaagagaagtaatagatctttgccttgatcggatacgaaaattggcagacaactgcactggtcttcaaggttttctggttttcaatgctgttggtggtggaacaggctccggcctgggttcgctacttttagaacgtctatcagtagattatggtaggaagtcaaagctcggtttcaccatctatccttccccacagatctcgactgctgtggtcgagccttataacagcgtgctctccacacattccttgattgaacacacagatgttgttgtgcttcttgacaatgaagctatctatgacatatgcaagaggtccctcgacattgagcgtccaacatacaccaatctgaacaggcttatatcacaagttatatcatctctgactacctctctgaggtttgaaggagctattaatgttgacataactgagttccagaccaaccttgtgccttatccccgcatacactttatgctctcttcgtatgctccaattatctcagtggaaaaggcctaccatgaacaacactctgttcctgagatcacaaattctgtgtttgagccatcaagtgtgatggcaaaatgtgatcccaggcatggaaagtacatggcatgctgtttgatgtaccgtggcgacgttgttccaaaagatgtgaatgctgctgtccattcaatcaagaccaagagagcagtgcagtttgttgattggtgccctactggtttcaagtgtgggataaactaccaaccaccaactgtagtccctggaggggacctggccaaggtgcaacgagcagtctgcatgatcagcaacaacacagccgtggctgaggtcttctctcgtattgaccgcaagtttgatctcatgtatgccaaacgtgcattcgttcattggtatgtcggtgaagggatggaagaaggggagttctcagaggcaagggaggatcttgcagcactggagaaggattatgaggaagtcggagctgaagttgaagatgaggacgaggaagctgagtattgagtcatcgatctggatgcatggttattttcctttggtgtcagtcaaccaggcgtgcttgagttgcatggttgtacctcccatttattccatgtttgctattgcattacacctgttcatggttggcatagtagaagtgtgaagattggttgaactggtatgatggtttcagatcaaataaattatgttttcaaaatgtcatatgaaaaatttattagtagattagtcacaaaaaacata

SEQ ID NO: 153932 - DNA, 81 bp, Zea Mays
gtgatattgccggctagctttgctgcgcgcgtgctcgatcgatggatcatagccaggaatgaatttgctcgatcaagtgtc

SEQ ID NO: 153933 - DNA, 2257 bp, Zea Mays
cggctccgcctgtcggcgagcgcacgccgcgtgcctgcccgcggtctctcgtcgtctccagaagatgcgccccgatactcgtctttccacccttcttctacctccttccacccccttctccccacgccccatcggatcgcacgcgcaccgcaattgttgttcatcacctctccgaagaagcgtcacagagcaccgcccggaggttccccttcccgtcgccgtcgcttggccaggatggctgaacaattctataccgtggcatcggatagtgaaaccaccggggaagacaaatcacaggcttcattccctgatgttgctgttggcattgacattgggacttccaaatgcagtgttgctatttggaatggccaccaagttgagctcttaaagaatacccgtaatcagaaagggatgaggtcatatgtcatgttcaaagatgatactctttcagcaggagttactggaggtgcagccaaggaaaatgcacacgaggaaagagacatcttgtcaggaagtgccatattcaacatgaaacgcctgataggaagaatggacactgatgaagtggttcaagctagtaagactctcccatttcttgtgcagacattgggtatcggtgtgagaccattcattgcagcgctcgtgaacaacatgtggcgatctacaactccggaggaggtccttgccatctttctacttgaactgaaggccttggtggagatgcaccttaagcatcccgttaggaatgctgtgcttacaataccagttgcattcagtcgatttcaacagaccaggattgagagagcctgtgcaatggctgggctgcatgtgttgaggttgatgccagaaccaactgctgtggcgcttctgtacgctcagcagcagcagcagcttgtgcatgacaatatgggaagcggcatcgagaaaattgctctgatatttaacatgggtgctgggtactgtgatgtggccgtggctgccacagctggaggtgtttctcagataagagcattatcaggatgcacagctggtggggaggatatacttcagaacataatgcgccatgttcttcccaattttgacggtatatatgctggccagacaatggatagaatcaagtcgatgagcttactgcgaattgctactcaagatgcaattcacaggctcgttagtcaagaatccgtggagatcaatatagatttggggaatggccacatggtgtccaaagttctagaccattcagagtttgaacaagtcaaccgggcaattttcgacaagtgcgaaaagatcatcaaccagtgcttggctgatgcgaagttggtaccagaggacatcaatgatgtcatactggtcggaggttgttcgaagatccccagaatcagaagccttgtcctgggtttgtgcaagaaggaggtctcttacaagaacatagatgctctagaagctgctgtttcaggtgctgcgctggaaggagccatagcttcgggagtgaatgatccttcggggagcttggatcttctcacgatccaggcaactcccatgaacctgggaatccgtgccgacggtgatagcttcgctgcgatcatccctaggaacacgacggttccagcaaggagggacatgctgttcacaacgacacacgacaagcagaccgaagccctaattgctgtgtatgaaggagaaggggaacgtgctgaagataaccatctgttagggtacttcaagattactggaattccggcagcccctaagggagcagttgatatcagtgtatgcatggatatcgatgctgccaatgtcctcagggtgttcgcaggggtcgtcaagcctcaaggcccagccattccaccgttcatcgaggtgaggatgccaacgctggacgatggccatggttggtgtgggcaagctctagcaaagatgtatgggaggattctcgaccttgctgttcttccgaagaagctgcagccatgatatgtggccttccgaggcctcgtaagtagctggtgcgttgtgcgaatgtagcggatgctcagtgttcagtattcactgtgtcactgtcccccgtcttgtgtgggcgctgtctatgtgctgttggtgttgggcagtcttcagaactgaactaccagtttcatccttgtgcaataatgtctcgtacatgtgagatgaatgttgcggatgtttgtacttcatagttttcaggatttgttgactgctggactgctggtgtgcagtacgaaactgagagtttcatccttct

SEQ ID NO: 153934 - DNA, 666 bp, Zea Mays
atgccaggccaacatgtcgctgtcctttctcctcctcctctcatagcctgcaggctgcagctacttatccgttctcttctccctgaaaagatcaacaaacccatctccagcccacaaggccacaggctagatctgaccgaccgtccatgcatggcttccctgtgcatgtttaccatcagcagcaccccacatgttccgcagggctgcaggcgacgatgtagcgacgccgtgtcgtctaggccgagatcctacctcgtctgccaaagtcacctcccgtccgggccgccggcaagcggcggcggcgggggaggaggtggtgaggagaagacgaccccgtggtgggctgccacggccgagaggctgcgcggcgacgtggtgaaggccgggatggcagcgcgggagagcctgagccccaagcagaagggggactggaaggacgtcacgctcatgagcttctccttcgccgtgtacgtgtacatctctcagaagctcgtgtgcacgtactgcgcttggctctctatgattaaccactgacttggtgctgtaatcatctataccgttgctgatcttcaaggtagaaaagatcgttgctgttagttgcatatggatgctgtacctgtagtatatttagatccaaatccaataaagcctcaatttccattgtta

SEQ ID NO: 153935 - DNA, 186 bp, Zea Mays
gaattgacattggtcaaatatcaaatggcacagtaggaatatcattagcacagtttacagtgtataatcattcactaaaaatgaaaagaaagataacttgcttcctgcagtaaattctaatacagatttgaatatttgattaatatactttctaagcaacattagcctttcaccaaattaaaaata

SEQ ID NO: 153936 - DNA, 2719 bp, Zea Mays
acaacgaactatcctgttagccagccctaaacccttctgtcccgatggcgtcgtcgtcgtcgccgccgccgccgaagctgccgattcccggccgccgcaacatactcatcactagcgcacttccgtacgtcaataatgtcccgcacctagggaacatcatcggctgtgtgctcagcgcagacgtgttcgcgcggtactgccggctccggggttacaacgctatctacatatgcgggacggacgagtatggcaccgccaccgaaacgaaggccatggaggagaagtgcacgcccaaggagatctgcgataagtaccatgctatccacaatgaagtttacaagtggtttaacataaaatttgacaagtttggacggacctcttctcctgagcagacagaagtctgccatgcaattttccataaattgatggaaaacaattggctcacagaaaatactatgcagcagctgataggcttgttgaaggaacatgcccgaacaaagtctgcaacgcatcagcaagaggagatcagtgtgaaacatgcagcaccttgttgaatccaactgaacttattgacccaaagtgcaaggtttgtaagaacactccacgtattcgtgacacggatcacttatttttggagcttcctctattgagagacaagctggtaaactacatcaatgaaacttcagttgctggtttgtggagtcaaaatgctattcaagcaacaaatgcatggctgaaggaagggctaaagccacgctgcatcaccagagatcttaaatggggtgttcctgtcccccatgagaagtataaagacaaggtgttctatgtttggtttgatgcacctatcggctacgtgtctattacggcatcctatacacctgagtgggagaagtggtggaagaatcctgataatgtagaattgtttcagtttatgggcaaagataatgtgccgtttcacacgatcatgttcccttcaacgctactcggaactggggaaaagtggacaatgatgaaaacgataagtgttactgaatatttgaattatgaagcaggcaaattttccaagagtaaaggtattggagtctttggtaatgatgcaaaggatacaaatattcctcctgaagtatggcgatactatttgcttatgaatcgccctgaggcatcagatacactctttacttgggctgatttgcaagccaaattgaacagcgagttgctgaacaacttgggaaacttcattaatcgtgtgctaagttttgttgcaaaaccagctggagctggatatggttctgttgtacccgatgcacctaatgcgggcgcgcacacattgacaaaaacacttgcagaaaaaaccagtaaatgggttgaacaatatctcgacgcaatggaaaaggttaaactgaaacaaggactcaagagtgcaatgggcatttctagtgatggaaatgcatatttgcaagagagccagttttggaaactttacaaggaagatcctgcagcatgtgcaatcgtgatgaaaacttcagttggccttgtttacctgcttgcctgtctgctggagcctttcatgccctctttttctgatgaagtgttacgtcaactaaatttatctccagaagaaaatctgtcattaagtgaagaaaagggagaaattgcgaaggcaaaaactccttggaattttgtaccagcaggtcacagaatagggaaacccgcacctctgttcaaggaattgaaagatgaagacgtagctctccatagagaaaaatatgcagggagtcaagctgagagaagctcaaaagcagcagctgatgctgaagccaacaaagttgctaaccagctcaagggcacaaaattatctgatggaggaacaaaaaaggaaccgaagaaacaatctggtggctcaaaatcgaagacagctgaggctgacattacagttgcaaagttggatattagagtggggcttatcagaaaagcagagaagcatccagatgctgattccctttacgtggaggagattgatgttggagaggacgcgccgagaacagtagtcagtggccttgttaaattcatacctcttgaagaaatgcagagccggaaagtctgcgtgctctgcaatctgaaaccggtggcaatgcgtggcataaaatcacatgcaatggttctggctgcatcgaatgaggaccacacgaaggttgagttggtggaacctccagagtctgctgctgtgggggagcgtgttacctttgctgggtacgcgggtgagcccgaggcttccctcagtggcaagagcaagacgtgggagaagctggccgccgagttgcacagcaacggtgagctggtggcgtgctacagagatgtgcccttcactacctcggctggagtctgcagggtgaagacaatagcgaacggagagattcgctagtaccaccacatcaccgaactgcagccagcggagccagtctgtgtctggtttcgctgaaagcgattgttcctgattttcatcttcgaaaattttggtatttccatttgttcaaataccgcaaagcaaccatgatttagaaaaatacagagagtgccctttccgcatcctcttttttatcagttagtacttggctcctgttgtctcactcggaggctccatgcttcttgctctatctgtatttccttagaagtgattctttacctgctcttatttatagttccatatgaaaggaacgaa

SEQ ID NO: 153937 - DNA, 2775 bp, Zea Mays
acaacgaactatcctgttagccagccctaaacccttctgtcccgatggcgtcgtcgtcgtcgccgccgccgccgaagctgccgattcccggccgccgcaacatactcatcactagcgcacttccgtacgtcaataatgtcccgcacctagggaacatcatcggctgtgtgctcagcgcagacgtgttcgcgcggtactgccggctccggggttacaacgctatctacatatgcgggacggacgagtatggcaccgccaccgaaacgaaggccatggaggagaagtgcacgcccaaggagatctgcgataagtaccatgctatccacaatgaagtttacaagtggtttaacataaaatttgacaagtttggacggacctcttctcctgagcagacagaagtctgccatgcaattttccataaattgatggaaaacaattggctcacagaaaatactatgcagcagctttactgcgatacatgccaaaaatttttagctgataggcttgttgaaggaacatgcccgaacaaagtctgcaacgcatcagcaagaggagatcagtgtgaaacatgcagcaccttgttgaatccaactgaacttattgacccaaagtgcaaggtttgtaagaacactccacgtattcgtgacacggatcacttatttttggagcttcctctattgagagacaagctggtaaactacatcaatgaaacttcagttgctggtttgtggagtcaaaatgctattcaagcaacaaatgcatggctgaaggaagggctaaagccacgctgcatcaccagagatcttaaatggggtgttcctgtcccccatgagaagtataaagacaaggtgttctatgtttggtttgatgcacctatcggctacgtgtctattacggcatcctatacacctgagtgggagaagtggtggaagaatcctgataatgtagaattgtttcagtttatgggcaaagataatgtgccgtttcacacgatcatgttcccttcaacgctactcggaactggggaaaagtggacaatgatgaaaacgataagtgttactgaatatttgaattatgaagcaggcaaattttccaagagtaaaggtattggagtctttggtaatgatgcaaaggatacaaatattcctcctgaagtatggcgatactatttgcttatgaatcgccctgaggcatcagatacactctttacttgggctgatttgcaagccaaattgaacagcgagttgctgaacaacttgggaaacttcattaatcgtgtgctaagttttgttgcaaaaccagctggagctggatatggttctgttgtacccgatgcacctaatgcgggcgcgcacacattgacaaaaacacttgcagaaaaaaccagtaaatgggttgaacaatatctcgacgcaatggaaaaggttaaactgaaacaaggactcaagagtgcaatgggcatttctagtgatggaaatgcatatttgcaagagagccagttttggaaactttacaaggaagatcctgcagcatgtgcaatcgtgatgaaaacttcagttggccttgtttacctgcttgcctgtctgctggagcctttcatgccctctttttctgatgaagtgttacgtcaactaaatttatctccagaagaaaatctgtcattaagtgaagaaaagggagaaattgcgaaggcaaaaactccttggaattttgtaccagcaggtcacagaatagggaaacccgcacctctgttcaaggaattgaaagatgaagacgtagctctccatagagaaaaatatgcagggagtcaagctgagagaagctcaaaagcagcagctgatgctgaagccaacaaagttgctaaccagctcaagggcacaaaattatctgatggaggaacaaaaaaggaaccgaagaaacaatctggtggctcaaaatcgaagacagctgaggctgacattacagttgcaaagttggatattagagtggggcttatcagaaaagcagagaagcatccagatgctgattccctttacgtggaggagattgatgttggagaggacgcgccgagaacagtagtcagtggccttgttaaattcatacctcttgaagaaatgcagagccggaaagtctgcgtgctctgcaatctgaaaccggtggcaatgcgtggcataaaatcacatgcaatggttctggctgcatcgaatgaggaccacacgaaggttgagttggtggaacctccagagtctgctgctgtgggggagcgtgttacctttgctgggtacgcgggtgagcccgaggcttccctcagtggcaagagcaagacgtgggagaagctggccgccgagttgcacagcaacggtgagctggtggcgtgctacagagatgtgcccttcactacctcggctggagtctgcagggtgaagacaatagcgaacggagagattcgctagtaccaccacatcaccgaactgcagccagcggagccagtctgtgtctggtttcgctgaaagcgattgttcctgattttcatcttcgaaaattttggtatttccatttgttcaaataccgcaaagcaaccatgatttagaaaaatacagagagtgccctttccgcatcctcttttttatcagttagtacttggctcctgttgtctcactcggaggctccatgcttcttgctctatctgtatttccttagaagtgattctttacctgctcttatttatagttccatatgaaaggaacgaagtgtatcagaacatcactttatata

SEQ ID NO: 153938 - DNA, 1215 bp, Zea Mays
gggcgcgcgcgaggaagaagttaggttagaaggactctccaaaagcgccgcttgagtaaaaaagatctcgccccaaggggtacgacgactacgatcacacaatataagcatctctctgctgctcaaagcaacccaggccggactcccgagggagcttttttagagcaagagaggacggagaggtagagagagaagggggacggaacaagcagctagctagcagggaagatgggtcgcggcaaggtggagctgaagcggatcgagaacaagatcagccggcaggtgacgttcgccaagcgcaggaacgggctgctcaagaaggcgtacgagctgtcgctgctgtgcgacgccgaggtcgcgctcatcatattctccggccgcggccgcctcttcgagttctccagctcctcatgcatgtacaaaacactcgagagataccgcagctccaactacagcacacaggaagtaaaagctccactggagagtgaaattaactaccaggactacttgaagttgaggaccagagttgattttctccagactacacaaagaaacatccttggcgaagatctgggcccactcagcatgaaggagctcgagcagctggagaaccagatagaggtatccctgaagcatatcaggtcaagaaagaatcagatgctactcgaccagctctttgatctcaaaagcaaggaacaagagttgcaggatctcaacaaagacctaaggaaaaagctgcaagaaacaagtccgcagaatgtgatccacgacgtctcctgggaggaaggcgggcacagtgggagtagtgttcttggtccgttccagggactccttcagcaccatggcaatgatccttccctgcagacacggtaccatcagcaggcctacatggaccagctgaacgaggacatggcggaccctgacgagcacggtcggtctggatggatatgagatgctccggtccgatgccccccaaataatgtcgatgcatgcatatagtttcctgcggtatgcggaactatatatgtgttgaaactgcaccaacgattagctgcctgattgtaatggttaccttaagaactccagtgtattgtattgttgtgtgctgtgctgtgttgtcagaagcttgcaactttgtatatgtacatgtatggtattctgttagtttcttggagctgcgcaaaaccgtcttcatttctgggcttcatttctata

SEQ ID NO: 153939 - DNA, 2415 bp, Zea Mays
gtaataagtttactgtgatgattgatgaatgatgatatctctggcgtcatgcccgctcgcggctcgcacctagcagtgtcgccgcctcgccgtggacgacggatatcgcgggcgcggcacccccgttcccgtcctcgttcgcttgtctgatcagatccccatctggccgttcacgaaggcacgcagccgagctcgcagcgcacgcagggggctgggagaaccggacaagtcagaaggtccacccgcgacgcgaccgcgacccgcaaggcgggcgagcccgccgaggcggaggagggcgcctcgagatctcctccgcgcggctcgcgggtcagaagcagcgaagtcgcatttgtaaattcatcatcgtccccgactccccgcctgcaaaaattctgctgtggcctcctgccctcctcgtttgccttccattgcctgaaatcccaattccgagattcccaaattgcaggaccccactgctagtgctaggttcccactccgcgcgcgccggcccagttaacccccgtccgcggccgcgggttgactcgcaatcggaatcgcaagcgtccggatccgggctcacacctccgaccgacagccaccgcgcagaaaacaaggcggagacccggcgataaatccccgcgccccatccttttccgttccccacaccaccaccgagttcaccggggctggaggaagcgtctacaggacaaggatcagcatcgcttcatgtgactgattggttggttgcgccggcctgcgaggatctagcaccgagttcagggagcacttcgtgagacttgttcattcgtcttgaggtgctggagccgtcacgttgtggtagttgagaggaacctgtccaatttccatagttgcgaggaaagattcctgagatgtctactctctcagacccctcaaaagaagatacttcacctgagggttcaggtactacccagagaaatggagcctggagtaacacattgaacactcttctgcagcaagcctcagtatatggtgtggccgctgggtattgtttatcagcgtccctgctctcgatcatcaataaatgggcaatcatgaaatttccatatcctggagccctgacagctctgcagtacttcactagtgttgctggagttctcctatgtggacagctcaagctcattgagcacgatggacttaacttgaggacaatgtggaagttcttacctgctgctgtgatgttctacatctccatcttcacaaatagtgaactcctgcttcatgccaatgtggatactttcattgtgttccgctctgctgtgcctatatttgtcgcgatcggagagacgctgtatcttcatcagccatggccatcgctcaagacatggctttcactctccacaatacttggtggaagtgtgatctatgttttcacagacaaccaattcactgtgactgcttacacctgggcagtggcctacctagcaagcatgtccattgatttcgtgtacatcaagcacgtcgtaatgaccattgggctgaacacatggggccttgtgctatacaacaatctcgaggctttgatgttattcccccttgagctccttataatgggagaatttgatcagatgaaggtcgacagctccaaggtgtcaaactggctgtcattcgatgtggtcctccctgttgctctttcatgcctgtttggactatcgatatcattctttggattctcctgcagacgggctatttctgctaccgggttcacagtgcttggcatagtgaacaagctcctgactgttgttattaatttgcttatctgggacaagcatgcctcttttgtgggcaccattgggctcttgatatgcatgtcaggtggcgtgctctaccagcaatccaccatgaagccgaaggcgcccaaggttgagccgaaggaagagaacgacaacgacgaggagcagcagaaattgctgcagatgcagggtgttcaagagagcaatccaactcagaaataaagctcttcataaaccttacaacgaagtaatgctttgatggattaccttctttgcaacagcctcacctgaaacgtttttgtattggctaatacttggaaaaaagcatatggatgagtagtcatgaattaggagctacaaaatatcatgtttttgatattagaagtcgtgaggggacctaattatcactatgcaattctttattactgtattaccacttacatttgtaacgcaaaatcgttatgataggataccaggtactcggcaaatacctgcattgaatacttcctatacaaaagcatccgtctcatacagttcgggggtgacagtggtagtatgatctgtttttaggcatttctctgctggagttagcctatatgttctgtaacttattgttggtgatgaagacattggttcttgtgct

SEQ ID NO: 153940 - DNA, 1786 bp, Zea Mays
ccccaagcttgtttgacttccctggctgtcatggacaagcgcattatgccctcacgagataagttaacagggctagctgctaggtggttgctgcatactggtcttccctctttctcttgccacctcgggcatcctctctggcttagaaaaaaaatatgcgcttcatagtccatacctagatcttttggtgttcagttttggtttcaagccatggcgaattctcggattggacgttacaagatgtctactctctcagacccctcaaaagaagatacttcacctgagggttcaggtactacccagagaaatggagcctggagtaacacattgaacactcttctgcagcaagcctcagtatatggtgtggccgctgggtattgtttatcagcgtccctgctctcgatcatcaataaatgggcaatcatgaaatttccatatcctggagccctgacagctctgcagtacttcactagtgttgctggagttctcctatgtggacagctcaagctcattgagcacgatggacttaacttgaggacaatgtggaagttcttacctgctgctgtgatgttctacatctccatcttcacaaatagtgaactcctgcttcatgccaatgtggatactttcattgtgttccgctctgctgtgcctatatttgtcgcgatcggagagacgctgtatcttcatcagccatggccatcgctcaagacatggctttcactctccacaatacttggtggaagtgtgatctatgttttcacagacaaccaattcactgtgactgcttacacctgggcagtggcctacctagcaagcatgtccattgatttcgtgtacatcaagcacgtcgtaatgaccattgggctgaacacatggggccttgtgctatacaacaatctcgaggctttgatgttattcccccttgagctccttataatgggagaatttgatcagatgaaggtcgacagctccaaggtgtcaaactggctgtcattcgatgtggtcctccctgttgctctttcatgcctgtttggactatcgatatcattctttggattctcctgcagacgggctatttctgctaccgggttcacagtgcttggcatagtgaacaagctcctgactgttgttattaatttgcttatctgggacaagcatgcctcttttgtgggcaccattgggctcttgatatgcatgtcaggtggcgtgctctaccagcaatccaccatgaagccgaaggcgcccaaggttgagccgaaggaagagaacgacaacgacgaggagcagcagaaattgctgcagatgcagggtgttcaagagagcaatccaactcagaaataaagctcttcataaaccttacaacgaagtaatgctttgatggattaccttctttgcaacagcctcacctgaaacgtttttgtattggctaatacttggaaaaaagcatatggatgagtagtcatgaattaggagctacaaaatatcatgtttttgatattagaagtcgtgaggggacctaattatcactatgcaattctttattactgtattaccacttacatttgtaacgcaaaatcgttatgataggataccaggtactcggcaaatacctgcattgaatacttcctatacaaaagcatccgtctcatacagttcgggggtgacagtggtagtatgatctgtttttaggcatttctctgctggagttagcctatatgttctgtaacttattgttggtgatgaagacattggttcttgtgctaaatagagttttcttatcatc

SEQ ID NO: 153941 - DNA, 79 bp, Zea Mays
ttttttttgaaacgaaacatacatgaaagtttgcctcctctcacacgacttgacttttttgccgctatatcttttccgc

SEQ ID NO: 153942 - DNA, 1182 bp, Zea Mays
atggagggtttttcgagggacttgctgtgcgggattggcaagggggacgcgccgccaccggagaagaggccggggcagctgcgggaggagatggaggaggtggagcttagcctcgggctgtctcttggcggccgattcgggctcgacaggaaggggagcaagctcccccggtcgtcgtccgtggcggccatgctgacaacgccggtggaggtgccggcgccgccctccctctcgcgggcgagctcgctgccggtccaggcggaggcgtcggaagttgagaggaagcaggggctggatggatggggttcttgccgtgagggcggcggtctcggcgtgcaacacgcggcgaggctgccggcgagcgggaacccttcctctgcctcttcggtaggtgaaggacagattttgcaaggcaccctcatgaggactagttcactccctgctgtcattgaggcttctggcaatgatgactggaagaaacgaaaggaagcacagagcctgaagaggctcgaggttaagaagaagaggattgagaggaggaactctctcgcctgcaacacttcaaaagaagctgctgggcagagtccaaaagagatgaatgcaaacactgacaaattagtaagttctgatgaaactattgtcagcgctaacgaaagtcatagcagtggcaagcatctggtgaaggggcttccaccaaagtaccaggccacaattacatcagaagacagttcgtcagcaatgcgaaagaagccaaactcggccttcaaaggaacagccatcactgaggagcagaactcatcatcgtctgttccttcctccggtgaagctataagtagcgtgacggcaccaagtctgcctctgttgtctttggtccccataacagcaacccttggttccagggaagaccaaagcattttaggcagggctggtgcaagggcaaacggcatgggggacgtggaaaggaggatgatgcaggagatgccgggcgtgttcaccaagggcctgtccaacggcagcagggtcgaaggcttcctgtacaaatacagcaaaggagaagtgaggatcgtatgcatctgccatggaagcttccttactccttcggagtttgtggagcacgccggcgccggcaaggtagataacccgctgcgacacattgtcgtcagcgctaccccgaacctgtga

SEQ ID NO: 153943 - DNA, 744 bp, Zea Mays
atggcctgcacgacggcagcatccctgcagcatgacagggccaacgacgacgaggcgtgcatgtacgcgcaggagctcctgagctgcttcgtcgtgcccatgacactgaaggcggtcatcgagctgggcctcatcgacgacctcctcgcggccgacgggcgcttcgtgaccccagaggagctggcggcgcggtgggcgcggccggccgaggcggccgccgcggtggaccgcatgctgcggttcctcgcgtcgcacagcgtcgtccggtgcacgacggaggcggcggggccagacgggagggcccgccggagctacgcggcggcgccggtgtgcaagtggctcatcgctcggaacggcaccgggcagggctcgtgggctccgatcgggctgatgaacctgaacaaggggttcatggagacctggtactacatgaaggacgccgtggcggaaggggcgacgccgaccgagaaggcctacggcatgccgctgttcgagcacctggggtcggacgaggcgttgaacacgctcttcaaccaggccatggccggtcactcggagatcgtaatcagcaagcttctcgaggtgtaccgcggcttcgagggcgtcgacgtgctggtcgacgtcggcggcggcaccggctccacgctgcggatggtcaccgcccagtacaagcacctgagaggcgtcaactacgacctcccccacgtcatcgcgcaggcgccgccgataaaatatgagatatga

SEQ ID NO: 153944 - DNA, 858 bp, Zea Mays
ctcgacctcctcccccatgaccacgaccatgcgccgtttcaacctcggcacttctgcagaaccgtccacgccccgcatgcccgcatcctccacctcttcccgtccaactccgttcccacctggcctagaactgcagacggccaagactggcgatgcttctcagatccatgctcatcaccgctcgctcacctacctcccagtacctcctccttccgtaataacctggcgtgcagcgtggtgctcctcggcaccgccgccacctaccccaacagcgggcgctctgacaacggcgaccgtggcggtgcaggtgtaggggctggggagtttgtgccctgccggatccagttgatcgcagaggtttccctcgctaagctcttcgcagacttcgccagcccagtcgacacgtctgcgctgatgcagcagaactcgcctcccaccttgtccaagtcgcccgtgccggagagggagaccatcccgccgcaagagacgctaggcggcggcgacgacaacatagatcccgtcgatccacgtgagagtgttacaggctccgaggaacccggcttgccagaagctgccgttatgaggaaggacatggcggcggtttccaacaaggatggcttgcccaccaggaaggatgacgacgaggatgcaacgtccgagcccaccaccaagccatcatgatgagtttctatgagcactagctgtgctgagttcatgtatgaggggcaccctcctcgagatcggcatgtcctactctagggcctccagtgtgcagctccttggaaaggtaggttactgactgcacttgtttgtgaatacttggagtgaccacaactaagtcacacaatgaaactttac

SEQ ID NO: 153945 - DNA, 3164 bp, Zea Mays
ctcgacctcctcccccatgaccacgaccatgcgccgtttcaacctcggcacttctgcagaaccgtccacgccccgcatgcccgcatcctccacctcttcccgtccaactccgttcccacctggcctagaactgcagacggccaagactggcgatgcttctcagatccatgctcatcaccgctcgctcacctacctcccagtacctcctccttccgtaataacctggcgtgcagcgtggtgctcctcggcaccgccgccacctaccccaacagcgggcgctctgacaacggcgaccgtggcggtgcaggtgtaggggctggggagtttgtgccctgccggatccagttgatcgcagaggtttccctcgctaagctcttcgcagacttcgccagcccagtcgacacgtctgcgctgatgcagcagaactcgcctcccaccttgtccaagtcgcccgtgccggagagggagaccatcccgccgcaagagacgctaggcggcggcgacgacaacatagatcccgtcgatccacgtgagagtgttacaggctccgaggaacccggcttgccagaagctgccgttatgaggaaggacatggcggcggtttccaacaaggatggcttgcccaccaggaaggatgacgacgaggatgcaacgtccgagcccaccaccaagccatgtgactggcataacaaatcaataacttgagatacatttcacaagcttagtcccataggttgtaacagataatgtgctaatgtccagcatgatgagtttctatgagcactagctgtgctgagttcatgtatgaggggcaccctcctcgagatcggcatgtcctactctagggcctccagtgtgcagctccttggaaaggaggaatccaatgggaagcggtgcagatcgaccaagcgcggtggcacgaaggacaacccgagaatggtggaaagaagcaggggaaggacaacgcaacgaagcccccctagctgcccaaggactacatccatgtctgggcaaggcgtggcgagcaaggcatggcgaggcgatggactgtcacaacctcgtggagaggaccttgcaatggcgaatcaagggatagttacacatcgaggcttttcgaaatgctactcttctggctccctcctggctaagcagttgaagaatgtgaatgaacacaaatgtcaaatctatggtgacactgtcgggttcttagcaacaggcgatatttttgttgcgtgcaacgaatgtgccttccctgtgtgtcggtcacgctatgagtatgagcgcaaagaggggaatcaatgttgtcctcaatgcaaaactagatacaagaggcacaaagcactggttgcactgtacctttaccctttcttgaacactgtctacaaaacaagagagtatgagttcttgaggcttaccagcctgggtgtgatcgatgctcttgtgaagccggttgttaggaagtgcaccgaaatgttgagtcgagcaatttgcatatctggcggcgatttttatgtacgcaggtttcataaggatggacctattgtttggaggttgttggctttatctccattccgacgtctgtcaaagatggatgaaaaagcaatcattttaccatatagggatacctcacttaactcagaggaacctatggctgagatctctagccaaaagattcagattgcagtcctggacatgatcgctgcaatatcttcgaacaagagaaatgttgttgcactagaaagcgtactaaagaaggtctgtggccttgtggtaggcattgcctacagtagtttgacaggtttgcaggaagctactataagggcattggcaggccttgcctgcatggatgctgatcttgtctggcttctccttgcagatgtgtactactcactaaaccaaagggaatctttacttcccgaccaagatctagccctggtatcagatcttttgccccctcaagtgtcttcgagagaatacctctttgtacagtatggaggtgagggtgtcaggtgtgatgtagacccctcatctgtttattatgtgttcagaaggatgcagggtgtgtgatcttgtgcgacctgaaaatcaggttcctaatactgtgtatttgtaatcttgctgagtttttttggtcatgctagcaccctgtgtcacacattgaatataatatcacctgctacaaagaatggtaaactttttcatacgtgttctcgcactgaaaatcatcaaggttggtcacatgtctgaagaatgattatgacaagtctttaccactttgaccataattatattaaggtagaagtagtgtgctttcttcattccgcatatccactattaaccttatagatatctgtacattgtcgttgtaccatatgttttggtgaatctcgtctaacctcgagtacccttgaaatttttccagcaaacatcaggactcatgatgacaatgaaggatgtgatgagtttgtgtctgttaaccatataaggttgcacgttaagcatgcccctgacttgccggacgagcagcaagactttgggacctagattggctaaggcactaagaatagaatagcttttcaagaaaagagagacaacaactaacactgtactatgtaggggtgaaatagctagattaagataataaaatttatatatagctaggatcataaatggattacgaaacatttttatcttaacaatataacacatgtttatatataagttattatagtattatatatttccgttgcaacgcacgggcactcacctagtaagcaaagaattcaggggtgtgatcatttttggccgtggggacactccgaagcagcatgtggacctgctgcaccagcagctgcttcctcactcaggtatttcattccgtccacaacagtacagcacagtgcatcgatcttgaaatcaaaatccaacagcgacacaaaccgaatataatcgacaccaccgctcgctcacgacgccagggtggtgctggggcagttgtcgacgccgcaggccagaacgtcgcggtagtcgcgggagatggtgaagtggtcgtgcacgctgccatcccggctcttcttgtactccaacagcagcctcgtgtggttgaacgccgtcagcttcacgaacccaaagtcgcggtcccgcacgtggctccatcgcgcccg

SEQ ID NO: 153946 - DNA, 803 bp, Zea Mays
aagtgcaccgaaatgttgagtcgagcaatttgcatatctggcggcgatttttatgtacgcaggtttcataaggatggacctattgtttggaggttgttggctttatctccattccgacgtctgtcaaagatggatgaaaaagcaatcattttaccatatagggatacctcacttaactcagaggaacctatggctgagatctctagccaaaagattcagattgcagtcctggacatgatcgctgcaatatcttcgaacaagagaaatgttgttgcactagaaagcgtactaaagaagatgtgtactactcactaaaccaaagggaatctttacttcccgaccaagatctagccctggtatcagatcttttgccccctcaagtgtcttcgagagaatacctctttgtacagtatggaggtgagggtgtcaggtgtgatgtagacccctcatctgtttattatgtgttcagaaggatgcagggtgtgtgatcttgtgcgacctgaaaatcagcaaacatcaggactcatgatgacaatgaaggatgtgatgagtttgtgtctgttaaccatataaggttgcacgttaagcatgcccctgacttgccggacgagcagcaagactttgggacctagattggctaaggcactaagaatagaatagcttttcaagaaaagagagacaacaactaacactgtactatgtaggggtgaaatagctagattaagataataaaatttatatatagctaggatcataaatggattacgaaacatttttatcttaacaatataacacatgtttat

SEQ ID NO: 153947 - DNA, 2094 bp, Zea Mays
gtactgagtactgactactgactacactcccaagtcaactccaccgtcggctgtgctgcgctgatcttctgtgagtagtgcgcgcggcgtggtctccgttcgaaccgatgcccatctgctgaatcggatcggatcgtgcgatcggccgccacgccacggcccgcgggtgaggcgtggtctccgggaggcagccaacctatcccgcccggtctagcctctagcgatcccggcgccggcagcgcgcacgagaggaatggacgcgtcgcacccggagggcgaggccacggcggggtggctgacggtcgaggagtggagcggctcgtcagcctccgcgctctcccgcaccgccgtcctcaccgcctccgcctcctctctcaccgcacacaggttcggcagccggtgggaacggatcgggagccgcatgctcggcgccttcgtgcctgagggctttcctgggagcgtgactccggattatgtcccgttccagatgtgggatacgttgcagggtctctccacatacatccgtgcaatgttgtctacacaagctcttctaggggcaatcggagtgggggaacagtccgcaactgtcataggtgctacttttcagtggtttctgagggacttgacaggaatgcttggagggatattgttcaccttttaccagggatctaatcttgatagcaatgctaaaatgtggcgtctagttgcagactttatgaatgaccttggaatgttgatggatcttttgagccctctgtttccttcatcgttgatagttataatgtgcttaggcagcctgtctaggtcattcactggtgttgctagtggagcaactagagcagcactaacgcagcattttgcacttgcaaataatgcagctgatatttctgcaaaggagggcagtcaggaaacacttgctacaatgttagggatggggttggggatgctgttagctcaaattaccagagggcatgctttgagtgtatgggcatcttttctttctcttacgatgttccatatgtatgcaaattacaaggcagtgcagtcactttcactcactacgctaaactatgagagagcttccatcttgctacaatacttcaaggaatgtggtgaagttcttgtgccacggaaggtttcccagcaggaacatattcttccttcttggtcaaactggaggaaactgaacagaattaaactgccacatgagcgtgtgcacttgggtgctaaagcctcgatgcttacacacagtgacatgttggtgattgcaaaaacaagataccactatgaaaacgcgaactactttttgctggataaacaaggcatcgtttacgttttcatccacaaggaggcaacaccagccgatgttttaaggtccttcgtacacgggctcgtgctagctagctcgacacagaacagcaaacctcagcacttagaggcccgtcgatggatggacgagatgtataccagttttatctcgaagggaaatattcgttcgttctcttttcgtgcaaacagctgcagactgaaggttactcgacggaacgccttctgtcgcattcgattctttggagggcacactggcttcacggccagctggatgagaagctcaagtaggaggaacactgcaagaccgcgtctgcttatccaaggacaggtcacaggtatatcgcccaggacgcgattattagctagggtgagaacgtgttaattgttcgcttgtgcatggcatgactgcatgatgaaagatagatgcatgagctgcaccgagcaccaccaaatatagttaaccgcttcgaggttctagcatatggacggacttcacgataaaagtgctggcctgtacgctcgagttcagcatgttaatggttcacactacgtccatccgcgccgctttagggcatgtacagtggtgtttaatgtggagtctcttaaggtgtttaagggggttatttgtaaaaaaatcttagagccgtctctccgtgaagagacgtctctggctcgtaaaccaagtagcaacagacgccttacttcccactgtacgaatttgtcgtctgttctatcgatctgatgctatacaaatacatttaattc

SEQ ID NO: 153948 - DNA, 2059 bp, Zea Mays
gtactgagtactgactactgactacactcccaagtcaactccaccgtcggctgtgctgcgctgatcttctgtgagtagtgcgcgcggcgtggtctccgttcgaaccgatgcccatctgctgaatcggatcggatcgtgcgatcggccgccacgccacggcccgcgggtgaggcgtggtctccgggaggcagccaacctatcccgcccggtctagcctctagcgatcccggcgccggcagcgcgcacgagaggaatggacgcgtcgcacccggagggcgaggccacggcggggtggctgacggtcgaggagtggagcggctcgtcagcctccgcgctctcccgcaccgccgtcctcaccgcctccgcctcctctctcaccgcacacaggttcggcagccggtgggaacggatcgggagccgcatgctcggcgccttcgtgcctgagggctttcctgggagcgtgactccggattatgtcccgttccagatgtgggatacgttgcagggtctctccacatacatccgtgcaatgttgtctacacaagctcttctaggggcaatcggagtgggggaacagtccgcaactgtcataggtgctacttttcagtggtttctgagggacttgacaggaatgcttggagggatattgttcaccttttaccagggatctaatcttgatagcaatgctaaaatgtggcgtctagttgcagactttatgaatgaccttggaatgttgatggatcttttgagccctctgtttccttcatcgttgatagttataatgtgcttaggcagcctgtctaggtcattcactggtgttgctagtggagcaactagagcagcactaacgcagcattttgcacttgcaaataatgcagctgatatttctgcaaaggagggcagtcaggaaacacttgctacaatgttagggatggggttggggatgctgttagctcaaattaccagagggcatgctttgagtgtatgggcatcttttctttctcttacgatgttccatatgtatgcaaattacaaggcagtgcagtcactttcactcactacgctaaactatgagagagcttccatcttgctacaatacttcaaggaatgtggtgaagttcttgtgccacggaaggtttcccagcaggaacatattcttccttcttggtcaaactggaggaaactgaacagaattaaactgccacatgagcgtgtgcacttgggtgctaaagcctcgatgcttacacacagtgacatgttggtgattgcaaaaacaagataccactatgaaaacgcgaactactttttgctggataaacaaggcatcgtttacgttttcatccacaaggaggcaacaccagccgatgttttaaggtccttcgtacacgggctcgtgctagctagctcgacacagaacagcaaacctcagcacttagaggcccgtcgatggatggacgagatgtataccagttttatctcgaagctgcagactgaaggttactcgacggaacgccttctgtcgcattcgattctttggagggcacactggcttcacggccagctggatgagaagctcaagtaggaggaacactgcaagaccgcgtctgcttatccaaggacaggtcacaggtatatcgcccaggacgcgattattagctagggtgagaacgtgttaattgttcgcttgtgcatggcatgactgcatgatgaaagatagatgcatgagctgcaccgagcaccaccaaatatagttaaccgcttcgaggttctagcatatggacggacttcacgataaaagtgctggcctgtacgctcgagttcagcatgttaatggttcacactacgtccatccgcgccgctttagggcatgtacagtggtgtttaatgtggagtctcttaaggtgtttaagggggttatttgtaaaaaaatcttagagccgtctctccgtgaagagacgtctctggctcgtaaaccaagtagcaacagacgccttacttcccactgtacgaatttgtcgtctgttctatcgatctgatgctatacaaatacatttaattc

SEQ ID NO: 153949 - DNA, 2268 bp, Zea Mays
gtactgagtactgactactgactacactcccaagtcaactccaccgtcggctgtgctgcgctgatcttctgtgagtagtgcgcgcggcgtggtctccgttcgaaccgatgcccatctgctgaatcggatcggatcgtgcgatcggccgccacgccacggcccgcgggtgaggcgtggtctccgggaggcagccaacctatcccgcccggtctagcctctagcgatcccggcgccggcagcgcgcacgagaggaatggacgcgtcgcacccggagggcgaggccacggcggggtggctgacggtcgaggagtggagcggctcgtcagcctccgcgctctcccgcaccgccgtcctcaccgcctccgcctcctctctcaccgcacacaggttcggcagccggtgggaacggatcgggagccgcatgctcggcgccttcgtgcctgagggctttcctgggagcgtgactccggattatgtcccgttccagatgtgggatacgttgcagggtctctccacatacatccgtgcaatgttgtctacacaagctcttctaggggcaatcggagtgggggaacagtccgcaactgtcataggtgctacttttcagtggtttctgagggacttgacaggaatgcttggagggatattgttcaccttttaccagggatctaatcttgatagcaatgctaaaatgtggcgtctagttgcagactttatgaatgaccttggaatgttgatggatcttttgagccctctgtttccttcatcgttgatagttataatgtgcttaggcagcctgtctaggtcattcactggtgttgctagtggagcaactagagcagcactaacgcagcattttgcacttgcaaataatgcagctgatatttctgcaaaggagggcagtcaggaaacacttgctacaatgttagggatggggttggggatgctgttagctcaaattaccagagggcatgctttgagtgtatgggcatcttttctttctcttacgatgttccatatgtatgatcggatactgcatacttagactcggatacggatcggagctcaacgcttttagacagataatatccgtaccatttacatccctacggctatcccatatttctgtgtgattttcttccttagcatatcacgtttcttcatgcttcagggatttagttttaaaaaggcatttcttaacatacttccgcttgttttgtttctgatgatccagcaaattacaaggcagtgcagtcactttcactcactacgctaaactatgagagagcttccatcttgctacaatacttcaaggaatgtggtgaagttcttgtgccacggaaggtttcccagcaggaacatattcttccttcttggtcaaactggaggaaactgaacagaattaaactgccacatgagcgtgtgcacttgggtgctaaagcctcgatgcttacacacagtgacatgttggtgattgcaaaaacaagataccactatgaaaacgcgaactactttttgctggataaacaaggcatcgtttacgttttcatccacaaggaggcaacaccagccgatgttttaaggtccttcgtacacgggctcgtgctagctagctcgacacagaacagcaaacctcagcacttagaggcccgtcgatggatggacgagatgtataccagttttatctcgaagctgcagactgaaggttactcgacggaacgccttctgtcgcattcgattctttggagggcacactggcttcacggccagctggatgagaagctcaagtaggaggaacactgcaagaccgcgtctgcttatccaaggacaggtcacaggtatatcgcccaggacgcgattattagctagggtgagaacgtgttaattgttcgcttgtgcatggcatgactgcatgatgaaagatagatgcatgagctgcaccgagcaccaccaaatatagttaaccgcttcgaggttctagcatatggacggacttcacgataaaagtgctggcctgtacgctcgagttcagcatgttaatggttcacactacgtccatccgcgccgctttagggcatgtacagtggtgtttaatgtggagtctcttaaggtgtttaagggggttatttgtaaaaaaatcttagagccgtctctccgtgaagagacgtctctggctcgtaaaccaagtagcaacagacgccttacttcccactgtacgaatttgtcgtctgttctatcgatctgatgctatacaaatacatttaattc

SEQ ID NO: 153950 - DNA, 171 bp, Zea Mays
aatccggcctattatggattggaggatactgaaacaaacacattgaattcttatctatcaaggttagtcgaaactacatttgaagatcttgaggacagtggatgcataaaagtggatgaccactctgtaaagtacttgattttggggaaaatagcttcacagtattacctg

SEQ ID NO: 153951 - DNA, 157 bp, Zea Mays
gatgagcttcctgtacggcacaatgaggacaatttgaatcgaatactcagcggaaatgtcccgtatccagttgatcaacaccaccttgatgatccacatgttaaagccaacttactctttcaggcacatttctccagagcagaattgccaataagcg

SEQ ID NO: 153952 - DNA, 864 bp, Zea Mays
tgcatctcttgcagatgatcatacagggtctctggtttgagagagattatgaatccctctggatgttgccatccatgaatgatgatatattagaccatctcaagagtagaggagtctcaacagtcccctccttactagatctttcccgtgaagaattgcgtagggtacttcaaccattttctgcgtcagagttgtatcaggatctgcaacatttccctcatgttgatgtgaaagttaagcttcataatgaacaggagcgatccaaacctccaactttaaacatcaggttgcaattgaaaaattcgcgacggtcagcatcaagagcatttgcccctagatttcccaaggcaaaacaagaagcttggtggcttgtcctggggaatgctacaagttcagagctgtatggtctgaaaagaattagttttgcagatcgggtgattaatactcgcatggaattgccacagacgttcaatgtgcaggagacgaagctgatcttggtgtcggattgctacctaggttttgacttggagtattctcttgagcatctcaccaagggttgagtgctttattcagagctgtttgggctgtttcattttgtatgggttcagcaaccagctcatcctagattgatcctgtaatcacgagacatgagttcattccatgaatttttgtttgtatgactacatccctcgtgttcatggttatattatatttaatagctatatatacgagtggataggtttataactttcatgaaatatcttttccgtaagcatagtagatgtttgagctctaaggttatgaccaacaaattgtgtatatggtcgtgcaaaatactattttataatataaactatattattt

SEQ ID NO: 153953 - DNA, 117 bp, Zea Mays
atggtctggatgtcttttctgactgaactggaccaacccttgccgcttcactctgaggatcagcaggaatccctaaaaattgggaatactggtttccaggccctctactgctggtag

SEQ ID NO: 153954 - DNA, 612 bp, Zea Mays
atgtcccccgagaacaaggaaccaaagctccgcctcgtccgaggcccacctcatgagtctttcccaaactccgtctcacccgagctcccccgcaagggtcttccaaaacctccgcctcgccccgcgccatgtctcggggggctcggaaacgtgaccgggccctcaacttcaacctcggctctcagcgggaatcgggcaggcccaagtcaacaacaagcacaagaccatgccatctacaggatacacaagacatcctcacacagtacgcagccaattcccgtcctccaggaagtgcctcttgagcctataaatatgacagtctacgacttctcaagggaggcaggtcaagaagggcaagcttcaccagctccaccagtggactggggaaccgtcgggattcaatcccttcaggttcaactccgaccccctagaaggcccatatacgacgaacacctacatcagcctgtacgagcagctccagggatctcagagtacgaaagccccaagaccgaagacgatctaggcttaggactagacttcttcgggctccacgaccccaaggccatgtgtcatctctcaatcgcgtctgaatgcctcgtctccaacgactag

SEQ ID NO: 153955 - DNA, 256 bp, Zea Mays
tctatatgctgctcaaacctcgcagtgttaccataccccaatggtttgtggcaggtaccttgtctggtaattctatatggggatcaatgctttaaaattgcactatccagcgacaaataaaaagaaacggagggagtacttggacaacaataacttcatcgggaggatacccgaagggttgtacaggcatccatttctgaaggagctgtacatcgaaggaaaccacttcaggccaggaaccagaccaaaaggaacg

SEQ ID NO: 153956 - DNA, 2611 bp, Zea Mays
gagcgcgagcgggggaggggaaggggagaagcaagcgagacgtcacgggagcagagcatagcctgatagctccattgccgcttgccggccatcgcctagccgccgcccggctcccgggaagagaaatcagcccccatccccaatccctcgcccccccaaaatcccctggggattcgccgatagggccccccccgtgccgccccgtattttgcactgctcgcacgcggcgacgagcattgctatttccttcttttttacctattagcatgtctctgcccaatgccaccgcctcgccgccgccgccgtcgccggaaccctaggccgccggactcggggctcccgtcggcgggggaggatgcagctgcggatctcgccgagcatgcgcagcatcaccatctccagcagcaatggcgtcgtcgactccatgaaggtgcgcgtcgcgccgcagccgcccccgcccccgccgccgccgcacggggccgcccggcgcggcgggggtggcggagggggatggtattggcgcgcggtcgcgttcccgcttgtcgttgcgctcggctgcctcctgcccttcgccttcatcctcgccgccgtccccgcgctcgaggcaggcggaagcaagtgctcctccgtcgattgcttggggaggcgaatagggcctagtttccttggtaggcagggaggtgattctacaaggctggtgcaagatctgtatagattttttgaccaagttaacaaggaggaattcccatccgatgagaagttaccagaatcattcagggatttccttttggagatgaaggataaccattatgatgctagaacatttgccgttaggttgaaagctacgatggaaaccatggataaggaggtaaagaggtcaaggttggcagaacagctgtataaacattatgctgcaacagctattcccaaaggaatccattgtttgtctctgcgccttacggatgaatactcctcaaatgctcatgcacggaaacagttaccgccaccagaactgttacctttgctttctgataattccctccaacattatattctagccagtgataatattcttgctgcttcagttgttgtcagctcaattgtacgatcttcctcactgcctgagaaagtagtctttcatgttattaccgataagaaaacatatcctgggatgcattcgtggtttgctcttaattccatagctcctgcaatagttgaagtaaaaggtgttcaccagtttgcttggctgacaagagaaaatgttccggtactagaggctatagaaaaccatcgtggagtcagaaatcactatcatggagatcatggaacagtttccagtgcaagtgacaatcctagggtgcttgcttcaaagttgcaggctcggagccctaaatacatatccctgctgaaccatctccgtatttatttgcctgagctctttcccaacctcaacaaggtggtcttcctcgatgatgacattgttgttcagcgtgacttgtctcccctttgggcgatcaatcttgaagggaaggtgaatggagctgtggaaacatgcagaggggaagacagctgggtgatgtctaagcgtttcaggacatatttcaacttctcgcatcccgtgatagctcggagtcttgacccagatgaatgtgcttgggcatatggtatgaatatatttgatctggcagcttggaggaagacaaatatcagggatacatatcatttctggttgaaggagaatctaaaatctggtcttacactctggaaatttggtactttaccaccatcccttatagcatttaggggtcatgtgcatggcatagacccatcatggcacctgcttggcttaggataccaagacaagacagatattgagagtgtcaggagggctgcagtgatacattacaatggacagtgcaagccatggctagacattgcttttaagaacctacaaccattttggacaaagcatgtaaactactccaacgactttgttaaaaactgccatattttggagcctcagcatgtcaaggaatgacctgtaggctgtagcaaataccggacacacggagggagtatagtttatgattcgtttgttggctggagagactgactgttgctggatgataagtatactggttaatcaagaaagcaaccagcattcaatggaactgaccatcccctgtgaaaactgccaggagttttcatctgtaccataggggaacacaattcttaccatctgtatcatattggtgcatcattctttcctatactgtagctgcgcaaaaaggggctctgggactgggctgatccttggtcgcagaacaacatcagaaggctagaagattgaatgcttggttgatcaagacgaagaaaggaggcggatattatgaggtggcaagtttatatgctttacatccatccatttaattctttttacactcgagcattgaaattttgttctggtagttttgtgattgcttcggtaggttcgagatgattgtagtagagatgccattgtttctggagtaacctacaggatattgttacgattgttgacatactaaagatgtgcagataattctttcaagagtatttgcgctaaactgtg

SEQ ID NO: 153957 - DNA, 1502 bp, Zea Mays
aacggaggctggactggattcttgaagaggcttccattccatgggggtaaagcgatcccatttccactcctgcctgttgtctgcctccaaggcaacagttttttagtttgcttgcgctctcctgccttcggttcaccgcctctccatgaatgcaagcaagccgccttttaaatacgaggctctcgcttgttactgaagctgcgcggcgtcttgtgcctcggaacctgccaactgccattggaagtgtttctctacagtctacaaatacgtcgcgcgccatggacggcgactcgaagaagctgagggtgtggttttctggagtaggaaagggaggtggaggtggacgccagtcttcagcggcaccaccgcaagaaagcgcgcctattggaagagcggaaatgaacagcagcggggaatttgatgctgcattcgcagccacaattgcagcagcagcatttgcaattgctgcccgtgaagagaagcttgcagctcagaagaagtctgtccccatcgaggaggtgccacgagccctgtcgctagtcaagagagctggaagcaccaaaaaacctgcgggaggcaacaaaatctcaagatggtttagcggcaaggagcctctagaacacgacgacgacggtccagtgagcaggccactgaaaccagcacctggaaagcccgagggtatgcctgcagatcacaaggtggcacccaagattcttgagacttctctgagtgtgaggaagggttcagggtcctccggcaagacaacagacaggaaagggagcaagaagtttgagcaagaacatgttcagaaagcgccatcgatcatcaggccatctacatcataccattctagacggaatggagaagacgcagcaggagtagctgctattggcggcacgagatctaaggctgatgagtgggagaaggcaaagcttgcaaaagttagagaggagtacgaaaagatgatggagaccatagctgaatgggaaactgagaagaaggtgaaggcgagacgccataaagaacagagagagactgtgctggacagaaagagagcaaaagcactagaagaatacaaccaggagatgacaaggatcagcaagattgctggaggagcaaggtcgatggcagaggaacgaaaatacaacgacgagaataagatcaaagagaaggcgcacaagatacgatccacaagaaagcctccccgcacatgtgcttgcttttgagaatagttctatacactgaaatttggaaccgtatgaaagaagtgtgatttgaagtcactattgtaaaagtcacacaatagtgacgtactgtattgtaatatgtatttggctttgacaagatattagtgtagagttgtatcccccttcaaaaagagagttgtatccaacacgcaacatattgacgctttccactgaaagcaacatcagcatgtttgaaggacgtggaattcagatagagagagaggaagatacatgcatcaatattcaagatgaagc

SEQ ID NO: 153958 - DNA, 700 bp, Zea Mays
ttcgggtaaccagattatgagggccagagagagcggcacgacggcgtaggcgcccagcttgagcagctcctcggtgtccttggagatggcgccgatgcgggaccagtcgccgctgtacctgcggagcaccagcagctacccactgtaaggtccgagtccgagcagcaggcaatgccgccaatgccgggatgcatggcgcaccggcccactgacggcgtgcgtgcgtgcgtgctcgagcgtggaagctcacccggcgtcgacgaagccgagggcgaatagcgcgacgccggcccgaagcatcacggtccgggagagcacgccggcgccgtctcccgcccgccggtcgtccttggcctcgttcgctgccttcttcttcgcgctgcaccgcgctgtccgccggggcgcgagctggcgcggcagcggcgggacgggagcgcgagcaacggtgctggcgccggcgggcagatgcagcagcatgccgttcatctggctctttgagcggctctgctgtgcctggtttgccgtcgctcgttggttctcgaccacacgtgtgttagcacttagcagcaaagccagcaaaaaaaacttgcactgttgcacacacttctgtagttctggcgttctgccaaaagcgccgtgcgggcaaattatacttccatctgtttcatcttttttgtgagaaaagtcttttctgagaata

SEQ ID NO: 153959 - DNA, 1524 bp, Zea Mays
atggcagtcggcggtctccagggagcgaagaagcgcaagcgcgagcacgcggaagggaaggcaaagcctcggaagcaagtcaagggaggcggggacggagcgaagcggaagagccactcggccgccggcggctacacggcccatggcggcgccggcgaagttgtggcgaggaagaagaccccggttacccccaaggagaagcgcctcgcggccaagacactctatgagttcgatgatctcgagagcatcattgataggacactaaagcgcgattttgacaccgaggaagcactctggttgcttaagataggtcttgtgtgcatcccggatagccctaagatcaagccctccatgtcaatggttgctaagatactgcaaggtccatttggaggtccaggatgtcaaaatcaagaacatgagaagcactttgagcattttacacctaatatgagcaaaacacgaaatgaatctgcatttcctcaggatgaaattgactcacatagagagcatatttataatgaactgacctcagattcaattgcttcaaagaagccaaaaataaggaagagagaaaataacaattctgtttcaagttctgctcccaacattcctaatactcaagattttatcactaccttctgtgaggtggtggaggatttctgtggaaaaaccgaaattcctgaagatggaaattgcggtgactggttgtcaatcccacttggtgatgttaaggttctcgtgaatgaaattacatctgttcgatccaaaaggatattgcatgaggttcctatggatacagttacaaggttattggatgtgattgatcgtcagattcgatattctcaagtcagcatgaacaaggtcgaggcattgtacaggttgttcaagaagattggcaacaccttcattgatgatgggctgattaacaaggctctttcaaatggcaagcccactgttgttgagttttatgcaaactgggaactagactctgagaaccctgttgctgatgtggagagcattgtagccaagggcataagagatggtgcaataaatgccaccatagatcaagcaaatggctggatggaagacacgtggtatgggagttgggcgcaagctcaagagccaccgcaggaaccagaggtgtgtttgtttccattgtgtagtggtattgaggccaagcagccaaattcggccatccataagtgtgcccgtgttcagctggtgaaggatggaaagaagattgctgcctttgtgccgaatgatggttgcctaaactacatcgaggagaatgatgaggtgttgattgtaggacgaggagacattcctggtgtcaggttcaaggttgttaaggtttctggtgtgtcgctgcttgcactcttcaaggagaagaagccaaggtcagtttggaagaaacattctcctttattcacaaactatgttgattttctgaccaagtgtccttccatacagatccatagaaaatatagtacaggtggcagcacggagaagacgtttgaaagataa

SEQ ID NO: 153960 - DNA, 4603 bp, Zea Mays
atggggatggtgcccaacgggctcctgcccagtgcgtctgccgggatgacgcgacggctcgaccccgagcgctgggcggtcgcggaggaccgcacggcggagttgatcgcgtgcatccaacccaacgtgtactccgaggggcggaggctggccgtgtaccactacgtgcagcggctcatcatgaactgcctctcctgccaggtttttacctttgggtcagtccctctcaagacttacttacccgatggtgacattgatgtcactgcttttagtaatagtgaagaattaaaggagatttgggcaaatcttgtccgggatgcattggagcgtgaagagaaggatgaaaacgctgaatttcatgtaaaagaagtccagtatattcaggcagaggtcaagattataaagtgtcttgtggaaaacattgttgttgacatctcatttaatcaagtcggtggactatgcacactatgttttcttgaagagattgacaacttgatcagccaaaaccatttattcaagaggagtatcatattgataaaggcatggtgtttctacgagagccgtattcttggagctcatcatggtcttatatctacttatgcattggagacacttgttctgtacatatttcatatattcaacaactctttcactggacctcttgaggtgttgtaccgtttcttagaatttttcagcaactttgattgggagaaattttgtttgagcttgtggggcccagttcctattagttcacttccggatatgactgcgatccccccacggatggacagtggtgagttgttgctgaacaagtccttcctcgatacttgtagttctgcatatggagttgtgcctcacacccaggagaaccagggtcaaccatttgtttcaaaacattttaatgttattgatcctttacgtacaaacaacaatcttggaagaagtgtcagtaaaggaaatttctttagaatacgcagtgcttttgcgtatggggcgaaaaggctcggaaagttacttgaatgtccaaaagaagctttaattcctgaattaaaccagttcttcacaaatacatggataagacatgggagtggaagtcgtcctgatgtgcctatcccaagtctggttgatgtgcggcctatgaaggttgtttcttctgtagtgtcaagcagccagagaagtttagcggcattcaagaaaaaagttgaaaatcctaaacttcatgttaatcaggataatcttcgtccgaatcaagataatctcactggagttggtgacatacattaccgtaatctaccaagaacagttaatccttcagtttctcatgttcagcaccaaaaaagttatacaccacaaggcaatgctaaggtctctgaacagcttgaaagaaataactcagacggattgatgcaaagtgcaagggataagagagtgccaaatggtctctttgtcaatgacagaaatgggcagaacaggtccagatttgcaaggacccgatcaagtcctgaactcacagactcgtctactgaaggatttcgtggtaggcggactaatgcagttggtatggaaaaatcttttggtgttgattacagcagaagaaacatcttgattccagaagtgtctagcaaccacagcactaagtcttcacaagatgaatcagtgtcttccatgaatggttcatctcaccctagtgcattggcagcttctgactcaaatagcgtttcaagcagctttcgtgatgataatggttttgtgatgaatgaagaactcccttctgtttctgaatcatcggatatgcaccacgatgaacaagttctggctaatttaatggaatccatgaagttgcatggattcaacggacagattcaattgccaatgcaaataccttctcatttgtctgtagcgcatccccctttactggctccaacaacttattcacaaaagcatttggctggggttccaccagctaacttaattgggacaccatggttgcccaatatgcagttcctgcatggatttgttccacctatggcccattacatacacaatccaaattttgcaccaaacatcgaggatggtactgagactgaaaaacctaatacatcagatgtgaatcatgatgctggcaaaacttggcaagagtatggtgttgggttttctagacattttgatcctgaagcaagagatcctcacttctatggtattgatggcaaggagcattcctctttgcctaatggtgtaccaggtgctcccttggaaaggcagatgaaattcacagttgagaataatgttgtaggtgatgaaacttatactggcatgttccaaattcatacaggtagagaacctgctgtagattattctaagaggagtggttatgggaatgttccgtcttcacatgccagttcatccaaaggcaaaactctggattcgagttcatgggatgaaatgactgtaaatacaacaataccaccaagagaaaattggggaaaaagacctgcctttgtggcacctgccacgactacacatggcaatactgggtggcagatgggaaatatcactgagcatctcgcagctgaagttaatgatggccccagaaatgggacagtggtaccaatcatcactgaagcttctgagatagtaacagggtctgattctttttcatcaaaatcaagaactagtcaagtacccaatgagcttgatccatcacaagttggcatgcctaatccagtgtttacaccttttcttattggatcaccacagcataggcaagctgatagctctggacttacttttgttccaacaggtccaccagttccttttgttgtgctcccgtttgttccagggaataatgatggttctggcccccagtttgagagaagcgaaggaattgatcagcttcctgccaatactgtaggtcaattttttggttcacttaatgatgttcaccaacaagattccagtgctatctcaacagtatcgtccagtactatgactgagccatctggtgaacacaagcctgatatcttgcatagtgattttgtcagccattggcacaatttacagtatgggcgactctgtcagaatcctcgtcccatgggtcctgttctataccctgttccagtgccaccgatgtatttacagggccatgttccatgggatgggcctggaagaccagctgcaccaaatgttaactggacacaaatggtgggcggtcaacgagtatttcctgtgatgcctgtacaaccggctacagaaagaactggtgtttttcagcactacggtgaagatgcacccagataccgtggaggcacaggaacctacttgccaaatcctaaggttcattttagggaccgacactcaaattcaagaaactacagaggaggttataatggtgacaggggtgactataatgataaggagggaagctggataaactcaaaacaacgaaatccaaaccgcggctatggacgtagccagtcagagaggtccggcatgaggtctgatagacaggtcactgatgagagccggtctgataggcaacgacgaacttatagaaatgactcgtaccggcatgaggcaagctctcagtatcttgtgcagggccaaccttttggatccacaagctctatgcgcaaaccaggaaacacagtgcatggggtttatacaccaccatctacgtattcaaatggtaccagtgctttatctggccctccaggaccaccattttttatggtgtactcttatgaacaaggctcaaatcatgctgcttcctcatctgaaccaattgaatttggatctcttgggccacttcctgcagcagatggtgatgacataccaaggtcgacacgccaagtaatgcctaatgggttttatgggcaaagacgtggtcgatataggggtggttcctctcattcatctcctgatcaaccatcctcgcctcagcctcgtcggtagttgagtcttcgtatgatggcttgatcacttcgtatgaaaccttgcgatagcaatattttggtccaccccttgtgatcacatcctgcatgggtgaagatggttgggccttcagcagccacaaaaaaagtatatgccctagctggcttgttggtgctctgtgattctcagaagcactgaattgtgaataccatcaaaagaggcatcaatttaccggcaggttattttaccagtcacaatgatgcttcctggaatcaaaataactatcttccgaacaaatcatggaaccttcaatcctataatatcttcatacagaaatcagaactgaactgaaggttatgagcaaggatgaactgtgttccggccgtcccgttatatgaattgtgtcaagggtaataacaatattagtttggatggagcaggaacaagcattgctgcattggaaacaatctggaatgctttgggctttaaatcccgtaccgtttttaggtaggattaagctcatgtaacacagcaaacttttcacttagatgcactatgaatcaagtgaatcgtaggaaacggattctcgtgctgaagggagggatgactccagaatttactcttaaggcacgagtaaaaaagttatccatgtcaatcttcctcgtttcctttc

SEQ ID NO: 153961 - DNA, 2761 bp, Zea Mays
tttgcatacacaccgctacgcccccggctccaaccctacccccctccgcctcctcgccggcgcgctctaccccgcctcactccccatcagtgtctctcatcggcggctctccgggcttcacgttggtccggggtacctctcgtgcgatccgcgcgcaatggagcaagatcaaagcccagccgtcgacagcgcggattctggcgccgcggcttttgattttgcgactggcaatgcacctagctcggctgtgaccagcggaagcgccgtggcccctgacggtggggctcaggcagctgatacttctgcctaccaggccgagcacacggagttgaatgggacgactggcgatatgtctaattaccaatctgcaggagctgcagagaatggcacagccgtcaccgagataggcgagccggttcctgagccatcctacgaggaagctgtgctttcagcagaagaggctagattgtggagtgttgttactgcaaattgcttagatttcaatgcctggaccacacttattgaggagacggagaaaaatgctgagaacgatattttgaagatacggaaagtgtacgattcatttcttacggaattccctctttgctttgggtactggaagaaatatgctgatcatgaagcgagacttgatggtgtcaataaagttattgaggtgtatgagcgagcagttcttgcagttacttattcagtggacatttggtataactattgtcaattcgcaatttcaacatatgatgacccagatatcgtccgaagactgtttgaacgtggcttggcatacgttggaactgattatcgctccaatattttgtgggatgagtatattaagtatgaagagtcactggaggcatggagtcacctcgctgttatatatacaagagtattggaacatcccatccagcagcttgatcgctattttaattgcctcaaggaattggcttcaaagcacagtttttcagaaatacttactgcggaagaagcctcggtgtatgttgtcacgtctgagaccagtgctcaagcgcctgatggtgacacacatcctgatgatatcgataaggctggtcaaccagaactttcatctttggcagatgcagaaaaccttgcaaagtatgtctccatgagggaagagatgtacaagaaggctaaagagtacgaatctgagatcattggttttgagctagctattagaaggccatattttcatgtcaagcctcttgacaatccagagcttgaaaattggcatagctaccttgactttatcgagaaggaagaagacattaataaggtatgcttttacacttctaggaaccccttgtcctttttatttagtagtttttatggaacacttggaattttataacttacaatccagtcttattggctcaactatatcctttaacggctagtatttggacgaagcttcctttgtaatgggatgttgaactgaggatagagcgtggacataatgtttggtttcgatgaggctaagtactccaaactttcatttggcagtggtcgttctgggttcatgatatatggtaccaaataccagttttgaatttttaatctcatatatgcaggtatttgcttaatgctcaccttcttaaccatctatctatcgagcaggatggtccctcctttcttatggaggggcctccataatcagctaatggagtaatctgttatcaaattgtatgaaaggtgtgtgattgcatgtgctagttattcagaattctggatccgctatgtgcaatgtatggaggataaagggagtctagacctagcaaacaatgccctggctcgtgctactcatgtgtttgtcaagaagcagccggagatccatctatttagtgctcgctttaaggagcttaatggggatatttctggagcacgtgcagaatatcagcatctttactcagatttatgtcctggctttctagaggccatcgtgaagcattctaatatggaacaccgactgggagataaagaattatcttgttcagtttatgaaaaggccatcgctgctgagaagggaaaggaacagagccagctcttgccgacgttgcttattcagtactcccgtttcttatttttggccatccgagatttggagaaggcaagagaaatattaactgtgctgcatgagcagttaaatgtaacaaaaacagtgcttgaggctgtcattcatctagagtcaatttttccatgcgaaaagcgtattgattttttagactcacttgtggagaagtttgttacacctgaatcatctcagggagaggtggcaagtctagttgacaaagaggaaatatcttccatatttttagagtttttggatctctttggggatgcaaagtcaatcaagaaggctttaactcggcatacaactcttttttcatgtaagagaagcattctgccatcaaagaaacggaaagcagatgacactgttgtctcagacagggacaaatttgctaaaactgtggttactcagtcagccacgggaactgatccaaatgcttccaatcctcctgtttggcctgcaacttctgaagcatctgggcaacaatggggagcttcttatgcacagcaggctgcatatcctgcatatggaacttacgactacagccatcaaatgccccagcctgctcctcaagcagctgcctatggtgcttatcctccaacatactctgcacagtccagtttatctactggtattcagttacgaaatcaggaattgggactt

SEQ ID NO: 153962 - DNA, 2818 bp, Zea Mays
tttgcatacacaccgctacgcccccggctccaaccctacccccctccgcctcctcgccggcgcgctctaccccgcctcactccccatcagtgtctctcatcggcggctctccggtgcatgcccctcgccctccctctcacctatacacgcctccttccacttattgcgcgtcaatttcaccttctgctctcggtctcttcgccttagggcttcacgttggtccggggtacctctcgtgcgatccgcgcgcaatggagcaagatcaaagcccagccgtcgacagcgcggattctggcgccgcggcttttgattttgcgactggcaatgcacctagctcggctgtgaccagcggaagcgccgtggcccctgacggtggggctcaggcagctgatacttctgcctaccaggccgagcacacggagttgaatgggacgactggcgatatgtctaattaccaatctgcaggagctgcagagaatggcacagccgtcaccgagataggcgagccggttcctgagccatcctacgaggaagctgtgctttcagcagaagaggctagattgtggagtgttgttactgcaaattgcttagatttcaatgcctggaccacacttattgaggagacggagaaaaatgctgagaacgatattttgaagatacggaaagtgtacgattcatttcttacggaattccctctttgctttgggtactggaagaaatatgctgatcatgaagcgagacttgatggtgtcaataaagttattgaggtgtatgagcgagcagttcttgcagttacttattcagtggacatttggtataactattgtcaattcgcaatttcaacatatgatgacccagatatcgtccgaagactgtttgaacgtggcttggcatacgttggaactgattatcgctccaatattttgtgggatgagtatattaagtatgaagagtcactggaggcatggagtcacctcgctgttatatatacaagagtattggaacatcccatccagcagcttgatcgctattttaattgcctcaaggaattggcttcaaagcacagtttttcagaaatacttactgcggaagaagcctcggtgtatgttgtcacgtctgagaccagtgctcaagcgcctgatggtgacacacatcctgatgatatcgataaggctggtcaaccagaactttcatctttggcagatgcagaaaaccttgcaaagtatgtctccatgagggaagagatgtacaagaaggctaaagagtacgaatctgagatcattggttttgagctagctattagaaggccatattttcatgtcaagcctcttgacaatccagagcttgaaaattggcatagctaccttgactttatcgagaaggaagaagacattaataaggttatcaaattgtatgaaaggtgtgtgattgcatgtgctagttattcagaattctggatccgctatgtgcaatgtatggaggataaagggagtctagacctagcaaacaatgccctggctcgtgctactcatgtgtttgtcaagaagcagccggagatccatctatttagtgctcgctttaaggagcttaatggggatatttctggagcacgtgcagaatatcagcatctttactcagatttatgtcctggctttctagaggccatcgtgaagcattctaatatggaacaccgactgggagataaagaattatcttgttcagtttatgaaaaggccatcgctgctgagaagggaaaggaacagagccagctcttgccgacgttgcttattcagtactcccgtttcttatttttggccatccgagatttggagaaggcaagagaaatattaactgtgctgcatgagcagttaaatgtaacaaaaacagtgcttgaggctgtcattcatctagagtcaatttttccatgcgaaaagcgtattgattttttagactcacttgtggagaagtttgttacacctgaatcatctcagggagaggtggcaagtctagttgacaaagaggaaatatcttccatatttttagagtttttggatctctttggggatgcaaagtcaatcaagaaggctttaactcggcatacaactcttttttcatgtaagagaagcattctgccatcaaagaaacggaaagcagatgacactgttgtctcagacagggacaaatttgctaaaactgtggttactcagtcagccacgggaactgatccaaatgcttccaatcctcctgtttggcctgcaacttctgaagcatctgggcaacaatggggagcttcttatgcacagcaggctgcatatcctgcatatggaacttacgactacagccatcaaatgccccagcctgctcctcaagcagctgcctatggtgcttatcctccaacatactctgcacaggcctatacacaacaaagctacccacagcctgcagtaattccagcagcaccagtaccagcacctacagcgccgtcagcttatcctcaacaacctgcggcagctcaaccttattatggcacaacctactactgataagtagagtagtcgtggatggtgatccgatgagcctgttaatctaccttttcgcatgtgtggttgctctgtactgccattgtttagctcgcctttagacgaatgctagcgacgagatgatcacttgagaacaaatctgagattcgtacaatcagcatttttgtcgctaggagttgccattgttttcatgcaatagcataatctactttagacgagatagcgttgttaaccatgaatatgaacataatcgacataattcagtgttcatgcctcct

SEQ ID NO: 153963 - DNA, 3120 bp, Zea Mays
tttgcatacacaccgctacgcccccggctccaaccctacccccctccgcctcctcgccggcgcgctctaccccgcctcactccccatcagtgtctctcatcggcggctctccgggcttcacgttggtccggggtacctctcgtgcgatccgcgcgcaatggagcaagatcaaagcccagccgtcgacagcgcggattctggcgccgcggcttttgattttgcgactggcaatgcacctagctcggctgtgaccagcggaagcgccgtggcccctgacggtggggctcaggcagctgatacttctgcctaccaggccgagcacacggagttgaatgggacgactggcgatatgtctaattaccaatctgcaggagctgcagagaatggcacagccgtcaccgagataggcgagccggttcctgagccatcctacgaggaagctgtgctttcagcagaagaggctagattgtggagtgttgttactgcaaattgcttagatttcaatgcctggaccacacttattgaggagacggagaaaaatgctgagaacgatattttgaagatacggaaagtgtacgattcatttcttacggaattccctctttgctttgggtactggaagaaatatgctgatcatgaagcgagacttgatggtgtcaataaagttattgaggtgtatgagcgagcagttcttgcagttacttattcagtggacatttggtataactattgtcaattcgcaatttcaacatatgatgacccagatatcgtccgaagactgtttgaacgtggcttggcatacgttggaactgattatcgctccaatattttgtgggatgagtatattaagtatgaagagtcactggaggcatggagtcacctcgctgttatatatacaagagtattggaacatcccatccagcagcttgatcgctattttaattgcctcaaggaattggcttcaaagcacagtttttcagaaatacttactgcggaagaagcctcggtgtatgttgtcacgtctgagaccagtgctcaagcgcctgatggtgacacacatcctgatgatatcgataaggctggtcaaccagaactttcatctttggcagatgcagaaaaccttgcaaagtatgtctccatgagggaagagatgtacaagaaggctaaagagtacgaatctgagatcattggttttgagctagctattagaaggccatattttcatgtcaagcctcttgacaatccagagcttgaaaattggcatagctaccttgactttatcgagaaggaagaagacattaataaggtatgcttttacacttctaggaaccccttgtcctttttatttagtagtttttatggaacacttggaattttataacttacaatccagtcttattggctcaactatatcctttaacggctagtatttggacgaagcttcctttgtaatgggatgttgaactgaggatagagcgtggacataatgtttggtttcgatgaggctaagtactccaaactttcatttggcagtggtcgttctgggttcatgatatatggtaccaaataccagttttgaatttttaatctcatatatgcaggtatttgcttaatgctcaccttcttaaccatctatctatcgagcaggatggtccctcctttcttatggaggggcctccataatcagctaatggagtaatctgttatcaaattgtatgaaaggtgtgtgattgcatgtgctagttattcagaattctggatccgctatgtgcaatgtatggaggataaagggagtctagacctagcaaacaatgccctggctcgtgctactcatgtgtttgtcaagaagcagccggagatccatctatttagtgctcgctttaaggagcttaatggggatatttctggagcacgtgcagaatatcagcatctttactcagatttatgtcctggctttctagaggccatcgtgaagcattctaatatggaacaccgactgggagataaagaattatcttgttcagtttatgaaaaggccatcgctgctgagaagggaaaggaacagagccagctcttgccgacgttgcttattcagtactcccgtttcttatttttggccatccgagatttggagaaggcaagagaaatattaactgtgctgcatgagcagttaaatgtaacaaaaacagtgcttgaggctgtcattcatctagagtcaatttttccatgcgaaaagcgtattgattttttagactcacttgtggagaagtttgttacacctgaatcatctcagggagaggtggcaagtctagttgacaaagaggaaatatcttccatatttttagagtttttggatctctttggggatgcaaagtcaatcaagaaggctttaactcggcatacaactcttttttcatgtaagagaagcattctgccatcaaagaaacggaaagcagatgacactgttgtctcagacagggacaaatttgctaaaactgtggttactcagtcagccacgggaactgatccaaatgcttccaatcctcctgtttggcctgcaacttctgaagcatctgggcaacaatggggagcttcttatgcacagcaggctgcatatcctgcatatggaacttacgactacagccatcaaatgccccagcctgctcctcaagcagctgcctatggtgcttatcctccaacatactctgcacaggcctatacacaacaaagctacccacagcctgcagtaattccagcagcaccagtaccagcacctacagcgccgtcagcttatcctcaacaacctgcggcagctcaaccttattatggcacaacctactactgataagtagagtagtcgtggatggtgatccgatgagcctgttaatctaccttttcgcatgtgtggttgctctgtactgccattgtttagctcgcctttagacgaatgctagcgacgagatgatcacttgagaacaaatctgagattcgtacaatcagcatttttgtcgctaggagttgccattgttttcatgcaatagcataatctactttagacgagatagcgttgttaaccatgaatatgaacataatcgacataattcagtgttcatgcctcct

SEQ ID NO: 153964 - DNA, 1438 bp, Zea Mays
cctcacatgcacaaggtttctgatggtatgctaaattgttttcaggttatcaaattgtatgaaaggtgtgtgattgcatgtgctagttattcagaattctggatccgctatgtgcaatgtatggaggataaagggagtctagacctagcaaacaatgccctggctcgtgctactcatgtgtttgtcaagaagcagccggagatccatctatttagtgctcgctttaaggagcttaatggggatatttctggagcacgtgcagaatatcagcatctttactcagatttatgtcctggctttctagaggccatcgtgaagcattctaatatggaacaccgactgtttatgaaaaggccatcgctgctgagaagggaaaggaacagagccagctcttgccgacgttgcttattcagtactcccgtttcttatttttggccatccgagatttggagaaggcaagagaaatattaactgtgctgcatgagcagttaaatgtaacaaaaacagtgcttgaggctgtcattcatctagagtcaatttttccatgcgaaaagcgtattgattttttagactcacttgtggagaagtttgttacacctgaatcatctcagggagaggtggcaagtctagttgacaaagaggaaatatcttccatatttttagagtttttggatctctttggggatgcaaagtcaatcaagaaggctttaactcggcatacaactcttttttcatgtaagagaagcattctgccatcaaagaaacggaaagcagatgacactgttgtctcagacagggacaaatttgctaaaactgtggttactcagtcagccacgggaactgatccaaatgcttccaatcctcctgtttggcctgcaacttctgaagcatctgggcaacaatggggagcttcttatgcacagcaggctgcatatcctgcatatggaacttacgactacagccatcaaatgccccagcctgctcctcaagcagctgcctatggtgcttatcctccaacatactctgcacaggcctatacacaacaaagctacccacagcctgcagtaattccagcagcaccagtaccagcacctacagcgccgtcagcttatcctcaacaacctgcggcagctcaaccttattatggcacaacctactactgataagtagagtagtcgtggatggtgatccgatgagcctgttaatctaccttttcgcatgtgtggttgctctgtactgccattgtttagctcgcctttagacgaatgctagcgacgagatgatcacttgagaacaaatctgagattcgtacaatcagcatttttgtcgctaggagttgccattgttttcatgcaatagcataatctactttagacgagatagcgttgttaaccatgaatatgaacataatcgacataattcagtgttcatgcctcct

SEQ ID NO: 153965 - DNA, 1845 bp, Zea Mays
atggccgagatcgacactacaccattagaatctgtgaaggcagcagtggatctcttcgaccggccgggaagcgatcagagcaggctcagtccagacggaaatgaggaagatcagatcgccatcttaagcaaggagctcgcgacgtgcaagctgcagctggaagtcagagagaaccagcagaagcaggccaccatgcagatcgaagccctccagaaggccgtgcaggagctctcggaccagtacgagaaagactgcatggacgcgcacctccgcatagcccagctggaggcggagaacaccggcatcatgagccggcaggcggaggcggacggcgagcgcgaggccctgaggggcgagctggccgccgtgagggccgacctcgacgccgccagggcgtcggtcgccttcgtgctgcgggaggtggaggccgtggagacgagggccatcctggagcgggagggcaccaaggacgccctggcccggatactgcagctcaacgaggcggtcctgtcgtccgccgtcgcggcgatcagggcggaggaggagaggtcggtcttctttcaggaggccatgctccggttctttgactctgacggcagtaatctcgaggtggtcaggaggcagatggagatggtggagcgcatggaggccgagctgctggcgaagaccgtggaagttgagtacctgcgggcggagctgaagcaggccagcgagatttacgtggcgccgcaaggagattctgatgcaacggtcacggtggtcgctgctgacggttgcgatggtcatgatcaggttcaggttcagagacgtgaaacagcagtggaagatacaggaacggagccggaattcacgtttcagcactcaccaggattatcctttgtctctgatgagatcttcagagtggattgtgacgccgttccatctggtggtagcaagatggaagctgatacatccgaggatttagctgagaatgagagtaaacaaggagcggcagtaatggttggggagacgacagtggctgaagggaactccgatgctcaagagacaagatgtcttgttgctaaaacctctggagaagatcgaagcatcgaagctaacactaacagcaatcaagaaccagatgagtcggacggcgcagttccagacttcgcggcgtgccaagggaatgatgtccttgtgaaagatcacgaggagacgaaggcagacgccagctttgtccttgcaagctccagggacgatttccagaacgcgcactctgatgatgccaaggacgtcatcagcatcgccgagcctgacaaccaagaaccacgagcagagccggccgcagctccgatctccacgccgcgagagggcaggtcggatgcttgcgtcgtcgtcgccacagagatcttctccaaagacgagcacgagttctacaccaaggagctcgagcccgacccggggcagggggccaagctggacgggtacgtgctcgtgtcgaagggcgccgacgtcgcggtcaagaacaaccagctggacgaggcgcgcgccgagatcagcgacctgcggttcagcctagaggaggccgtgcggcgggcggagctggccgaggaggcgaaggcggcgctggagcgggagctgcgggaggagatcaggaggaagcacaccccgtcgcggcggcgcgcgacgtcggactcggaggacggctggcgcccggcgcgcgaaggggcgcggccgacgccgtctcatgcgtccgcgtccgggacgccgtctagggcgatgagaagtgccaggccaggaggggaggacatgccgacgccgcgctgcttgacgcttggcaaggtgctcaacatgaagtacaagtga

SEQ ID NO: 153966 - DNA, 774 bp, Zea Mays
gttagtgtttttatagggctaaaaaatattgcgcgctgcacggaggcattcatccgtcctgcgattttcgtttcctccgtgtctccgttcttcatcctgcgttagagaacaagacgaggtcgaggacccagacgcagacgcacacgcagcgcgccttctccaccgcgaagtcatcgttccgcgctgccgccgccgccctagcaaggtgttggattctgtgttgcggcttcggagtgtcattgctacccttctcctgacaacatggtttctttcgagatgaatgacctcaagagtatgcacctggcattacattttttgtttgaattggtgctaatagggacatcaatatgtagtgccaggaactccatttttggtgtgattttttgtatctcgtttattacttatgaccttcacatatctgcaaattgccaccacatacaatgcatatggaaagaccggtatacatgagtttttttattccatacgatctcacatacccaatattttagtagtattattgtcaatcatgtctttatcatgtattattattctgttcaattctgcaatgcatttgtgggttgaaggatcaaacatgatgaagatacgaccttggaacacatgtgatgaattgatgtttcgttgcattgcagtatgtgggctggacaaaaagatcgttgagttagctcagtggctcgtttgaaaagggccccgattaaacttatttttcttttaaaatgaaaatgactggatttgaatgacttttgactttggctc

SEQ ID NO: 153967 - DNA, 1475 bp, Zea Mays
gttagtgtttttatagggctaaaaaatattgcgcgctgcacggaggcattcatccgtcctgcgattttcgtttcctccgtgtctccgttcttcatcctgcgttagagaacaagacgaggtcgaggacccagacgcagacgcacacgcagcgcgccttctccaccgcgaagtcatcgttccgcgctgccgccgccgccctagcaaggtgttggattctgtgttgcggcttcggagtgtcattgctacccttctcctgacaacatggtttctttcgagatgaatgacctcaagaagattgggctaggcctaacaggctttggaatattcttctccttcctgggaatcattttcttctttgacaagggtcttattgcaatgggcaatatcctctttctatctggtttgggtttgacaattggtttgaaatccactatgcagttcttcaccaagcctaagaactacaagggtactatctcatttggtgctggcttttttctggttcttattgggtggccctttcttggcatgctcttagaagcatatggctttgttgtactcttcaggttgtatgattctctttaattgttctctctttagcaatctgcaacaggaaatgcttctaacattcatccatcttacaaagtggcaaatcccttgccactcacccacaaatagcagcaattcaaatggttgtacacacaatgcaacagtacacatctgctattcaaggttgaaacatcaacctgaagcattcaatgcattaccaataactattcacaaaacttttttttgctcttactccatcattaatgtcaaaagattggcttctatatggatgcttacatggatttagtttcagtggattttggccaacccttgctgttttcctccaaaggattcctattattggatggatttttcaacaaccgtttgtcacatcgttccttgaccgctacagaggaaaacgagttccggtttagcttactcctgctatatttcaacatacttccctcacaaatatcatgcggttatggatatgttccgtccttgcctttttctttaacttgtttagttggtggtaggattttttgttgttgtgtaaattacccctcatccgtggttttccacagaccagaatgcattttccccgttaatacattgaagaaagttctcatgcaagcctctttgtggggggaaatgaagtcttagggatgttctgaaagtagtgactacccatcatgtctttttgtaacattacttaatgtaagcatatctgatataggtatgcaaaggctacaatagcttccgtttgctgtatgggaaagaaaggagacttggcagaatcgaagttacttgtgattcttgtaccgccatgtgattattttcttcagtaattccccttccaggcctagtatgggaactcagctttgagttgtaaagaaaaattgcattggtaatctggtatgagttctggt

SEQ ID NO: 153968 - DNA, 1264 bp, Zea Mays
gttagtgtttttatagggctaaaaaatattgcgcgctgcacggaggcattcatccgtcctgcgattttcgtttcctccgtgtctccgttcttcatcctgcgttagagaacaagacgaggtcgaggacccagacgcagacgcacacgcagcgcgccttctccaccgcgaagtcatcgttccgcgctgccgccgccgccctagcaaggtgttggattctgtgttgcggcttcggagtgtcattgctacccttctcctgacaacatggtttctttcgagatgaatgacctcaagaagattgggctaggcctaacaggctttggaatattcttctccttcctgggaatcattttcttctttgacaagggtcttattgcaatgggcaatatcctctttctatctggtttgggtttgacaattggtttgaaatccactatgcagttcttcaccaagcctaagaactacaagggtactatctcatttggtgctggcttttttctggttcttattgggtggccctttcttggcatgctcttagaagcatatggctttgttgtactcttcagtggattttggccaacccttgctgttttcctccaaaggattcctattattggatggatttttcaacaaccgtttgtcacatcgttccttgaccgctacagaggaaaacgagttccggtttagcttactcctgctatatttcaacatacttccctcacaaatatcatgcggttatggatatgttccgtccttgcctttttctttaacttgtttagttggtggtaggattttttgttgttgtgtaaattacccctcatccgtggttttccacagaccagaatgcattttccccgttaatacattgaagaaagttctcatgcaagcctctttgtggggggaaatgaagtcttagggatgttctgaaagtagtgactacccatcatgtctttttgtaacattacttaatgtaagcatatctgatataggtatgcaaaggctacaatagcttccgtttgctgtatgggaaagaaaggagacttggcagaatcgaagttacttgtgattcttgtaccgccatgtgattattttcttcagtaattccccttccaggcctagtatgggaactcagctttgagttgtaaagaaaaattgcattggtaatctggtatgagttctggtctgctggagtggcgtctacgcctcgccatgttggctttgtaaggttccgcagctaatcaaaagtgagccgtttatcaccttgcaa

SEQ ID NO: 153969 - DNA, 1943 bp, Zea Mays
tcgcccgcctccgctccgctgcgcaccaacacacacgctcctcccgcctcgttgccccacggatcctctgacgtactgcaccgtgcagttgggtcactgcgcgtgggccctgtcgcacgcggagcccacgcgacagtggcccatgcagtactgcaggggatccccacctcctccgacgtctctgatcggcatcgcctccgctaagagacccgcggtccacgctcccgtccaaatcccatcgccataaatctcgccacgcccgcgcccgcgcccgcgcgtgtctcttccccccaccactccgccaccggcgccgaagcagagcagccatggccggctccgagcagcgcgtcgtcgccgtcatcatggtcggcggccccaccaaagggacgcggttccggccgctgtcgctgaacgtgcccaagccgctcttccctatcgccggccagcccatggtgcaccaccccatctccgcctgcagccggatcccccacctggcacagatatacctcatcgggttctatgaggagcgggagttcgcgctctatgtctcgtctatctcccacgagctcaggatccctgtcaggtacctacgagaggataagcctcacgggtcagctggagggctctacagctttagagattacatcatggaagacagtccgaggcccataaaaagtatggaggaatgggtactttactagtcaacaaggtatcagcagagtcagcaaaccagttcggcgagttggtagctgatcctgaaacaaatgaactgctgcactatacggaaaagccggagacttttgtgagtgcagttttgctctttgttggtttatttgctcgttgtaattttttcggttgagattttgcatgtcatatttttgctctgaaattgattgcacctttcacatgcaatgattctcagtgagtaattggcatagttgatagcagtaatgcagtttatctatgtgtaggtgagtgatctcataaattgcggagtatatatatttactcccgatatccttagcgccattgaggatgtcttaaaacagaaaaaagacagagcaaatttgcggcgtgtatctagcattgaagctcttcattcagcaactaaggcgcttccaccagactttgttaggttagatcaagacattttatcccctcgagcgggaaagaaggagctgtacacataccagacacttgatttctgggaacagatcaaaaccccagggatgtctttgagatgctctgggttatatctctctcagtttcgccatacctctcctcatcttttagcctcaggagatggcaaaagaactgccactattgttggcgatgtctatatccatccatctgccaaggtgcatcctacttcaaagattggcccaaatgtctctatatcagcaaatgcacgcgttggagctggtgccaggcttatcaattgcataattctggatgatgttgaaattatggaaaatgctgttgttatacattcaattgtagggtggaaatcatccattggaaaatggtcacgtgtacagggcgaaggtgatcacaatgccaaacttggcattactattcttggtgaagccgttgatgttgaagatgaagtagttgtagttaacagcatcgtgctcccaaataaaactctcaatgtcagtgtccaagaggagatcatcctataataaccatcgtttttttttgtctaattccatataaggtctgagtaccaatcacatagtttaagtttattcgttctcaccatgtaatgtaaccttccattagattgagattattagtttgcatttatacctgtcttgcagcatgacactgcacaatcttgacttgctatgctactttggttagcgattgtggtgatgtaaaaaatgtacaaacaggtgacaccattttttgtgagaatgactcaagacattacatcaaatgtg

SEQ ID NO: 153970 - DNA, 1861 bp, Zea Mays
tcgcccgcctccgctccgctgcgcaccaacacacacgctcctcccgcctcgttgccccacggatcctctgacgtactgcaccgtgcagttgggtcactgcgcgtgggccctgtcgcacgcggagcccacgcgacagtggcccatgcagtactgcaggggatccccacctcctccgacgtctctgatcggcatcgcctccgctaagagacccgcggtccacgctcccgtccaaatcccatcgccataaatctcgccacgcccgcgcccgcgcccgcgcgtgtctcttccccccaccactccgccaccggcgccgaagcagagcagccatggccggctccgagcagcgcgtcgtcgccgtcatcatggtcggcggccccaccaaagggacgcggttccggccgctgtcgctgaacgtgcccaagccgctcttccctatcgccggccagcccatggtgcaccaccccatctccgcctgcagccggatcccccacctggcacagatatacctcatcgggttctatgaggagcgggagttcgcgctctatgtctcgtctatctcccacgagctcaggatccctgtcaggtacctacgagaggataagcctcacgggtcagctggagggctctacagctttagagattacatcatggaagacagtccgtcacacatagttctgctgaattgcgacgtctgttctagcttccctcttccagacatgctagaggcccataaaaagtatggaggaatgggtactttactagtcaacaaggtatcagcagagtcagcaaaccagttcggcgagttggtagctgatcctgaaacaaatgaactgctgcactatacggaaaagccggagacttttgtgagtgatctcataaattgcggagtatatatatttactcccgatatccttagcgccattgaggatgtcttaaaacagaaaaaagacagagcaaatttgcggcgtgtatctagcattgaagctcttcattcagcaactaaggcgcttccaccagactttgttaggttagatcaagacattttatcccctcgagcgggaaagaaggagctgtacacataccagacacttgatttctgggaacagatcaaaaccccagggatgtctttgagatgctctgggttatatctctctcagtttcgccatacctctcctcatcttttagcctcaggagatggcaaaagaactgccactattgttggcgatgtctatatccatccatctgccaaggtgcatcctacttcaaagattggcccaaatgtctctatatcagcaaatgcacgcgttggagctggtgccaggcttatcaattgcataattctggatgatgttgaaattatggaaaatgctgttgttatacattcaattgtagggtggaaatcatccattggaaaatggtcacgtgtacagggcgaaggtgatcacaatgccaaacttggcattactattcttggtgaagccgttgatgttgaagatgaagtagttgtagttaacagcatcgtgctcccaaataaaactctcaatgtcagtgtccaagaggagatcatcctataataaccatcgtttttttttgtctaattccatataaggtctgagtaccaatcacatagtttaagtttattcgttctcaccatgtaatgtaaccttccattagattgagattattagtttgcatttatacctgtcttgcagcatgacactgcacaatcttgacttgctatgctactttggttagcgattgtggtgatgtaaaaaatgtacaaacaggtgacaccattttttgtgagaatgactcaagacattacatcaaatgtgaattcaactgcgtgttgtataaattt

SEQ ID NO: 153971 - DNA, 1006 bp, Zea Mays
caactataattagtaatcaatgctatcaactactacgaccacacattcacagcccaaaacaaccaaacatgagatgtaaatacggccaacgcatgttcccaggcacagtggaaagggtgggaatctcaagaggtcctcacctccagggaccggaggtaccggtcgatgtctccgacgtacggcgcaaccgccgcttcagggtaaggcggcttcgtgtccaacagccagcgcgcggagtctccggagtccggactcccgccgtttcctcgcctcctccgcctcgccctcaatccgcgccgccgaccgcgttctcggcttcgatggccgcggcgccgagtcgtggttcatgttcgctccgctggacgtggcgagctcggccagggccttgcgcttcccccgtggcctattgagaggcggcgccgagtgcgcggagacgcagagtttcccttgttcttcatcgcctctgagtccgacctccggatccggattcgttcctccgattgccttggctttccgcttgggtttgcatggtttggttcgggtcgggcaatgagtgaagcgccagggttcgtttggggtcctgggaagtgggaagattgatgcggttagaagttttgagatggccttgtggtgggcatctgcagggccgattttttttttaccttctttatgaaaaaagtaagcatttagatcctgaatgttttatttcagtatttgtacccgaatctcggcgccttagcctatgacgccgagtttacatagctcgacgccatagcttatggcgtcaagtgctgacgtggcggtggcgtcgatggatgacgtgtttgcttacgtggctccctagctcggcgccatagattttggcgccgagctagaatcttccccattctctcttctatcttcccgccgtagctcccccccccccgcgcctcgccacgccggctccgtccctgagccacccggtgtcacgccctcaccgtgtgccgtccgccaatcgccatgaggt

SEQ ID NO: 153972 - DNA, 2082 bp, Zea Mays
tataaatcgttgcagaaaccatccaaccaatcagccctggttctagagcaactctcatcctcactccccccactcgcccgcatcttccggtcttcctcatggcgtcgagcgacctcgccgagagcctcctccccggcggcgggggcggagcctccgcctcacatgacgaatacgaggagcgcgcgtacgactccgaggacaagatctccatcgccgtgtcggattccgacggcgaagacgacggcacgccggcgtcgcgcccgcccttctcgtggcggaagctctggcgcttcacgggcccgggttttctcatgtgcatcgcgttcctggacccgggcaatctggagggggacctacaggcgggcgccgcggcggggtaccagctgctgtggctgctcttgtgggcaacgatcatgggcgcgctgatgcagctgctctccgcccggctaggcgtggccacggggaagcacctcgccgagctctgccgccaggagtaccctccctgggccactcgcgcgctctgggccatgacggagctcgcgctcgtcggcgcagacatacaggaggtgattggcagcgcgattgccatcaagatcctctcggggggtgccataccgctctggggtggcgtcgtcatcaccgcgctcgattgcttcatctttctcttcctggagaattatggcgtgaggaaactcgaggcatttttcgctgtactgattgcaactatggctgtttcatttgcggttatgtttggtgaaacaaagcctagtggcaaggaacttctgatcggtttggtggttccaaaattgagttcaaagacaattaagcaagcggttggaattgtgggctgcatcatcatgcctcacaatgttttcttgcattcagcactagtgcagtccaggaagattgacacaaacaagaaatctcgtgttctagaagcagtttactactataacatcgagtcaattcttgcactcatcgtgtccttcttcattaacatctgtgtcacaactgtttttgccaaaggattttatgggtctaaacaggctgacagtataggtcttgagaatgctgggcagtacttacaagaaaaatatggaactgcattctttcccatcctctatatctgggctgttggtttgttagcatctgggcagagtagcacaattactggcacatatgcaggacagtttgttatgggaggtttccttaatcttcgattgaagaagtggctacgggcaatgattactcgaagttttgccattattccaactatgattgtggctttatttttcgatactgaagatcctactatggacattctgaatgaagcactcaatgttcttcagtccatacagattccgtttgctctaattcctctcatcaccctcgtttcaaaggagcaaatcatggggtcgttcgtaattggtcccatcaccaaagtgattagctggattgttacggtatttctgatgcttatcaacgggtatcttatactatctttctacattactgatgtccggggtgcattgcttcgctcaagcttgtgtgttgtgttggttgtttaccttgcattcatcgtctatcttattgtgcgaaatacttcgctgtattctcgcctttgctcatcaacgtcaaagagctcgtgagcatttcaatgtcgtcatctgctgctttgatgggttggaacagtgctgtagatccatgcaaagcttgtgctgctgcttatttattggcttcagagaagactatgtatgctgtatgcatatcccgtgtatgcttgcatttatgggatatttggtagtagggctccttcccttttaggatgctatattttcacctccagtcacacgttgcagatagatttcttatttctgaggtttatggtgatgtgaaaagactactggcaaaaaaactggcattgctgttcctcctgaaactgagcagatgaaatttactgaatgatctgtaaagctcgatgttgcagttctgaattccaggagctcaatgcatattctgctgaagcttgaatggaatgtcgtgtaagatatgaatgagttgtactttgtgatctaccttaga

SEQ ID NO: 153973 - DNA, 946 bp, Zea Mays
gctagctgtaaacaggcccggaagaatattgcgctcctgcctttacctcgcgtgcgcgacaactagggcgaccgccgtcgctaaacgcccagctgcccaggtcttcgtcgggcccctcgccggcgacgagcactcaacacactcaccaggatggcgctgaggggggtctggcagctccagaagctcgtggtaaactactgcgactggggagggagcagcaggggcatcagagccttcatggaggcacatcttccagcctttaaggaaaagattccacacttagaagtggtgacagagcttgtccgcggtcaacatcctaacttgaagggaatttacaagaaccataacgagcgagtggtctgcgtgagaaatttaccgccagaagaaatactcctgcaagccaccaggctaaggaactctctgggcaggaaagtggtgaagctgcggaccagacacgtaacgaagcggcccagtgtccaggggacgtggacgacggagctgaagatgtgaagccaagctagcagtcaaggtgtttcggtgttcttggtggtgtgatcgcagagaaatgtcagctgtgtcaataacttcggtagagagctgccgttatgccagcctatttcgatagccaaactatttacaccttttgttccgactaaggctgcctcgagcagtattcggtaaagggtccggtacccttgactctaacaacacctgctaaggtctagtttgggtactttagtattgaagtgatttggagggattgaagagtatataaatcccaaaaaaatcaaaaactctcataatacatctcaatccactacgatcccttttattactagattacctaaactaggcctaaatgagcctgtaaaatttagaggagcctcgtcgaacgccatatctagagttcagctctgcttaggtgtgctgcaatcaacatgaaaga

SEQ ID NO: 153974 - DNA, 2482 bp, Zea Mays
acaccttgtgtcgtaccctccggatcgaaggctggacgacgcgaccgcgcggcggcggctcgacgcgaccggtggctttgacgcgaccggcacggcggcgacgcacagcccgacgacgaccctccccgctgccttctccccgggcatttgctggagctggaaggcggaagcgttcccgttggattacttcttgggctggaaagagtgaaagacccggatgcactaaatcctgtcttggaacagttacggccctggaattgatcccatgctgccgaacgggccctaagttggaacctgttcaggcggggggtcagctcgcagctgactggggatccggcaccgcatcgccagacgccaggaggggactatcagccatggcagcgaggcagccgccgccttcgtccgcgtccgcgcccgcgcccgcggcgggtctctccatgaaggactacctcaagaggtacgtgtcgggcccagggaccgacggcgaccagaagagggcgaagaagaagacgaagaagaagcccaagcccgccggcggggtgctcatcgtcgacgaggacccagtgtggcagaagcccgtgcaggtggacgaggagcccgcgtcgtcaggtgacgacaagcctctggtcgacgaggacatcgaggtcaagcggatgcgtcgcctggaggcaatacgcgccgcaaggccgtacaatgctatcgccgaggatggcagcgggtgggttaccgtggccgccccagaggagcagggcggtgggtccacccaccagcgcaggaacgacacgccgttgccagagcggggacgtgctcctacgagggaggacctttctcctgtgcggcggaggcagcggcgcgacacgccctcacctgtgcatggcgatgctgctgcaaaggatttttcaccacctaggcggccctcacctgtgcatggtgatgctgctgcaaaggatttttcaccacctaggcggaggcagcggcgcaacacgccctcacctgtgcatggcgatgctgctgcaaaggatttttcaccacctaggcggaggcagcggcgcgacacgccctcacctgtgccggacggtgctgctgcaaaggatttttcaccacctaggcggaggcagaggcgtcaggacacgccatcaccaaaggacagtggtgcagcggaccaggacgatatgtcaccaccgcggaagtctaggcagagagaggacctttcgccgccaaggaagggtgctcgtcatatcactgaggagccccgggatatctcgccacgaaagaagagagacatttctccctcaaggaagagtacaaaggaaggagcctcaaaacaggtgaagaaatctggactgatgacagcagaagaagttaaagaggacataagaaagattaaggaggctgagatgattaagtttgcatcacaggatccttctctggttgggaaaggggcaaaggcagtattcagagataaggaaggaagacgaataagtgaagaagaaatgtgcaaggcaaaggaacctgagaagccaaaggaaatacatatagaatggggtaaagggttggttcagaaacgagaagctgagtctaggttgaaagagattgaagctgagaagagtaaaccttttgctcgaacaagggatgatcctgagcttgataatatgctaaaagaaagaatccgatggggtgatcctatggctcatctggtcaagcggaaagatccagaatttattttggaagacttgggagatgatgaaaagatgaaagaatctggcttcatagtaccccaaagtatacctactcacagctggctgaaacgtggagtggatgctcctccaaaccgctatggcataaaacccggtcgtcattgggatggcgtggatcgcagtaatggatttgagaaggacatgttcaagctgaagaacgagaagcaagcaatggagcaagaagcctatctttggtctgtctctgatatgtgatcccaactgctgctccttacgagaggaatacagttgtgtaaaggaagaaccaatggaagacctttcaaacgatttttttttcactcttcttattacacaaagtgacatcactggtgatgctgcgccggagtagcctgaatattttccaggaaagcattttcaggaatgcagttcaatgaagctgcattacgtatttgttggaaatctgttactgctgtaccatttgtcatccttcacgttttgtaatatagatgaacgcactgcaaggttttggaacagttcaaaagatgagattttatattcactttctggtttccatgtgtataacttgtcttagcagctgtcgcggtttaatttaaattaaatgatggtggatttgagagccagcagttgtcgttccgaaagcaggaaacaacagggttattactccttattagtagtaactgtaactgatactgtgtgtacgagctgatccgtccaacagggttataacttgttcgttgaggtggagt

SEQ ID NO: 153975 - DNA, 539 bp, Zea Mays
aaactgaaaacaaacagcagcgctgttgttaagctagcaacacgcgacctgtgctttcaggtcttcacatcttttttactcgctgaatcgcttggcttaacaaacagcagctgtcgttaatctagcaacgcgtggcctggagatggccgacgacgacatcaggggcggcgaggctgtggcgctgctgagcctcgcgcgggcgcgggcaccgtgctccggaggtcgatcggaggatctcctcccggtgtccgaggagaggaggtggaacttgtcgcgccacgtgcgtagacgccgtcgccgtcgcctgcatcgtctgcaagaacgacaaccagttgagcatgtgcacgcgagcaacaccaacggtgaccggtgacagctcggccgtcgatggctggttggctgacgtcgctgcgggtcgataggttccagagagccctcgtgttgccatgaaggctaggggggctcaagggcattgctctctgggcacgctcgtcatgctgtggttgggttttgcggcggattttgggatggagagggta

SEQ ID NO: 153976 - DNA, 938 bp, Zea Mays
ccccccccccgcgcgtacaaatagggtgagccagtgagggaacgagggatagagccatagaggagaggaccgaccagagtaccggacacacagcgagggggaggaagaaggaagcaagaaggaggaccgagcaggcctaggccctagggtagtcccgtccggtccactgcggcgcaagtccggccggccggcgggctgactgcctggcgtcggtagggggcgacggcgatctatatctgtcgatgggctactggtgggaccgcgtcgtgctgccggtgcggcgggcctggctcggcgtcgcgtcccgcttcggggttcgccagaccgggctgtggaggctgcggcaggaggtgagcacgtgcgagtacgaggacgtgcacgtgatgtgggagatgctgagccgcaccacggcgccggcgccggcgccagcgcccaggcggcacagccggttccggccgcagccgcggccgtggggcggcaggttccgtctctgccgaggcttctagtggtagatcaaggccgccgcgcgcgtcagctccgatgatgttgctgcggtgcggggtactagtgattccgcttcattttggcttcttttttctgtctctctctctcttgttctttggttttcgctgcttgtatgtaccgtcggcgtccatccctcctggctctgagatgtacgtacttccattcctcctcgtatatccgtctccatccgcctgcagatgatataccggggcacgtgaatgaacagagctgatttcggtcgggtaataatcctgtcattgtttctaccataccacctacctacttctccatctatctgttgcataatcatgcctccttatctgttctctttttgacccttgacgacgaattcatctgtaaacaaaggggtagagagtattagtgtaggatttcaagattcagccagttggtct

SEQ ID NO: 153977 - DNA, 977 bp, Zea Mays
ccccccccccgcgcgtacaaatagggtgagccagtgagggaacgagggatagagccatagaggagaggaccgaccagagtaccggacacacagcgagggggaggaagaaggaagcaagaaggaggaccgagcaggcctaggccctagggtagtcccgtccggtccactgcggcgcaagtccggccggccggcgggctgactgcctggcgtcggtagggggcgacggcgatctatatctgtcgatgggctactggtgggaccgcgtcgtgctgccggtgcggcgggcctggctcggcgtcgcgtcccgcttcggggttcgccagaccgggctgtggaggctgcggcaggaggtgagcacgtgcgagtacgaggacgtgcacgtgatgtgggagatgctgagccgcaccacggcgccggcgcctaggcggcccagccggttcgggccgcagccgcggccgtggggcagcaggttccgtctctgccgaggcttctagtgctgttgctgcggtgcggggtactagtgattccgcttcattttggcttctctctctctctcttgttctttggttttcgctgcttgtatgtaccgtcgtcgtccatccctcctggctctgagatgtacttccattcctcctcgtgtatccgtctccgcccgcctgcagatgatataccggggcatgtgaatgaacagagctgatttcggtcgggtaataatcctgtccttgttgctaccataccacctacctacttctcttttgacccttgacgacgaattcatctgtaaacagaggggtagagagtattagtgtacgatttcaagattcagccagttggtcttgctttgtgcgtcctgtttattcaggttagtttcaggcaaagcaattccatctgactatccgagggaggagggcccatggcatctccagtcgaaaaaagctcgtcagtcaccaggaccaggaggtagagcaagctcgggg

SEQ ID NO: 153978 - DNA, 1093 bp, Zea Mays
ctctccccccgcgcgtacaaatagggggaggcggagagggaacgagggatagaggagagaggaccgaccagagtaccggacacgcagcgagggggaggaagaaggaagcaagagggaggaccgagcaggcctaggccctagggtagtcccgtccggtcccctgcggtgcaagtccggccggcgggcgggctgactgcctggcgtcggtagggggcgacggcgatctatatctgtcgatgggctactggtgggaccgcgtcgtgctgccggtgcggcgggcctggctcggcgtcgcgtcccgcttcggggttcgccagaccggtacggcgcgagggcgaggctcggcgttcgtcggcggctcccgtacaatctcccgtctgcgctgcgctgcgctgcgctgcgctgcgctgactgaccccgtcgctggttgctgcttgttgcagggctgtggaggctgcggcaggaggtgagcacgtgcgagtacgaggacgtgcacgtgatgtgggagatgctgagccgcaccacggcgccggcgcctaggcggcccagccggttcgggccgcagccgcggccgtggggcagcaggttccgtctctgccgaggcttctagtgctgttgctgcggtgcggggtactagtgattccgcttcattttggcttctctctctctctcttgttctttggttttcgctgcttgtatgtaccgtcgtcgtccatccctcctggctctgagatgtacttccattcctcctcgtgtatccgtctccgcccgcctgcagatgatataccggggcatgtgaatgaacagagctgatttcggtcgggtaataatcctgtccttgttgctaccataccacctacctacttctcttttgacccttgacgacgaattcatctgtaaacagaggggtagagagtattagtgtacgatttcaagattcagccagttggtcttgctttgtgcgtcctgtttattcaggttagtttcaggcaaagcaattccatctgactatccgagggaggagggcccatggcatctccagtcgaaaaaagctcgtcagtcaccaggaccaggaggtagagcaagctcgggg

SEQ ID NO: 153979 - DNA, 693 bp, Zea Mays
acttcactactctccctcaaactgtaaacactgcttcaccagttcgctgcttctcctcgtcctcgcaggcgcgtcgatccggagggcgcccgccgccgccggcgggagcggaggcccgagcaggagcgggactggggccggcgaatctggagcccggcggacctgcattgccgcgagaccgccgcgcgtaggcagatctccccccgtcccctgccgcagcaccggcatggtggctgccgcggcggcggccaccgcgccagatccggcccgcccctcgcgcccgccgctcacgccggcgctcgacaagcccaactccgccgccgcgcggaggaactcgcgctccaacaagcccgtgtcctcgaggtacctgcccgccgccgcgtccccggcctcctccacctcgtcgtcttcctcgtcctcgtcctcgtcccgccgctccctctccgcgcagcgcgcccggtcgtccaccccgccgccgcagcactccacgtcgcccaccaccaccgcctcggcagcggcaaccgccaccgcgaccacgatgcggagcctctccgtgtcgttccagggggagtccttcttctacaagacgtcgcgcgcgccgcgggcctcgtcgccgtcctcaccggcagcgcgccgcgggcccacgccggagcgccggaagagcgtctcctccgtgccggaggccgagaacgc

SEQ ID NO: 153980 - DNA, 835 bp, Zea Mays
cgggacggtggccggcggcgaagcccaaggcgtcggacccgctcgcccgcagccttgactgcagcctcgaccgcaaggactccatcctcgccgccgtccacctcctccgccgctctatggccttcgactccacgacgtctctctcgccgtccgacccggccgctgcagccgctccagacctctacgcgtcctctgacaccgacagcgtctcctctggtagcaactcgggtgccagtgatccgccgcgccggggcatcagcgtgccggcgagattctggcaggaaaccaacagccgcctgcgccggcttccagagcccggactgccactaccgtcgtctggcagaaggtcgttttcagacagcccaatgtcacccaggctgccaggtcggtccccgtctccatgccgtggaagcaggggcggtgcgagtccatcgagagggcgcagtggggaggcatcgccaaatgggcatatggtgcaggctccagcaaacgcgccatctatcatcagctttgcagcagaggtgagaagggcgaaaaagggggaaaacagaatcgaggaggcacacagattgaggctactggacaatcggtatttgcagtggcgatgcatcaatgctcggacggatgcgacgcttctggtgcagagcttcactgctgagaaaactctccacagtgcatggaaagaaatatcaagattgcgtgacaatgtcagtaccaaaaggagcagactccagcttcaaaagcaaaaactcaagctgtttgctattcttaggaggcagatgtcatttctagaggactggtctcatatcgaaaaacatcattcaagtgctttatc

SEQ ID NO: 153981 - DNA, 853 bp, Zea Mays
cagttgttgatggtgcaaaggctgatgcactagctgtgaaggaagcagttaactcagcagtggatgtaatgaacacaatgacatcatcaatatgtaatttgctgtctaaggtcgagggaacaagctctgtggtgtctgagctttctaaacttgcaacacaagaacaaatgttgttggaccaatcaaaggatctcttgtccacggttgcagcaatacatgtaaaaaactgcagtttgcaaactcatatgctacagcgaaaccaaaagcagagcccggcacagttgtagatcagtttgccctcgccacattgggtggtcactaacaacatcacacggcctcatgttttctcaccggagactgtgcctacaggtaataaaaagctgtaaccatttgttgggtgtgaagcgtttcctaatctgctcggtcgacctcactgagtgtagctgattcgtgtaattgtttgagtgcatatcaaccatagaagcggcccctgctcgccgcaattggtgtatacagaaacccctagccttgacccaaagataagcttcctgtagatatgaaaagagcttgtcgtttgcgtgcttgctcttctgtgtggagtgctcgagtggtgatgagtgtttgtattgtgtaagggagacggttgctggcttgatacaggtgtctcattgcaaaatcaacaagttgtttctcctgacttgctcatggaatcacagtatctgctttgatgcatactgattcctgaaagagtataaatctatctcttagcgctgtaaagattctgcttgctgcatgggccgtcaaacgtttgttgcggtctttggtgtcaagtttagggccgtggctgcaacaa

SEQ ID NO: 153982 - DNA, 951 bp, Zea Mays
atggagtcctccgaggcgggctggcactcgtttgatccgtcagtcgccgtggaggactccgaggcaatggcccagctgctcggggtgcagtactctggcaacgagcagaagcagccaacaacgccgacggccatggccatgtgctggcctggccaagaagctgacgaccagcactacagctcggccgcggcgtacccgtactgcacgcagatgcagcaacccgacccgggtgcaagtgcaagctgctacgactatgactactactatggcagcaacacgttcacgatcaccggcgacttcttcgtgccggaggagcaggtggcggaccccagcttcatgctcgatctgaacctcgacttcgagtaccaccaggaaggcgagggcatcggccacggcggcggcggtaacggtgaaacggcgccggtgtgcaagaggaggcagctggaggatcagaagaagggcgagaacaccacgtgcaccgtcgttccaaagaagaaatcgcgatccaccgcagtaccggcgcagaagaagggcaagaaggcgcacaaaggcgcgtgcagccgaggcaaccaggaggagagcaacggcggcgacgacggcaataataatgttgcacagccgcagcagtgctccgacaactactacctgtctgacgacgactcgctggagatgaccgccgcgtgcagcaacgtgagctcggcgtccaagaagtcgtcgtcgtcggcagcaggtgggaaggccagggctgggcgtggggctgccactgatccgcaaagcctctacgccagggtagatatcagcacgatgcttgaagaggcagctcaatacgtcaagttcttgcagctccagatcaagcttttgagctcggatgatatgtggatgttcgctccgatcgcctacaacggggtcaacgttggcctcgacctcaagatctctccaccgcaacaatga

SEQ ID NO: 153983 - DNA, 1802 bp, Zea Mays
ctacgcgcaactccacctcccaatctcccatgactccatttcatttctctacctctccagctgcccacttctcccctgtgctcgcgggcgcgcgcgagtgtggagagaagggagggaattcccccctttctgttcggcgccgtgctcgcgcacacacccgcacgccccacgctgcacgccgccttttcctccgtcttgctgctgcaagtccgcaaccactggaggaaaaatcttttccttcacttttcttccctttccccccgcgcatgcacgggctctgattgacgccatgggggacgccgccgccgccgcagcctccacgtccgctcccaccacgcccacctccattctcatctgcctggaagacggcagcgaccttctcgccgatgccgacgatggcgccggcactgacctagttgtcgcccgcgacgagcgtctgcttgtcgtggaccaggacgaggagtatgtagcgctgctcctgtccaaggagagcgcgtcaggcggcggcggcggcccggtggaggaaatggaggactggatgaaggccgcgcgctccggatgcgtccgctggatcatcaagaccacggcgatgttccggttcggcgggaagaccgcttacgtcgcggtgaattacctcgatcgcttcctggcgcaacggcgagtcaatagggagcatgcgtggggtctgcagctgctcatggtggcgtgcatgtcgctggcgaccaagctggaggagcagcacgctccgcggctgtcggagttgccgctggacgcgtgcgagttcgcgttcgaccgcgcgtccgtgctgcggatggagctcctcgtcctgggcaccctcgagtggcggatggtcgccgtcacccccttcccctacatcagctgcttcgcggcgcggttcgggcaggacgagcgccgggcggtcctcgtgcgcgccgtggagtgcgtcttcgcggcgatcagagcgatgagctcggtggagtaccagccgtcgaccatcgccgtagcatccatcctcgtcgctcgcggcagggagacgcccgccgacaatctggacgcgctcaaggcgatcctgggctcatcatttccacagctagacaccgggcatgtgtactcctgctacagcgcaatgattcgggaggacgacaagtcgccgacgcagtcgacgtcgacgtcgacgggggtggcgtcctcgggcgtctctgtcgccgcgcacgccggggggagcgggagtcccagccccccgggcgcttccgtgtccgtgggcgccaataatgccgctggcaccgccccgccggcaaccacggacaaccgcaacaagaggagacggttgcgctcacctcagcgacagtaggagcagctcagctgctggcagtgcattgcagtgcagtgcagtccagctgcgttttcttttttcagctcaccatttccttttgctgccgattgtttcttcaggggtggccgtagagtgatttggtaatttagtgccggaaagattagtgcggtgtcgcagagtgatttggtaatttagtgccggaaagatttctttgttttgaggagatctttcgcgggaccaaagggaggggggcagtgtaaagacgacagaacaagcgtgaaggcctcgagagtcgagacctcacagggtaccgcctagcgcctactggggtgaaagtgaagtcaaggagtcgggagggtgtgtgtgaataccgtttgtagcagctagtgcgtccgtctgtctttttttttctttctgtttattaattattaatagcctgctagatttcatttgatttcatctttattaa

SEQ ID NO: 153984 - DNA, 1723 bp, Zea Mays
cgcgggcgcgcgcgagtgtggagagaagggagggaattcccccctttctgttcggcgccgtgctcgcgcacacacccgcacgccccacgctgcacgccgccttttcctccgtcttgctgctgcaagtccgcaaccactggaggaaaaatcttttccttcacttttcttccctttccccccgcgcatgcacgggctctgattgacgccatgggggacgccgccgccgccgcagcctccacgtccgctcccaccacgcccacctccattctcatctgcctggaagacggcagcgaccttctcgccgatgccgacgatggcgccggcactgacctagttgtcgcccgcgacgagcgtctgcttgtcgtggaccaggacgaggagtatgtagcgctgctcctgtccaaggagagcgcgtcaggcggcggcggcggcccggtggaggaaatggaggactggatgaaggccgcgcgctccggatgcgtccgctggatcatcaaggtcaccacggcgatgttccggttcggcgggaagaccgcttacgtcgcggtgaattacctcgatcgcttcctggcgcaacggcgagtcaatagggagcatgcgtggggtctgcagctgctcatggtggcgtgcatgtcgctggcgaccaagctggaggagcagcacgctccgcggctgtcggagttgccgctggacgcgtgcgagttcgcgttcgaccgcgcgtccgtgctgcggatggagctcctcgtcctgggcaccctcgagtggcggatggtcgccgtcacccccttcccctacatcagctgcttcgcggcgcggttcgggcaggacgagcgccgggcggtcctcgtgcgcgccgtggagtgcgtcttcgcggcgatcagagcgatgagctcggtggagtaccagccgtcgaccatcgccgtagcatccatcctcgtcgctcgcggcagggagacgcccgccgacaatctggacgcgctcaaggcgatcctgggctcatcatttccacagctagacaccgggcatgtgtactcctgctacagcgcaatgattcgggaggacgacaagtcgccgacgcagtcgacgtcgacgtcgacgggggtggcgtcctcgggcgtctctgtcgccgcgcacgccggggggagcgggagtcccagccccccgggcgcttccgtgtccgtgggcgccaataatgccgctggcaccgccccgccggcaaccacggacaaccgcaacaagaggagacggttgcgctcacctcagcgacagtaggagcagctcagctgctggcagtgcattgcagtgcagtgcagtccagctgcgttttcttttttcagctcaccatttccttttgctgccgattgtttcttcaggggtggccgtagagtgatttggtaatttagtgccggaaagattagtgcggtgtcgcagagtgatttggtaatttagtgccggaaagatttctttgttttgaggagatctttcgcgggaccaaagggaggggggcagtgtaaagacgacagaacaagcgtgaaggcctcgagagtcgagacctcacagggtaccgcctagcgcctactggggtgaaagtgaagtcaaggagtcgggagggtgtgtgtgaataccgtttgtagcagctagtgcgtccgtctgtctttttttttctttctgtttattaattattaatagcctgctagatttcatttgatttcatctttattaa

SEQ ID NO: 153985 - DNA, 162 bp, Zea Mays
atgcccagcacgccgcggaggtccgtgttgaacacggtgcggcagacgtggagcgagatgtccggccgcatgttgaagagcgtgcggctgaactcctgcaccgccgcgggcacgtccgcgccaaccgccagcggggcgtacccggtcgcccacgccgagtag

SEQ ID NO: 153986 - DNA, 1328 bp, Zea Mays
acacgagtatgaacagacgggggctcttgggtgggtctgggcagggcatctccggactcccacacagctcctcttggtggcgccctctgacatctcctttttcctcgccttcgatcggtggccgccgccctcctcgacttccgtcccgccgccatgaagggacccggcctcttctccgacatcggcaagaaggaaggatctactcacctacgactagaagctgtccatctccaccgccagcgcctctggagtggcgcccagacccggcaatccgttagaatccgttcgtcgcagaggccatgagctcggcgcaggatccgttctacatcgtccgggaggagatccaggagtcgattgataaattgcaaagtaccttccaccgctgggagcaaactgcttcaaacacaggagaatatgttcatctgacaaaggagcttctgatcagctgtgaaagtatcgagtggcagatgagctagaaaagacaatctcagttgcatcaagggatccggcatactatggacttgatgaagttgagctttccagacgaagaaactggactggttcttctcataagcaggtatgcattcgctcatattgtagcaactcttcagtgatgtggtgattggacatgttgtttcttgtatgttttgaacatgaatgagtcacactaagctcaggttgcatgatttcctgttgtttggtacagacattaaggagtaacatattaccatgttcccgaattctgcagttgacaatgtacctaaatttattgcatggatcctcacaatttatgcatgagcatattcaggtcggtacagtcaagagagctattgaaaagggcaagagcaatgcagcaacttcaaaataccaggatacaagcaggaccaaccactattctgcccaagataatgatgactttctttcttcagaatcagatagacagcttctactcatgaggtgagtttaatttgttacttttaatgaactttacaaacatgtttgttagaatatgttgccgctcagcattcaacatatgctgtctattgtaagtagctagtagacagtccataaatttgctgttttcctagccaaagttcgccttagtggcacataaaccttgtattcctcctcaattgttctagttagtgtcttcgcttctcctccttgaatattacattggtttacttatctttgctcactgattcttgtgtttccaccagcacataattattaattttgtgcaaatgtaagtaactgtactaagtttttttctgttcctttcttgttgtagtaagtaggtcacgcgtgctagaatatcaaaatctcag

SEQ ID NO: 153987 - DNA, 1587 bp, Zea Mays
acacgagtatgaacagacgggggctcttgggtgggtctgggcagggcatctccggactcccacacagctcctcttggtggcgccctctgacatctcctttttcctcgccttcgatcggtggccgccgccctcctcgacttccgtcccgccgccatgaagggacccggcctcttctccgacatcggcaagaaggaaggatctactcacctacgactagaagctgtccatctccaccgccagcgcctctggagtggcgcccagacccggcaatccgttagaatccgttcgtcgcagaggccatgagctcggcgcaggatccgttctacatcgtccgggaggagatccaggagtcgattgataaattgcaaagtaccttccaccgctgggagcaaactgcttcaaacacaggagaatatgttcatctgacaaaggagcttctgatcagctgtgaaagtatcgagtggcagatgagctagaaaagacaatctcagttgcatcaagggatccggcatactatggacttgatgaagttgagctttccagacgaagaaactggactggttcttctcataagcaggtcggtacagtcaagagagctattgaaaagggcaagagcaatgcagcaacttcaaaataccaggatacaagcaggaccaaccactattctgcccaagataatgatgactttctttcttcagaatcagatagacagcttctactcatgaggcagcaggatgaagaacttgatgagctcagtgaaagtgtccaaaggattggtggcgtgggactaaccatacacgaagagctgtctggacaggaaaggatcctaaacgacctaagcttggagatggagactacttccaacagacttgatttcgtgcagaaaagagtggccatggtgataaagaaggccggcatcaagggtcagatcatgctgatcgtgttcctgattgttctgttcatcattcttttcgttttggtgttcttgacatagccaagtgcaccagggtcctcggttttctctctcatttgttgtgcctccctagtacgaacactagtaaattggtcgcgctccgcgtgagttgttgcttgatgtgcttacataagatgtagaatcttgttgctataggcatgtatcaacaggtgctagcagcttgcagttctcctaacagaaacaggtcgaagcagattttttgttctccaagtgatcagtttgtccaaggttgttaggctttccgtaatcgcttcgagtttgcttttcaagatcatcattcacatgttgcttgttagactttggctcaacataaggaggcagcatggttagtgccctgtccaggtctccttgtcctttttgcactggatatctgtcatggtcgggcgcacgtatgtgaggcgacatcgtgcccgtgacgtgcgccgcgccctagagcaagcagcggccaggcaggacagctaagggataggataggatagcctgctgttatccagttccttagattgtggagtgctgttattcagttccttagattagggagttccttagattatggagtttgttgctcctttcggttgggcctctggccatat

SEQ ID NO: 153988 - DNA, 1328 bp, Zea Mays
aaccgaggacgccgaaaccgcgaaacgtgcagtgcctgtcagctgtgccacgcccccacccagtgcccacacagctcttctcggcggcgccctgacctctcctttttcctcgccttcgatcggcggccgccaccctcctcgacttccgtcccgccgccgccgccatgaagggacccggcctcttctctgacatcggcaagaaggccaaggatctacttagtaaggactacacctacgaccagaagctgtccatcttcaccgccagcgcctctggagtgggcctgacttccacagctgtgaagaaaggaggtctttattctcttgatgtcagttcagtttacaagtacaagaataccaccgttgatgttaaactggacacagaatcaaatatctctactacattgactgtgttggacgctttgccatccacaaagcttgtcacttctgtgaagctgcctgactacaattctggaaaggtggagctgcaatacttccatgagaatgcaacttttgctactgttgttggcacgaagccgactcctgtgattgatctttctgggacagtaggtgctcaaggagttgcatttggtgcagaagctgggtatgacactgctacaggaaaatttaccaagtacactgctgcaattggtgtaaccaagccagactaccatgctgcattcattctggcggacaaaggtgacaccattaaagtgtcaggtgtttatcaccttgatgagaaacagaaggcctcagctgtggctgagctaacccggaggctctcaacaaatcagaacacactcacagtcggtggactgtacacagttgatccccagacagctgtgaaggcaagactcaataacactggaacgcttgccgcgcttcttcagcatgagcttaaacccaagtcgctcttgacaatctctggtgaattcgacacaaaggccctggacagatccccaaagtttgggttggcgcttgcactgaagccctgatcagatcatcccatgttgattggtggtgaatcttgaattcattttttttttttgcaaagctgtagccaataattcgttccacgaaccttttctgttaatccggcaaatgtttggagcactgtgggtaggatccggatgggtcgcctacatgaaattttacctgtctgcccttattgttgaaagcatctggccgttggtaaatgtacattgtgcttgtttctttagcacctaggcctctctgccactgctactgagggcttgaggagccgctacagtaaccttttccatgtagaaattgcatgctgatcgtttgatttactgctcacctaaggttta

SEQ ID NO: 153989 - DNA, 1381 bp, Zea Mays
ctggtcacacacacgcagcaaccaccgagcccagcgcccggcccagccagccagggccaacggcaaggcaacaccctcctcagcccgacgccgacgctcgccgtcatcctcgtaaatccacagcgcgcgcctcccgtcctcccaggcctcacccctagcgatgcgccactcccggcgctcgtgatccatggcctcactccccgttcctcacactcttccgcgggtctcgccagcgatagtgggcgccgcgagggggagggccgcggtgcgcgtacgcactgccaccgcggcattgggcggtgggtgcggcggcggcggcggaatggagcagcgccacggggatgccccgcacagcccagtgaaggagaagcctgtaatgtcaaacattgggaaatcgactaatattttatggcacaattgcttgattggacaatctgatagacagaaattgctgggacaaaaaggctgtgtcgtatggataacaggactcagtggttcagggaaaagtactcttgcatgtgcactgagtcgtgagttgcattgcagaggccacctcacgtatgtacttgatggtgacaacctcagacatggcctaaatagagatttaagctttaaggcagaagaccgtgcagaaaatatacgaagagttggtgaagtggcaaagcttttcgctgatgctggtgtcatatgcattgctagcttgatatctccatacaggagagatcgtgatgcatgccgtgctctacttccacattctaactttattgaagtatttattgatttgcccctaaaaatttgtgaagctcgtgatcctaaaggcctatacaagcttgcacgtacaggaaagattaaaggtttcactggaattgatgatccatacgaaccaccaattaatggtgaggtgagcctgaagagcatgccttccttcataatcacgccgtacaattgctagagtaaactgaaactctgaaatacaaagtcgtcatcagccactattgatgtggtgcttccttcatgatcacaccgtacaattgctagagtacactgaaactctgaaatacaaaacccttcattatgctgtgactactgaagtttagcacaaacaatcacttcgtttctacactcttattccttaacattgagaaataaaaaataactgccggtgataagacagctctgggcattgtgtgatagagaggacctctcacgcaatctaagaagacctctgtgttagagtgtgtgttcctatattatccatgtatccgtagatgggctggcaccgctgttaggctgctggcctattagggttagagttttttggatctatatatgtagccctcctctatgcaatacacaaggattctcactctcttacactctg

SEQ ID NO: 153990 - DNA, 1417 bp, Zea Mays
ctggtcacacacacgcagcaaccaccgagcccagcgcccggcccagccagccagggccaacggcaaggcaacaccctcctcagcccgacgccgacgctcgccgtcatcctcgtaaatccacagcgcgcgcctcccgtcctcccaggcctcacccctagcgatgcgccactcccggcgctcgtgatccatggcctcactccccgttcctcacactcttccgcgggtctcgccagcgatagtgggcgccgcgagggggagggccgcggtgcgcgtacgcactgccaccgcggcattgggcggtgggtgcggcggcggcggcggaatggagcagcgccacggggatgccccgcacagcccagggaaaagtactcttgcatgtgcactgagtcgtgagttgcattgcagaggccacctcacgtatgtacttgatggtgacaacctcagacatggcctaaatagagatttaagctttaaggcagaagaccgtgcagaaaatatacgaagagttggtgaagtggcaaagcttttcgctgatgctggtgtcatatgcattgctagcttgatatctccatacaggagagatcgtgatgcatgccgtgctctacttccacattctaactttattgaagtatttattgatttgcccctaaaaatttgtgaagctcgtgatcctaaaggcctatacaagcttgcacgtacaggaaagattaaaggtttcactggaattgatgatccatacgaaccaccaattaatggtgagatagtaattaagatgaaagatggggaatgcccttcacccaaagcaatggccaagcaagttctatgctaccttgaagagaacggatatttgcaagcttagcatatgtattttgagaagattgatctgattcttgtgtgtccattacttgtggacacaataagatctgttgttggtcacatgaataaaaggcatcaacacgtaggaagtaacagaaggtaccgttcattcagaaacggaaatggattcattcgtttcattgttgatgatatttgtttcgcgtgtattttgcctgcatagctgtgattcatctgcatcagcaattcaggatgcattcggttaactcgcgttgaccgttcgcgtcaattcgggtagttgttctgtgcttgctagttgggttctgttggcaatgtatttgttacaagtaaatacggacaatgtgtgtaatttgtgtatcactttttttcctcttggaataaaaaccgaggaacattgtaacttcttccattgaattcatgcttttggcttttgctgcctctttcattgttgcagtttctgaggcagtaagaacgggtttacgaacccttccacagaaaaagctgccattttatcttgttatatgctcttttttcatacaggaagttatattctcaacttctc

SEQ ID NO: 153991 - DNA, 1549 bp, Zea Mays
ctggtcacacacacgcagcaaccaccgagcccagcgcccggcccagccagccagggccaacggcaaggcaacaccctcctcagcccgacgccgacgctcgccgtcatcctcgtaaatccacagcgcgcgcctcccgtcctcccaggcctcacccctagcgatgcgccactcccggcgctcgtgatccatggcctcactccccgttcctcacactcttccgcgggtctcgccagcgatagtgggcgccgcgagggggagggccgcggtgcgcgtacgcactgccaccgcggcattgggcggtgggtgcggcggcggcggcggaatggagcagcgccacggggatgccccgcacagcccagtgaaggagaagcctgtaatgtcaaacattgggaaatcgactaatattttatggcacaattgcttgattggacaatctgatagacagaaattgctgggacaaaaaggctgtgtcgtatggataacaggactcagtggttcagggaaaagtactcttgcatgtgcactgagtcgtgagttgcattgcagaggccacctcacgtatgtacttgatggtgacaacctcagacatggcctaaatagagatttaagctttaaggcagaagaccgtgcagaaaatatacgaagagttggtgaagtggcaaagcttttcgctgatgctggtgtcatatgcattgctagcttgatatctccatacaggagagatcgtgatgcatgccgtgctctacttccacattctaactttattgaagtatttattgatttgcccctaaaaatttgtgaagctcgtgatcctaaaggcctatacaagcttgcacgtacaggaaagattaaaggtttcactggaattgatgatccatacgaaccaccaattaatgtaattaagatgaaagatggggaatgcccttcacccaaagcaatggccaagcaagttctatgctaccttgaagagaacggatatttgcaagcttagcatatgtattttgagaagattgatctgattcttgtgtgtccattacttgtggacacaataagatctgttgttggtcacatgaataaaaggcatcaacacgtaggaagtaacagaaggtaccgttcattcagaaacggaaatggattcattcgtttcattgttgatgatatttgtttcgcgtgtattttgcctgcatagctgtgattcatctgcatcagcaattcaggatgcattcggttaactcgcgttgaccgttcgcgtcaattcgggtagttgttctgtgcttgctagttgggttctgttggcaatgtatttgttacaagtaaatacggacaatgtgtgtaatttgtgtatcactttttttcctcttggaataaaaaccgaggaacattgtaacttcttccattgaattcatgcttttggcttttgctgcctctttcattgttgcagtttctgaggcagtaagaacgggtttacgaacccttccacagaaaaagctgccattttatcttgttatatgctcttttttcatacaggaagttatattctcaacttctc

SEQ ID NO: 153992 - DNA, 1558 bp, Zea Mays
ctggtcacacacacgcagcaaccaccgagcccagcgcccggcccagccagccagggccaacggcaaggcaacaccctcctcagcccgacgccgacgctcgccgtcatcctcgtaaatccacagcgcgcgcctcccgtcctcccaggcctcacccctagcgatgcgccactcccggcgctcgtgatccatggcctcactccccgttcctcacactcttccgcgggtctcgccagcgatagtgggcgccgcgagggggagggccgcggtgcgcgtacgcactgccaccgcggcattgggcggtgggtgcggcggcggcggcggaatggagcagcgccacggggatgccccgcacagcccagtgaaggagaagcctgtaatgtcaaacattgggaaatcgactaatattttatggcacaattgcttgattggacaatctgatagacagaaattgctgggacaaaaaggctgtgtcgtatggataacaggactcagtggttcagggaaaagtactcttgcatgtgcactgagtcgtgagttgcattgcagaggccacctcacgtatgtacttgatggtgacaacctcagacatggcctaaatagagatttaagctttaaggcagaagaccgtgcagaaaatatacgaagagttggtgaagtggcaaagcttttcgctgatgctggtgtcatatgcattgctagcttgatatctccatacaggagagatcgtgatgcatgccgtgctctacttccacattctaactttattgaagtatttattgatttgcccctaaaaatttgtgaagctcgtgatcctaaaggcctatacaagcttgcacgtacaggaaagattaaaggtttcactggaattgatgatccatacgaaccaccaattaatggtgagatagtaattaagatgaaagatggggaatgcccttcacccaaagcaatggccaagcaagttctatgctaccttgaagagaacggatatttgcaagcttagcatatgtattttgagaagattgatctgattcttgtgtgtccattacttgtggacacaataagatctgttgttggtcacatgaataaaaggcatcaacacgtaggaagtaacagaaggtaccgttcattcagaaacggaaatggattcattcgtttcattgttgatgatatttgtttcgcgtgtattttgcctgcatagctgtgattcatctgcatcagcaattcaggatgcattcggttaactcgcgttgaccgttcgcgtcaattcgggtagttgttctgtgcttgctagttgggttctgttggcaatgtatttgttacaagtaaatacggacaatgtgtgtaatttgtgtatcactttttttcctcttggaataaaaaccgaggaacattgtaacttcttccattgaattcatgcttttggcttttgctgcctctttcattgttgcagtttctgaggcagtaagaacgggtttacgaacccttccacagaaaaagctgccattttatcttgttatatgctcttttttcatacaggaagttatattctcaacttctc

SEQ ID NO: 153993 - DNA, 2017 bp, Zea Mays
ctggtcacacacacgcagcaaccaccgagcccagcgcccggcccagccagccagggccaacggcaaggcaacaccctcctcagcccgacgccgacgctcgccgtcatcctcgtaaatccacagcgcgcgcctcccgtcctcccaggcctcacccctagcgatgcgccactcccggcgctcgtgatccatggcctcactccccgttcctcacactcttccgcgggtctcgccagcgatagtgggcgccgcgagggggagggccgcggtgcgcgtacgcactgccaccgcggcattgggcggtgggtgcggcggcggcggcggaatggagcagcgccacggggatgccccgcacagcccagaatccagagggtgacgtgtcggacggggccgggtggttgttcctgtacatgaggttatctacctgctgcatctgcttcactggtcatcagccactgccgctaacctttgtgtcctggcgatcatccggtaaggatgatggataagtaaatacgtgtggaactggatctcgaactggagccgattggacgtttgacagcgatgttctactcctgttctagtatatttcccccctctttaagaagggcagtaggaaggttggtattgtcattctgacggctcgcgttctgttcttttgatgattgttcctggtcgctcggagggttgtcatcattcatcaatatcgtggcggcagataattctgtgatgaggaatcttataaatacatgggatgggacgggtggtgttttcaaataaacttgaaacgtgatgcctcaatggcatacatcttatgaattgagtgaaggagaagcctgtaatgtcaaacattgggaaatcgactaatattttatggcacaattgcttgattggacaatctgatagacagaaattgctgggacaaaaaggctgtgtcgtatggataacaggactcagtggttcagggaaaagtactcttgcatgtgcactgagtcgtgagttgcattgcagaggccacctcacgtatgtacttgatggtgacaacctcagacatggcctaaatagagatttaagctttaaggcagaagaccgtgcagaaaatatacgaagagttggtgaagtggcaaagcttttcgctgatgctggtgtcatatgcattgctagcttgatatctccatacaggagagatcgtgatgcatgccgtgctctacttccacattctaactttattgaagtatttattgatttgcccctaaaaatttgtgaagctcgtgatcctaaaggcctatacaagcttgcacgtacaggaaagattaaaggtttcactggaattgatgatccatacgaaccaccaattaatggtgagatagtaattaagatgaaagatggggaatgcccttcacccaaagcaatggccaagcaagttctatgctaccttgaagagaacggatatttgcaagcttagcatatgtattttgagaagattgatctgattcttgtgtgtccattacttgtggacacaataagatctgttgttggtcacatgaataaaaggcatcaacacgtaggaagtaacagaaggtaccgttcattcagaaacggaaatggattcattcgtttcattgttgatgatatttgtttcgcgtgtattttgcctgcatagctgtgattcatctgcatcagcaattcaggatgcattcggttaactcgcgttgaccgttcgcgtcaattcgggtagttgttctgtgcttgctagttgggttctgttggcaatgtatttgttacaagtaaatacggacaatgtgtgtaatttgtgtatcactttttttcctcttggaataaaaaccgaggaacattgtaacttcttccattgaattcatgcttttggcttttgctgcctctttcattgttgcagtttctgaggcagtaagaacgggtttacgaacccttccacagaaaaagctgccattttatcttgttatatgctcttttttcatacaggaagttatattctcaacttctc

SEQ ID NO: 153994 - DNA, 2033 bp, Zea Mays
gcctttttcattgattcggccatacatatccgagtgcacacacagagagagagagagagagatctagggggagagagaggagggtcgttgcagcaataataatggggagaagagccttgacgatcctaccgctgctgtgggtcgccatgctgagtggtggcgccgctgccgtgatgcaatctcttccttacgactactcgtcgagcgctgagtgcttgccggagccgctggagcctcagtacggcggcggcatcctccggaacgccaacttcagcgccggcctccagggctggtcggcgttcgggcacggcgccgtcgaggaaggcgcgtcggcgagcggcaacagctacggcgtggcgcggaaccggacccggccgtaccagagcgtcagccagaaggtgtacctgcagaatgacacgcactacaccctgtcagcttggttgcaggtcagcaacggtagcgccgatatcagagccgtggtgaagaccgacggcgacttcgtccacgccggcgtcgtcgaggcgcggtccggctgctggtccattctcaaaggcggcctcaccgcccccgcctccggggcggcagaactctacttcgagagcaacacgacggcggacatatgggtggacagcgcctcgctgcagcccttctcgcgagaggagtgggcggcgcaccacagcgcggccatcaagtcggcgcgcaagaaggcggtgcggctccgcgccaggggctccgccggcgagcccgtgccgggggcgcatgtgcgcatcgagcacgtccggagcggcttcccgctggggtcggccatgggcgcggagatcctgcggagtccggcgtaccagcggtggttcgcgtcgcggttcacggtggccaccttcgagaacgagatgaagtggtccagcacggagcgcttgcgggggcgcgaggactactcggttcccgacgcgatgcttaggttcgccaggagccacggcatcgccgtgcgcgggcacaacgtgttctgggaccagccgggccagcagccggcgtgggtgcggtcgctgccgtaccggcagctcctgcaggcgacggcgcggcggatcaggtcggtcatgtcgcggtacgccgggcaggtggtcgcgtgggacgtggtgaatgagaacctccacttccggttcttcgaggacaggttcgggcgggacgcgtcggcggagctgtaccgcaaagcgcaccagatggacgggcaggcgctcgtgtccatgaacgagttcaacacgctggagtggcccggcgaccccaaagccgggccgagcaagtacctgggcaagctgttccagatcaaggagttcccgggcaacaccaacgacgccaggatggccatcggcctccagggccacttctccgtgcccagcatcccctacatccgcgccgcgctcgacaccttgtccagggccaacgcgcccatctggctcaccgagatcgacgtcgcgccggggcccaaccaggcgtaccacctcgagcagatactcagggaggtgtacgcgcacccggccgtgcacggcatcatcctctggacggcgcgccaccggcagggatgctacgtcatgtgcctcaccgacaacaacttccagaacctccccaccggcgacgtcgtcgacaggctcatcgcggagtggaagacgcattcgcacgctggcgtggcggacgccgacggctactacgaggccgagctgttccacggggactacaaggtcaccgtcagccacccggcggccaactccaccgtggtgcagagcctgagcgtcgacagggagaccgatcccgataccgagttcaccatacacgtctaactgccttagctcctagcctccttcctacccctagtcctaggactacacatatatctatagggcgcccgagagacagaattcctggtgaggcgatccatatgtaatgttcatatatacagtataaaaaaggaggaatatacatatgatatatgttgagagggtggtctgtccattctataatatacagatgatatattgcttttc

SEQ ID NO: 153995 - DNA, 207 bp, Zea Mays
atggagaactgtatcaagagtccggtaaaacagctcatcatgatcggcggccatagattcgtaaggaggccggatagttcagcaagaaccgcgcacgcttcgcaggaaaagaaaaatgaggaggcgaagaagagaagagggagagacagcggtgctcaccattggcaggttgatccagagaagcgaagaggacaaatgaaaggctaa

SEQ ID NO: 153996 - DNA, 1217 bp, Zea Mays
cccgttggcgacgggaccggacaccagagcggaacggcactcgtggctggacgccctatcagcagcggccaggcgagcgcgtatgattggcggaccggacgccaataatacccttgccttccctcgcctcaacccatcgccgctgctcgctcgcggtcgcggcgccctcgcctccctgtcactccctcgtcccccgccccatccacgccgcgtcgccctccgcctccaaataaagtaaacgcgggtgacaggaggcctccaccgaacccccctgcgcccttcaacccgtcgccgccccgcacgatcccctccgccttcttcgccgccggcctccggaccgcgcagctccccggagccgacaaggacccggcgccatggggttctgggaggcttttcttaactggctccgcagcctcttcttcaagcaagagatggagctttccttgatagggctccaaaatgctgggaaaacgtcacttgtgaactctattgctactggaggctttagtgaggatatgatccctactgtaggattcaatatgagaaaagttacgaaaggaaatgtgacgataaagttgtgggatcttggaggccaaccaagattccgcagcatgtgggagagatactgccgtgcggtttctgcaattgtgtatgttgttgacgcggcagatcgagaaaacatggccattgcaaagggggaactccatgacctcttgagcaagccatctttgaccgggattccgttactagtcattggcaataaaattgacaaacctgaagctttccccaagcaaaccttcacagaactaatgggcctaaagacaatcactgaccgagaagtggcatgtttcatgacatcttgcaagaactctaccaacattgattctgtcattgaatggctggtgaagcactcgaaaaagaagaattgaacttaaatctgcactagctcttaaagcgcactccagtcttcctcttttttgcatgtcgcatagcattggagctgtaaattacgcaagaggtattgatcagggattttgtgtttataattctgttaacccggtttggcaatatgttggtggattgtcctacaggagtctgccttctttgttccatacttgtcatttgagctgtgcgatttgtttcacattgtttagtttgaattaaacaaactttaatgacgttgttgatgcagtaaatgaacgttggtgaaaagcaag

SEQ ID NO: 153997 - DNA, 1300 bp, Zea Mays
acgctgcagatgggccgaatcagatggcccaaccatgcctcgaagcacacatatgggccacaccgcatcgtgtgcgtccatccacttttgagtgcctgctgaccgcatgatcgaacctggaaaccctcgagtcgtatataggtagtccgctgccccaaagtgctttctcccgcagagccgccgacaacgctctctaccgtccgagaccccaagcaccagcgcggcggcgggggcggcggcgaccatggctgtcggaaagaacaagaggatctccaagggaaagaagggtggcaagaaaaagaccgtcgaccctttctctaagaaggattggtatgacatcaaggcaccgtcggtgttcagtgtgcgcaacatcgggaagactctcgtatccaggacacagggtaccaggattgcttctgagggtctgaagcacagagtctttgaggtttgcctagctgatcttcagggcgacgaggatcaagcttacaggaaaatcaggctccgtgctgaagatgtgcagggcaggaatgtgctcacaaacttttggggcatgaattttaccactgataaactcagatccctagtgaagaagtggcagacattaatcgaagcccatgttgatgtcaagacaaccgacaactacatgttgcgtttgttctgcatcggcttcaccaagaggcgcccaaaccaagtcaagagaacctgctatgctcaggcatcccagatccgtcagatccgccgtaagatggttgagattatgatcaaccaggcttctacatgtgacctgaaagaacttgtttcgaagttcattccagaagttattggtaaggagattgagaagtctacctccagcatcttcccacttcaaaacgtcttcatccgcaaggtgaagatactcaaggcccccaagttcgatcttgggaaactcatggaggttcatggcgactacaaagaggatgttggtgtgaagcttgagaggcctgtcgagggagatgaggctgggcaggaggttgctgctgccgagtagtttgtttgctacttctgtatctaggcgagtctggacatgaggttgcttatgacgtgaacttatagagttgtcttggctacgtgttttcatctggccctaagattttgtcttgaaacaagtttaaaattaagattactcgtggcgatcttctgtgttcgagtactgatgtactaagttcctttgcatcctcatttttgtttggtcatcgataatttactttctcattcatatgagatgctgttctctgcttatttattgttagctgacactggc

SEQ ID NO: 153998 - DNA, 1534 bp, Zea Mays
accgatgcacaccgacgcgcacggaccggaccagcacagcccggaaactgccctacgccgacacgttttccggtccggcccagcagcagcagggaggaaggttcgctcggtcgctgggcctggctccgcgtgccgtccctcctataaatgcgagtcctcgccgagtccactgggcaccagaagctcactcactgctcgttgccggctgcccccgcggccccggccagtccatcccctcgctcgctccccaactccagcaggcagatcagatacatccatccattcgcggaccggaaggtgagcgccgtgaacgaaccatccgccctgctagctgcgatctgtagccttgcgtcgctttcgcgcctagatcgtcacgtcacctatcacgatccgtgcggttctagatctgtggtttttccttcccctggtggtcgaatccttccatccaccagaccaccacgggacctcgtggattccttttggttttcctgtgccgagagccaaaatcgagggggggggcttgttttttattggctcggtctcccgctgtctcgtgatctgatttgctgtagtaatcagcaggaaaggaagggttgaactatgagcgccgtggcggtttcgtcgtcgctgaacccggacgcgccgctcttcatcccggcggcgctgctgcaggtggaggacttctcgccgcagtggtgggacctcatcaccaccactgcctggttccgcgaccactggtcccgcgagcgcgcccacctggacgagatggccgagcagatcgacgcggccggcctcctccccgacgacgaggacctcttctacgacgaccagctcgagcagggccccgtcgccgccgcccttaagacaggtactgatgtctctctctctctctctctcttactctcccctcgattttagatctgcctgaaggacgaatcatagtgagctcacgttggtgcgtttttctccaccagattcggtgctcaaggcgctgaacatgacctccccgaagggcggcggcgacgccccgcgggggttccgggagaaacccaggaacgccgagaagccgaccaagtacgccggcagccccaagagcaacgctccccgcgtgatccaccagcctcgctaggttcgctgggggaactcatcaggaaggctgctgcccctcttgcagccttgctcctggctgccgccgctgtcgtggtctgctctttcaagtcgaagtaacggtggttcgagctagtggatagtgtggctcaactgtagaagttccttttgtatagcaagcaagtaaaaaaaaaaaatgaccaaaaaatataacaaaatgcagctgtaagtttactgctgctctctaagtcgtgttcagtcatccagtgtgtctagtctagggaaaccccataaaaatggtgaaggtggaatcccatcccagtgtcataattaaggatgcacttcttctgtaagcaaatgtatgatgtacaatggccggccggcagtctaaatgttacaactagctcttcttggtgaattcaccggt

SEQ ID NO: 153999 - DNA, 1200 bp, Zea Mays
accgatgcacaccgacgcgcacggaccggaccagcacagcccggaaactgccctacgccgacacgttttccggtccggcccagcagcagcagggaggaaggttcgctcggtcgctgggcctggctccgcgtgccgtccctcctataaatgcgagtcctcgccgagtccactgggcaccagaagctcactcactgctcgttgccggctgcccccgcggccccggccagtccatcccctcgctcgctccccaactccagcaggcagatcagatacatccatccattcgcggaccggaaggaaaggaagggttgaactatgagcgccgtggcggtttcgtcgtcgctgaacccggacgcgccgctcttcatcccggcggcgctgctgcaggtggaggacttctcgccgcagtggtgggacctcatcaccaccactgcctggttccgcgaccactggtcccgcgagcgcgcccacctggacgagatggccgagcagatcgacgcggccggcctcctccccgacgacgaggacctcttctacgacgaccagctcgagcagggccccgtcgccgccgcccttaagacagattcggtgctcaaggcgctgaacatgacctccccgaagggcggcggcgacgccccgcgggggttccgggagaaacccaggaacgccgagaagccgaccaagtacgccggcagccccaagagcaacgctccccgcgtgatccaccagcctcgctaggttcgctgggggaactcatcaggaaggctgctgcccctcttgcagccttgctcctggctgccgccgctgtcgtggtctgctctttcaagtcgaagtaacggtggttcgagctagtggatagtgtggctcaactgtagaagttccttttgtatagcaagcaagtaaaaaaaaaaaatgaccaaaaaatataacaaaatgcagctgtaagtttactgctgctctctaagtcgtgttcagtcatccagtgtgtctagtctagggaaaccccataaaaatggtgaaggtggaatcccatcccagtgtcataattaaggatgcacttcttctgtaagcaaatgtatgatgtacaatggccggccggcagtctaaatgttacaactagctcttcttggtgaattcaccggtccacactgatgtgctgctatgtatcattactatccagttagggcttgttcggttatt

SEQ ID NO: 154000 - DNA, 1039 bp, Zea Mays
gggcaccagaagctcactcactgctcgttgccggctgcccccgcggccccggccagtccatcccctcgctcgctccccaactccagcaggcagatcagatacatccatccattcgcggaccggaagtaatcagcaggaaaggaagggttgaactatgagcgccgtggcggtttcgtcgtcgctgaacccggacgcgccgctcttcatcccggcggcgctgctgcaggtggaggacttctcgccgcagtggtgggacctcatcaccaccactgcctggttccgcgaccactggtcccgcgagcgcgcccacctggacgagatggccgagcagatcgacgcggccggcctcctccccgacgacgaggacctcttctacgacgaccagctcgagcagggccccgtcgccgccgcccttaagacagattcggtgctcaaggcgctgaacatgacctccccgaagggcggcggcgacgccccgcgggggttccgggagaaacccaggaacgccgagaagccgaccaagtacgccggcagccccaagagcaacgctccccgcgtgatccaccagcctcgctaggttcgctgggggaactcatcaggaaggctgctgcccctcttgcagccttgctcctggctgccgccgctgtcgtggtctgctctttcaagtcgaagtaacggtggttcgagctagtggatagtgtggctcaactgtagaagttccttttgtatagcaagcaagtaaaaaaaaaaaatgaccaaaaaatataacaaaatgcagctgtaagtttactgctgctctctaagtcgtgttcagtcatccagtgtgtctagtctagggaaaccccataaaaatggtgaaggtggaatcccatcccagtgtcataattaaggatgcacttcttctgtaagcaaatgtatgatgtacaatggccggccggcagtctaaatgttacaactagctcttcttggtgaattcaccggtccacactgatgtgctgctatgtatcattactatccagttagggcttgttcggttatt

SEQ ID NO: 154001 - DNA, 1032 bp, Zea Mays
gggcaccagaagctcactcactgctcgttgccggctgcccccgcggccccggccagtccatcccctcgctcgctccccaactccagcaggcagatcagatacatccatccattcgcggaccggaagcaggaaaggaagggttgaactatgagcgccgtggcggtttcgtcgtcgctgaacccggacgcgccgctcttcatcccggcggcgctgctgcaggtggaggacttctcgccgcagtggtgggacctcatcaccaccactgcctggttccgcgaccactggtcccgcgagcgcgcccacctggacgagatggccgagcagatcgacgcggccggcctcctccccgacgacgaggacctcttctacgacgaccagctcgagcagggccccgtcgccgccgcccttaagacagattcggtgctcaaggcgctgaacatgacctccccgaagggcggcggcgacgccccgcgggggttccgggagaaacccaggaacgccgagaagccgaccaagtacgccggcagccccaagagcaacgctccccgcgtgatccaccagcctcgctaggttcgctgggggaactcatcaggaaggctgctgcccctcttgcagccttgctcctggctgccgccgctgtcgtggtctgctctttcaagtcgaagtaacggtggttcgagctagtggatagtgtggctcaactgtagaagttccttttgtatagcaagcaagtaaaaaaaaaaaatgaccaaaaaatataacaaaatgcagctgtaagtttactgctgctctctaagtcgtgttcagtcatccagtgtgtctagtctagggaaaccccataaaaatggtgaaggtggaatcccatcccagtgtcataattaaggatgcacttcttctgtaagcaaatgtatgatgtacaatggccggccggcagtctaaatgttacaactagctcttcttggtgaattcaccggtccacactgatgtgctgctatgtatcattactatccagttagggcttgttcggttatt

SEQ ID NO: 154002 - DNA, 201 bp, Zea Mays
atgtcctctttgcagtcgaggatggtgcgcaccacctcctggttcatgtcgaggaggcagccggtgacctcgcgaagcgagtccagcgacatcgaccgcacctcaacgcccactgccagcgtcgagatggcgcgcctggtgcgccgctgcagcgtcgtgtcgaacgtgcgcagctccggatccgaccggcacgctgcctcg

SEQ ID NO: 154003 - DNA, 100 bp, Zea Mays
cagaaatttggacatcggaacacttttcagttacgtctagatctctgagattaacattctattcaattttaactagagagagatttaatccccttctatc

SEQ ID NO: 154004 - DNA, 121 bp, Zea Mays
ggtaaacaccggagtaatattttggtggcggtgggattccaaaaaattgagaggacaatgtcgctccggcctcatcttactttgacctcaaaccaaatacattctaactcctcaaatcttt

SEQ ID NO: 154005 - DNA, 224 bp, Zea Mays
agtttcagcaattcagatttgccttcaaagtttcagagttgcctatttgccttcattgaagtgtgtatacaggagtacaggacgaccagggtcgaccaggtccggttagtcgtcctggaccgaccagctgatcgtcccacttgaaaacagagatcctaagagtgatcagtgatggagtcgtatctattgcttcccttcgttctcaagttttatggatcgagaag

SEQ ID NO: 154006 - DNA, 1011 bp, Zea Mays
gttttggggcggcgacctctgttcacggttctttgaagatttcgattgctttaagcattccagttccagtagaattcctcttctcttctattgtgcgaggcttcgctgttggatctttctctgtgaagagagtgcaagcagacgggcggtctgaactgatgccgtgttgattcgtctgcagttacatgccttcttcgggcgggcagccgagagaaagcagcaaattagtcgctacgtctgtcctatttgctcttaatatctttttgagtttgccaaagtactggtgctgtgatgaagatgctcaactatttctatgtctggacatctgagatcaatttctgtgattggtttacgcatcattctgagctccgaacaattatatctttttatcaatttactgttgcgcctggcttatattcttcttgggaagggctcaatcatcgattgaagcaagcccaaagatcctgagaaagcaaagctggtgcagacatcgagatggttaacttaccaaccctttgcagccttgcattgcactggagtcaaatggtttaatcgaaattacttcatgttgtttttctgattcagttcactcgtttgtcagcgcttattatgacggcaagtgatgtgcaaatctttatcctacacacttaatggaattactgccatgtgtggactaatctccgcttattatctgatgcttttgtcaggcgctgctccatttttcttataaaaaatctttttcttgatattttaagagcttagattttctgtcaatacaaagcagattgtggcaagtgatgcagaagttaatattatgctatacactgaaaccttttgtggacaaaaaaactccgcttattatctgatgccacatcccaagaacgcttggaactcagtttatctcaaaatggatgaattcttctgtatacaattttaaattttggtctttaccactttttttacttgataatcgtcagaatgttggcaaatttcatgttcacgtgaaactac

SEQ ID NO: 154007 - DNA, 114 bp, Zea Mays
ttctatctataatatacagctcgtgttattttttaagcttagtttcacttattggtcaccacaacaatcaggcacccacttaacagttttagtgagcctggcaacccaaaaaaa

SEQ ID NO: 154008 - DNA, 2319 bp, Zea Mays
atgaaatttaaaagtgaaacgaattctccgagaataaccggtgaccgggataagggttcgtatctggctcggtctctgccatctccaacctcgagagcccaccaaacccaaagcccaggcctctccgtccccaatcccccatccggcttgccccccatgtcgtcgcagtgcccctactgccgcgcgtcggggccggcgcggtgcgcgacgacgcagccgccgctctcgcgcgccgtctccgagtgctccgcctgcgcccgaatcgtcctcgagcgccacctccacacgcaccccttcttccccctcctcccctcactccatccgctcccccttgtcacccccgacctcgccacagccatcgatcccgccccgtctccttcccccggcgacgaagatgacgaggacccctttctccccgcgggcttcgtctccgccttctcggctttctccctcgagcgccaccccgtcctcgcccgctccgcctccaccttctctggacacctcgccgagctcgagcgcgcgctcgctgtcgactccgccaccgcggcctccaacccggaccccgccggccccatggtctccgtcgacagcctccgcgcctacctccagatcgtcgacgtcgcctccatactcaggctcgacagggacatagcggatcacgctttcgagctcttcaaggattgctcgtccgcgacttgcctcaggaatcggagcgtcgaggcgctcgcgaccgccgcgctcgtgcaggctatccgcgaggcgcagcaaccacggacgctgcaggaaatctctactgctagcaatcttcctcaaaaggagataggaaaatacatcaaaatactcggcgaatctctgaaactgagtcaaccacttaacagcaactcaatagctgttcatatgcccagattttgcagcttgctccagctgaataaatctgctcaggaacttgcagctcatattggtgaggtggttgttaataagtgcttctgcacacggcggaatcccataagtatatctgctgctgctatctaccttgcatgtcagcttgaagacaaacgcaaaactcaggcagagatctgtaaggttacgggcctcacggaggtcacactacgcaaagtgtacaaagaactgttggagaattgggatgatttgctcccccctgactatacacctgccacaccaccagagaaagcttttcccatgaccaacatttactcagggcgctcagcgagtggcaaggatatgtatcaggataagatattcgagagtattaagcaaaaatgccctgagcctgcagagcctgaccacatggtcgtggtgaaagaagagggagacaagaaaacagctgctcttggccgtccgcctacaaaacttgaccatcctgagttaggcaaggtgttccggccaccaaatgcccctttctcaacatctcctaaatctgatcgtgacaaaacggaaactagcttacgtggattcaaccttaatgaggtatcatgtgcaatggactctgatagaacagacatcacagtgaaaccaacttttggtgatcgattgtcaaatgatcccaatgcgaatccatctcccaacaggcagcctttaccctggcagcttaagcaaggggcgcctgcaactgctccatcatattcaaggcttcgcgagcagcagtcgggcctggatcttgtagctgctctgaagggggttgggaaaaggagtcctggggatagtgatgtccgggataaagaagggaagtgaataattggtgctttgtagatggggaacgactattaagtgttaaatttgcaactatggtcggatcacgatccaaagttccagaggactcgcacacctaagtcttgcttgcacaacgttgttgctttgtagatgtatgtctgtagtagagttagtttagccacctctatggctcaatcactctgtatttcttttgcctcatgccggggctgtgaaatgtcatttcaggcgcattagcttctgttgtaaaattttactagtgtttatgaattatttatctgactaaagaggtgtttactttttaggaactaatttttaatctttccattttattccattttaatccctacattgttaaacactgaaactaatactttattttagtttttgtatttggcacttatggactaaaatgaaataaaatagaaagactaaaaattagtctctaaaagttattccttccatttctttttagttgtcgctagatagttcaattttgcactatttagcgacaactaaaacgaaacggatggagtcaccatgtttcgtgcaatgaaatgcagttccttc

SEQ ID NO: 154009 - DNA, 1163 bp, Zea Mays
cctcgaatcggataatacgaagtgcgaagcagaggtcttccaaaacacaacgcggcaaacggctaatgctccttcctgtcaccatggccgtccacaccaccacctcctcctcacatcccctcctcttcctctatcgcggcaccgcaaaccctagccccgcggttatctccttgccttcttctctccgtggcgtgtctctccgctcccgggccaccgccgcaccgcccgcagagaccctctctgacgacggcatccctgacgcgccaccggaaggggagggaacgggaattccgttgccatcgtcgattggggatgatggggagcaggtttaagctggaacgtggtattgaagatcgttttggaaatgattacatggaaaagattgatcagcatggtttcattgatgtggaagacaaaacaggacgtatcatctaccgtgtgaccaaacaaagtctgatggaccgtcttaagacagatatgcactctgcatgcttgtctattgacccaaactgcagggtgttgactgtacatggtgctaatgacgatgttgtgccatcagaggatgctctagaatttaataagtacataagcaaccatgaattgcatattattgaaaaagctgatcatagatatgcatctcatcagcttgaattagctgcagttgtactgaaatttattaaatctaaatgaagctcgcacccaagcagaagatcagaatcaagctgcggtcctactgggtgccgttgatagaggactcatgcaagaagataattgaagctgcccaaacaaccaacgcaaagaccatgggtcctgttcctctgcccactaagcggagagtctattgtgtgctcaactctcctcacgtgcacaaggattcacggttccattttgagatccggacgcatcagcggctgattgatatcatgtatccaactgcccaaacaattgattcattgatgcaactccagctccctgccggtgtggatgttgaggttaagctatgattctgttggagctaaacttttccaagtttgatgtaatgtggtactcattttctgcagcttttcttcttgatccttttgttgtctggatgggcaaaacactttttcatgctggttgcactgattctgggacaagactaacgaagctttctaacttgcaga

SEQ ID NO: 154010 - DNA, 1648 bp, Zea Mays
cctcgaatcggataatacgaagtgcgaagcagaggtcttccaaaacacaacgcggcaaacggctaatgctccttcctgtcaccatggccgtccacaccaccacctcctcctcacatcccctcctcttcctctatcgcggcaccgcaaaccctagccccgcggttatctccttgccttcttctctccgtggcgtgtctctccgctcccgggccaccgccgcaccgcccgcagagaccctctctgacgacggcatccctgacgcgccaccggaaggggagggaacgggaattccgttgccatcgtcgattggggatgatggggagcagttgttgtatgggattgctggaaaagaaattgttacaaggccttgtgcacagttggtctcctctcatagtgattctttagatgtatcacaagagaaaatagtgataataaacagatatggagagagacttgttggtgttttgcatgaaactggatctaaggagcttgtagtgttgtgccacggatttaggtcatcaaaggaaggcagaactatagtgagtcttgctgatgcattgacatcagaaaatatcagcatatttcgttttgatttttctggcaatggagaaagtgaaggcacttttgaatacggcaactactataaagaagtggacgatttacgtgatgtgatcctacatttcaaaaaacacaaacgtgacacccatgctattgctggccacagtaagggtgggaatgtggttatcctctatgcatccatatatcatgatatatctaaagttgttaacctgtctggaaggtttaagctggaacgtggtattgaagatcgttttggaaatgattacatggaaaagattgatcagcatggtttcattgatgtggaagacaaaacaggacgtatcatctaccgtgtgaccaaacaaagtctgatggaccgtcttaagacagatatgcactctgcatgcttgtctattgacccaaactgcagggtgttgactgtacatggtgctaatgacgatgttgtgccatcagaggatgctctagaatttaataagtacataagcaaccatgaattgcatattattgaaaaagctgatcatagatatgcatctcatcagcttgaattagctgcagttgtactgaaatttattaaatctaaatgaagctcgcacccaagcagaagatcagaatcaagctgcggtcctactgggtgccgttgatagaggactcatgcaagaagataattgaagctgcccaaacaaccaacgcaaagaccatgggtcctgttcctctgcccactaagcggagagtctattgtgtgctcaactctcctcacgtgcacaaggattcacggttccattttgagatccggacgcatcagcggctgattgatatcatgtatccaactgcccaaacaattgattcattgatgcaactccagctccctgccggtgtggatgttgaggttaagctatgattctgttggagctaaacttttccaagtttgatgtaatgtggtactcattttctgcagcttttcttcttgatccttttgttgtctggatgggcaaaacactttttcatgctggttgcactgattctgggacaagactaacgaagctttctaacttgcagactactttcatat

SEQ ID NO: 154011 - DNA, 809 bp, Zea Mays
cctcgaatcggataatacgaagtgcgaagcagaggtcttccaaaacacaacgcggcaaacggctaatgctccttcctgtcaccatggccgtccacaccaccacctcctcctcacatcccctcctcttcctctatcgcggcaccgcaaaccctagccccgcggttatctccttgccttcttctctccgtggcgtgtctctccgctcccgggccaccgccgcaccgcccgcagagaccctctctgacgacggcatccctgacgcgccaccggaaggggagggaacgggaattccgttgccatcgtcgattggggatgatggggagcagctcgcacccaagcagaagatcagaatcaagctgcggtcctactgggtgccgttgatagaggactcatgcaagaagataattgaagctgcccaaacaaccaacgcaaagaccatgggtcctgttcctctgcccactaagcggagagtctattgtgtgctcaactctcctcacgtgcacaaggattcacggttccattttgagatccggacgcatcagcggctgattgatatcatgtatccaactgcccaaacaattgattcattgatgcaactccagctccctgccggtgtggatgttgaggttaagctatgattctgttggagctaaacttttccaagtttgatgtaatgtggtactcattttctgcagcttttcttcttgatccttttgttgtctggatgggcaaaacactttttcatgctggttgcactgattctgggacaagactaacgaagctttctaacttgcagactactttcatat

SEQ ID NO: 154012 - DNA, 934 bp, Zea Mays
aggctaacgtgtcctgctcgttggctcggtgctactgcacgtccccatcctctgcctctgcacgtacgtacgtaccgacgaggcagcgggcagagatgggaggcgtaggcgaggcggtcgaggtgacggagctggagcttcgcatccagttaatggacggcggcagctacaacatcaacgacaacgcggacctcctggcggagatcctggcgcggctggacgggcggtcgctggccgcggcggccggcgtgtgccgcctgtgggccgccgtggcgcgccgcgacgccgtgtgggaggcgctgtgcctccgccacgtcggccccgcgccgtcggctgcggcggcggcggccgtcgctggtccggccacccgcgccgtcgtcgccgcgctcggcgggtaccgccgcctctaccgcctgtgtctcggcccggcgctcgaccggctggcgcaggcccaggcccaggtccaggcggcgcgggcgcaccgcctgtccctgtccctctccctgtcgctcttctccatcgactgctacgagcgcctcggcagcggcggcgggcccagcgccggcgcgagcgcgcccgggaggcggcagcagccgtcgtcgctgctgttcctctgcaagcccgtcgacgtgtcgtgatggcagtgatcagctgtcgtcgtcgctcctctgctcgtcctttccatgccgtcgcgtcgtgcttggcgtacgctgccgggactttgctgcctgctagtacctgctgcaatgcttgcccgactgactgccgccgccgaccgcccgccgcttgacataatcattaattagggttcgtttcgtcgattagtactacggacgaacaaataagcaaacgagaggtcttgaatcaattcaagctgtagtaccgtaccggagagaggcatattgaattccaatccaacaatggctattctttc

SEQ ID NO: 154013 - DNA, 682 bp, Zea Mays
ctaatgctagctagctccaaacagatcgatacaccggcccacacgcttgctaacgagacctctccaataatgacaaggcacggcggcagcgataatgccgcctccccttccatcatcatccacgcatcctccatagccctcctccgagagcggttcagaaacctgcagaaggtgaaggagatgagacaaggaagggagctgcagaggcgggcgcgcaccgctcacactaccgaccgcgccgccggtccgtcgccgtcgccgtcggctctcagcctcggcctccacgccgccaacagcagcaccacccagcaacccagcaggtggttcttgcacccggacttggtccgcccatcgaggccgctgcgcgggcccgcgtaccaccaccatggccttattattgccgccagcgccgtccagccgccgccgccgccgagctcgtggggaggaacgacgacgacgcagaattattcgggataccggagtgatgtcgtagtagacgtcgatacctcgcttcatctgtaacgtaaccttctatgatcgagcacgtacgtacgtacgtacggcctcaatcgatcgctgtcgttctttcgttgtttttttttttgtatggcgagcttgtcagttccgggcagtactttctgcggccggccggccttgtaacttcttgggtattctactatat

SEQ ID NO: 154014 - DNA, 1091 bp, Zea Mays
gagatattaagatctatgataaaatatatattaaaaatcgttgtgcattaatattttatgtgccgtcacaacacttatagtagtttatttcaaaacaacgctctactgccattgacagtgattatcacagagaggataatcaaggagaataaaaaaagaaaaaaagaactgcaaaagaaatgcgtggaaagctcccagcagaagtccgtgcgcgtgggctccctgggccgaacaattccggactgggctaccgccgtccaccgcagccactttcgacccgcgtgcgctctttctctctctctcttccggcggctgggcagtgggctaccgccgccgccgccctacgccaggtgctgaggtcttcgtcgatctcgagctcccacaagggaagccgtccaggatgggatacaaccgccacaggcgtggccggggatcatcctcatcgtcttcgcgccgcaccaagcaagaagcctcgtgtgatgatgatggccttgggacatcacttccaaggcaagaagaaggcacagaagacgaactcaaaggttcaagaattcagcttgcaatgtgggactttggtcagtgtgatgtcaaaagatgcactggtcgtaaactttcaagatttgggcttttgaaggagttgagagtgaccaatggttttggtggtgttgttctcagccctgttggaacacagtgtatatccaaggaagatcatcctattgtgcaaagaaaaggattggctgtggttgattgttcctgggcacgtttaagtgatgtcccttttgtgaaactacgttgcggtgctcctcgtctctattctcactctgattgaaccacttagaaacttcacccagatcctgagtttatggacctagatgagattcaggacaaattcaaggacgtccattcatttcaatgtaattttaagacattgattcatgtgttggtgggtcattttatgtatgcagtctttgggattactctgtcttgcctgttctgcatgaattctagcagcatattaggttgtgtttagttgcccacattagactgcttctaggattttgtaatcaggacacctgtgtttggatgtctgc

SEQ ID NO: 154015 - DNA, 1292 bp, Zea Mays
gtgcgcgtgggctccctgggccgaacaattccggactgggctaccgccgtccaccgcagccactttcgacccgcgtgcgctctttctctctctctcttccggcggctgggcagtgggctaccgccgccgccgccctacgccaggtgctgaggtcttcgtcgatctcgagctcccacaagggaagccgtccaggatgggatacaaccgccacaggcgtggccggggatcatcctcatcgtcttcgcgccgcaccaagcaagaagcctcgtgtgatgatgatggccttgggacatcacttccaaggcaagaagaaggcacagaagacgaactcaaaggttcaagaattcagcttgcaatgtgggactttggtcagtgtgatgtcaaaagatgcactggtcgtaaactttcaagatttgggcttttgaaggagttgagagtgaccaatggttttggtggtgttgttctcagccctgttggaacacagtgtatatccaaggaagatcatcctattgtgcaaagaaaaggattggctgtggttgattgttcctgggcacgtttaagtgatgtcccttttgtgaaactacgttgcggtgctcctcgtctcttaccatggttggtagcagcaaatcctgtgaactatggccgcccatgtgaactgtcatgtgtggaagctttatcagcagccctcataatatgtggggaggaagatacagcgcatttgctgcttgggaaatttaaatggggtcacgcattcttgtctctaaacagagatctcctgaaagcatactcccagtgtgaaaatggagctgagattatcaatgtgcagaagtcatggttatcaagtaactcgagtgttccaaagccacctgtaaacggggcagaggaatcacggcaaaacacggagggatctgaaggtgattcagacgatgacttgccccctctcgagaagaatatgaaccacctgaacctcgacgaagatgaagaaagcgaggaagagagtgaaagcgagtaaaattgtgggctgaaagtgctgccatggtaactttacgactgttttacaactgaatttcagttgccttgcctgctacgaagcaaccgttgtaggtgcttcagtgtctaatagccagaataagcttcagtggccttttcgcccagatgttgaatgcatggttcgaaaagaaatccttgtacgccttagtagtgtgtatctatagcactatctttgaagataaatgatgaattgaacacattgagatcatttttctttctaggagaatatatatatatatata

SEQ ID NO: 154016 - DNA, 1289 bp, Zea Mays
gtgcgcgtgggctccctgggccgaacaattccggactgggctaccgccgtccaccgcagccactttcgacccgcgtgcgctctttctctctctctcttccggcggctgggcagtgggctaccgccgccgccgccctacgccaggtgctgaggtcttcgtcgatctcgagctcccacaagggaagccgtccaggatgggatacaaccgccacaggcgtggccggggatcatcctcatcgtcttcgcgccgcaccaagcaagaagcctcgtgtgatgatgatggccttgggacatcacttccaaggcaagaaggcacagaagacgaactcaaaggttcaagaattcagcttgcaatgtgggactttggtcagtgtgatgtcaaaagatgcactggtcgtaaactttcaagatttgggcttttgaaggagttgagagtgaccaatggttttggtggtgttgttctcagccctgttggaacacagtgtatatccaaggaagatcatcctattgtgcaaagaaaaggattggctgtggttgattgttcctgggcacgtttaagtgatgtcccttttgtgaaactacgttgcggtgctcctcgtctcttaccatggttggtagcagcaaatcctgtgaactatggccgcccatgtgaactgtcatgtgtggaagctttatcagcagccctcataatatgtggggaggaagatacagcgcatttgctgcttgggaaatttaaatggggtcacgcattcttgtctctaaacagagatctcctgaaagcatactcccagtgtgaaaatggagctgagattatcaatgtgcagaagtcatggttatcaagtaactcgagtgttccaaagccacctgtaaacggggcagaggaatcacggcaaaacacggagggatctgaaggtgattcagacgatgacttgccccctctcgagaagaatatgaaccacctgaacctcgacgaagatgaagaaagcgaggaagagagtgaaagcgagtaaaattgtgggctgaaagtgctgccatggtaactttacgactgttttacaactgaatttcagttgccttgcctgctacgaagcaaccgttgtaggtgcttcagtgtctaatagccagaataagcttcagtggccttttcgcccagatgttgaatgcatggttcgaaaagaaatccttgtacgccttagtagtgtgtatctatagcactatctttgaagataaatgatgaattgaacacattgagatcatttttctttctaggagaatatatatatatatata

SEQ ID NO: 154017 - DNA, 1260 bp, Zea Mays
gccgccgccgccctacgccaggtgctgaggtcttcgtcgatctcgagctcccacaaggtatttccaccccttctcttcccttcctgacgttcgaaaccgagcacccaaatcctaacctaagctatttggctatttgatgtctacttccttgaaccttttgcaaacattatcgggtacatgtgttagggaagccgtccaggatgggatacaaccgccacaggcgtggccggggatcatcctcatcgtcttcgcgccgcaccaagcaagaagcctctgatgatgatggccttgggacatcacttccaaggcaagaagaaggcacagaagacgaactcaaaggttcaagaattcagcttgcaatgtgggactttggtcagtgtgatgtcaaaagatgcactggtcgtaaactttcaagatttgggcttttgaaggagttgagagtgaccaatggttttggtggtgttgttctcagccctgttggaacacagtgtatatccaaggaagatcatcctattgtgcaaagaaaaggattggctgtggttgattgttcctgggcacgtttaagtgatgtcccttttgtgaaactacgttgcggtgctcctcgtctcttaccatggttggtagcagcaaatcctgtgaactatggccgcccatgtgaactgtcatgtgtggaagctttatcagcagccctcataatatgtggggaggaagatacagcgcatttgctgcttgggaaatttaaatggggtcacgcattcttgtctctaaacagagatctcctgaaagcatactcccagtgtgaaaatggagctgagattatcaatgtgcagaagtcatggttatcaagtaactcgagtgttccaaagccacctgtaaacggggcagaggaatcacggcaaaacacggagggatctgaaggtgattcagacgatgacttgccccctctcgagaagaatatgaaccacctgaacctcgacgaagatgaagaaagcgaggaagagagtgaaagcgagtaaaattgtgggctgaaagtgctgccatggtaactttacgactgttttacaactgaatttcagttgccttgcctgctacgaagcaaccgttgtaggtgcttcagtgtctaatagccagaataagcttcagtggccttttcgcccagatgttgaatgcatggttcgaaaagaaatccttgtacgccttagtagtgtgtatctatagcactatctttgaagataaatgatgaattgaacacattgagat

SEQ ID NO: 154018 - DNA, 612 bp, Zea Mays
tgttaaaaggaaaccgaacattcaggcaaatatttatgatcttttatcccatacaaatatgctagacccagcggaatccgcaagggcatgctgcaacgttaacccatcaagggaaacctggtccgatgaagccaaaaaaaaccctggaatttaggcacgttacacatcttgtccaaaaacataattcatataacctggggtcaacacaataaagagccgaagattgaagttacccttcttcgccatcgctcacgccctctattgtgtagtctagtgcttaggctttactaacgctaagcagcatgaagctaaagcatcagatgcatcaagaataggtggaagcgtgaacgggggcagaacaccacatttctcatgcacggccatcgcggcagtccctccaagcgtgcgagccattgcagcctgctgcttattgagcccctccatgatgcatgagaatgctgcgaaggtggcacagctttggagcaatgcctgtggcgcccctgataaaagctcataacaattggccatatactaacagacgagcgctaaaatgtaatgcagtaatagccatgactagtgccagaaagcaatgaaacatgcactggaaactaa

SEQ ID NO: 154019 - DNA, 2369 bp, Zea Mays
atcctttttatatcttgcctttcccctcccgttccgttcccgtctcgctctcgcatcggccaacaacgcttcacggcaaaatccttccacaggcgggggagtcgcctcacctcacttcaccccgttcatccccagcgaagaaggtaactaccgccatctcccggtaatgatcctcggtatcttccggccagaaaagatttgttttcggtacggatagggtttctgatcaagtgcgcgcgagcccaggagctaagaagaatcccagttctttgttcgccgactcgagtttgacattatgcaaaatacttagcacaccagtgatggcggctacttaccaaactggccttgtggccgagccacagttgctgaacactgaaattatcactcggagggccaccaactctgttgctgacactaacagaaaagacaaatgcgtcggctacttggatgtgtttgtacaccaagcacgcgacatccacaatgtttgtatctatcacaagcaggatgtgtatgcaaagctgtgcctcacgagcagccctgatgtttcgtgctcaaccaaggtgatcaacagtgctgggcgcaacccagtatttgaggaaagcctacgccttgatgtgcaaactgtggatgcttctctcaagtgcgagatatggatgttaagcagagtgaggaactacctggaggatcagctccttggctttgcccttgttcctctggtagacattgtaattggtaatggaaagctggtccaggagttctccttgacatctactgacctattccacacaccagctggatttgtgcacttgtccttgtcatatgctggttgttccccagatgttgtcctcatctcatcacccaataagtccccatcaacagtggatgattctggaaatgatcatgtggttcctgctcagcttgagaagattgtgttcccagacctaaatgtggagaaggaagacgagattatggtctcaaagtatctcgagatgacttcagactctgaaacccctataaaagttgagaacgtcatgtcactgcattctgcaaatgatgatgatgttccttctaaacttgaaaagatcaagttcatagattctgagagccgtgcgaaagctgaaaatggcaagatgctactatttggtgtagctgtgcctagtactgcaatttgtgcagataaggttgaggaacaccgcgatgaaagccctctaagttgtgtctcaaccacaggctcctccactaccctttctgcaacaacacaatcagtttctgagccttcggagaccagtgtcgaggcatcccctagacaatgccatagggagaaaagccaagatgttacaggtggtgaggctaattcttctgaaacaccagcaaaggatgaagttatcaagcctgtgatctgcgttaaccttcagccagagcagtcagttgtccaacaggacatagttgacatgtacatgaagagcatgcaacagttcacagaatctcttgcaaaaatgaaacttccattggacgttgagaatactagtccctcaaacgatgattcatactccagtacaattgagaagacatccccatccccatcttcatctgcagcaaagggttctagggtcttttatggaagcagggccttcttttaagtttctaatgcaaagtagtacactagctcgttactatctcctacatacatatacatggttccaggtttatcagatatcttctggcatgtaatcacatactttctgtctccataatatgcttctaggactcactcctggtattgctattagtgttatgctttgttagaagataataatttcatctcatagtaatcccatgtactaatacatacccatgaaatataatgtcatgaaatcagttctgactcgagattaattcctgcactgtattgtgaccaggtggggactcttcgtcccccccgttgccctgtcaaaaagaagtattgtgtttatctgaaggtctgggtgacaggtgaatcatattctgcttctcagaaataggtagaggcacgaccatgacagagcactagagcagcaatggctgctgggtgaaacattttattttcatcaagaaaagcaggaactggaagctgcgattgtttccttgtcataatttacattgcaactttaaaaagatggtgctaagtgataacgtgatatcacgggcacttgtttctagtgaagtagcatttgaggaaaaaccatgtgacttctgtagttctgttcttgaataatgtaggagagctgcctaccttgtattgtgatttgtgaaaggaagagaatatttgtacagagctccttaggagaagaaaagggggaggggcacggaatgtgcactttatttgcctt

SEQ ID NO: 154020 - DNA, 1712 bp, Zea Mays
tcccctcccgttccgttcccgtctcgctctcgcatcggccaacaacgcttcacggcaaaatccttccacaggcgggggagtcgcctcacctcacttcaccccgttcatccccagcgaagaagcaaaatacttagcacaccagtgatggcggctacttaccaaactggccttgtggccgagccacagttgctgaacactgaaattatcactcggagggccaccaactctgttgctgacactaacagaaaagacaaatgcgtcggctacttggatgtgtttgtacaccaagcacgcgacatccacaatgtttgtatctatcacaagcaggatgtgtatgcaaagctgtgcctcacgagcagccctgatgtttcgtgctcaaccaaggtgatcaacagtgctgggcgcaacccagtatttgaggaaagcctacgccttgatgtgcaaactgtggatgcttctctcaagtgcgagatatggatgttaagcagagtgaggaactacctggaggatcagctccttggctttgcccttgttcctctggtagacattgtaattggtaatggaaagctggtccaggagttctccttgacatctactgacctattccacacaccagctggatttgtgcacttgtccttgtcatatgctggttgttccccagatgttgtcctcatctcatcacccaataagtccccatcaacagtggatgattctggaaatgatcatgtggttcctgctcagcttgagaagattgtgttcccagacctaaatgtggagaaggaagacgagattatggtctcaaagtatctcgagatgacttcagactctgaaacccctataaaagttgagaacgtcatgtcactgcattctgcaaatgatgatgatgttccttctaaacttgaaaagatcaagttcatagattctgagagccgtgcgaaagctgaaaatggcaagatgctactatttggtgtagctgtgcctagtactgcaatttgtgcagataaggttgaggaacaccgcgatgaaagccctctaagttgtgtctcaaccacaggctcctccactaccctttctgcaacaacacaatcagtttctgagccttcggagaccagtgtcgaggcatcccctagacaatgccatagggagaaaagccaagatgttacaggtggtgaggctaattcttctgaaacaccagcaaaggatgaagttatcaagcctgtgatctgcgttaaccttcagccagagcagtcagttgtccaacaggacatagttgacatgtacatgaagagcatgcaacagttcacagaatctcttgcaaaaatgaaacttccattggacgttgagaatactagtccctcaaacgatgattcatactccagtacaattgagaagacatccccatccccatcttcatctgcagcaaagggttctagggtcttttatggaagcagggccttcttttaagtttctaatgcaaagtagtacactagctcgttactatctcctacatacatatacatggttccaggtttatcagatatcttctggcatgtaatcacatactttctgtctccataatatgcttctaggactcactcctggtattgctattagtgttatgctttgttagaagataataatttcatctcatagtaatcccatgtactaatacatacccatgaaatataatgtcatgaaatcagttctgactc

SEQ ID NO: 154021 - DNA, 122 bp, Zea Mays
ttgtgttattttactgtagtggaaattcacatggattgagagcaaaacaaacaaaccgttgtagggtggattcaatattttttggattttttagaaattttaaaggttcttttaaatttaaa

SEQ ID NO: 154022 - DNA, 2212 bp, Zea Mays
ccattgtcatcgctcagtcacagaggcagccactgccgacgggcgacggccgacggcctcccatttcgatcccctcctactcctatgctgcggtccagcataagttcgggacttccggcaatccgccggcgcccgtcggctcaaatcgcatctaccgcggctagaagctctctcttcctccctccgatccggtggggtccatttccttcaattgtggcagtggccgtctcgaaccctctataaatcccccaccccggacacccttccccgaccacacggtccacacagcccaacaaaggagcgcggcggcccctccttccttcctcccacttctctcgcgcggcgctcgcttacctcgcctcgcattccgttcgagcaggggagcggcagtgagaagggagggaattaaggcaagatgttcatcgagagcttccgcgtcgagagcccccacgtgcggtacggcccgacggagatcgagtcggagtaccggtacgacacgacggagctggtgcacgaggccaaggacggcgcctcccgctgggtcgtccgccccaagtccgtcaagtacaacttccggaccagcaccgcggtccccaagctcggggtcatgcttgtggggtggggaggcaacaacgggtccacgctgacggctggggtcattgccaacagggaggggatctcatgggcgaccaaggacaaggtgcagcaagccaactactacggctccctcacccaggcttccaccatcagagtaggcagctacaacggggaggagatatatgcgccgttcaagagcctcctacccatggtgaacccagacgaccttgtgtttggaggctgggacatcagcagcatgaacctggcagatgccatgaccagggccaaggtgctggacattgacctgcagaagcagctcaggccctacatggagtccatggtgccacttcccggtgtctatgatccggacttcatcgccgctaaccagggctctcgtgccaacaatgtcatcaagggcaccaagaaagaacaggtggagcagatcatcaaagatatcagggagtttaaggagaagaacaaagtggacaaggtagttgtgctgtggactgcaaacactgaaaggtacagcaatgtatgtgctggtctcaacgacacaatggagaatctgctggcatctgtggacaagaacgaggcggagatctcgccatcaacactatatgccattgcctgtgtcacggagggggtgccgttcatcaatgggagcccccagaacacttttgtgcctgggctgattgatcttgctatcaagaacaactgcctgatcggtggtgacgacttcaagagtgggcagaccaagatgaaatcggtcctggttgattttcttgttggtgctggaataaagcccacctcgattgtgagctacaaccacttgggaaacaacgacggcatgaacctgtctgcccctcaaacattcaggtccaaggagatctccaagagcaacgtggtggatgacatggtctcaagcaatgccattctctatgggcccggcgagcatcccgatcatgttgttgtcatcaagtatgtgccgtatgtgggagacagtaagagggctatggacgagtacacatcagagatcttcatgggcggcaagagcaccatcgtgctgcacaacacctgcgaggactcgctcctcgccgcaccgatcatcctcgatctggtgctcctggctgagctcagcaccaggatccagttaaaacctgagggaacggacaagttccactccttccacccggtggccaccatccttagctacctcaccaaggcaccactggttccacccggcacaccggtggtgaacgctcttgcaaagcagagggcgatgctggagaacatcatgagggcttgcgttggcctggccccagagaacaacatgatcctggagtacaagtgagcgaagtggcgtggcctgcagctagatatggaggaggctgcacgaaggggactagagaggcgagattagctgtggaattgtgttggcttctcgtgttttcttttgcgttcttttcctggtcatcgctgtggcgcttttgtattttatttgttggacccgtaacactatcagggctctgctattagcgcttgaagcctgtaatggcattggcatcgtatgataatgtgatcgagggtgctagttcccctaagcattatttatata

SEQ ID NO: 154023 - DNA, 2306 bp, Zea Mays
ccattgtcatcgctcagtcacagaggcagccactgccgacgggcgacggccgacggcctcccatttcgatcccctcctactcctatgctgcggtccagcataagttcgggacttccggcaatccgccggcgcccgtcggctcaaatcgcatctaccgcggctagaagctctctcttcctccctccgatccggtggggtccatttccttcaattgtggcagtggccgtctcgaaccctctataaatcccccaccccggacacccttccccgaccacacggtccacacagcccaacaaaggagcgcggcggcccctccttccttcctcccacttctctcgcgcggcgctcgcttacctcgcctcgcattccgttcgagcaggggagcggcagtgagaagggagggaattaaggcaagatgttcatcgagagcttccgcgtcgagagcccccacgtgcggtacggcccgacggagatcgagtcggagtaccggtacgacacgacggagctggtgcacgaggccaaggacggcgcctcccgctgggtcgtccgccccaagtccgtcaagtacaacttccggaccagcaccgcggtccccaagctcggggtcatgcttgtggggtggggaggcaacaacgggtccacgctgacggctggggtcattgccaacagggaggggatctcatgggcgaccaaggacaaggtgcagcaagccaactactacggctccctcacccaggcttccaccatcagagtaggcagctacaacggggaggagatatatgcgccgttcaagagcctcctacccatggtgaacccagacgaccttgtgtttggaggctgggacatcagcagcatgaacctggcagatgccatgaccagggccaaggtgctggacattgacctgcagaagcagctcaggccctacatggagtccatggtgccacttcccggtgtctatgatccggacttcatcgccgctaaccagggctctcgtgccaacaatgtcatcaagggcaccaagaaagaacaggtggagcagatcatcaaagatatcagggagtttaaggagaagaacaaagtggacaaggtagttgtgctgtggactgcaaacactgaaaggtacagcaatgtatgtgctggtctcaacgacacaatggagaatctgctggcatctgtggacaagaacgaggcggagatctcgccatcaacactatatgccattgcctgtgtcacggagggggtgccgttcatcaatgggagcccccagaacacttttgtgcctgggctgattgatcttgctatcaagaacaactgcctgatcggtggtgacgacttcaagagtgggcagaccaagatgaaatcggtcctggttgattttcttgttggtgctggaataaagcccacctcgattgtgagctacaaccacttgggaaacaacgacggcatgaacctgtctgcccctcaaacattcaggtccaaggagatctccaagagcaacgtggtggatgacatggtctcaagcaatgccattctctatgggcccggcgagcatcccgatcatgttgttgtcatcaagtatgtgccgtatgtgggagacagtaagagggctatggacgagtacacatcagagatcttcatgggcggcaagagcaccatcgtgctgcacaacacctgcgaggactcgctcctcgccgcaccgatcatcctcgatctggtgctcctggctgagctcagcaccaggatccagttaaaacctgagggaacggtaagagcccacgaataatccgaagcatgctgggtgattcagcgcttcggcaatcagcaccatcatctaacgtctctctcattatgcaggacaagttccactccttccacccggtggccaccatccttagctacctcaccaaggcaccactggttccacccggcacaccggtggtgaacgctcttgcaaagcagagggcgatgctggagaacatcatgagggcttgcgttggcctggccccagagaacaacatgatcctggagtacaagtgagcgaagtggcgtggcctgcagctagatatggaggaggctgcacgaaggggactagagaggcgagattagctgtggaattgtgttggcttctcgtgttttcttttgcgttcttttcctggtcatcgctgtggcgcttttgtattttatttgttggacccgtaacactatcagggctctgctattagcgcttgaagcctgtaatggcattggcatcgtatgataatgtgatcgagggtgctagttcccctaagcattatttatataagttc

SEQ ID NO: 154024 - DNA, 1850 bp, Zea Mays
atactggccaagtgcgcatgcgaagccatctgccatcttggacccccctcccccccccccccccccccccggtttcgttcctgttcctatggtcatgcttgtggggtggggaggcaacaacgggtccacgctgacggctggggtcattgccaacagggaggggatctcatgggcgaccaaggacaaggtgcagcaagccaactactacggctccctcacccaggcttccaccatcagagtaggcagctacaacggggaggagatatatgcgccgttcaagagcctcctacccatggtaatctattctaggatcttttactgaaaccaaacatacatgcagaacaaggcatatttctgtaaggtgaacccagacgaccttgtgtttggaggctgggacatcagcagcatgaacctggcagatgccatgaccagggccaaggtgctggacattgacctgcagaagcagctcaggccctacatggagtccatggtgccacttcccggtgtctatgatccggacttcatcgccgctaaccagggctctcgtgccaacaatgtcatcaagggcaccaagaaagaacaggtggagcagatcatcaaagatatcagggagtttaaggagaagaacaaagtggacaaggtagttgtgctgtggactgcaaacactgaaaggtacagcaatgtatgtgctggtctcaacgacacaatggagaatctgctggcatctgtggacaagaacgaggcggagatctcgccatcaacactatatgccattgcctgtgtcacggagggggtgccgttcatcaatgggagcccccagaacacttttgtgcctgggctgattgatcttgctatcaagaacaactgcctgatcggtggtgacgacttcaagagtgggcagaccaagatgaaatcggtcctggttgattttcttgttggtgctggaataaagcccacctcgattgtgagctacaaccacttgggaaacaacgacggcatgaacctgtctgcccctcaaacattcaggtccaaggagatctccaagagcaacgtggtggatgacatggtctcaagcaatgccattctctatgggcccggcgagcatcccgatcatgttgttgtcatcaagtatgtgccgtatgtgggagacagtaagagggctatggacgagtacacatcagagatcttcatgggcggcaagagcaccatcgtgctgcacaacacctgcgaggactcgctcctcgccgcaccgatcatcctcgatctggtgctcctggctgagctcagcaccaggatccagttaaaacctgagggaacggacaagttccactccttccacccggtggccaccatccttagctacctcaccaaggcaccactggttccacccggcacaccggtggtgaacgctcttgcaaagcagagggcgatgctggagaacatcatgagggcttgcgttggcctggccccagagaacaacatgatcctggagtacaagtgagcgaagtggcgtggcctgcagctagatatggaggaggctgcacgaaggggactagagaggcgagattagctgtggaattgtgttggcttctcgtgttttcttttgcgttcttttcctggtcatcgctgtggcgcttttgtattttatttgttggacccgtaacactatcagggctctgctattagcgcttgaagcctgtaatggcattggcatcgtatgataatgtgatcgagggtgctagttcccctaagcattatttatataagttcaaatggcggcccggcccggtccggcctgagcctgagcccgctgtggcctggcacgaattgggacaggcccgttacgtcac

SEQ ID NO: 154025 - DNA, 1131 bp, Zea Mays
agacacaccagtggtctggtactctggtcgcgccgatagctgccactgaacgtctgaacccaccaccggcaccaccgcgacagcgcgcagcggctcggacgatcgacggccatggcgaaccgtccgtcgcgctcgcgcctgctggtcctggcgctcgcagccgcagggctactagccgccacgcgcgcggaagcctccacgccagcatcgccggcgccggcgccggggccgtcggcggactgcacggacgcgctgctggggctggcggggtgcctgggctacgtgcaggaggggagcacggcggcggcgcccgacccgtcctgctgctcggggctcagggacgtggtgcgcggggaggtggcctgcctctgccagctcttccagggcggccaggacttcggcctctcgctcaacatgaccagggccctgcagctgcccgccgcgtgcaaggtcaagacgccgcccgtcagtaagtgccacgtttctgttcctggtgtgcccagcgcgtctcctgttccggctccctcgtccggggccccagacttcgggcagtcgccgacgccgtcgccgtcaaccccttcgggatcaccggcagcaaccgggagccagaccagcgctccagcgccttccccagcgcgttccgccgctgccggcctctcggcaccaccacgggccttcaccttcatcgctgtcgcgactctgttggtgtaccgggtcttgtgagctgggctcactcacccgagttcatgcgctccgcccgtaccttaccccagtctgaccacaaatcatgtaccgagagatgtatcttgtgagcgtttccgtttcgtttagtagcactgcggctgttcatggatttcactgcctcgcataaataatgctaccggccggccacgaatagcttaccccgctgccgctgagtaagtacatcacgatgttcattcgaagggctcgcagcttacttatacaaccttatagtatgtatcaagtgtacacaatacacgtttcgcaatgcgcctgagcgcgtaggccagggatgtgcgaaatgctcacgcctcacgggcattttgccagcgagtgcagctgttgcaagaagagaaaaaagaaaagaaaagaaaaaaaagaagtgcgctc

SEQ ID NO: 154026 - DNA, 267 bp, Zea Mays
atgccagacgtatggagcgtcgtcaggagtgacgaatgctcagagtcaaagtcgaagggcatttttataggtcacattgttggagatgctcttgcgtgtcgccagcaggcggcgtcgcagcggccagcgcagcgcagagtggcacacaagccggcgggcgggcccagcctgacaggatcgctgaccgcaccgctgagggcagccggcgacccacccgacccgacaccagcagagcaggactcaatcagggagggagggagcgattag

SEQ ID NO: 154027 - DNA, 1195 bp, Zea Mays
ggagacctctgaattgacgagtcaattctctcaccgaggtcctggtgcccgaggggattcgcgatcccatcccaattcacaacgcaccgtcgtctactcgtctcccacaacacggtccactaaccctagcgacagcctcggctcgtttgatccccgcggggagctctagttccgccaagcgtgcgtaccggcgtccggatccgggaccgaagatgacggagtccctggtgcggaacaagccggggatggccagcatcaaggagatgccggtggtgcaggacgggccgccgccgggcggtttcgcgcccgtgcgcttcgcccgccggatccccacctcggggcccagcgccaccgccatcttcctcaccaccttcggtgctttcgcatatggcatgtaccaggtcggccaggggaacaaggtccgccgggcgctcaaagaagagaaaattgctgctcgcagtgctatactgccgatgctccaagcagaagaggatgaaagatttgtcaaagagtggaagaagtgtcttgaggaggaggcgaggatcatgaaagacgttccagggtggaaggtcggcgagagcgtgtacaactctgggaaatggatgcccccggctactggtgagctccgccctgaggtttggtaagggcctgttgcaggcactgaatgccatcatgtcacgggggcacggataaagcttcatttttcattaaggatcagctgtttaaagacctgtatttgttgtacttgaaatctggctggttaataattggacatgtaaagccgacgtttacattgatgtaacgtgttcttgtctgctattgcttcccagcctctggtgtttcttcctgtaagtcattccgaacatgaatccttgttattgaagaaagtatgaaatataagcagcgcgtagcgtggtggcggcgcctcctgtcgcgtgtggattttcccgtgttgatggaacctgatgttgcaccggggattttccccggagggagccgagcggtcagtatagtttccagagcggagtttgtgtgggtagtgtttaatatgtggtcagtataggtgcccagagctgtgagtagtgtgtgcgtgttctcgggtagtttcgagtatgcgatcagtatgtgtctctatgagttacttgatacgccactgctcatatatgagtgttactctgtatgttaagaaaaaaaa

SEQ ID NO: 154028 - DNA, 1357 bp, Zea Mays
gagctgctcgcttcagtcctcattcctcaatctccgcggtgcgcccccgcgaattgctgacgtcgacgccctcgaaatctcgctctctccgtttctagaccttctcggcttccctcctctgtttcgtgcaagaatccatggcggctacgacgatagattggcacggccgcaacgccgccttgtatggcgtgccggacagcaaggagctggtgcgcgcgctggctccgcccatgcagcaggccccgaccatctcgttcgcgtacccctgcccaggcgtggagcagcagagccagtgcgcggcggcgggctcgtttctgggcgccggcggcctgaccccggcgcagcttctccaggtgcagtcgcggctccggttcctgcgccggccggcggcagcgggcggcgccgcgcagccgatgaagcggcagggcgtgccgcagcaggctccgcttcccgcgcggccggcggtgtccaagctgtaccgcggcgtccggcagcggcattggggcaagtgggtggcggagatccgcctgccgcgcaaccgcacccgcctctggctcggcaccttcgacaccgccgaggaggccgcgctcgcctacgacggcgccgcgttccgcctccgcggggactccgccaggctcaacttccccgagctcaggcgcggcgggcagcacctcggcccgccgctccacgccgcggtcgacgccaagctccacgccatctgcagcggcgcggacgtcggcgcgccgctgccgcagggccagagccagagccacgccacggcggcggcgactacagccaccccgagccccttctcctcggtgagcccacacgtcaagagtgagccgggctgctccgtctcagagagctcgttctctgcagacggcgacgtgtcctccactgggtcttccgacgtggtgccggagatgcagctgctcgacttctcggaagcgccatgggacgagtcagacagcttccaccttcgcaagtacccctccctggagatcgactgggactcgatactgatttcataatgcgatggctctgctcgtcttgtctccctcgatcaacctgttcttgcttgctctgtacttcacagatcaaaggattaaagtggtgcactgtcttggtttttaggtacttgtttgtttaggtctcgggtttgatcatgtctagcatcaaccctgctctgcttggttttttaacggcattgccaggacacatgtctcactcatctgtattgttttggtgaaattacattacactagcagtctgcatgcaaacggtttcatgtatatatctttaaagtttaaactctatactgtagttgcaatggtccaattgagaaccactctgacac

SEQ ID NO: 154029 - DNA, 2327 bp, Zea Mays
atgagggcctcggactcggcggcggcagcggcggcggcggaggcggagtggacggaagagatagattttctactcggcgtcggcgagatcccccacgtcacctctccgcaggggcggcagcgcggggtgggtgttatcggcgacggcaacggcgtgcatcgcgcctcgggttccgacggctacacttcaccattgcgccttgggtgccgacgggtacactgcccccctggcgccgacgggtacgatgcgcagcacgccaagtacccctactacatggtcctgaaccgtcgggacaatgctgctccaccccatggcggaggcgatgcggggggcatgggcttccccactcagtcatcggtcacgggaccgctcgtcggtagcgcggtgccgtcgccgtcgccgcctccgccgtcgccgctgccactgggggcggacgatccggaccagcagctgatcgcgaaccagctccgctgcctgcgcatcggggacgcgcagggcgcgctcctgcaccagggccgggcgccaatcatgagcaccgcccggaccgatgtccccgcagggcacgacgcctaccatgggtacaccttcgccgcgtcaggttcttccttcccccgtgatcgcgtgttccttgatcaagccaaagctgtcgggcacgtcgcagcacggccgcatcatcgcttcgtgtcggacgctggcctggatgactttggtggtttccccggagccctggacaccagcattggaagcttcatgtacaatagggcagggcatgccaccggcatcggttgtggccaaggtttggtacagtctgatttccccgagtcgtcctacctgcttccgagtcaggcttgtgtagaatttcccagctcgagtcggtttgcccttaagcggcaccatgcatgtggtggtgtccctatggcagacaacggatttgggagaggcagaaatccttgtgagaacagtctaatgttcgataaaaagaacatgaactccctggaacgtgagaaggagaggagattccagcgtgtcagttctaggactttgaggtttaacaacttggttccggtcaagggaggatccatctaccacatggccaaggaccaaaattggtgccggtatttgcaggacaagttattggaagggaagcatcatgttgatgtgatctttgaaggaataattaaccatattgcagaccttatgatcagtagttttggcaactatcttgcacaggagatagtggaagtgtgtgatgaagggcaaatgttgaggatcatcttagtgctgacacagtaccctctgaagcagctgattgccgtctctctaaacacacatgggacaagggtagtacagaaattgatagagaaagttagcagcagagagcagattatgctcattatttcagccctacagccaagcttcatgctgcttgtcaatgatcacaatggtcatcatgtaatacagagatgtctggtcaactttggagtcgaggataataagttcatatttgagggcgctgcagccaactgtcttaacatggcggtacattgccatggatgctttgttctacaaagttgcataaaagcacgtggtagatacctggccaatctgattatggaaatatgtcttcatggctttgaacttgcccaggatccatttgggaactacgtggtccaatgtgttttggaacaggaaattccttccgcaaatgcacacttggcatctctgtttgaaggaaagtatgtttatctctcaaagcagcaggggagcagcaatgtggtggagaaatgcttaatgtttttcccggacgatgccaaagctgtcataatacaagaattactcatgctcagcggttctgatttcgaacaactgctgcaggaccgtttcgccaactatgtctttcgcactgcccttgaccacaccaggggccgtctgtacgatgtccttgttgaagcgatcctcccttatgagaatgccattcggaacagcccctattgcaataagaggatcatcatgcacctgaccaggaggtgaaagttgtactatctgtatacctttggtaccagggggaaggccgctttcctgttgttgacaatttatgttcgctctgtcagagttcagaaaggcaggttttggttgcaagaacaacggttcaagtgttgtatcgtgtgtcttccgtgttgtagtttttttttcctgatggtgtgctgtagtgtactttaaagttttaaaaggaacccgtgtgcttcccccttgtttcttttttgtacctgctgtaatgatttccactttggattctgtgaattgttactgtttgataaggaccattc

SEQ ID NO: 154030 - DNA, 607 bp, Zea Mays
cccgttccagtctcactcactcgctctcgctcactcaacccgcgcccggctcgctgcgccgccgccggtccatccccgtcctcggccaaccactgtcgcggccagccattgagcgcggccactggccccttgcgccgcccgttccccgacactgccgccttttcccggcgacgccccttcccggcagttccccggcaaccgccaccgacctcgacccggctcccccgtgcgtgacgccgctcctcctcctctgcgccgcagtccctccccggcgccgccgcacgctctggccaccttcttgacgccaccacgcgcgtacactattttttggtaacttgttgataactgctagttggttgattgattgatggtggcagtgaaaactagaagagttaaatagaagatacaataaactagtttggtaaactagtttggttgattgattgattgatgttgggagtgagttgtaattttgggatgacgataatgtttgactggtagtagggtatagtcatatggtataactttatcaatatttgataatattttcgggtttatatatatgaatgcttcgaattatgcaaacgttacaatacattcgaactta

SEQ ID NO: 154031 - DNA, 1386 bp, Zea Mays
ccgaatccaaacccatctcgcccccactcctatccgcagagtactacatcaccagagggaggttgcgagttgcgaccgggggccggccgaccgagccaaagtacgctaccactcttgctgcaccgaccgcgagggtgcaacaacgacttacatatatatataaatatccgcgccgcagctagctagctagcagagcagcccggccgaagccgtgtagcctagcctcctcacatatagcagcagcaggacgagatcgtcgatcgatcgatggtgtctctgcagccctcatcagcggcgccgctcctgccggaggccgccaccgcgaacaagctcccgccgtggctctcactcgtcggcagcgtcgtcgcctcctccacgggtacggcggccaccagcaagaagcggaagcgggacggcagcggctgcggcggcgacgacgacgaccgtggcgaggtcgtggacgggatcgagctcaatttcgacgccgcgccgctgcctcccgagtggcaacgctgcctcgacatcaagtcggggcagatctactactacaacacgaggacgcagaagcggacgtgcaaggaccccaggggccacgggctgcagtcggactaccgcgccgaagaaggccaggaggaggaggaggactccgcgaattgtgcgccgccggggctggacctggagctgaacctcacgttcgagccgcgccgagtgctcgccgcccacaggaagacgatgaagagggccaacaagcagcccgcggaggaggaggaggccgaggacgacgacagcagcagcagcagtagagagatggtggctggcgtgtgcgtgcggtgccacatgctggtgatgatgtgccgcgccagcccggcgtgccccaactgcaaattcctgcacccacccagccgcgccgcgccgccgccgccgccgctcaagctcggcctccagctgctctgctgcagggactagagaccaaagcgtcccaacgagacccatggatgggctcccccagcaggcatatgcgtgcaccagtacaacgcgcgcacgtgtgtcgcacgcatgtgcaaggaagacacagcgtaatattcaatcagaggcagggtggtggtatggtagctaggggagttgatcagtagtgagtggcggcgccgatgtccgtggccgaccgatcggctgtgcgcgtacgtacgtacgtacgtttcgccaaggggtatatatatcgtgtcataatgttattactcatgtggcgatagatggatggatggatggatggtggtgtagatatcataaagtgcatgcatagcataaatgtagctcggaactttcggtgtctgtcacttgtccgtgtgcatgtacacgtactgtgtaaacatgtagtattccaactcc

SEQ ID NO: 154032 - DNA, 92 bp, Zea Mays
gaaacgcgacagaggcaaagaaaaatcattagaatcaactattagcaacatgcagttcgctttaagttcaatctcgttacatcaataagggc

SEQ ID NO: 154033 - DNA, 1806 bp, Zea Mays
atggacctcctcgacgcgaggcaccgccacacgccggattcgagctcctccccacatgccgcctccgacatgggtctcccgctcgccggggctgcctaccagccctacgtctctgagctcctctccttctccatcgagcgcctccacaaggagccggagcttctgagggtcgacgcggagcgagtgcgacggcagatgcaggaggtggcggtggagaactacggcgccttcatcgccgcctccgaggcgctctccttcgtccgcgcgcagctcgagagcttcgatggccacctcgaggccatgatagaggagataccaaacttaacatctggctgcactgagtttgttgagtctgcacaacaaattctggaggagaggaagcttaaccaaacattactagccaaccacactacattgcttgacttgcttgaaatcccaccattgatggacacgtgtatacggaatgggaactatgatgaagcacttgatctagaagcttttgtgagcaaaatatcgaagttgcacccagatttacctgttgtccaaggattagctgctgaagtaaagaagacagtacaatcattaatttcccagcttctccagaaactccgatcaaatattcagttacctgagtgcctccgtattgtagcacatctgcgtcgaattggagttttcagtgagtcagaattgcgcttacagttcctgaggtgcagggaagcttggctttctggaattcttgaagatctggaccaaaggaatgtttatgattacctcaaaggcatggtgacttgccacagggtacatctattcgatgttgttaatcaatatcgagcaatattcaacaatgataaatctggaaatgatgagaactccgaaggtgggctgcttttcagctgggcaatgcaacaagttagtaatcacctcgctactcttcaagttatgttaccaagcataacagaaggtgggtctctgtccaacattcttgaacaatgcatgtattgtgcaatgggccttggcttagttggattggatttccgtggcctccttccgccaatctttgaggacgcggttctaaatttattctcaaagaatatgagtatggcggttgaaaattttcaggttgttttggattcgcaccgctgggttccgatgccatctgttggctttgtagcaaatggtgttgtcgatgacacttctgatgatgtgactccaccttctgttttaatggagcatccacctcttgcagtgtttgttaacggtgtttcagcagcaatgaatgagctaagaccgtgcacaccattgagcttgaaagtcatccttgctcaggaggtggtcaagggactacatgcagtctctgactccctagtaagatacaaagctatgcggatgcttcgtggaaatgagtccgctcttttcctgtcactctgccaggcatttatcgaggttgtacatccttattgtgccgcatgttttggtcgatgctacccgaatggggcaacattgatctcagagtgtcaaggcacactggacgctgtccgtcagctattgaccatacctgcaagatctaacagttccagtatcgaaagaaagcagtcaggagccattgaaagaaagcaatctgttgagagccctgggacagcagtcacgaataacgagctgtcagccgatggacctgggctagagatcaacgatgctgctacaaccaccaccccaccggtagaggacgacgtgagtacccatccaccagcaatgaagtttgaaattggagaagatataggagatagggatgagacgttcctcagataa

SEQ ID NO: 154034 - DNA, 2081 bp, Zea Mays
gctgtccgttgtcctctccctgccccaagggtcctggcgcggcaagatcaaagcctcccaacagccaacaagtcgatcgcaaatcgcaagaacaagagaagaaccaatccgacaacgtctccattctccctcacatctccttgctcgcccagcagctggcactccccgtctcccctcgcatccgcatcgaatcgaggcatatcgccctatatatcccattccgctcggttggattcagcttcccctccctctcccccatcgataaaaccgatgcgtcgcccggcctcgcgtaccctaccggcgacgggacgaggggaaggttacaggcacggcgcgtgaagggtcctgcccagtcctgcccggtccgccgcgatgccgtggtttgagatgtggctgcctcctgtgcctggcgagggggctgtggcggcggcgggggggctgttcctcgacggcgccgatgcggcggcgcacggcgcgctcctcgcggccatgcctggttgctccttgtcgttcgtgctccggcaccagcgttgccgggggtcgccgccggggttcctgtcgctgacgatgtcggtaaaggggggcaggggctttgtgccggccccggtggggttgctcgctggtgcggaggagaagagcggggcggaggagtcggacgcgctggtcgcggggaagagggccgtggaagcggaggcggaggcggaggcggagggagtgattctgctgcaggagaaggagaaaaagaagaagaagctggacgattgtgctggagctggcgcgatgaacatgaccaaacacctatgggccggagccgttgctgccatgatatcgagaacagccgttgctccacttgagaggctaaagttggagtatatagttcgtggtgagcagaggaatctatttgagcttatgcatgctattgcaacaacacaaggattgaaaggcttttggaaaggaaactttgtgaatatcctccgcactgctccattcaaggcagtcaacttctatgcatatgacagttacagaaagcaactggtcaaatgggctggtaatgaagaagctacgaactttgagagatttattgctggtgcttttgctggtgttacagcaacaattatgtgcatacctatggatacaatcaggacaaagatggtagctcctggcggtgaagctttaggtggggtcattggtgttgcccgccacatgatccaaactgaaggattcttctcgctgtacaagggattggtgccttctcttatcagcatggcaccctctggtgctgtattctatggagtgtatgacatactgaagatggcttatctgcattcccctgaaggaaagaaaagagtatcgatgatgaagcaacagaaacaagaggcaaatgcattggatcaacttgaattgggtactgtgaggaccttactctatggggctattgctggttgctgtgctgaagcagctacatacccgtttgaagtggtccgtaggcagctacagatgcaagtaaaagcaacaagaatgaatgcatttgcaacatgccttaagattgttgatcaaggtggggtaccagcactgtatgccggtctgatccccagcatgttacaggttctaccatcagcatcgatcagctattttgtttatgagttgatgaagatagtcctgaaagtggagtgaatacaaattaattggtgagcctacgaaccacgttcaaatggtgatcacataccttgataaaattgccgaaaaaaaagtatgtaagggctagtttggaaactctattttttaagggatttagggaaaatgggatttccaaactagccctaacttgtgaaattttctcgtagacttgtttgacgaaagctcctgatgctgagggtagcttcaggttggtaccgtaaaacattgttcagctgaggcttttcacactagttgaccaaattgtacacgaggatatattcaagacctaattcagtggcttagtagaagattgttctctgcaactctgccccagcgaaataatctcggccttgcccaatttctgttgacaatttttttcatactttgtcgttgatgtatttgac

SEQ ID NO: 154035 - DNA, 1080 bp, Zea Mays
atggcaccggtagatctaacccccaggcagccccggaaggcgtatggcggcgacgccggcgcctactacgagtggagcccagccgacctgcccatgctcggcgtcgcctccatcggcgcagccaagctctccctcgccgccggtgggctctcgctccccagctactccgactcttccaaggtcgcgtacgttcttgaaggcactggcacctgcggcatcgtcctgccggaggcgaccaaggagaaggtgctggccgtgaaggagggcgacgccctcgcgctccccttcggcgtggtcacgtggtggcacaacggccccgccgcgccgacccagctcacggtcctcttcctcggcgacacctccaagggccacaggccggggcagttcaccaacttccagctgacgggcgcgagcggcatcttcacgggcttctccaccgagttcgtgtcgcgcgcgtgggacctgccggaggcgaacgccgcggcgctggtgtcgagccagccggcgtcgggcatcgtcagggcctcgtccccgctgccggcgccctcggcgcaggaccgcgagggggtggcgctcaactgcctggaggcgccgctggacgtggacatcccgggcgggggccgcgtggtggtgctcaacacggcgaacctgcccctggtcagggaggtcgggctgggcgccgacctggtccgcatcgacgcgcactccatgtgctccccgggcttctcgtgcgactcggcgtaccaggtcacctacatcgtgcgcggcagcgggcgcgtgcaggtggtcgggcccgacggggtgcgcgtcctggagacgcgcgtcgagggcggcttcctcttcatcgtgccccgcttccacgtggtgtccaagatcgcggacgcgtcgggcatggaatggttctccatcatcaccacccccaacccgatcttcagccatctggccggaaagacgtcggtgtggaaagccatctcggcggaggtgctgcaggcgtcgttcaacaccacgccggagatggagaagctgttccggtccaagaggcttgactcggagatcttcttcgcgcccccgtccaactga

SEQ ID NO: 154036 - DNA, 817 bp, Zea Mays
agtgtcgttcggttcggttcctcgcaacgaaccacgccagcgtggcggtccgccccccaccgctcttccctcctccgccctcactggctcccgactatttctagcaccgccgcgccggatcgacacttctcatgtcataccccggctcctctgcttctcggttcccgccgttccatgtccgccacaaggtgcccgccacaaggtgcccctgtgtcctccgtccctctctacctggttccatgtccacggttctcatctcatgctaggcttcttgcttcatgcagggcagaccggcggcagaggttgtaccgatcgctctggcccacgtcgccggccggaccatcaaccaccgcgcggagcatcaagcagctgccattccaaagcccgttgaagcatcgaaggatttccagccgtgagcgtgtgcggtggcggcgcggccgggtcgccgggatgggcaagatgaactgcttctccggcctgctcagcggcaagagcaaggcattcaaggttggtggcacaaccaggctcggcttttcgcaaccgaatttcggcggagctgttcatcagttttagtgactttggcctttgtttgctcgtcgatggcggcagggtggcaacaagggcgcttacgccaagaaggcggccagtggtggcaacgattgccccaaggtgaagccggtagagttcgtagacatggcgggcactgctgtcgacgacttcgtcggcagacgcggcggaggcagcgttcatgcgtccgcatgcagcagtagctttgtcgttcacgcagccaccgagctgccacgccatgccactgccg

SEQ ID NO: 154037 - DNA, 2131 bp, Zea Mays
cgacacttctcatgtcataccccggctcctctgcttctcggttcccgccgttccatgtccgccacaaggtgcccgccacaagggcagaccggcggcagaggttgtaccgatcgctctggcccacgtcgccggccggaccatcaaccaccgcgcggagcatcaagcagctgccattccaaagcccgttgaagcatcgaaggatttccagccgtgagcgtgtgcggtggcggcgcggccgggtcgccgggatgggcaagatgaactgcttctccggcctgctcagcggcaagagcaaggcattcaagggtggcaacaagggcgcttacgccaagaaggcggccagtggtggcaacgattgccccaaggtgaagccggtagagttcgtagacatggcgggcactgctgtcgacgacttcgtcggcagacgcggcggaggcagcgttcatgcgtccgcatgcagcagtagctttgtcgttcacgcagccaccgagctgccacgccatgccactgccgagaacggtgaagacgaggccgcggttaacaaggactcatcctccgccggcgctggctcgcccggttacagcattggccgcatgtcgccaacggcatcgccgaagctgacgcgctcctgctccaacatggagacggcgaggtctgtccccccgccagggtccgactccgacctgccggcgaggtcacgctcccacaacgacctgctgaagaacctgccccccggaaggccgacgaccgcccgcagcggcttgagcccgacggcgtccttcaggtcctcgtgctccgccgaccgcgtcctgctgaagaaacggtcgtcgcggcaggtgctcccgtcccggagccggaagctgtggtggcagacgttcctctggagccaccgcaacctgcaccggccgggcgcgagcgcgaccactcccacgctgccgtctgcgtggaaagacggccgtcccgtgcaccacgggtacacgtccgacacgctgggcactgccaccgcggacgccaagaacaagggcgtcgtcgcggtggaggaggaccccgtcccgaaccagtgggtcgcgttctccgccgaggcgtctccactggaccgggtcagcgcgtgggtgaacagcctcggggacgcctcgttccacgccgtcgacgaggaggacgacgccacgctgcacggcgcgcgaccgcggccccgaccgagacgctctgagatcgtggagctgtggacggccggcggcaagaggcagccacaggcgaagcggcgcgccgcggacgaggccgcccccgcccaggcgagcggcgtcgtgcacacgctcaacgccttctcctccgtcgcgcacatcgccggcatggggctccggaccgtcccgatgatcgccgccttctcgaccctccgcgccgtcaacctgtctggaaacatgattgtgcaaatcaccgctggatcgttgcccaaaggcctgcactcactggacctgtcgcggaacagcattgcagtcatcgaggggctgcgggagctgacgaggctgcgggtgctcaacctcagctacaaccggatctcaaggatcggccatggtaagcaagcaagcatgtccttgtgctctgctggcgatgcaacatcacttttacgtactttctctaccagttagtgtctgcgtttctgcctgccctcctgtgctctggaaacacagagcttggagctattggcaccgcacgaatattgttcagtgcccatgccagcagtaatgtttgacaccctggatgtttggcgcgtttagatcctttgctcgtgctaactgctaaggccataccaccatagtagcacggtccagtccataccacactgcaggggctagctagggttcctgctagacatcatggggaaagggtccagcagttttagctcgttgtgactcagaacgccatgtggtcgtgtgggtgttgggtggtaacaagaacgtcagtcgcctgcaggtacgaatgggggtgccacatgcttcagagatatctgatgcggacatttctcattcatgatgcttttcttttcagccccgtgacacgcttcggcgcttcccatgtttctcctgtttggtacccaatgcctgttcagagagttcagacctttggattttgg

SEQ ID NO: 154038 - DNA, 2185 bp, Zea Mays
cgacacttctcatgtcataccccggctcctctgcttctcggttcccgccgttccatgtccgccacaaggtgcccgccacaagaccggcggcagaggttgtaccgatcgctctggcccacgtcgccggccggaccatcaaccaccgcgcggagcatcaagcagctgccattccaaagcccgttgaagcatcgaaggatttccagccgtgagcgtgtgcggtggcggcgcggccgggtcgccgggatgggcaagatgaactgcttctccggcctgctcagcggcaagagcaaggcattcaagggtggcaacaagggcgcttacgccaagaaggcggccagtggtggcaacgattgccccaaggtgaagccggtagagttcgtagacatggcgggcactgctgtcgacgacttcgtcggcagacgcggcggaggcagcgttcatgcgtccgcatgcagcagtagctttgtcgttcacgcagccaccgagctgccacgccatgccactgccgagaacggtgaagacgaggccgcggttaacaaggactcatcctccgccggcgctggctcgcccggttacagcattggccgcatgtcgccaacggcatcgccgaagctgacgcgctcctgctccaacatggagacggcgaggtctgtccccccgccagggtccgactccgacctgccggcgaggtcacgctcccacaacgacctgctgaagaacctgccccccggaaggccgacgaccgcccgcagcggcttgagcccgacggcgtccttcaggtcctcgtgctccgccgaccgcgtcctgctgaagaaacggtcgtcgcggcaggtgctcccgtcccggagccggaagctgtggtggcagacgttcctctggagccaccgcaacctgcaccggccgggcgcgagcgcgaccactcccacgctgccgtctgcgtggaaagacggccgtcccgtgcaccacgggtacacgtccgacacgctgggcactgccaccgcggacgccaagaacaagggcgtcgtcgcggtggaggaggaccccgtcccgaaccagtgggtcgcgttctccgccgaggcgtctccactggaccgggtcagcgcgtgggtgaacagcctcggggacgcctcgttccacgccgtcgacgaggaggacgacgccacgctgcacggcgcgcgaccgcggccccgaccgagacgctctgagatcgtggagctgtggacggccggcggcaagaggcagccacaggcgaagcggcgcgccgcggacgaggccgcccccgcccaggcgagcggcgtcgtgcacacgctcaacgccttctcctccgtcgcgcacatcgccggcatggggctccggaccgtcccgatgatcgccgccttctcgaccctccgcgccgtcaacctgtctggaaacatgattgtgcaaatcaccgctggatcgttgcccaaaggcctgcactcactggacctgtcgcggaacagcattgcagtcatcgaggggctgcgggagctgacgaggctgcgggtgctcaacctcagctacaaccggatctcaaggatcggccatggcctgtcgagctgcacggccatcagggagctgtacctggccgggaacaagatcagcgacgtggaggggctccaccgcctgctgaagctggccgtcctggacgtgagcttcaacaagatcagcacggccaagtccctgggccagctcgtggccaactacggctcgctgcgggcgatcagcctgctgggcaacccggtgcaggcgaacaccggcgaggacacgctccgcaaggcggtgtcgggcctgctcccgcggatcgactacctgaacaagcaggccgtgaagccgcagcgcgcgcgcgaggtggccaaggacagcgtcgcgcaggcggcgctcgggaacaacgccgggggcagctcgcggaggcggctggcgcgccgcctcagccagagccccggctcgtcgtcgggcaagggccggggccggggcggcagggaggggaacggcagccgcaggggcagcaggagcaggttcgtggccaggccccagagctcgagctaccaaggagatgaggcaaaacatgacaacggtgttgggcttgaagagggagaagaaacaagtccgtgcgtttaaactgcaagatgttgttaatgagctcgagtttgacgcatctattgct

SEQ ID NO: 154039 - DNA, 2270 bp, Zea Mays
atgtcataccccggctcctctgcttctcggttcccgccgttccatgtccgccacaaggtgcccgccacaagggcagaccggcggcagaggttgtaccgatcgctctggcccacgtcgccggccggaccatcaaccaccgcgcggagcatcaagcagctgccattccaaagcccgttgaagcatcgaaggatttccagccgtgagcgtgtgcggtggcggcgcggccgggtcgccgggatgggcaagatgaactgcttctccggcctgctcagcggcaagagcaaggcattcaagggtggcaacaagggcgcttacgccaagaaggcggccagtggtggcaacgattgccccaaggtgaagccggtagagttcgtagacatggcgggcactgctgtcgacgacttcgtcggcagacgcggcggaggcagcgttcatgcgtccgcatgcagcagtagctttgtcgttcacgcagccaccgagctgccacgccatgccactgccgagaacggtgaagacgaggccgcggttaacaaggactcatcctccgccggcgctggctcgcccggttacagcattggccgcatgtcgccaacggcatcgccgaagctgacgcgctcctgctccaacatggagacggcgaggtctgtccccccgccagggtccgactccgacctgccggcgaggtcacgctcccacaacgacctgctgaagaacctgccccccggaaggccgacgaccgcccgcagcggcttgagcccgacggcgtccttcaggtcctcgtgctccgccgaccgcgtcctgctgaagaaacggtcgtcgcggcaggtgctcccgtcccggagccggaagctgtggtggcagacgttcctctggagccaccgcaacctgcaccggccgggcgcgagcgcgaccactcccacgctgccgtctgcgtggaaagacggccgtcccgtgcaccacgggtacacgtccgacacgctgggcactgccaccgcggacgccaagaacaagggcgtcgtcgcggtggaggaggaccccgtcccgaaccagtgggtcgcgttctccgccgaggcgtctccactggaccgggtcagcgcgtgggtgaacagcctcggggacgcctcgttccacgccgtcgacgaggaggacgacgccacgctgcacggcgcgcgaccgcggccccgaccgagacgctctgagatcgtggagctgtggacggccggcggcaagaggcagccacaggcgaagcggcgcgccgcggacgaggccgcccccgcccaggcgagcggcgtcgtgcacacgctcaacgccttctcctccgtcgcgcacatcgccggcatggggctccggaccgtcccgatgatcgccgccttctcgaccctccgcgccgtcaacctgtctggaaacatgattgtgcaaatcaccgctggatcgttgcccaaaggcctgcactcactggacctgtcgcggaacagcattgcagtcatcgaggggctgcgggagctgacgaggctgcgggtgctcaacctcagctacaaccggatctcaaggatcggccatggcctgtcgagctgcacggccatcagggagctgtacctggccgggaacaagatcagcgacgtggaggggctccaccgcctgctgaagctggccgtcctggacgtgagcttcaacaagatcagcacggccaagtccctgggccagctcgtggccaactacggctcgctgcgggcgatcagcctgctgggcaacccggtgcaggcgaacaccggcgaggacacgctccgcaaggcggtgtcgggcctgctcccgcggatcgactacctgaacaagcaggccgtgaagccgcagcgcgcgcgcgaggtggccaaggacagcgtcgcgcaggcggcgctcgggaacaacgccgggggcagctcgcggaggcggctggcgcgccgcctcagccagagccccggctcgtcgtcgggcaagggccggggccggggcggcagggaggggaacggcagccgcaggggcagcaggagcaggttcgtggccaggccccagagctcgagctaccaaggagatgaggcaaaacatgacaacggtgttgggcttgaagagggagaagaaacaagtccgtgcgtttaaactgcaagatgttgttaatgagctcgagtttgacgcatctattgctagttagcggtgtgtctaatttatctttgtagtaccaccgtcgacggattaggtctccaatgcaaaaaaatgtttagcgtctaccatttgat

SEQ ID NO: 154040 - DNA, 994 bp, Zea Mays
atacaacaaccaacgaaaagcgcacgcgcacgcgcatcccggcagtcagtagcgcagctgcctctcctctctttgccccccggagccggagcaagagcgccgccaacagctcgctaccggcgccgtgtcatggcgggggctggagacaaggtggactacgtcttcaaggtggtgctgatcggcgactcggcggttggcaagtcgcagatcctcgcccgcttcgcccgcaacgagttcagcctcgactccaaggccaccatcggcgtcgagttccagacccgcaccctcgtcatcgaccacaggagcgtcaaggcccagatctgggacaccgccggccaggagaggtacagagctgtgacaagtgcttattacagaggtgcactgggagctttgctggtctatgacattaccagacgccagagcttcgatcatataccccgctggctagatgaactccgagcccatgctgacaagaacattgtgataatgctggttggcaacaagagtgatctcgaggagcagcgagcggtgagcactgaagatgccaaggagtttgccgagaaggagaacctcttcttcctggagacctctgcgctccaggcaacaaacgtagagagtgcttttcaaactgtcttgacagagatattcaagatccacagcaagaagaacatggtgtcggagccgaagagcaatggagctgccccagcaatgccggggacaaaggtccttgtcccaggtccggcgcaggaaatcccaaagagcaagtgctgcagttccatgtgatgcttctacgtttggtgctgggtgggttgaaaatatattcacgcaacattgtgttggttttaaatccctgctgaaatacttgggttttggcgggattgtattggaacaccggtgtattttagatatttgtcacaattgtgacatgagggaagggtgtgctgatgtattagttctcttgttctctaattgatacgttttatccctgctgcaa

SEQ ID NO: 154041 - DNA, 2455 bp, Zea Mays
atacaacaaccaacgaaaagcgcacgcgcacgcgcatcccggcagtcagtagcgcagctgcctctcctctctttgccccccggagccggagcaagagcgccgccaacagctcgctaccggcgccgtgtcatggcgggggctggagacaaggtggactacgtcttcaaggtggtgctgatcggcgactcggcggttggcaagtcgcagatcctcgcccgcttcgcccgcaacgagttcagcctcgactccaaggccaccatcggcgtcgagttccagacccgcaccctcgtcatcgaccacaggagcgtcaaggcccagatctgggacaccgccggccaggagaggtaccagcaaacaacgcacccgtccatccgtccgcctccccgctctactcccgatcctatccgctgctttactcactagtctcttgcgcaaatcatgctcctcgatccgttcctctggcgcattagatctctctggactgtagcggttgctgaaacgctgagcgcaatggtggatctctacttctgaagcatttgcttttttttgcgcgttcacacctaccttaccagcaaaggacaatgtgctgttaggtgattagatctggcagctctatgcttatggtgcagtgctattactgaagtctttaactgttgaggcacgacgaattcaatcattcatgttggcttctacttgctctgtagtttttggaaccgtaatttgaggaagtaaacgtgtgctataggtagtggaggtggtggttctgcattgacagaagttgcttgagcttgactgggagcttgagcaaatgggacaatattattcgaattctgaattgttcacatttaccttgtacttcgctcttctgctttccgatacccgacgtcatctaatgcacaattgacaccacctttaaagtttttgtggtacacaaatcaacaggcctgatagacgtactatgaaatgctctgcaagaatctaaaacctttgataaaaaaaatttgtttgttcagacctctttggtgggaggcctaccatgctggtttgaatctgaggtacattgcttgtgcactaggtcatggttcctcgtttggtcacaaatcatcgtcagctgtcaacatgtcattactccttattttgagcaaatatgccttaatagcttgagcccgcaaggcatgttcgtgccctgttagtagaactgggagaatttcgtagaagtagaatacaagcatcagtctgtcattatcttcttcaggcaattctttactcatgacaagaaaacttacaatgtgcatgattctcactctcgaagtactcttcatattagaatcatcatttgctttagacatgtttaggggtggtaatgtgttctaaattttacactaaaatttttacactataaaatttaaggatcagaccagattaggattgagctctatttctatttttttaactaaaattatttaagggctcaaataaattgtgcagaaacatttgaatcgtgatctattaccacccctagacatgttcatagtgttcgggcattctgattatcggagtgctgacccgtggaaattattttatatattgggtcctggttcatatccgtggccttaaagcatggcatatttagccatttttaggtgctgtgactttttgcacctgctttccatcacttttttcttcattgacttctcatgctgagttgctggttacacccaactactgcaggtacagagctgtgacaagtgcttattacagaggtgcactgggagctttgctggtctatgacattaccagacgccagagcttcgatcatataccccgctggctagatgaactccgagcccatgctgacaagaacattgtgataatgctggttggcaacaagagtgatctcgaggagcagcgagcggtgagcactgaagatgccaaggagtttgccgagaaggagaacctcttcttcctggagacctctgcgctccaggcaacaaacgtagagagtgcttttcaaactgtcttgacagagatattcaagatccacagcaagaagaacatggtgtcggagccgaagagcaatggagctgccccagcaatgccggggacaaaggtccttgtcccaggtccggcgcaggaaatcccaaagagcaagtgctgcagttccatgtgatgcttctacgtttggtgctgggtgggttgaaaatatattcacgcaacattgtgttggttttaaatccctgctgaaatacttgggttttggcgggattgtattggaacaccggtgtattttagatatttgtcacaattgtgacatgagggaagggtgtgctgatgtattagttctcttgttctctaattgatacgttttatccctgctgcaagtatctgtagcaccgattgtttttgagatgcgaggtgtgaatttgccgtgtacaagaaataatccactcatctg

SEQ ID NO: 154042 - DNA, 1885 bp, Zea Mays
agaaggaaaaaaaacatgttgagagtgaaatgctactactacactacagtacattcagacgataaaattacaccaggaaaccaatgtttcgaccctagaaagcgcagctcgcaggaagagaacaggcaccggcgtcttctcagcgcatcgctttccgaattggacttcgcagcaactgttacccctatcatgccaccgatctttggcagaaatggacacctacgcttcccagctcctgctttttcgaccaacttggttcacagtaataaaattctctttagtggagcacctcacgtcggcactactaccacccaattgaccagagaaacgccattgctccaacgtcgacagcttcaggaatcagatatgagagagatttaaaaaaacacaaaaatctatcatgtagatacaaatgagtcaacaactgcttatcaatcagtcatgtgtcaccaaacacgctttgtaatccatgtgacccataataattagacgagccaccaccatacaccacaaaacaagccaggtccatgtcatgccagaaaccaaagctcaactgcaattgtctaccgaacaaaatctatcatgaacaaggatccaaagatcaagcacagaacaaagaccaagttttttttataacgaatcgcatgcacaggaaatcagattgggctagtcccagccaatcctttttgacctcacaagtcacaactcacaagcaagaacattgctgttcaaatgagttcactctttactgcaagtgtagccaagcaagctagagtagataaactaccactactgctgctatatcatcctaaaggaattttggatatgagattctgccatacatattgcttccatgagctttgttacaaaaaaaattagccaagcatgagcaatccatattggttgccaaccaaacgccgcatgtcccatatacaccaacaaaatatcaaggcaggtgtggagcacgctaggagaaaggagagaaattttgagagagagtgatggagctaacagaatgtgaaggtgttgctgcctgcttccttctgcggtcgccgcccgccgcctcgccagatctctcctacaccagccggccgtatgtacacatcggcggcggcgcaacggtggtggtgggggttcctgcatcacgcacgtcacgggtcgcggacgcgggggctggtagctggcatgggcacgccgggcgacggcaggcagccgaagccgagcggcgacgtgggcgcgcggatcggcgagggcatcccgcggaggcggcgcatgtaggcggagatgggcgactccgcggtcatgcacaccgccgggagcggcgggagcggggagagcgccggcggggccgggggcaggatgggcggcggggccagcggcggcggccggatgcggtggaggcgggagggtatcgccgtcggcggcggaggcggcggcgccatgatgggaggcggtggcgccatgaggggggcgcgggcgcgggcggtggcgggagtgggcgctggctgcggcggcaggaggtgggacggcgagcctgtgagcttctgcacgacgtcgcggaagtcggacttgtcgatgttgtacacggggggctggggaggcgggtggtcggcagggatggaggaggcctgcggcggcggcggcggcggcggcgggagaggaggaggcgggcggggagccggcggcggcggggaaggcgctcgcatggtggaggcgggaacgggagcgggagaggcggaagacgactgcttggagatcttgtaggaggccttgttgagggacttgagcgaggagggtgctgaggaggcggagggaggaggcggctgctgctgctgtgggaggttggacttgtccgtgaccatggcgggggaggactgaggagacg

SEQ ID NO: 154043 - DNA, 1381 bp, Zea Mays
tttccaatcgccgaccctccaggggtcccagatcccttgctccgatcgccgtgcagcatttcaagtcaatccatcggggaagctagagatgcaggaaagccgttgggacatggatcatcaggtcgcgaggcttcggggcgagctgcgcaaggtgcgcgacgagcgagaccgcgcgcagcgcgcgctggaggtgaccgactggaaggcgctggcttcggccaatgaccgcgctgcgatagagacgctcgaggccgagctcaacgtgtcgcgggaatgcgagaaacggatgctcgactcgctggcaatgcagacgaagcagctggagctcaccaagatatcgctcgaggaagccaagctcgagattgcgtcgctgcaggagaccgtccagaggctcgaggccgccagaagccccgtcgccacgatgccggcgagaaaccggcgcgaccgcgacatgcagagggttcacggcgagctgcgggtggcgctggcggcggaggagaagagcaagaaggcgatggaggagttcgtgatagcgctcaaggaggtgaacgcggagctgcacacgacgaagcagcagctggcgcgcgcgcagcacgaggcggagtcggccaggctggacgccgaccgcctgcacatgtcggcgaaacgcaaggacgagaagctccgcgccctgtccgacgaggtggcgcggctccgggccgaagccgaagagtccttcaccgcgtggcggggcaaggaggacgggttcacggcgtgcatgaagtcaacggaggccgagctcgccgaggcgcggcacgagaacgcgcggctcctggagtcgcagcgctcctggcgggccgaggtcgccaagctacgggacatcctgaagcaggcggtgaaggacaccaatgtggcgaaggaggcgctggaggaggcaaggagcgagaacgccctgctcaagagcgtgctcggcgacaaggacaccgccgtgaagtgcacgaagcaggagctggagtgcctccggatcagcgaggccgccgcgcgcgatagcgtcaaggagctgcagagcatgctcgtggcgacgtcgtcgagccccacggccgctgccgcggctgcaaagctggacgcggaggagagccccacgccgcgcgtaagggtaggaccgccggggctggagaagtacccgtcggactccaagataaggccgccggccggaatcacgcggccgcggcggatgtccgagaccttcgagggttcggcgtacgacatctttggcacgatggacgagcagaagggtgacatgggcgtgttctcgtcgatgccgaggttgcccgcccggcggcgggtggttcttcgcaaggttggcagcttgttccggtggaagagcttcagtaacaaatag

SEQ ID NO: 154044 - DNA, 1134 bp, Zea Mays
atggccgcttgggtcagttgtttgcacctgtggcctctctctctctctctctctctctctctctctactccctctctcacacccgtcctgcagtcctgctcagcaaggaaggagatagggatcaccgccaactcgtttgtgcgtgcaactcggctcctgcttttccaagacccctgccgcagtctcacaatagaatcaccgccatttccgaatcccttccagagctcagctgccaagtgccggtcacagatgaagaggcaatccaagaggcccaccgccagccgtgactccccagaaacgggtacagtggacaagcagctggcgctcgcggagtccctaacggcgcggaagacggagcccgacgagctgggggagaagaagcggcgcctggcgccggaccaggtgcgcgcgctggagcgctgcttcgaggcggacaacaggctggacccggaccgcaaggcccgcgtcgcgcgcgacctcgcgctgaacccgcgccaggtcgccgtctggttccagaaccgccgcgcgcgctggaaggccaaggccctccaccgcgacttcgcggcgctgcgcgcgcgccacgacgcgctccgccgcgacaaggacgccctcgccgccgagataagggagctgaggcagaagctggcagagcccgcggctgtgaagacggaggcgacgggcagtgacacggcggaggcgcgcccgacgacgacgacgacggccggcgcgccggcaccgcccgcggggggctgcaaggacggctcgtcggacagcgactcgagcgtggtcctcaacgacgacgtggacgcgtcgccgtactccggcgcggcgttcgagcagccgggcgccttcgccgggttcggtgcgccgttcttggccgcatcggcggcggcggcgccgccaccgacgggctgctcgtctccccccgtgttcgagaccaagtggcagcacgggccgacgacgtacgctttcgaatcgtacaagagctgctgcgccggatacggcttcacggaggaatggctcgccagctcggacgtcgtcggcagcgacggcgcggccggcttcttctcggaggatcacgcctccagcctcaactttagctggtgtgcgagtggcgcccaggactgggagtga

SEQ ID NO: 154045 - DNA, 558 bp, Zea Mays
atgcggcgatcagagtgggaggaccggtgcaatcggcacccggaccaccgcacgtccaaaggcgtctgcccgtactgcctccgcgaccacctcgcgcgcctctccgcctccgcctcggcggcccccaccaccaggcgcgcctcctcatcctcttcctcggcgaccacatccgcgtgctcctccggcggctcgtccccgccgcgccaccgcgccgcgctctccgcggacgtcagctcggtccacgttgtcgccggctcctccttcgccgacgccgcctcctcctccttcgccgacgccgccgccttctcgcagccgctgatgccgacctctgctagtaagaagccgccgccaacggcggcggcggcagcggcagggaggcgagacgaggcggcgcaaccggcgagggggaaggcggaggtgaggaggaagaagatcgggaggttcctgtccaggctcgtcggggcggagaagcggcggcacaccggggacggcggcggcgagctcgtccactccaaaaccatgaaggagaagacggcgttcaagtgggtgttcttctga

SEQ ID NO: 154046 - DNA, 2549 bp, Zea Mays
ttgcgcgcccgcgtaattccggttccttcaaaacacctctgacctctctctctctctcttcccatttcccaatctccagatacaaggccagcagatctctctccggcgcccggaggtggcattggcaatggcccgatggcgtgtcgcgccaccactcgccgtcctgctcctcgtgctcctgtccaccgcggcgcgaccgtctgtggctcagccgagcaacaacaacagcacgagcagccaacaccactcccgaaccaccgccggcggcgggttcaccccaaccacagtgatcgtgctggtggcactcatctccgccctcgtcgtgctcaccctcttctccatctacatcaaccgctgcgcgccgacccgccctgctcccccgcgccggccgtcccgctacgccccaccggaccaccagcaccaggccggagggagcgccgcccacccggacccccgcggtggcggcgcgcgcgccggcctcgacaaggaggtcgtcgagtcgttccccaccgcggtgtacggcgacgtgaaggcgcgcgtggcggccagatcggggtccgggtcgggcccgctcgagtgcgccgtgtgcctcgccgcgttcgaggaccaggacgagctccgggtgctccccgcctgctgccacgtcttccacccggactgcatcgacccttggctcgccggcgccgtcacgtgcccgctctgccgcgccgacctcacggccgccgccgcgccttactaccctcccgcgtcctctgacggctccgggtccgggtccaacctggcggcgcgcccgcacgaagcggtgcgggaggagacggacgacgaggaggagcggggcgaggcgcgcctcgtcgccgcttgcacgcccgagtccgtcgtcgccagcctcggcgcagcgcccccctaccacgagttccactaccggcggacgcagtccgccatggacgtgcccgaccggcacacgctgcggctgccggagcacgtgatgaaggagctcaccgcggtgcgcgggcaccggcgggccgcgagcctcgccgcataccccggcgccgcggagcggacgcccgggtggctggcgtcgatctggcggtccgtgtcgtggcagcggccgagccggacggatccggacgccgtcgacgacagcggcggcagcaagcgcgtcgtcccgatcaacggggcaccggcggaaaggcccagcggcgggtcaggggatgatgctacggacgacatggagaagcctgaccatgacgccttgttaaaccaggtctgatcgatttgcatttaccttcgccatgcgaggacgatggtcattgatcggtgtcgtctaagtgctgtgctgcttccctccgggaaaaatttgcgattctagtttggtttctagctaaacgttttaaacctgaactaaaaaattatataaaggagtatacccgacgttttcgtcttagacattagaaattatagaactgcatttttttcagacggagggaaaagtaacgtggatggtatggtagaaagaatcagcatgtcggatgctttccatcccggtactagtacattgtttttttaatctggatatgaatgcctcaagaaattggtcactgtaataagatagtaaccgcggcccgcggttacttggaagtccttgattgcctccagctgtggcatgaagttgtacagtagactccacggtaggcatgacatgagacagtacgagtgtacgactgcaaaaaaaaaaaaacaacgacgccggttgccggagctattttttttctttttattctcttttctttttttggccggtgcccagtggtcagagataactagtcgaagaatgtattccgtaaaaaaaacaatggccgccatagttgcatgacggcgacccaaagtaagcaaggtcatcaacaaggactagacgtctaccccggcctagaagacgaaggtacaagcaaaagaccatcagtgcgacgccactctaagccaggcctctccttcgtcttaaagcggacccgggcgatctgtccctgattcctgagcaccttgcattgcttttccacaggggcaagatctgatttgacgaaactagcatacatgcagaacctgcgacatcttgtgcatgcgcgtgctcgcgagtcgcgatcatggcctgcaaacgacaccgcgtccaaaccgttagctctcggcaagcggcaagcagaagaacatctggtttatctaatgagcaacaattttgccggcagtgtgtgtgtgtgtctgacctccttttcccagtcgcagcggactgtcataatggccaggatgagcgtggcaataaacgagggttccgcccagattccctgcaaaggttccgtgcggcgaatttaatttcaggcggcgaggcaacgctggagctaccagactgcccatgcatggtcaagaggaaaataaacgagggcacagtacgcgacgtaccagcacgccaacgttgaagagccgtccgagcagaatgcccatggggatgccgatgttgacgtaggccaccatggattgccagccggagccgacggccacac

SEQ ID NO: 154047 - DNA, 2476 bp, Zea Mays
aggcgaacacaagtacacctcacacccactccccgcaccccagtgaccccaccacccagcccgccgcgcagagcagcgcagcgcagcgcaggcgccctccaactccgggctccgcaaccgctgctccccctccctccctccctccagctcggcctgcctcagcccgcgccgcgcgatgtcagaggaggacgaggaccagccgccgcccaagcggccgtgcgcgtcgccgcccgcggaccaggtgctcgacaacgtgctcgagacggtgctccagttcctggacgccccgcgggaccggagcgccgcctcgctggtctgccgctcctggcaccgcgccgagtccgccacccgcgactccgtcgccgtccgcaacctcctggccgcctcggccacccgcgccgcgcgccgcttccccaacgcgcggagcctcctcctcaagggccgcccgcgcttcgccgacttcaacctcctcccgcacggctgggacgcctccgccttccgcccctgggccgccgccgtcgccgccgggtccttccccgcgctcacctcgctctacctcaagcgcatccccgtcaccgacgctgacctcgacctcctctcccgcccgctcccggcgtcattccgcgacctcacactgcacctctgcgacggcttcacctcgcgcgggctcgcctccatcgcctcccattgcaggggcctgcgagtgctcgacgtggtggagtgcgacatggccgaggagcaggaggtcgtggactgggtggccgcgttcccgccggagcccaccaacctggagtcgctctcgttcgagtgctacgagccgcccgtggccttcgccacgctcgaggcgctcgtggcgcggtccccgcgcctcagccgcctgggggtcaacctgcacgtctcgctcggccagctgcgccgcctcatggcgcacgccccgcgcttgtcgcacctgggcaccgggtcgttccgcccggcggaaggcggcgagggggaggcagagttcggggaggttgtctctgcattcgtgtccgctgggcgagcgcgcacgcttgtttctctctccggcttccgtgacctcgcgcaagagtacctgccaatcatcgacgtggtgtgctcccacttgaagagccttgacttaagctacgccgcggtcaccccgaatcagatcctgatgttcatcgggcaatgctacaaccttgagacgctatgggtacttgactcggtgcgcgacgaagggctcgacgccgtggggatttactgcaagaagctccagactcttcgcgtgctcccattggatgcgcatgaggatgccgacgagttggtatcggaggttggccttactgccatcgcacggggctgccctgctctccgttcaatactatatttttgccagacaatgaccaacgctgctgttgtcgacatgtcgcgccactgcccggagctcaaggtattccggttatgtataatgggacgacaccagccggaccatgcgactgaggagcccatggatgaaggattcggtgccattgttaagaactgtaggaagcttaccaggctatccacgtcggggcaacttactgaccgggcgtttgagtacattggcaggcatggcaagtccctgcggacgctctctgtagcgtttgctggaaacagcgacgtggcgctgcaatacatcctccggggctgctcaaagctcgagaagctggagataagggactgccctttcggtgatgccggcctcctctctgggatgcaccagttctataacatgcggttcgtctggatgtcaggctgcaacctgaccctgcgggggtgcaaggaggtggctcgggggctaccacgaatggtggtggagttgataaatggccagcctgatgagagcgagaggaaggaaagtgtggacatcttatacatgtatcggtcactcgatggtccaagggaagatgtaccaccatttgtgaagatcctgtgaagctgcttctggtagtatcatgctgctgcccttgatatgctagttgagtgcagatcatttaacggaatatatgtaagttgtttgggctgcagatatggtacatttttttatctcttcaaattcttaggaggatttccaaagcgctgtaatggagcggcgggcagggtgttaaattgacgttgttgttctagtaggagttcatcagtgtatgtaaagcgtacgttccacggcgagaccataaaagcgcggcagagcaggcttcttggagggggcctcatggctgcctcagttttgtttgctgctctggaggggctccggttctaggactgtctttcagtgccggtgcaatgaccatgttttccctcataattttcgaggtgaaccttgttgtatatcatattagattcattagaacttgcccttctgccgctgctgcgtgtcgtctgttccatttttcgcgttctggaactatgagacgagaaaacctcctgatccattgttaaa

SEQ ID NO: 154048 - DNA, 233 bp, Zea Mays
caaagctcattcacatttccattcccggctatcacatgtctttctcattctccctcccacaaaatttattctcattcccacgtgcatcccacgcctgccccattccgtgttctgtcattcccattccgtcctcactgtaaagctcattcccattcccaaagctcattcacatttccattcccagctatcttcccacgtgcatcccacgcctagctaaaattaaattaaaaaaa

SEQ ID NO: 154049 - DNA, 726 bp, Zea Mays
aggtgatggtacggtgccatgatctgtctctctctgtagctcatcgctctcaaggttgttgggcacatgcatgatgcatcgcgagatattttttgtgcgattttgaacacgctctgtccaccaccttttgtattgaaccatccaatgcagccactgaatcttatcctagtagcacaagcacaaggtgatcatacatgaactgcagacagggtgcatctatccacacaaaaggcacatgatcgcagaattatgattgcctacatgccaagataagattctgctgttgtggttcgccgaatgccatccggccaattcaccttcttataaactgatttcagggttcagtgcggaatccatgcaaaaggttgagaaatgcaaggagcttaacacaactgcgagagatagacgacgatcctccatctgtccaactgcgtcgtcctggaggtgaatggtcaaggtgccaaactttgaaagctagcgtcgtcctggagttacacgtagtcaagcaccgaacgttaggattgggttctgaagaatatcacgtcgtgcagccatgcaggcatggacacctgtaagggacgaagcaagtgtacgtaactgtgtaagtgacagactgactatagagcaagatgtcaaaagctcaaagaaaatggttttgctactcaaaaaccatgtgtcctttcatggattaaggttaaagacgattaataattgtcattgtttact

SEQ ID NO: 154050 - DNA, 873 bp, Zea Mays
ttatattccaaattcaacagttttttttttaaatctttgagaatgtgcaggagaaccacgcatttttgcactcatgggagtaatttctaaaactgtcaggaatagtgcttgggctaagaaagccaaagcagctagcgcacgtatctgtccccgattcgattcacaaataaaagcgcccaaataaagtgattaaacccccgatgcgcacgatcacaagcagatatagatggggattttttttaaatatattcataagtagcgtaatcgacgctactgcgagtgcagatcgaattagggatcggccgcaggtacggacacgaacgacgacgacgacgacgcgcactaaggtaaaaaaagaactgattatagggtggatggatatggatgcacgtacgtgtgctgggagcggacggagcaggcggagcagcggaagagctcgggcaggaggccgcggtcgccgcacatgcagcagacggcggcacctggcggcgagccgcgcccgccggcagtggggcctggcggagacgacgccttgccgctccccatgaagcaatcgatcgagttctctcaggagacgggtgcgtggggcatccgtaggtgccgcgtgctgtcgaatcggccggatccaacccacagcggcacagccacagggctgcgtctcgatcggtcgctgctggctgcttgattcctcgtcgtcgatcctggtcctggataggtgatgagaaggtggtggtgccaaacttgcggggtggatgtcctggggagggtggctggacgctggaggcagcaactaaaaaggtggtggtggtggtgcctgactgatgcggggtcttctccagtcctcacacatcgcaaggcgtaggtagatcttgc

SEQ ID NO: 154051 - DNA, 907 bp, Zea Mays
agggtttcaaggggaaggttggctaagacattgatataaccagtaaattggttgttctgcaaatacctgagaagaaaaggaatgggttaatgcaaaacattctaatgaggcatgtgtaggagatgaaagtaaacaggcatgcgtcatttcatacattcttttcaggcttgacaatccagtgaaactttgtggtagatcaccagtaagagaattaaaggagagatccctctctgacaaactataaaggttggaaaatacatcagtgatgtttccttgtagttggttatgattaaggtttaaatacttaagattaggcatcgtcgaaattgagtagggtaaatttccaccaaattgatttcctgcaagattgcttttctcaagcttcacattgggaagattgtactgtatttggcctccaccaccaaggttattttggctcaagtcactgcatcaaaagttgatttagggtgcctattaactgaagcctcacaatggacaagtttgagtgaaatttataattggggactcacagctcaactaatgaacccaagttattcatgttgtaggccagatttccggtgagtgacaagtttggtaataggctacagcaacaaacaaagagaaatatgatgagagggagtaagaaaagaagctgtggtagcaggtggttgcaactatactgcatcacaaggctcacattttagtgacccctgatcctgagcaagtaatgccctgccatgactggccacaaggatcaccgccattcgcctgccaagctctgagctgcccaggagaattcagactggtgaagagcgtattgaggacattaactgcatgtgagagtgcaactaattagaacagtgctagggaatgtgtcatcacaaatctcagttcatttgcaaactcg

SEQ ID NO: 154052 - DNA, 583 bp, Zea Mays
ttccattccacggtgctgcctctctgtctactctcctctggtcagcatcatggccggcctggctgccacggccgtcggcctcgtcacccccggggcgcccgcgcacgacgccgtcatggagtacctcctgccggctgccgtcccgctgctgctcctcggcgccgacctccgccacgtcgtccgcaccaccggcgacctcctcaagacattcctgctcggatctgagcccaagacggcgacggcgagtccgcagaaggacggcgagcggctgtcggtgctgaacggtggcgcggcgatcgctttgtccttcatcatctgcaaggccgcgcggctggggctccagggcggcacgctgccctgcatcacggcgctggccgtgttcctggcactgaggccaacagatcagccgttctgatggctccagcatgtgtgtcctcccgtttgctctcagagcaggcaccctcatgtttttcttcggaacagtgcccaacgccatcaccggggattggaataggaaccacatttgcttgtggctgccctgcatctttgagcaatgcagtaggttcctcgttctctgggagca

SEQ ID NO: 154053 - DNA, 1389 bp, Zea Mays
acaaatagggttttatcattttgggaaggagcagatcaggatccattaacacccctacgtacgcctttcctctggaaacccttctctcgcctgcctctcccccgccgcgccgccacttcccctctcccgtcaactccggcttccgcgcgaggtcgagctagcgtttggagttctcgagacctgctgtgatggcgacagagcaagcggcggagaactacacggtggaggacctcgtggccctgaacccctacaaccccgacatcctcaacgacctcgagaagttcgtcaatgagcaggtctcatctcagacatataacttggatgcaaatctcagccttcttcgcttgtaccagtttgagccagaaaggatgagcatacagattgtggcccacatactgattaaggctctcatggcaatgccagcccctgacttcagtttgtgcttattcttaatccctgaacatgtggtactaaaaattacatcctgcccttttagttgagttgtatcagatttgctgtgtagacctggaatacacagtatttaattatggctcatgctcggtgaacgtgcacaatatccaataattatagatatttggtaaacaagcccccacacccatgtttcaatgtgatttgaaattttgcacgaaacagactagccttgcaaatgccacagattcagagattccataaaagagctgtcccgttatctttacattttttggctacattattttgttggtatgttcagtttgcttgtctgtctctttgtttcagcaaatggaggagcaattcaaggtattgatagttctttctcactacctagagactgctaggttcagtcaattttgggatgaagcagcaaagaaccgccacatatcggaagcagtgccaggtttcgaacaagcaatccaatcctatgcgattcatgtactttccttgacataccagaaagttccaaggcctattcttgtagaggcaatcaacatcgaaggtctcgcgttggacaagtttcttgagtaccatgccgcgaactcaggttgggtgattgagaagggtgggcagtctcaagtgattgttcttccgcgtaatgagttcaatcacccagagctcaagaagaacacagccgatatccttccgtttgaacacgtaacacgcatattccctgtccttggctgattcaggcgtgctgagagatctatacaaaactcagcgagtgaagcttctcttagtcattgcatcttcagtttgtagtgtaccctattgagattatctcggtataccagtcctttttatgccggagttggtttctgcaacctatggttattgttattactataacgaaatgctcagatatgagattggtcttgtccttcgaaggaggctgtc

SEQ ID NO: 154054 - DNA, 1983 bp, Zea Mays
acaaatagggttttatcattttgggaaggagcagatcaggatccattaacacccctacgtacgcctttcctctggaaacccttctctcgcctgcctctcccccgccgcgccgccacttcccctctcccgtcaactccggcttccgcgcgaggtcgagctagcgtttggagttctcgagacctgctgtgatggcgacagagcaagcggcggagaactacacggtggaggacctcgtggccctgaacccctacaaccccgacatcctcaacgacctcgagaagttcgtcaatgagcaggtctcatctcagacatataacttggatgcaaatctcagccttcttcgcttgtaccaggttacagcggatctctagcgacatcatttttacaagtattgtggctccattcatatgttttcttagttactggtttccttttgcagtttgagccagaaaggatgagcatacagattgtggcccacatactgattaaggctctcatggcaatgccagcccctgacttcagtttgtgcttattcttaatccctgaacatgtggtactaaaaattacatcctgcccttttagttgagttgtatcagatttgctgtgtagacctggaatacacagtatttaattatggctcatgctcggtgaacgtgcacaatatccaataattatagatatttggtaaacaagcccccacacccatgtttcaatgtgatttgaaattttgcacgaaacagactagccttgcaaatgccacagattcagagattccataaaagagctgtcccgttatctttacattttttggctacattattttgttggtatgttcagtttgcttgtctgtctctttgtttcagcaaatggaggagcaattcaaggtattgatagttctttctcactacctagagactgctaggttcagtcaattttgggatgaagcagcaaagaaccgccacatatcggaagcagtgccaggtaaatatatttgttgagccatcgagtttgagatatgcatagtctgttacattttataatgtgagcttgtcgcaccaatcttagtcttaatagcaaaaacaattcttatgagtgttaaagttctaatgttcacgctggatttctagtagaaatttgaaatgatgttccacgttctagtcgtcaggccttagttgagtgcaagtgctttttgtcatcagcgttgactgaagtgttacattgtgtattcaggccgaagtaaattattttgtgtgcctgccttgttctgtcacttggtgtttggtatcttttattctcctataatagcatgaagttttcttttgttaacctcatttacctgggttctttcaatgagatgggaagaacgcctgagcgctagaattttatgtggatttattcagacataatcagcagctggatgatattttaggcctgatgatgtgcattatgacctatgtctttatttgctctgactctgcacattgtgcaggtttcgaacaagcaatccaatcctatgcgattcatgtactttccttgacataccagaaagttccaaggcctattcttgtagaggcaatcaacatcgaaggtctcgcgttggacaagtttcttgagtaccatgccgcgaactcaggttgggtgattgagaagggtgggcagtctcaagtgattgttcttccgcgtaatgagttcaatcacccagagctcaagaagaacacagccgatatccttccgtttgaacacgtaacacgcatattccctgtccttggctgattcaggcgtgctgagagatctatacaaaactcagcgagtgaagcttctcttagtcattgcatcttcagtttgtagtgtaccctattgagattatctcggtataccagtcctttttatgccggagttggtttctgcaacctatggttattgttattactataacgaaatgctcagatatgagattggtcttgtccttcgaaggaggctgtc

SEQ ID NO: 154055 - DNA, 1149 bp, Zea Mays
acaaatagggttttatcattttgggaaggagcagatcaggatccattaacacccctacgtacgcctttcctctggaaacccttctctcgcctgcctctcccccgccgcgccgccacttcccctctcccgtcaactccggcttccgcgcgaggtcgagctagcgtttggagttctcgagacctgctgtgatggcgacagagcaagcggcggagaactacacggtggaggacctcgtggccctgaacccctacaaccccgacatcctcaacgacctcgagaagttcgtcaatgagcaggtctcatctcagacatataacttggatgcaaatctcagccttcttcgcttgtaccagtttgagccagaaaggatgagcatacagattgtggcccacatactgattaaggctctcatggcaatgccagcccctgacttcagtttgtgcttattcttaatccctgaacatgtgcaaatggaggagcaattcaaggtattgatagttctttctcactacctagagactgctaggttcagtcaattttgggatgaagcagcaaagaaccgccacatatcggaagcagtgccaggtttcgaacaagcaatccaatcctatgcgattcatgtactttccttgacataccagaaagttccaaggcctattcttgtagaggcaatcaacatcgaaggtctcgcgttggacaagtttcttgagtaccatgccgcgaactcaggttgggtgattgagaagggtgggcagtctcaagtgattgttcttccgcgtaatgagttcaatcacccagagctcaagaagaacacagccgatatccttccgtttgaacacgtaacacgcatattccctgtccttggctgattcaggcgtgctgagagatctatacaaaactcagcgagtgaagcttctcttagtcattgcatcttcagtttgtagtgtaccctattgagattatctcggtataccagtcctttttatgccggagttggtttctgcaacctatggttattgttattactataacgaaatgctcagatatgagattggtcttgtccttcgaaggaggctgtcaggtccattgtttgagaacgtgtgttgtgaatggtgtgtgctgggaatgagtctcattagctatcgccta

SEQ ID NO: 154056 - DNA, 1000 bp, Zea Mays
cattttgggaaggagcagatcaggatccattaacacccctacgtacgcctttcctctggaaacccttctctcgcctgcctctcccccgccgcgccgccacttcccctctcccgtcaactccggcttccgcgcgaggtcgagctagcgtttggagttctcgagacctgctgtgatggcgacagagcaagcggcggagaactacacggtggaggacctcgtggccctgaacccctacaaccccgacatcctcaacgacctcgagaagttcgtcaatgagcaggtctcatctcagacatataacttggatgcaaatctcagccttcttcgcttgtaccagtttgagccagaaaggatgagcatacagattgtggcccacatactgattaagcaaatggaggagcaattcaaggtattgatagttctttctcactacctagagactgctaggttcagtcaattttgggatgaagcagcaaagaaccgccacatatcggaagcagtgccaggtttcgaacaagcaatccaatcctatgcgattcatgtactttccttgacataccagaaagttccaaggcctattcttgtagaggcaatcaacatcgaaggtctcgcgttggacaagtttcttgagtaccatgccgcgaactcaggttgggtgattgagaagggtgggcagtctcaagtgattgttcttccgcgtaatgagttcaatcacccagagctcaagaagaacacagccgatatccttccgtttgaacacgtaacacgcatattccctgtccttggctgattcaggcgtgctgagagatctatacaaaactcagcgagtgaagcttctcttagtcattgcatcttcagtttgtagtgtaccctattgagattatctcggtataccagtcctttttatgccggagttggtttctgcaacctatggttattgttattactataacgaaatgctcagatatgagattggtcttgtccttcgaaggaggctgtc

SEQ ID NO: 154057 - DNA, 936 bp, Zea Mays
cattttgggaaggagcagatcaggatccattaacacccctacgtacgcctttcctctggaaacccttctctcgcctgcctctcccccgccgcgccgccacttcccctctcccgtcaactccggcttccgcgcgaggtcgagctagcgtttggagttctcgagacctgctgtgatggcgacagagcaagcggcggagaactacacggtggaggacctcgtggccctgaacccctacaaccccgacatcctcaacgacctcgagaagttcgtcaatgagcagcaaatggaggagcaattcaaggtattgatagttctttctcactacctagagactgctaggttcagtcaattttgggatgaagcagcaaagaaccgccacatatcggaagcagtgccaggtttcgaacaagcaatccaatcctatgcgattcatgtactttccttgacataccagaaagttccaaggcctattcttgtagaggcaatcaacatcgaaggtctcgcgttggacaagtttcttgagtaccatgccgcgaactcaggttgggtgattgagaagggtgggcagtctcaagtgattgttcttccgcgtaatgagttcaatcacccagagctcaagaagaacacagccgatatccttccgtttgaacacgtaacacgcatattccctgtccttggctgattcaggcgtgctgagagatctatacaaaactcagcgagtgaagcttctcttagtcattgcatcttcagtttgtagtgtaccctattgagattatctcggtataccagtcctttttatgccggagttggtttctgcaacctatggttattgttattactataacgaaatgctcagatatgagattggtcttgtccttcgaaggaggctgtcaggtccattgtttgagaacgtgtgttgtgaatggtgtgtgctgg

SEQ ID NO: 154058 - DNA, 1102 bp, Zea Mays
ttttgggaaggagcagatcaggatccattaacacccctacgtacgcctttcctctggaaacccttctctcgcctgcctctcccccgccgcgccgccacttcccctctcccgtcaactccggcttccgcgcgaggtcgagctagcgtttggagttctcgagacctgctgtgatggcgacagagcaagcggcggagaactacacggtggaggacctcgtggccctgaacccctacaaccccgacatcctcaacgacctcgagaagttcgtcaatgagcaggtctcatctcagacatataacttggatgcaaatctcagccttcttcgcttgtaccagtttgagccagaaaggatgagcatacagattgtggcccacatactgattaaggctctcatggcaatgccagcccctgacttcagtttgtgcttattcttaatccctgaacatgtgcaaatggaggagcaattcaaggtattgatagttctttctcactacctagagactgctaggttcagtcaattttgggatgaagcagcaaagaaccgccacatatcggaagcagtgccaggtttcgaacaagcaatccaatcctatgcgattcatgtactttccttgacataccagaaagttccaaggcctattcttgtagaggcaatcaacatcgaaggtctcgcgttggacaagtttcttgagtaccatgccgcgaactcaggttgggtgattgagaagggtgggcagtctcaagtgattgttcttccgcgtaatgagttcaatcacccagagctcaagaagaacacagccgatatccttccgtttgaacacgtaacacgcatattccctgtccttggctgattcaggcgtgctgagagatctatacaaaactcagcgagtgaagcttctcttagtcattgcatcttcagtttgtagtgtaccctattgagattatctcggtataccagtcctttttatgccggagttggtttctgcaacctatggttattgttattactataacgaaatgctcagatatgagattggtcttgtccttcgaaggaggctgtcaggtccattgtttgagaaccataataataaaaatacataac

SEQ ID NO: 154059 - DNA, 1423 bp, Zea Mays
ccctacgtacgcctttcctctggaaacccttctctcgcctgcctctcccccgccgcgccgccacttcccctctcccgtcaactccggcttccgcgcgaggtcgagctagcgtttggagttctcgagacctgctgtgatggcgacagagcaagcggcggagaactacacggtggaggacctcgtggccctgaacccctacaaccccgacatcctcaacgacctcgagaagttcgtcaatgagcaggtctcatctcagacatataacttggatgcaaatctcagccttcttcgcttgtaccaggttacagcggatctctagcgacatcatttttacaagtattgtggctccattcatatgttttcttagttactggtttccttttgcagtttgagccagaaaggatgagcatacagattgtggcccacatactgattaaggctctcatggcaatgccagcccctgacttcagtttgtgcttattcttaatccctgaacatgtggtactaaaaattacatcctgcccttttagttgagttgtatcagatttgctgtgtagacctggaatacacagtatttaattatggctcatgctcggtgaacgtgcacaatatccaataattatagatatttggtaaacaagcccccacacccatgtttcaatgtgatttgaaattttgcacgaaacagactagccttgcaaatgccacagattcagagattccataaaagagctgtcccgttatctttacattttttggctacattattttgttggtatgttcagtttgcttgtctgtctctttgtttcagcaaatggaggagcaattcaaggtattgatagttctttctcactacctagagactgctaggttcagtcaattttgggatgaagcagcaaagaaccgccacatatcggaagcagtgccaggtttcgaacaagcaatccaatcctatgcgattcatgtactttccttgacataccagaaagttccaaggcctattcttgtagaggcaatcaacatcgaaggtctcgcgttggacaagtttcttgagtaccatgccgcgaactcaggttgggtgattgagaagggtgggcagtctcaagtgattgttcttccgcgtaatgagttcaatcacccagagctcaagaagaacacagccgatatccttccgtttgaacacgtaacacgcatattccctgtccttggctgattcaggcgtgctgagagatctatacaaaactcagcgagtgaagcttctcttagtcattgcatcttcagtttgtagtgtaccctattgagattatctcggtataccagtcctttttatgccggagttggtttctgcaacctatggttattgttattactataacgaaatgctcagatatgagattggtcttgtccttcgaaggaggctgtc

SEQ ID NO: 154060 - DNA, 291 bp, Zea Mays
atggcgcagcacctccaaaggaaagagcagagggaggcagatgcagtggagaaaaggcgcagggagtcctggacgccatggccagccgatggtgtggccgagcaggagggggtgctggccatggaaaggctgctggtggccatggaagggctgctggcggccatggatcaaggagcaaaggaggtcgcggatccaggcgtccaggagaggtcgccggacctgggacctagcgccgagcaggaagaccaaggaatggagctcgggcgccatggagaagatcgcgtggcctaa

SEQ ID NO: 154061 - DNA, 1065 bp, Zea Mays
ctctcactatcctttctcgatcttgttccttgcaaccaccgtcggtcgcgccccacgcccgccccaccacccgcccgccgcgcccgcccccacccaccgtgggctttccccgcaccgccgacgcccccatccgccagtcggccgccgcgcccccgcccgccgtgcccctcaccgccccgccccaccgcgcccctcgtcggttggtgctcgtggccatggcggtggcgaaggtcaaatcggtcgccgtctccgttagtcacaagtgtcggaatatcttggccaccggttgggaagcgcacctcaacactgtcaaggctgacaacaagggaagcaagaatgagatttacacgtcgagggtgcactacatgatccataagggcacaccctacttgattgtccccgagaacgacatgcacaacattaacattataatcgatgagcgggggtctcttgcagtattcagtctgattcgtgaccgagttgcgagcttattgaagccatcgaagacacctcctcgtgttggtatgactggtgatgttctgcgcctgaaagactcaaagtgcttatatggaggtgctccaaaaggccctcagctaagagagttggagcgtggtgttgacattcttgtcgcaactcctaggagattaaatgacattttggaaatcaatagagtgagcctgcaccaagtatcatatcttgtccttgatgaagctgatcgtatgctcaacaaatatcatttgtacaagtatattagacccctccagctaccttgccgacgcatgaacgagaaaacgggttagactttgtcgaagccctcttcgctagtggaggtaccgaccatcactcgtcactgtaacccgatggtgatcggcgatcgtgagcttccatgttattgtgttctgatacttgagacttttattatgactatgtataagatattgtctcttattagtactggatgagatgtgtcttattatgactatggatgagacttttgtgatgtaattgatgagactatggatttaaatattgttatgtgattgtgtgtgagatgttttatgtgaa

SEQ ID NO: 154062 - DNA, 1114 bp, Zea Mays
aaggtgatgccgactaatctttatgtattgtgcttaaggttccaattattgaagatagcctgaagcaaactatgcataatacttcttcctttgagtatccatctgtgttcctataatttaaacaccagtatgctcatgcccacctgcagggtgttgactccaccttctagtgcctccttatccagctctccatgtagacatgtccaatatttctccagtgcctttaaataacctaatgagggcatgtaaacattttgttatacaatgactcatttatgtcctacagatttgttatgcccatatgccagttattggaaaaacctatcatgagcagcaatactgattaaaataataatcaactttgctattttcatgtgttgcaaaataagtagaacatatcattgaacaacatgttgtcatttttttagacatttttaagttgagtatcaacatggctcttgtttaaattattgcgctcttactcaggatgagattgaagctgctcgaatggcagcgatcaacaaggaaattaagcgtgtattgactgaagtcctttcgaaggctgggcaaaaggttcgtgaataaagtgaaaggcggcgagcctgcgacagcaggaacgtgagcaaattgtaatgaagcgtaagcatgaaatgggaattggcgacaaaaattcaagatgaagcaatcaagtttggcagatcttcaagaatatattctacttgcttatatggaggtgctccaaaaggccctcagctaagagagttggagcgtggtgttgacattcttgtcgcaactcctaggagattaaatgacattttggaaatcaatagagtgagcctgcaccaagtatcatatcttgtccttgatgaagctgatcgtatgctcaacaaatatcatttgtacaagtatattagacccctccagctaccttgccgacgcatgaacgagaaaacgggttagactttgtcgaagccctcttcgctagtggaggtaccgaccatcactcgtcactgtaacccgatggtgatcggcgatcgtgagcttccatgttattgtgttctgatacttgagacttttattatgactatgtataagatattgtctcttattagta

SEQ ID NO: 154063 - DNA, 468 bp, Zea Mays
atggaaacgctacggggagaagaaactgaagccgggagctgcgcgggaggaagccaagaaaggcaccagcagttgtctgaagaaacttacatgtgcagcgtagcgaaggcccctgttgaggaatcacgcctagctacagcgaggagaaacggtgtggttcctggagcaggtgagcggcacggcacagcagcggagcaagagcacgctctctccgtcgctgccgccgccgggcgagaagcgccgcacagggtgatgctgaaggaattgggcgtttcaaggatccccagccagagccaggctctgacatctcaccgcacggggtgtcttgcaccggcaagtgacgaaatgtcgacttcgaccgaaagcgactctttggcttccctgttctcgcctcgatctcaagtaggagtaacacgggccgggcacggcagcatggaagccaagcatgacatgattcattctgtttag

SEQ ID NO: 154064 - DNA, 147 bp, Zea Mays
aggggaagggtacgagcagcttcggcaagcgccggaacaagacgcacacgctctgcatccgctgcggccgccgcagcttcctcctccagaagagcacctgctcctcctgcggttacaccgccgcccgcatccgcaagtgtaagatcc

SEQ ID NO: 154065 - DNA, 981 bp, Zea Mays
ctttatattcttacagcagaagattatctgtgttcagccaaatggacataattagtgctgttttgcaaaagcattttggattttccagtctcaaagcattccaaaaggaagtcttggatgcttggtttgctcacggggattgtgttctcctagcagccacaaggttttctataatgctcctctttatcttctgtaatttattacaactgctgatgtgactttgctttttatatgggctgtaagtttcagtaatattttttcataacttctatcattattgaatacttatattttgtatccttttttcgctgaaccttcttgccttatgtttgaacatgcaacattttgattggggtagaaggtaccaaaggaaatgagcaaaacatatcatacagtctcagatgctgcaggatcacatgaaaattattgaagacgacggtccaggtgcagccttctatgccagtgctaaggccttgactaatggaaatcacactttctatgtgagcaaactgatacagaggttggctagattaagtaaatatgatacaatgtatcacctgcacagggacctgtcaagcaacaacctcaatggataaggtatattaaatagtaatgctccttccatttcataatgtcattacttcttcagcatcatgggagaaaatcttactgtcagggttcagaggatgttgtacgtaacttttaatgaagagctttgctggtgttgcgacaaagatacatgccaagagcagtatggtcggaggtgaagcagtgagtaacatctgcgctatagtggcattcaacgttcaaagcaagaaatgtatttggtttaattattgcaagcagtgatctgaaatatgtaaattatctttatatggtctttgcaagggaacacattttctggctctataccatcagtgattagcctatacaaattttattgaaagaaaaactaaaggaatgttttttattgctcttgca

SEQ ID NO: 154066 - DNA, 1027 bp, Zea Mays
ccacggtccatccatcgacgacgagtcacacgagtcacggctcgtgcgtgcgtgcgtacgtacgcagcccagggacaccgaccgccgccgccgcccgcagctcctcctcctcctcctccgaccccctctcaaccgcacgtacacgtcctcgctccatggcgggcatgcccacggaaagcgtgacccggcgcttcgccgccgcgtgcggcgtgctcagccagtacgtccggacgaccggcgcgcccgcgatgacgccgccgccgccgttcctgaagccagccgccgcccaggagacgacggtcgcgccgcgcacgcagcagctgaccatcttctacggcgggagggtggtggtgctggacgcctgcccggccgacaaggcggacgagctgatccgcctcgccgcctcggcggcggccgcgcagggcccgctgcagcagccgccggaggagcaggcgctggtggacatgcccatcgcccggaaggcctcgctgcggcgcttcctcgccaagcgcaaggaccggtggtcctccgccagctctacggcctatgacgaccgccgccaggacgacgacgacgacgacgaggcggaggaggaggaggagccgccggcgcccaagaaaggcaagatggcggcggcggcgcgcgaggacccttcttcctcttcctggctcgcgctcggcagcatgtgctccatgcacggccgctgatgagggagccagcggtggttattagtagtgcagacaagagctcgggcgcccgcccggccatgggatgggatgggaggcgttgcagcagcaatttatgtgctacctacgtactagtatttattataattgttattactaacaacaacgactggtagtatcgatcagagaccgacgctattcgatcgttggttcgtttcattgtccttccttgctagctggtggtgtatcgaccatctaaatctaacaggacacgtggacctggacggcaagagatgtccagtccagcagtgtggaacgtttgttgctttgtctatcattaa

SEQ ID NO: 154067 - DNA, 2112 bp, Zea Mays
gttcctggcttgggccgaacaaccccgtattgggctaccgctgcagcggttcattttcaccacgcgtgcgctctctctgtctgcgacgactgggctacgccgccgccgccgtcctccgtctggtgccgaggtcttcgttggacccttcgcccgcgactagcgtccgccaggtgccaggttttcccgctcgcaccatctctcttccattcctgatgctgaaggcgatggcgacggagaggaggcgcgcgtcagtcgtggtactgggcgacatcggccgcagcccgcggatgcaataccactccctctcgctcgctaaccaggccagtatggaagtggacattgttgcaaatggaggaagtgatcctcacttgtcactgagagagaatccatcaattcacatccacgagatgaaaacagtgcagttaactggaatttcaaagatatctggtgctctgtcacttctacttaaagctgctgtccagttcattttgctggtttggtttctttgttttaagattcctcgccctgatgtcttttttgttcagaatccaccctctgttccaacactggctgctgtaaaactggcaagctggctgagaggtgctaaatttattgttgattggcataactttggatatacattgctggggttgtcgcatggcagaagtcacattattgtcaaaatctatttctggtttgagaagtactttgggcagatggctgatggtgccttttgtgttacaaaagcaatgcagcatgagcttgctcaaaattggggaatcagggcgacagttctttatgatcaatctcctgatttttttcaccctgcttcattgatggagaaacatgggttgtttagcaggctagggaattccatgtgtagtgctatgggcaatgctgattgcatatcagtggaggaagtaggggaagacatgaacactactgcctttaccagtaagattgatggccaagttttcttgaagcctaacaggccagcacttgttgtgagcagcacaagctggacgccagatgaagatttcagcatacttttggaagcagcactaatgtacgacagacgcgtcgctgcagctttaggtgaagatgattcaatggatgaggggcaactttggattgatatcaagaacgggaagcagtttgtctacccaagattactgttcattattacaggtaaaggacctgataggaagaaatatgaggatcaaataaaaaggttgaagttgagacgtgttgccttgcggacaatgtggcttgcatcagaggactaccctttattgctcgggtcagctgatctaggagtgtcgttgcatacatcttcgtcagggctggacctaccaatgaaggtggttgatatgtttggatgcggattgcctgtttgtgctgcttcattctcctgcattgaggagcttgtaaaagtaaacaaaaatggtcttcttttctcaacatcttcggagcttgctgatgaacttatgatgctctttaaggggtttccagaagaatgcaatgccttgaaatccctcaaagaaggtgccatgaagtcagcatcatcttcgaaatggtcaacagaatgggaaaccaatgcactacctttggtggaccaggtcattggatgagatgtgtgcttacatacatcagatagaattgttgtattgcagagaaccagagatcggtgtactagagagaccagatgtacattaaagggtacggtttgctttcaccaaaaatcaattgctagttgctgccagtgccatgtgcaccacttcagcaaaacttgggcaagtttgtagctacgaagctctttcctttttaggctgggaaacatactctgctgaacacatgtctaagttgtttcaggatgtatactactgtaggccagcactttgtttgataatatggtctgtattggaatacctctaatctgttacgtcagaaggaaaacatagaaaaccatattgttttccctggcttcgaaggccatctgataagatcctatgcagagaggcgtgtaccaaacagaagtgtacaaggaatcaggatctctagcacgatgtctggagaatgaaaaggatatgtcagatgcatggtcctatctta

SEQ ID NO: 154068 - DNA, 2075 bp, Zea Mays
gttcctggcttgggccgaacaaccccgtattgggctaccgctgcagcggttcattttcaccacgcgtgcgctctctctgtctgcgacgactgggctacgccgccgccgccgtcctccgtctggtgccgaggtcttcgttggacccttcgcccgcgactagcgtccgccaggtgccaggctgaaggcgatggcgacggagaggaggcgcgcgtcagtcgtggtactgggcgacatcggccgcagcccgcggatgcaataccactccctctcgctcgctaaccaggccagtatggaagtggacattgttgcaaatggaggaagtgatcctcacttgtcactgagagagaatccatcaattcacatccacgagatgaaaacagtgcagttaactggaatttcaaagatatctggtgctctgtcacttctacttaaagctgctgtccagttcattttgctggtttggtttctttgttttaagattcctcgccctgatgtcttttttgttcagaatccaccctctgttccaacactggctgctgtaaaactggcaagctggctgagaggtgctaaatttattgttgattggcataactttggatatacattgctggggttgtcgcatggcagaagtcacattattgtcaaaatctatttctggtttgagaagtactttgggcagatggctgatggtgccttttgtgttacaaaagcaatgcagcatgagcttgctcaaaattggggaatcagggcgacagttctttatgatcaatctcctgatttttttcaccctgcttcattgatggagaaacatgggttgtttagcaggctagggaattccatgtgtagtgctatgggcaatgctgattgcatatcagtggaggaagtaggggaagacatgaacactactgcctttaccagtaagattgatggccaagttttcttgaagcctaacaggccagcacttgttgtgagcagcacaagctggacgccagatgaagatttcagcatacttttggaagcagcactaatgtacgacagacgcgtcgctgcagctttaggtgaagatgattcaatggatgaggggcaactttggattgatatcaagaacgggaagcagtttgtctacccaagattactgttcattattacaggtaaaggacctgataggaagaaatatgaggatcaaataaaaaggttgaagttgagacgtgttgccttgcggacaatgtggcttgcatcagaggactaccctttattgctcgggtcagctgatctaggagtgtcgttgcatacatcttcgtcagggctggacctaccaatgaaggtggttgatatgtttggatgcggattgcctgtttgtgctgcttcattctcctgcattgaggagcttgtaaaagtaaacaaaaatggtcttcttttctcaacatcttcggagcttgctgatgaacttatgatgctctttaaggggtttccagaagaatgcaatgccttgaaatccctcaaagaaggtgccatgaagtcagcatcatcttcgaaatggtcaacagaatgggaaaccaatgcactacctttggtggaccaggtcattggatgagatgtgtgcttacatacatcagatagaattgttgtattgcagagaaccagagatcggtgtactagagagaccagatgtacattaaagggtacggtttgctttcaccaaaaatcaattgctagttgctgccagtgccatgtgcaccacttcagcaaaacttgggcaagtttgtagctacgaagctctttcctttttaggctgggaaacatactctgctgaacacatgtctaagttgtttcaggatgtatactactgtaggccagcactttgtttgataatatggtctgtattggaatacctctaatctgttacgtcagaaggaaaacatagaaaaccatattgttttccctggcttcgaaggccatctgataagatcctatgcagagaggcgtgtaccaaacagaagtgtacaaggaatcaggatctctagcacgatgtctggagaatgaaaaggatatgtcagatgcatggtcctatctta

SEQ ID NO: 154069 - DNA, 2068 bp, Zea Mays
gttcctggcttgggccgaacaaccccgtattgggctaccgctgcagcggttcattttcaccacgcgtgcgctctctctgtctgcgacgactgggctacgccgccgccgccgtcctccgtctggtgccgaggtcttcgttggacccttcgcccgcgactagcgtccgccaggctgaaggcgatggcgacggagaggaggcgcgcgtcagtcgtggtactgggcgacatcggccgcagcccgcggatgcaataccactccctctcgctcgctaaccaggccagtatggaagtggacattgttgcaaatggaggaagtgatcctcacttgtcactgagagagaatccatcaattcacatccacgagatgaaaacagtgcagttaactggaatttcaaagatatctggtgctctgtcacttctacttaaagctgctgtccagttcattttgctggtttggtttctttgttttaagattcctcgccctgatgtcttttttgttcagaatccaccctctgttccaacactggctgctgtaaaactggcaagctggctgagaggtgctaaatttattgttgattggcataactttggatatacattgctggggttgtcgcatggcagaagtcacattattgtcaaaatctatttctggtttgagaagtactttgggcagatggctgatggtgccttttgtgttacaaaagcaatgcagcatgagcttgctcaaaattggggaatcagggcgacagttctttatgatcaatctcctgatttttttcaccctgcttcattgatggagaaacatgggttgtttagcaggctagggaattccatgtgtagtgctatgggcaatgctgattgcatatcagtggaggaagtaggggaagacatgaacactactgcctttaccagtaagattgatggccaagttttcttgaagcctaacaggccagcacttgttgtgagcagcacaagctggacgccagatgaagatttcagcatacttttggaagcagcactaatgtacgacagacgcgtcgctgcagctttaggtgaagatgattcaatggatgaggggcaactttggattgatatcaagaacgggaagcagtttgtctacccaagattactgttcattattacaggtaaaggacctgataggaagaaatatgaggatcaaataaaaaggttgaagttgagacgtgttgccttgcggacaatgtggcttgcatcagaggactaccctttattgctcgggtcagctgatctaggagtgtcgttgcatacatcttcgtcagggctggacctaccaatgaaggtggttgatatgtttggatgcggattgcctgtttgtgctgcttcattctcctgcattgaggagcttgtaaaagtaaacaaaaatggtcttcttttctcaacatcttcggagcttgctgatgaacttatgatgctctttaaggggtttccagaagaatgcaatgccttgaaatccctcaaagaaggtgccatgaagtcagcatcatcttcgaaatggtcaacagaatgggaaaccaatgcactacctttggtggaccaggtcattggatgagatgtgtgcttacatacatcagatagaattgttgtattgcagagaaccagagatcggtgtactagagagaccagatgtacattaaagggtacggtttgctttcaccaaaaatcaattgctagttgctgccagtgccatgtgcaccacttcagcaaaacttgggcaagtttgtagctacgaagctctttcctttttaggctgggaaacatactctgctgaacacatgtctaagttgtttcaggatgtatactactgtaggccagcactttgtttgataatatggtctgtattggaatacctctaatctgttacgtcagaaggaaaacatagaaaaccatattgttttccctggcttcgaaggccatctgataagatcctatgcagagaggcgtgtaccaaacagaagtgtacaaggaatcaggatctctagcacgatgtctggagaatgaaaaggatatgtcagatgcatggtcctatctta

SEQ ID NO: 154070 - DNA, 764 bp, Zea Mays
gttttttttttggtgtgcgatattttgctttggctagtttttactgaagcattaagctttgtgcagcattgaggagcttgtaaaagtaaacaaaaatggtcttcttttctcaacatcttcggagcttgctgatgaacttatgatgctctttaaggggtttccagaagaatgcaatgccttgaaatccctcaaagaaggtgccatgaagtcagcatcatcttcgaaatggtcaacagaatgggaaaccaatgcactacctttggtggaccaggtcattggatgagatgtgtgcttacatacatcagatagaattgttgtattgcagagaaccagagatcggtgtactagagagaccagatgtacattaaagggtacggtttgctttcaccaaaaatcaattgctagttgctgccagtgccatgtgcaccacttcagcaaaacttgggcaagtttgtagctacgaagctctttcctttttaggctgggaaacatactctgctgaacacatgtctaagttgtttcaggatgtatactactgtaggccagcactttgtttgataatatggtctgtattggaatacctctaatctgttacgtcagaaggaaaacatagaaaaccatattgttttccctggcttcgaaggccatctgataagatcctatgcagagaggcgtgtaccaaacagaagtgtacaaggaatcaggatctctagcacgatgtctggagaatgaaaaggatatgtcagatgcatggtcctatctta

SEQ ID NO: 154071 - DNA, 645 bp, Zea Mays
atgagccgcggcacgggcgcgggttatgaccgccacatcaccattttctcccctgagggacgcctgtaccaagtcgagtacgcgttcaaggcggtgaagtcggcgggtgtcacgtcgatcggcgtccgcggcgcggactccgtctgcgtcgtcacccagaagaaagtcccggacaagttgctggatcagacgagcgtgacacacttgttcccgatcaccaagtacgtcggattgcttgccactggcctcacagctgatgcaaggtcattggtttcccaagcaaggaacgaagcagctgagtttcgtttcaaatggggctatgagatgccagttgatgtgttagcaaaatggattgctgacaaagctcaagtttacacgcaacatgcatacatgagaccccttggagtagttgctatggtcttgggctacgacgaagagaaaaatgcacaactattcaaatgcgaccctgcgggtcacttctttggacataagattgcaatatctgcattgcaatcagttctccaggaagatttcaaggccactgagatcgaagttggtgttgtgagaaaagaagaacgtcttttcagagttctcacaacagaggagattgaccagcacctgacggcaattagtgaacgggactga

SEQ ID NO: 154072 - DNA, 393 bp, Zea Mays
atgtccgcggcggcgacggcgggcgggcaggaggtggcgccggccaccgtggccgtggccgaggcggaggagtgggaggtgtgcgcgtgctgcgggctccgggaggagtgcacgccggcgtacgcggccggggtgcgcgcgcggtacggcgggcgctggctgtgcgggctctgcggcgacgccgtgggcgacgaggtcgcagccggagccgggtcggcgctggaggtcgaggcggcgatcgcggggcacgccgccttctgccgcgcgctcggcgggcgccggacgccggacgcggccgagcggctcatcgcggcggtgcggcggctcctccgcaacgcgggcggcagggaggacaagtccctggtgctggtggagttccaggaggcctcttga

SEQ ID NO: 154073 - DNA, 1060 bp, Zea Mays
agttgtcacacttcatccacattgcttggctcacaatgatcaacgagttcttcgttaggcaggtacacggatgagtcattgggggttgagacacatccacactcaaatgactctatttattccttgctttcgttgccaagctaatgaactgcgtgcgttcaaaaggactagcgataccctatctatcttctacctcaaccgtaagtaccaccatgggtgcacacacagccatagctccagtggtgagcaagatcttctgcagctcctcgcaggccgtgctgatggtgcgcaggcgtcctcctaccgtgaacggcggcggccttgttgttacagaccggaaccagacggccgctttcagggtcgatggctgtggaaccatcggtgctagcgggcagctgatcgtcagggatggcgatggcagcgcaatcctcttcattcacaagaagggaggcgtcgttcaagcgctgagcgtcaacaactggtggagagggtatctgaccgactatggcgagccaagcaagctggttttcagcttgcaggatcccaagcctgtcctctgcacgaacacgaagggtgacgttcgggtcaccgtggagcccagcgggaggacgaagaggcactgggactacgaggtgactggatccttcgctcagaggtcttgcgccatcaagaaccgagcaggccagcttgtagcgcagattggcggcaaggggatgatggcaggcagggacctgtaccaggtggtggtgcagccgggctatgaccaggcctttgtggttggcattattgccattcttgacaacacgcatggagagtccacgagctgctaataagatccgctccagcagcaatttgttagaatacagttgtgtagcttgattattttattggactgtacattgcttgctctatcttttcgttgatagctaggctaccatgtacatgatatgtatatatgtgatatccaagtgtgttgtatttcaagtttggtatggttcactgttcacattcaaaaggatttaagttcttgatactagcgtatagtggttacttttatcca

SEQ ID NO: 154074 - DNA, 310 bp, Zea Mays
aacagacaagaaggttatacatatgtcacgttattatgataaaacctgatgttacagcagccgcctctggggcggatgcctataagggcaatacatgcgtttgctcgtcaagaaagaggcagccaaacaccgagttgaaaaaatcacggcctctgatggtatcctggcttcctaccagagcttgcgtgtcatacttgcatgccctcccgcagtctggacagtatgtcacctgcaagccaatttcaggaatggtttggttagaatacaattgtctctaaaagagaacggaagattgcagttgtttcatgga

SEQ ID NO: 154075 - DNA, 327 bp, Zea Mays
atggccgtcgccggcaccagctacgaagggttcgttgcctatgccctagcgcgcggcggggcctggcaggatcggctccatggtgatatccaactccggcctgctcaagacggccgacgacgacagggcgtcgctcaagcgcgtcggtgctgggttcacacgcacggccgacctgctcatgccgttggacacacgcggcacgcggcggcttatggagccgtccttctaccagagaaagaccatcatcgtgctgccagacatcgtgattggatgggctgtgctggtaacactcagcaaccggggttctactttgaggtcgctccatga

SEQ ID NO: 154076 - DNA, 192 bp, Zea Mays
cgtgatctctcgttagtggaatggaattttagggagattcttcagaacaacatagcaaatatcttgggtcttcagaaattatactggaaacagcgtgcgaccattaaatgggtaacctcaggggatttatgtaccaaagtctttcatgctcatgctacaattaagcacagaaagaatataattgtttccctt

SEQ ID NO: 154077 - DNA, 1215 bp, Zea Mays
tggagctgagaacaggcatcatgttgcgggatagtaatagtcaagcaggttcctctacatactttgcataaagcacaaccctcaaaggaagaaagttccgcaacaacaccaacgcattacaccgccaaaaaaaaaaacatttgaagcaacgttatgaccaaagtgaattctgcatgcggcaatgccagagtttgcgtccgatgaccagagagctagagcatgcatgtccgacacagtgccgtgcagacctcgagcgtctgatgcgaagcatggtccccagcctggtaacaacaaggcactgacgatttgaggaacacatccacgggctcacgagtcctagtgatcaccatcgtctccctgtggcttctgtgaccgcattctccgcatccatttcctctggctgagcgtcgcctcatgcggcgccgagcagggtgagacagcagtcctctggtgatgctgcgccgttgccgagcagcttggcagctccgcgggaagcgcggcggccgtgctggtgaaggcgttgaggacgaggaaagcgagtatcgtgctgcattgcattgccatcgttacacagtatacaatacagtgtgccagggaagcagctcatttgattttgtcactgagaggcgcgacgatggcgggcggcgtgttggggaaccaggtgagcacgagcctgacgacgagcaccgtgttgtaaaggttgaggaagttattgatgccgctggccaccaccgtcccggccaccgagtccccgagcaccgccgcgaagcagagctccccggacgacagcaccgtggcacgccgcgccgccaccagacgcctcctgccctgctcgtggctcgctccatcaaaccacagcggcgttggctcccgtctactgcgctaccgagaccgagctcaagaatgcagcgcgtgcctgcctacctgggagaaggaggagaggtgggagtgggcggcgaagagcggcttcaggagcgggtgggcggccgccgcggacgcgagctcctcgaggcggcgggcgagaggggcgaggacgtcggggccggggacggggaacgtgcgtgttcgggggacgcccgggaagggcaggtggcgtacggcgaggaggagtggcggcctcgaggaggcgtggtgctgagccgggtcggcgctggaggcggccattggtgtgtgtggtgcttcgaggcggatggcagaccgcagacgagaggttac

SEQ ID NO: 154078 - DNA, 950 bp, Zea Mays
gtccccctcacccactcatgactcacccttcctccccagctttccaccaccttgtatacagcgcacgctcggctcgctagctaccgccaagcgagctctcctcctccacttctgttccatgcaccgccgcccgctccaggttcctacttcctagctaggcgaggctggcattaaagactgaacgcgctccgcgtgtttcgtttctgcgtgtcggttcgccttgctgggatggagaggccgtggagggacaaggacaagggagcggcggctccggcggcggggagggcgcggcggtacggcgaccagccgtccttctcgtccacgctcctcgacgccatatacaggtccatggacgagcctgacgacggggtaacatcgtcctcctcaaccgccgccaagaagcagaaccaggacctgcgccacagctgctactactacaaggcgtcgctggcggcggggagctaccgcggcagcagcagggcggcggcgccccgggggccacaggccgccaccacgtcgagctcctccgatcagtgctccagctacggcgggttctcgtcgtcggaggacggtgccggtcggggtggcgccggagctggagcagatgctgctccaccggatggaggtggacagcggcgacgacgacgacgacgagagcagcgacgccagctccgatctgttcgacctcgagaatttcgcggccgttgacccggacggcggcgccgcgtacagtgacgagctgccagtgtacgagacgacgaggctggtgctgggccaccgcgccattggccacgggtacgcgcgcacgggaggagtacccaccagagtggtgtgaattgtgatcttgctgccggccgggatccattccggttcctgagcgccagggggtaactgtagaatacaagtgagcggtttgtgagggaaatggcaaagcgagttccaatcaatat

SEQ ID NO: 154079 - DNA, 319 bp, Zea Mays
ttgctcaatgacttgacaattgtatatggccagcaacaagagcacagtcacagtatcaggtaccgacatcatgtattttcaatttttcattgccgaatcacaggggcaacgaagaaacatttgctctttgctgactgcacaaactatacacgacagaagcttttgatgtattcagatacctcaaacattctggtggatctgaactgccaccgatctagtgacaatctcgaaagccgcaaacatttggaaacactttcatcatatacaaggtggtgaaggtattacttggcacataccatcccgcctttccaaatcgcga

SEQ ID NO: 154080 - DNA, 1308 bp, Zea Mays
ccctcacccactcatgacacccttcctccccagctttccaccaccttgtatacagcgcgcacgctcggctcgctagctaccgccaagcgagctctcctcctccacttctcctgttccatgcaccgccgcccgtgccaggttcctagctaggcgaggctcgcattgaggactgaacgcgctccgcgtgttttgtttctgcgtgtcggttcaccgttcaccttgcttggatggagaggtggagggacaaggacaagggagcggcggctccggcgccagggagggcgcggcggtacggcgaccagccgtccttctcgtccacgctcctcaacgccatatacaagtccatggacgagcctgacgacggggtaacatcgtcctcctcaaccgccgccaagaagcagaaccaggacctgcgccacagctgctactactacaaggcgtcgctggcggcggggagctaccgcggcagcagcagggcggcggcgccccgggggccacaggccgccaccacgtcgagctcctccgatcagtgctccagctacggcgggttctcgtcgtcggaggcggagtcgtcgcagcaccggcgcctgcggcccatacgcacgagcctcgccaccaccgcggtggccgtggccgcgcccgcactcgcgccggagaagaagaaggccggcgtcagcatccgcgccaggctgagggacctccgccgcaagccggcgtcccccggccccggcgcgcggctggcggggttcctcaacgccatcttcagcggcaggcgcgcgccgccgtcggcgtcctcctgctcgcgctcctgcctcagcgagacgccgtccacgcggggccagccgaagcggaccgtgcggttcctggacagcgacggcggcggcgagcgccggaggacggtgccggtcggggtggcgccggagctggagcagatgctgctccaccggatggaggtggacagcggcgacgacgacgacgacgagagcagcgacgccagctccgatctgttcgacctcgagaatttcgcggccgttgacccggacggcggcgccgcgtacagtgacgagctgccagtgtacgagacgacgaggctggtgctgggccaccgcgccattggccacgggtacgcgcgcacgggaggagtacccaccagagtggtgtgaattgtgatcttgctgccggccgggatccattccggttcctgagcgccagggggtaactgtagaatacaagtgagcggtttgtgagggaaatggcaaagcgagttccaatcaatatctcaggctctgcagacagcctctgcgctgc

SEQ ID NO: 154081 - DNA, 1098 bp, Zea Mays
ccattaacgagacaccccataaacctcccactgccacggcccagcccacaagtccaagacttcgccagatatttcggcctcgaagcagctaaataccacaccaggtgcggcttaaacccttatcgccaccagtggccgcgtcctcttcatttccgccatccgtatcgtctccctagggtttggcactttggccgccgccatggcgtcggcgtcgcgtgcgctcctcctctcccgtgcgctccaggccggcgcgtctcgccgcgtccccgccctcctgcgcccggtcgctgcggccgcgagcctcctcccagcggtggcggggccggcaggggccgccctcggcgctagggtgcggtgcttcgcgacccagccggcgacgtcctcgctgcgggactcgtccccaaactggagcaatcgcccgcccaaggagacgatcctcctcgacggctgcgacttcgagcactggctcgtcatcatggagccgccgcctggtgacgcctccaaccccgacatcacacgcgacgagatcatcgatagctatatcaagactctcgcccaagtcgtcgggagtgaggaagaagctaggcaaaagatatactctgtatcgactcgtcattactttggctttggtgctcttgtatctgaggaactttcttacaaactgaaaggtatttatgatctcattgagtaaaatataggagtaggaagtaaaacaatgttggatactctaaaatctgtccctggaatcttttccagaaattcccaaggtccgctgggttcttcctgattcatacttggatgtcaaaaacaaggactatggaggtaatgataacatgttctttatccagttatagactatgtgcattttcttggtcatgtacaaaaatcctgctcatgatactcgaattgccttttttcacattgtatttgttgtttgttaacactgttatatctttcttgcttttacacaatttattccagtttaattttgaacttgagtaatttaaaccttcattattttatatcagatgtgaaattgtgaatgccttttcaagttattttctagtgtccaagcaattctatgaaattgtgctcctt

SEQ ID NO: 154082 - DNA, 1793 bp, Zea Mays
ccattaacgagacaccccataaacctcccactgccacggcccagcccacaagtccaagacttcgccagatatttcggcctcgaagcagctaaataccacaccaggtgcggcttaaacccttatcgccaccagtggccgcgtcctcttcatttccgccatccgtatcgtctccctagggtttggcactttggccgccgccatggcgtcggcgtcgcgtgcgctcctcctctcccgtgcgctccaggccggcgcgtctcgccgcgtccccgccctcctgcgcccggtcgctgcggccgcgagcctcctcccagcggtggcggggccggcaggggccgccctcggcgctagggtgcggtgcttcgcgacccagccggcgacgtcctcgctgcgggactcgtccccaaactggagcaatcgcccgcccaaggagacgatcctcctcgacggctgcgacttcgagcactggctcgtcatcatggagccgccgcctggtgacgcctccaaccccgacatcacacgcgacgagatcatcgatagctatatcaagactctcgcccaagtcgtcgggagtgaggaagaagctaggcaaaagatatactctgtatcgactcgtcattactttggctttggtgctcttgtatctgaggaactttcttacaaactgaaagaaattcccaaggtccgctgggttcttcctgattcatacttggatgtcaaaaacaaggactatggaggcgaacccttcataaatgggcaagctgttccttatgatcctaaatatcatgaagagtgggtgagaaacaatgcccgtgccaatgacagaaaccggcgcaatgataggcctcgcaactttgacaggtcaaggaactttgacaggagaagggagaacatgcaaaactaccagaacagagatgggcctcctgcccaaggtttcaatggccccccacctccacctggccagaaccagatgccatcccaccatagtcagggcaacatgtctccgcaaccaccacatgctggtggtggccaaccaaactatcagccccaaatgcaaaacccacagacgggctacaaccctggcggtgctcctcactaccagcaaggtgctgctcctggctaccaaggtggacctccggggtatcaaggtggttaccaagggaacccaggccctgcctaccaaggtggtaacactggttatcaaggtggcaacccaccacctccctaccaaggaagcaacccaccacctccttaccagggaggcagcccaccagggccaccacctccctaccgaggaggcagcccaccagggccaccacctccctaccgaggaggcaaccccaacgtaccgccatattcgggtggtggcaatcctggctaccctggtggcagccctggctaccagggtcaaggaggcaactccaacttccagtgaacatgaccacgagtactaagttggcacccctgtttcagagtagccttctgcaagagatggtgcgccgtagcctagcataaatcgaacccttgttgctatcggattttcatggattgtcgctgtttgcacttaatgttctatatatagtactcaaaactatgcttggtgtctgagtgatgtacgtggaattctgaaactatggatcagctcttgtgtgcacttgctgaaccagatacccagcagtaagcttttgtttgttcgttttgagtggttggttaaccacatacttgttacagtcgattctgataaacttccatgtaatacttttgctgcattgtccgtgagacctcagcggcccggc

SEQ ID NO: 154083 - DNA, 201 bp, Zea Mays
atgctgcagctgctgatggcgctggccttctcggcggccccgctgacgctgtacgtgccgccggtgcgcagcctcagcctcttcgtcgaggccatggaggccgtctgccgcgactgcgcgccctactcccacggcgccgtcgcccgcttccgcctcggcctctcccgcgtcctcgccggcctagcgcgcgccctccgctag

SEQ ID NO: 154084 - DNA, 223 bp, Zea Mays
ttgctcgccggccttggaagtgccgcatcctcggggcttcggggacgccgccgcttgcccgcaaaagggccccgctgcggatcgaggaacctccgccaccgcgcgtcgaggtaatggagttgcgcccaccggcctgggaaccgccgccgccgccgctcgccctctggatcgggggccgccaccgccggcataggaaccgccgccaccgcatgtcgagatcggg

SEQ ID NO: 154085 - DNA, 555 bp, Zea Mays
atggtcaggccatgggttcttgtcgtccttcctctcatgctcgccaccttgcttattgccactaccaacgcccaaaactacatagaaccagcgcctagcccactaccggacagcccatctcctcctccgccaccgccaccggagccatcaaccgcgcctcctcctgcttcgacacctacgccagcagggtcatccccaccacctcccgctccgccagcgtcatccccgccgcctcctccttcgccagcgtcattcccgtctcctcctccaccaccggcacgggcgtctaactggacgcctgtggcgaacgcgaacgacccgaagatccagcaggtagcgcagtttgccgtgcgcatctacgcgatcagcaagaaggaactcaagatgcagttccaaaacgtcgtcagcggggagacgcagccgtgcgacggcgggtacaactaccggctggtcatcacggtgcgtggtggcaagaaggcgcagtacgacgccttcgtctggggcatccagaggacgacgtcgtggaagctcttgtccttcacgcccaagtactga

SEQ ID NO: 154086 - DNA, 327 bp, Zea Mays
atggcggctggagccgcgaccctcggagatgtccggcgtgtgcggctgcggagacggcggcttgctgcgcttgccgccgccgtcagcttcgtcgaggtcttcgacctcgacgtcttccggcgccgggcgcttgccgccgaggacctcgtgagcgaggtacgcccactgcgtctccgtctcgcaggagctcagcagggagcgcggaacaaggtaggacttcccttccagcatcatggcttcaccccaaaaaaaagctttctattcttgctttatttcctcctcctaaatcctaatttgaaattgatccagaaaaatatgaaaccttag

SEQ ID NO: 154087 - DNA, 2059 bp, Zea Mays
cacgccacactcctcacctctcctcgctccacgcacgcgctctctcacccgctggctattagtcgtcgtcccttggatttcgacactctctctagcgggcgcctgttccgccgccgtccatcgatcctagctagctagctagctagggcgcgaccgtcgtctcggtggttgttgacaggtcccgtacgtgtgtgctcgccatggctcgtggcgacggcgggcagctggcggagctgtccgcgggggtccgcggcgcggccgcggtggtggaccacgtggccccgatcagcctcgggaggctcatcctcgccggcatggtcgccggcggcgtgcagtacggctgggcgctgcagctctccctcctcacgccctacgtgcagactctggggctttcacatgcgctcacttcattcatgtggctctgcggccctattgccggcttagtggtccaaccgctggttggcctgtacagcgacaggtgtacatcgagatgggggagacggaggccgtttatcctgacagggtgcatgctcatctgcgttgccgtcattgttgtcggattctcgtcagacatcggagctgctctaggggacacgaaggaacactgcagcctctaccacggtcctcgttggcacgctgcgatcgtgtacgttctggggttttggctccttgacttctccaacaacactgtgcagggtccagcacgtgctatgatggctgatctatgtgaccatcatgggccaagtgcggctaactccatcttctgttcttggatggcgctgggaaacatcctaggctactcctctggctccacgaacaattggcacaagtggtttcccttccttaaaacgagcgcctgctgtgaggcctgtgcgaacctgaaaggtgcatttctggtggccgtggtgttcctagtcctgtgcctgacggtaaccctgatcttcgccaaggaggtgccgtacagagcgaacgagaacctcccgacgacgaaggccggcggcgaggtcgagactgagcctaccgggccacttgccgtgctcaagggcttcaaggacctgcctcccgggatgccgtccgtgctcctcgtgactgccatcacctgggtatacgccattggccatacagactacctttcgtggttcccgttcatcctctacgacaccgactggatgggccgggagatctaccacggcgaccccaaggggagcaacgcccagatctcggcgttcaacgaaggtgtccgagtcggcgcgttcgggctgctactcaactcggttattctagggttcagctcgttcctgatcgagcccatgtgccggaaggtcgggccgagggtggtgtgggtgacgagcaacttcatggtctgcgtcgccatggcggccaccgcgctgatcagcttctggtcgctcagggactaccacgggtacgtgcaggacgccatcaccgcgaacgccagcatcaaggccgtctgcctcgtcctcttcgccttcctgggcgtccctctcgccatcctgtacagcgtcccgttcgcggtgacggcgcagctggcggccacccggggcggcgggcaggggctgtgcaccggcgtcctcaacatctccatcgtcatccctcaggtgatcatcgcgctgggcgccggcccgtgggacgcgctgttcgggaagggcaacatcccggcgttcggcgtcgcgtcggccttcgccctcgtcggcggcgtcgtgggcgtgttcctgctgcccaagatctccaagcgccagttccgggccgtcagcgcgggcggccactgatcgaacccggccggggccggccgccggcacgcagcccggcaagagctgtatgttgttgagagttgaacagaaaccatgcatgtgtgcttctgtagttctgttgtttgtggtcgatcgatgggcgttgcgtggcagcgtgggcaagcgaggcgaggtgcgcggatccaaaaaaagggccattcgatcaatcaatgtgtagtagagtacaactagacgatgatgttcacatcatttgtctttaatacataccggtttctattgtctttacaata

SEQ ID NO: 154088 - DNA, 2032 bp, Zea Mays
cacgccacactcctcacctctcctcgctccacgcacgcgctctctcacccgctggctattagtcgtcgtcccttggatttcgacactctctctagcgggcgcctgttccgccgccgtccatcgatcctagctagctagctagctagggcgcgaccgtcgtctcggtggttgttgacaggtcccgtacgtgtgtgctcgccatggctcgtggcgacggcgggcagctggcggagctgtccgcgggggtccgcggcgcggccgcggtggtggaccacgtggccccgatcagcctcgggaggctcatcctcgccggcatggtcgccggcggcgtgcagtacggctgggcgctgcagctctccctcctcacgccctacgtgcagactctggggctttcacatgcgctcacttcattcatgtggctctgcggccctattgccggcttagtggtccaaccgctggttggcctgtacagcgacaggtgtacatcgagatgggggagacggaggccgtttatcctgacagggtgcatgctcatctgcgttgccgtcattgttgtcggattctcgtcagacatcggagctgctctaggggacacgaaggaacactgcagcctctaccacggtcctcgttggcacgctgcgatcgtgtacgttctggggttttggctccttgacttctccaacaacactgtgcagggtccagcacgtgctatgatggctgatctatgtgaccatcatgggccaagtgcggctaactccatcttctgttcttggatggcgctgggaaacatcctaggctactcctctggctccacgaacaattggcacaagtggtttcccttccttaaaacgagcgcctgctgtgaggcctgtgcgaacctgaaaggtgcatttctggtggccgtggtgttcctagtcctgtgcctgacggtaaccctgatcttcgccaaggaggtgccgtacagagcgaacgagaacctcccgacgacgaaggccggcggcgaggtcgagactgagcctaccgggccacttgccgtgctcaagggcttcaaggacctgcctcccgggatgccgtccgtgctcctcgtgactgccatcacctggctttcgtggttcccgttcatcctctacgacaccgactggatgggccgggagatctaccacggcgaccccaaggggagcaacgcccagatctcggcgttcaacgaaggtgtccgagtcggcgcgttcgggctgctactcaactcggttattctagggttcagctcgttcctgatcgagcccatgtgccggaaggtcgggccgagggtggtgtgggtgacgagcaacttcatggtctgcgtcgccatggcggccaccgcgctgatcagcttctggtcgctcagggactaccacgggtacgtgcaggacgccatcaccgcgaacgccagcatcaaggccgtctgcctcgtcctcttcgccttcctgggcgtccctctcgccatcctgtacagcgtcccgttcgcggtgacggcgcagctggcggccacccggggcggcgggcaggggctgtgcaccggcgtcctcaacatctccatcgtcatccctcaggtgatcatcgcgctgggcgccggcccgtgggacgcgctgttcgggaagggcaacatcccggcgttcggcgtcgcgtcggccttcgccctcgtcggcggcgtcgtgggcgtgttcctgctgcccaagatctccaagcgccagttccgggccgtcagcgcgggcggccactgatcgaacccggccggggccggccgccggcacgcagcccggcaagagctgtatgttgttgagagttgaacagaaaccatgcatgtgtgcttctgtagttctgttgtttgtggtcgatcgatgggcgttgcgtggcagcgtgggcaagcgaggcgaggtgcgcggatccaaaaaaagggccattcgatcaatcaatgtgtagtagagtacaactagacgatgatgttcacatcatttgtctttaatacataccggtttctattgtctttacaata

SEQ ID NO: 154089 - DNA, 770 bp, Zea Mays
cagctagctaacgcgctctctctttctcaaatactgcccatgcgccttggcctcctccgatcctctgatgaggccaatggccagcaatggcatggcgtcctcactctcgcccttcttccctccaaacttcctcctccaaatgcagcagacgccctccgatcatgacccccaagaacaccaccaccttcctgctcctccccttcatcttcaccacaaccccttcctcccctcctctcaatgcccctccctgcaagacttccgaggtcacgcgcagatccatccctatagcgagctagctagctagctagtcaacagcctccgacgcctaatccgatcgatccatcggctggtcctgacacatgcgctggcgcctgtggttgatgcgtgcaggtatggcgccaatgctgcggaagcgcccgacgatgtactgcggcgcggacgacgtcggcgtcggaggcgaggaggcgagctgcggcgcgacgaacgaggacgaggtgtcggacgacggctccctgcaggccgtcgggcccggggagaagaagcggcggctgaacgtggagcaggtgcggacgctggagaagaacttcgagctcgggaacaagctggaggcggagcgcaagctgcagctggcgcgcgcgctgggcctgcagccgcggcaggtggccatctggttccagaaccggcgcgcgcggtggaagacgaagcagctggagaaggactacgacgcgctgaggcgccagctcgacgccgtcaaggccgacaacgacgcc

SEQ ID NO: 154090 - DNA, 1485 bp, Zea Mays
ctagctaacgcgctctctctttctcaaatactgcccatgcgccttggcctcctccgatcctctgatgaggccaatggccagcaatggcatggcgtcctcactctcgcccttcttccctccaaacttcctcctccaaatgcagcagacgccctccgatcatgacccccaagaacaccaccaccttcctgctcctccccttcatcttcaccacaaccccttcctcccctcctctcaatgcccctccctgcaagacttccgaggtatggcgccaatgctgcggaagcgcccgacgatgtactgcggcgcggacgacgtcggcgtcggaggcgaggaggcgagctgcggcgcgacgaacgaggacgaggtgtcggacgacggctccctgcaggccgtcgggcccggggagaagaagcggcggctgaacgtggagcaggtgcggacgctggagaagaacttcgagctcgggaacaagctggaggcggagcgcaagctgcagctggcgcgcgcgctgggcctgcagccgcggcaggtggccatctggttccagaaccggcgcgcgcggtggaagacgaagcagctggagaaggactacgacgcgctgaggcgccagctcgacgccgtcaaggccgacaacgacgccctcctctcccacaacaagaagctccaagccgagatactggcactgaagggcagggaggcagcaggggggtcgtcggagctgatcaacctgaacaaggagacggaggcgtcctgcagcaaccgcagcgaggacagctccgagatcaacctcgacatctcgcgcacgccgccggcgtccgagggccccatggaccatccgccgccgccgccgccgcaccacgccgccggcggcggcttgatccctttctacccttccgtcggcggccgacatagtattgccgccggcgtgggtatggaccaactcctgcacgcctccaccccgaagctggagcaacacggtgacggctgcgccgtcgccgtccaggccgcggagaccgccggcagcttcggcaacctcctgtgtggcgtcgacgagacgccgccgttctggccgtgggccgaccaccaccacttccattgatcgatcatcgtccatcacaaacgatggcgatcgacactgtagtgagtagaaatatcggaggaaaggaatttatttggacaattctggcgagtgcatgcagcaagggaggagagaaaaaaaaggtcgtgtactcgtgtgtgatatctggtccatattggcggggtaggcgggtagctgcctgcctagctggtcatgcatggtgggaactgggaaggggttgtaaatggggaataagtggagaggcggtgtaatttaattaggtagattttggtttgagttttgatagtattttttttatctttttgagtcttcgttttttttttctttgcgatcttcttttttctttttggttgttgacacatataaatttgtgaattggcaagcat

SEQ ID NO: 154091 - DNA, 935 bp, Zea Mays
cgcgatcatctcctctccggatacttggcatatcaacagaacattttggttgggcgggccagaacatttgtacactgatatatactaacagccagcgattaatcaatcgatcgcttctgatgcatgcagatactggcactgaagggcagggaggcagcaggggggtcgtcggagctgatcaacctgaacaaggagacggaggcgtcctgcagcaaccgcagcgaggacagctccgagatcaacctcgacatctcgcgcacgccgccggcgtccgagggccccatggaccatccgccgccgccgccgccgcaccacgccgccggcggcggcttgatccctttctacccttccgtcggcggccgacatagtattgccgccggcgtgggtatggaccaactcctgcacgcctccaccccgaagctggagcaacacggtgacggctgcgccgtcgccgtccaggccgcggagaccgccggcagcttcggcaacctcctgtgtggcgtcgacgagacgccgccgttctggccgtgggccgaccaccaccacttccattgatcgatcatcgtccatcacaaacgatggcgatcgacactgtagtgagtagaaatatcggaggaaaggaatttatttggacaattctggcgagtgcatgcagcaagggaggagagaaaaaaaaggtcgtgtactcgtgtgtgatatctggtccatattggcggggtaggcgggtagctgcctgcctagctggtcatgcatggtgggaactgggaaggggttgtaaatggggaataagtggagaggcggtgtaatttaattaggtagattttggtttgagttttgatagtattttttttatctttttgagtcttcgttttttttttctttgcgatcttcttttttctttttggttgttgacacatataaatttgtgaattggc

SEQ ID NO: 154092 - DNA, 860 bp, Zea Mays
gaacacgtgttacaaaccgcgcgcacgataaccacccgaaacgggaagccccacccgcgcccgcgcgcgcttccaacaatcacacaccaggccaccaccaccaccaaccagggtccagactccagagacaatccagccatgccgcctccgtccaccgccgcggcagtctcctccattatccgcccgacgccgcctccggccgtatccttccaccccgtacccctcccgcagatcaggcggcgctcatcagctggcgccgcagccgcttcccggctcgccgtggcgcgcgccgccgcctcgggggcgcgcggcggcggcgacgccgagacggtgttcttcgacggcggcgcgcactacggcgacctggcggcgaacctgctcctggggctgaccctgctgtggctgccgctgacgctggcggccgtgtcccgcgcgttcatcctgcggtaccgcttcacctcccggcgcgtgacggtggtctcggggctctccggcgccgaccgcaccgacttcccctactcgtccgtcacgtccgtggtggtcgtgccgcggttcgtgggcgagtggggcgacatcgtcatcacgctcagggacggcaccaaggtcgacctcaggagcgtgcccaggttccgcgaggtcgccgactactgccgctccatggccgccgctgagggctccctcgtcgtcagctagcgccgccagcagcctgtgatgcctgttcgtagccatgcataacccgttgccgttgggattcagcaaaagtcttgttatatgtttcttacgcgacgtacgtacaacatcattatctgtaattcttgagatgaagtattcaagagtgataaaaattgattgcgttcagt

SEQ ID NO: 154093 - DNA, 2686 bp, Zea Mays
gaagccaccgcttcccttccgcggcttccacaccaccttagctcggccggtggcggtctgcttccgaccgtccgccggtttgcttgcttgcttgcttcatctgcctccgccgcacctcgcctccgtccagccagccagccagcgccaagtcaagcgatccggccgcacccagcctcgacctacccggccgacccgtgagggcggtgtgtttgcccttcaacggcctcgcctcgcctcgaggtgtgagctcctccgacatctgctgcggcgccgccgtttctgcaagcagggttatcttcccttctcgccgccaggagtgagtctgtgagtgggtcgtcactgggcggggctcttccaccacctgcagggagaagggaaaaaaaagggcagcagcttggattcttgctaggggggcgcggttggtcagctcgagagagaagctgaccgggtttgggcgtcgagatttcgattgacttttgaggtacccggggtatagtctacaatacaggttgcttcttcttgcacgctgctttcttggctctgtggctaccgaccttgctggctttccctcccgaattagcggctgagctccatccagaccttgcaaagattggacctttggggggcggttcgctcactcctagcttgcctcgctggctggtctttgagcttctcgtgctacgagccaagggaggccatcttttcctgctcggttctgtcgtgcaaacgggaaagattgagctgatctgctgctagctggggatcctgcagaggctaccgcgttcttcttgtctggagtgcacagtgcatgggcagtgggtgaactggtagagagcaagatggggaattgcatcgacaccacggcgcgggtagatcacagcatgaacaatgctgcctacccatcaaaagtgaccagcaagacaagtttgtcgtcagtcccttccacaattaagagcaactcaagtcgttcaacactgactcttccatcaatgagagatcgaaatgagcttcctactcctcggacagaaggtgaaatattgtcatcttctaatttgaaggcattcacgttcaatgatctaaaaaatgcaaccaagaacttccgaccggacagccttcttggggaaggagggtttgggcatgtctacaaaggttggattgatgagcacacgcttgctccttcaagacctgggagtggtatggttgttgctgtgaagaagcttaaaccggaaggttttcaaggacacaaggaatggctgacagaggttgattaccttggccaacttcaccacaagaatcttgttaagctcattggttattgctcagatggtgacaaccggcttctggtgtatgaatttatgcccaagggaagtttggagaaccatctgtttagaagaggcgctgatcctttgtcatgggcaataaggctcaaagttgccattggagctgctaggggcttgtcatttttacatgatgctgaaaaccaagtcatatatcgtgatttcaaggcatcaaacattcttctcgattcggaattcaacgcaaaactttcagattttggcttggcaaaagccggtccaactggggataaaacccatgtatccacacaagtcatgggtactcatggatatgcagctccagagtacattgcaacaggccgtctctctgcaaaggcagatgtctatagcttcggggtggtgttgcttgaactgctcactggaagaagggctctggataaatcaaaaccaggctttgagcagaacctagttgactgggccagacctcacctgggcgacaagcgcagactgtaccgtatcatggacacgaagttgggaggacagtaccccaaaaagggcgcaaatgccattgcaagcattgcctcgcaatgcatttgcggtgacgccaagctgcggcctccaatgtcgcaggtgctggaagagctggaacagctacaagatgccaaatatggtgcaccatcgccattagtcgacatccggaaagcctcgcacgctgcccccaaatcgcctatgaccagcaccccaaaatcgccgctgagcagcaccccaaaatcgccgatgagagctcaaccggcagcacggccttcgccacggcgctcgcttggagcagcagcacctttggcaggataccgcactgcccaagtgcactagaactttgcccaagtgcactagaactggacttattagcggggccaaggcccctgtaggctgtgtgtttgtgggctcaagctgtgagcactgagcatgttgtagcttttgcttctactgatgtttcggcgatggtgtgtgccacgggaatatgaccatgtcaaccttatgataagttgtcaggcctggttcattattgacctgtgtcgtgactgttccgaaattcactcacttggcatcaatgtcttgatctattattgtacgttgcaatggaatctcacaattgtatgctgcaatggaatctcacaatcttaaccaacagaacagatgaatgttgcaatcatacatcatttttttgttcaaaacgacgtgaaactggtgcattcagcgtttccattttcatctctcaacaataaactcctgaatctctatcccagtgtgacgggcggcgccctgtttcctcaccagaacttcatcaccgactttcagcgaagtcacgggaatggcggtccttccacttgatc

SEQ ID NO: 154094 - DNA, 2755 bp, Zea Mays
gccaccgcttcccttccgcggcttccacaccaccttagctcggccggtggcggtctgcttccgaccgtccgccggtttgcttgcttgcttgcttcatctgcctccgccgcacctcgcctccgtccagccagccagccagcgccaagtcaagcgatccggccgcacccagcctcgacctacccggccgacccgtgagggcggtgtgtttgcccttcaacggcctcgcctcgcctcgaggtgtgagctcctccgacatctgctgcggcgccgccgtttctgcaagcagggttatcttcccttctcgccgccaggagtgagtctgtgagtgggtcgtcactgggcggggctcttccaccacctgcagggagaagggaaaaaaaagggcagcagcttggattcttgctaggggggcgcggttggtcagctcgagagagaagctgaccgggtttgggcgtcgagatttcgattgacttttgaggtacccggggtatagtctacaatacaggttgcttcttcttgcacgctgctttcttggctctgtggctaccgaccttgctggctttccctcccgaattagcggctgagctccatccagaccttgcaaagattggacctttggggggcggttcgctcactcctagcttgcctcgctggctggtctttgagcttctcgtgctacgagccaagggaggccatcttttcctgctcggttctgtcgtgcaaacgggaaagattgagctgatctgctgctagctggggatcctgcagaggctaccgcgttcttcttgtctggagtgcacagtgcatgggcagtgggtgaactggtagagagcaagatggggaattgcatcgacaccacggcgcgggtagatcacagcatgaacaatgctgcctacccatcaaaagtgaccagcaagacaagtttgtcgtcagtcccttccacaattaagagcaactcaagtcgttcaacactgactcttccatcaatgagagatcgaaatgagcttcctactcctcggacagaaggtgaaatattgtcatcttctaatttgaaggcattcacgttcaatgatctaaaaaatgcaaccaagaacttccgaccggacagccttcttggggaaggagggtttgggcatgtctacaaaggttggattgatgagcacacgcttgctccttcaagacctgggagtggtatggttgttgctgtgaagaagcttaaaccggaaggttttcaaggacacaaggaatggctgacagaggttgattaccttggccaacttcaccacaagaatcttgttaagctcattggttattgctcagatggtgacaaccggcttctggtgtatgaatttatgcccaagggaagtttggagaaccatctgtttagaagtgtgtgcttcatctctatggctctgctttgttaacacctagtttcttataactttcttgttcattccctttaacaatgcaatatttctcctatttaggaggcgctgatcctttgtcatgggcaataaggctcaaagttgccattggagctgctaggggcttgtcatttttacatgatgctgaaaaccaagtcatatatcgtgatttcaaggcatcaaacattcttctcgattcggaattcaacgcaaaactttcagattttggcttggcaaaagccggtccaactggggataaaacccatgtatccacacaagtcatgggtactcatggatatgcagctccagagtacattgcaacaggccgtctctctgcaaaggcagatgtctatagcttcggggtggtgttgcttgaactgctcactggaagaagggctctggataaatcaaaaccaggctttgagcagaacctagttgactgggccagacctcacctgggcgacaagcgcagactgtaccgtatcatggacacgaagttgggaggacagtaccccaaaaagggcgcaaatgccattgcaagcattgcctcgcaatgcatttgcggtgacgccaagctgcggcctccaatgtcgcaggtgctggaagagctggaacagctacaagatgccaaatatggtgcaccatcgccattagtcgacatccggaaagcctcgcacgctgcccccaaatcgcctatgaccagcaccccaaaatcgccgctgagcagcaccccaaaatcgccgatgagagctcaaccggcagcacggccttcgccacggcgctcgcttggagcagcagcacctttggcaggataccgcactgcccaagtgcactagaactttgcccaagtgcactagaactggacttattagcggggccaaggcccctgtaggctgtgtgtttgtgggctcaagctgtgagcactgagcatgttgtagcttttgcttctactgatgtttcggcgatggtgtgtgccacgggaatatgaccatgtcaaccttatgataagttgtcaggcctggttcattattgacctgtgtcgtgactgttccgaaattcactcacttggcatcaatgtcttgatctattattgtacgttgcaatggaatctcacaattgtatgctgcaatggaatctcacaatcttaaccaacagaacagatgaatgttgcaatcatacatcatttttttgttcaaaacgacgtgaaactggtgcattcagcgtttccattttcatctctcaacaataaactcctgaatctctatcccagtgtgacgggcggcgccctgtttcctcaccagaacttcatcaccgactttcagcgaagtcac

SEQ ID NO: 154095 - DNA, 814 bp, Zea Mays
cgcctctgcaccacacccaaggcagccagtgagccagaaagaagaagaggccattcgaagctgccacgcacgccacgcggaaaccattcgagtccacgaggagcagcagaagaagaaagggcaagggccaggccccaccaccgagaagcgagaagcagagcgaggaacatcctccggtggccgccgccatggccggctgctgcgtgttcctccggtggccgtcggcctcgccgtcgcgcatcggctaccgctccctcgtcgacgcggcggccgacgccgccgccccgccgtcgacggtgacggtcgtggtcgggaaggagcggcgggcgttcgcggtggaccgcctcgtgctcgactcctacccgctccggctgctcctggagacggcggcgcgcagggaggagcgcagggccgggggcggcgccggcgccatcttcgtggacgtcgacgccatcctcttcgagcacatcctctggctcgcctgcgacgcccgctccgtctcccagatcctgcacctcgacctcaaggagatcatcgacttctacgcccaggacgcgtgactggtccgccgccctcagctgcgcggctccggcatgcccgagcccggctcctcctcctccctggacacgtactccgcaccacctgcacgtttcttccatggatggatattcttttttttctttcttcctttcgtcctctcttacgctaatgcgcgtattgatgcgcgggatactattggaaattaatacagaacagaaacggttatgaagttctcttgcgatccggacaagtaattcggttccggtcgttgtca

SEQ ID NO: 154096 - DNA, 811 bp, Zea Mays
ctctccactcctctcgtctccgtctccatctccgtctccgtctccacaccgtgccgtagctgctgctgtccgtgtccctcgcctcgaagaagacaactccaacactgttgctgcgtgactgctgaattcgctccacacacgcgcgaacccagcaaggcaagaacacgaacgagagagagagagagacagggagggatcatccatccatcagaccatcacccatggacaaccttaaggagcagcggggccacgatgccgcgggcgccaacagcggcgtctggatgacggtgccggcgttcggggactgggacacgaagaacggcgcgctgccggactactccatggacttctccaagatccgcgagacgcgcaagcagaacaagaaggagctctcccgcgccagcctcggcggcgacgacgacctcttcgcccacgcccacgcccacgcccagaagccgcaggccaacagcgcccagcccaagctcggccgcccctgccccgccgccgaccgccgaccgctccacgcccgcgaccactccccaacggtaaatctccgtgtcccggcccgtttcgttccagagtcactaaaatgaacttgacccatcttttctttcttcatttcttttgcgtggaaattcgggatattacatctcaaattcgtctcgtcttagttggattttacaagcgcggggggtaataattagtgtcggggattgaacttgctaattgcgagtgaccgcaagtacaaaagtgttaccttagtccggacaagccagattagcaaagctgacagcggagtaaaaaaaaactg

SEQ ID NO: 154097 - DNA, 925 bp, Zea Mays
ctctccactcctctcgtctccgtctccatctccgtctccgtctccacaccgtgccgtagctgctgctgtccgtgtccctcgcctcgaagaagacaactccaacactgttgctgcgtgactgctgaattcgctccacacacgcgcgaacccagcaaggcaagaacacgaacgagagagagagagagacagggagggatcatccatccatcagaccatcacccatggacaaccttaaggagtcatcacaccgtgcgctggtgcgtgcgtgcgtgcagcagcggggccacgatgccgcgggcgccaacagcggcgtctggatgacggtgccggcgttcggggactgggacacgaagaacggcgcgctgccggactactccatggacttctccaagatccgcgagacgcgcaagcagaacaagaaggagctctcccgcgccagcctcggcggcgacgacgacctcttcgcccacgcccacgcccacgcccagaagccgcaggccaacagcgcccagcccaagctcggccgcccctgccccgccgccgaccgccgaccgctccacgcccgcgaccactccccaacgggagggaagaagttcctgagctacttccagtgctgtatcaaggcctgaagaggagctgccgcaatgctatgtctgtgtgcctgtgctttgtcgcagcagaacactcgtgagcaattaggtcccggctttgttaagtatccaaaaaatgtgcaatgtatttgccctgatggtcactcgtttgacctgttagcctgtatgaagaacaagtcaggttatggggccaggcagccgtctatctgtacatggcaccatcgatttgtttgcgactggtggtataatgttgccctgtaatcattgtattggatgggaatttgcaccgcctccgtatttttgaacgatcacaa

SEQ ID NO: 154098 - DNA, 910 bp, Zea Mays
ctctccactcctctcgtctccgtctccatctccgtctccgtctccacaccgtgccgtagctgctgctgtccgtgtccctcgcctcgaagaagacaactccaacactgttgctgcgtgactgctgaattcgctccacacacgcgcgaacccagcaaggcaagaacacgaacgagagagagagagagacagggagggatcatccatccatcagaccatcacccatggacaaccttaaggagcagcggggccacgatgccgcgggcgccaacagcggcgtctggatgacggtgccggcgttcggggactgggacacgaagaacggcgcgctgccggactactccatggacttctccaagatccgcgagacgcgcaagcagaacaagaaggagctctcccgcgccagcctcggcggcgacgacgacctcttcgcccacgcccacgcccacgcccagaagccgcaggccaacagcgcccagcccaagctcggccgcccctgccccgccgccgaccgccgaccgctccacgcccgcgaccactccccaacgggagggaagaagttcctgagctacttccagtgctgtatcaaggcctgaagaggagctgccgcaatgctatgtctgtgtgcctgtgctttgtcgcagcagaacactcgtgagcaattaggtcccggctttgttaagtatccaaaaaatgtgcaatgtatttgccctgatggtcactcgtttgacctgttagcctgtatgaagaacaagtcaggttatggggccaggcagccgtctatctgtacatggcaccatcgatttgtttgcgactggtggtataatgttgccctgtaatcattgtattggatgggaatttgcaccgcctccgtatttttgaacgatcacaaggggcatggttcgtttggatt

SEQ ID NO: 154099 - DNA, 1092 bp, Zea Mays
ctctccactcctctcgtctccgtctccatctccgtctccgtctccacaccgtgccgtagctgctgctgtccgtgtccctcgcctcgaagaagacaactccaacactgttgctgcgtgactgctgaattcgctccacacacgcgcgaacccagcaaggcaagaacacgaacgagagagagagagagacagggagggatcatccatccatcagaccatcacccatggacaaccttaaggaggtaagacgggccagcgacctctgcgccccccccccccccccccctgaacaaccctttccttgctaggctcggccacgggtccctgctgcgagcgcgatccgtgcttgcgttcgtccttctcactagctcatcagtcatcacaccgtgcgctggtgcgtgcgtgcgtgcagcagcggggccacgatgccgcgggcgccaacagcggcgtctggatgacggtgccggcgttcggggactgggacacgaagaacggcgcgctgccggactactccatggacttctccaagatccgcgagacgcgcaagcagaacaagaaggagctctcccgcgccagcctcggcggcgacgacgacctcttcgcccacgcccacgcccacgcccagaagccgcaggccaacagcgcccagcccaagctcggccgcccctgccccgccgccgaccgccgaccgctccacgcccgcgaccactccccaacgggagggaagaagttcctgagctacttccagtgctgtatcaaggcctgaagaggagctgccgcaatgctatgtctgtgtgcctgtgctttgtcgcagcagaacactcgtgagcaattaggtcccggctttgttaagtatccaaaaaatgtgcaatgtatttgccctgatggtcactcgtttgacctgttagcctgtatgaagaacaagtcaggttatggggccaggcagccgtctatctgtacatggcaccatcgatttgtttgcgactggtggtataatgttgccctgtaatcattgtattggatgggaatttgcaccgcctccgtatttttgaacgatcacaaggggcatggttcgtttggattggttttgtgatt

SEQ ID NO: 154100 - DNA, 768 bp, Zea Mays
cattattatattttgtcgtaactgataggcaaggacgaatcttcctgtttttttcttaatcatactgtccatgtctacacgccttcagaaagctgcgcggatgtattgacgtggcactgtccgtaggaggatcttagggaaactgatgatgaggtttagccagttgaggggataagcaactgtccaggctgttgctgtgatatatcacaaatagcagaatggctgaagaagcatacttttaactgccaacaactacagaacactttgcatcagttcattgggttctccagaatgccttttcttacaccgttgcttgtgagttgtgatgatggagaatcagaacctgatttcggtcatagacccacgatccatgtacgtggttactaatcagaaatttgttggtgcagggagggaagaagttcctgagctacttccagtgctgtatcaaggcctgaagaggagctgccgcaatgctatgtctgtgtgcctgtgctttgtcgcagcagaacactcgtgagcaattaggtcccggctttgttaagtatccaaaaaatgtgcaatgtatttgccctgatggtcactcgtttgacctgttagcctgtatgaagaacaagtcaggttatggggccaggcagccgtctatctgtacatggcaccatcgatttgtttgcgactggtggtataatgttgccctgtaatcattgtattggatgggaatttgcaccgcctccgtatttttgaacgatcacaaggggcatggttcgtttg

SEQ ID NO: 154101 - DNA, 453 bp, Zea Mays
gaaacaatcggtctctatctttctcatgaatctcagcctagcttaccatcttgacctgccccacacgtcccaccggccaccaccgggtttcgtcgctgccgccgcccgcacctgcagccgccatgtggaggggcggctctacagccgcctccgccgcgagggctctccgctcgcgcctcctcctcgaccccatccaccacccggccacgtcgctcgctccaatcgcttcggcgcgtacctcctcctcttccaccccgtccaccgccgcggcgaacaccatcgtggaagaagcggcggcagcggtatccgtttctcagcataccggatccatctccgactcgctgcggcactacgggaagtgctactgggagctctcgaaagcccgcctcaggtgcgcgatccccccagccccatggatctgttgtaacgtttctcgaaataaattccgaatat

SEQ ID NO: 154102 - DNA, 1689 bp, Zea Mays
gaaacaatcggtctctatctttctcatgaatctcagcctagcttaccatcttgacctgccccacacgtcccaccggccaccaccgggtttcgtcgctgccgccgcccgcacctgcagccgccatgtggaggggcggctctacagccgcctccgccgcgagggctctccgctcgcgcctcctcctcgaccccatccaccacccggccacgtcgctcgctccaatcgcttcggcgcgtacctcctcctcttccaccccgtccaccgccgcggcgaacaccatcgtggaagaagcggcggcagcggtatccgtttctcagcataccggatccatctccgactcgctgcggcactacgggaagtgctactgggagctctcgaaagcccgcctcagtgctcttgttgtggcaacttcgggggctggctatgtgcttggtagtggcaacatcgtggacattgccggcctttgttgcacatgtgccggtacaatgatggttgcagcatctgcaaataccctcaaccaggtgtttgagataaaaaatgatgctaaaatgaaaaggacaatgcgacggcccctgccatctggtcgcattagtcctgcacatgctgcgatgtgggctacaagtgttggagttgcaggaacagctttgctggcctggaaggctaatggcttggcagctgggcttgcagcttctaatcttgttctgtatgcatttgtgtatacgccgttgaagcaaatacaccctgttaatacatgggttggggcagtcgttggtgccatcccaccacttctggggtgggcagcagcttcaactgaactgtcactaaacgcgatgatactccctgccgcattgtacttttggcaaatacctcattttatggctctcgcgtacttatgtcgaaatgattaccttgctggagggtatcgaatgttttcttttgctgaccctaccggtagaagaactgcatgggtgtcgctaagaaattgtctgtacatgctacctttggggttatttgcgtacaactgtaagtactaaacatattggatttctactgtccttgtcttgatgtgttttttttttgtcaatttgggatcttatatggaattaacccttggtaggggggctcacatccgagtggttcagttttgaagcttcactcctaacattaggccttaccatcggagctctatcattcgtcctagaaccaagcccgaagactgcgaggagaatgttctatggtagcctgctgtatctccctgccttcatgtccggacttctgttacatcggctaccaagtgaacaaaaggcgcacaacctggctgagaacaatgagctggacggagttctgtacggggctgatctgcaggacgaagaacgagcaagacagaaacgccaagacacgaaaccttctcgtgtgcaatcactccctccagtttcctatgcttctgtggctccattccctttcctaccggtacccatatacgagtcatgaaaagttgaaaacctcctctggttcttcctgcagccgtggggtagttggagcaatgtattcatgcatttttggcttacatgagttttccgccatcaagaagagtccttggtatggtgcgtctgttgttaaaattatagaatacgtttttgtgtgtgtggattgagccttttgcggctcacctacaaatgtaaaaagtga

SEQ ID NO: 154103 - DNA, 1872 bp, Zea Mays
gaaacaatcggtctctatctttctcatgaatctcagcctagcttaccatcttgacctgccccacacgtcccaccggccaccaccgggtttcgtcgctgccgccgcccgcacctgcagccgccatgtggaggggcggctctacagccgcctccgccgcgagggctctccgctcgcgcctcctcctcgaccccatccaccacccggccacgtcgctcgctccaatcgcttcggcgcgtacctcctcctcttccaccccgtccaccgccgcggcgaacaccatcgtggaagaagcggcggcagcggtatccgtttctcagcataccggatccatctccgactcgctgcggcactacgggaagtgctactgggagctctcgaaagcccgcctcagtgctcttgttgtggcaacttcgggggctggctatgtgcttggtagtggcaacatcgtggacattgccggcctttgttgcacatgtgccggtacaatgatggttgcagcatctgcaaataccctcaaccaggtgtttgagataaaaaatgatgctaaaatgaaaaggacaatgcgacggcccctgccatctggtcgcattagtcctgcacatgctgcgatgtgggctacaagtgttggagttgcaggaacagctttgctggcctggaaggctaatggcttggcagctgggcttgcagcttctaatcttgttctgtatgcatttgtgtatacgccgttgaagcaaatacaccctgttaatacatgggttggggcagtcgttggtgccatcccaccacttctggggtgggcagcagcttcaactgaactgtcactaaacgcgatgatactccctgccgcattgtacttttggcaaatacctcattttatggctctcgcgtacttatgtcgaaatgattaccttgctggagggtatcgaatgttttcttttgctgaccctaccggtagaagaactgcatgggtgtcgctaagaaattgtctgtacatgctacctttggggttatttgcgtacaactgggggctcacatccgagtggttcagttttgaagcttcactcctaacattaggccttaccatcggagctctatcattcgtcctagaaccaagcccgaagactgcgaggagaatgttctatggtagcctgctgtatctccctgccttcatgtccggacttctgttacatcggctaccaagtgaacaaaaggcgcacaacctggctgagaacaatgagctggacggagttctgtacggggctgatctgcaggacgaagaacgagcaagacagaaacgccaagacacgaaaccttctcgtgtgcaatcactccctccagtttcctatgcttctgtggctccattccctttcctaccggtacccatatacgagtcatgaaaagttgaaaacctcctctggttcttcctgcagccgtggggtagttggagcaatgtattcatgcatttttggcttacatgagttttccgccatcaagaagagtccttggtatggtgcgtctgttgttaaaattatagaatacgtttttgtgtgtgtggattgagccttttgcggctcacctacaaatgtaaaaagtgatgttgatgttcattctgatgattcgatcgacacggatgtgctgatgtcccgaaacattatgcttttcttgtaaaattcgatgtcctgaaatataaatgatggaagaaaggatgctttaaaaggcgcgctattggagcttggagggtataggagctcccctatttagaggacagtagactttagagtcagattgaaagcgagtggctctttaggttactcgcctgccttttccgtgagagcccctcgtgcttcttctcgcaaggaaaggaaaaaaaaa

SEQ ID NO: 154104 - DNA, 788 bp, Zea Mays
cccacacgtcccaccggccaccaccgggtttcgtcgctgccgccgcccgcacctgcagccgccatgtggaggggcggctctacagccgcctccgccgcgagggctctccgctcgcgcctcctcctcgaccccatccaccacccggccacgtcgctcgctccaatcgcttcggcgcgtacctcctcctcttccaccccgtccaccgccgcggcgaacaccatcgtggaagaagcggcggcagcggtatccgtttctcagcataccggatccatctccgactcgctgcggcactacgggaagtgctactgggagctctcgaaagcccgcctcagtgctcttgttgtggcaacttcgggggctggctatgtgcttggtagtggcaacatcgtggacattgccggcctttgttgcacatgtgccggtacaatgatggttgcagcatctgcaaataccctcaaccaggtgtttgagataaaaaatgatgctaaaatgaaaaggacaatgcgacggcccctgccatctggtcgcattagtcctgcacatgctgcgatgtgggctacaagtgttggagttgcaggaacagctttgctggcctggaaggttcttgctttctctttgcatctatagatgcatattctactttcttttgaaatttactaagctgtgaggtagtcagaaagctgacactggaactaaacatgcaaaaaattggcaaggtttgtgcaggctaatggcttggcagctgggcttgcagcttctaatcttgttctgtatgcatttgtgtatac

SEQ ID NO: 154105 - DNA, 1765 bp, Zea Mays
gacccaaacatcgtcaattcgctcataacagacaaaaagtatgttcacagatttctttacaatgcaggtgtttgtcattgtaacaaaaaattctaagacatcttgttgctctatcatatatgaagaattaacaagtatatatagacgcacgattcagagcctcaaagcagcaatagcttcaggcctgaagtcagtcctaagtcctaacaccctccgcacctctgcaggtgtcaacagccatgtcagatggccagcattgtcaccccagaaatccagtatctctgatacccgctcaaagtttagaatggtcgacatctgcgaaagcctagagaacttgtctctgactggtctctgggacatttctgagaaatggttgatcagagaccggacctccttgtcgagctggagcccaccaagctggctgaacctcttctgcatcattatcacctcgagccttttgacaatgaagtcaatgatcaagtgcacaaaggaatcgtagttgtttgatgtcatcactggctggagccaagcaacattagtgttaactgcaagtattagcttctgcacccatggatcattcacctcattttccccatattcagcatcatccaacccataactgacagtagcaacagtgtcaaggattggacggatgcgtggcgccacagatgccactaaatgctccagcgcagaatgaaggatcttcttaaaggaagcactgatctctcctagctctgataaacaggacttgatcttctctcgatcagctggagtatgaaaaatctgttggacagacacaaatcagtggagtttgtatcaaccatattgatacagcaatcaaatcactactcactagttattaatgacaccattacgtcatacaaagccacataggatttttttagaaccattagggcaagtacatggtctcatacaaagccacataggatttttttttatgatgtggacgagaagagggagggtgagagaaagaggttgttgtttcgtgaaacaaccacctcataaactaagatttaggaatatgagactgcttctgcaccattgtatgacttgtcgacatgcaaatcaaaacattccttttgttctacacacaaattaagtaaatgtgagtcactacaagacaactcaaatgataagttattgtacagattgtgtcataattcaactcaagattacatggtactacacgagaccacctacaagacaacaccaatatacttgccctagtccatcatggacgaggctgcgaagattacgaggggctggtgcagcggtggccgctgcgggcctgcggcgtgcctagggagggggttgaaggcacataggcagcgccagcgccggccgcttggagcgctggagtggacgagcaggagctggtccggccgtccgcccaagagagaaggcgagggcagagcagggctagggtgccgccgccgcgaccttgacctggagtcccgccaccgcggcggcggcctggagagggtctcggcggggcggatacggcgtggggaggcgcgacagcgcgatggccagcaggtggcgcggctgctggctcgacctgcagtgccagcgggtggacggcggcggctggcgtcctggctacgaccccgggggagggaggggggaaggggggcagcagcgggggaggaaggggagggctgacagccggtggccagagagatgcccgggggtcggcggcggctgtggggtgggttgggagaaggtaaaactggctctggaaccc

SEQ ID NO: 154106 - DNA, 425 bp, Zea Mays
gcaggcgtcgtcggcgcgcccgggcgcgcgtaccccatgatcgaggcgacggcgagacgcggcgctcgcacggagagcgccaaggtcaggaaccgtcggctgcagaagaagttcaacggcacggcgacgaagcccaggctctcggtgttctgctccagccggcagctctacgccgttctcgccgacgaccacaacaaggagatcctcttctacggcagcacgctgcagaagtccatctgcggcgacccgccctgcggcacggtggaggctgcccggaggctcggggaggagctcgtcagggtgtgcaacgagttgggcatctccgagatctcctacgaccgcaacggctttgctcgaggcgacaagaagatgacggcgttcgaggttccggacttccggtctcacagcatgggttcatgccaaga

SEQ ID NO: 154107 - DNA, 1999 bp, Zea Mays
aatagcgttcagtccccactccccactcctcactctcgcggtcgcggcctcaccggtcactgcttctcgaaccgccgggagctggaatcgcctccatagggaactgctctaatgcccgcggcgatctggaggcggccgcccgcccacctaggccacgtgcgatggtgaggtcgaggcctagggtttggctagtggcgggctgcgccgccgtcctgctgtgggcctccgtcgcgcagctcgtcgccgtcggccgccttctcctcctttttggcctcgcgggcgacgcggtttcatcgccgccacctactgcgcttccgcccccgagaatatacaagagcaatggttatctgaagatatcttgtaatgggggtctgaatcagatgcgctcagagatatgtgacatggtagcagttgctcgccttctaaacctcactatggttgtcccagaacttgacaagagatcattctgggctgatcaaagtaattttggggacatatttgacgtgaagcattttattgactcattgagagatgaggtccacatcattgaacagcttccggagaagcttggtccaagagattcagacattattatacttgaaatgtcacctgtgagctggtcagatgaaaaatattacttgcatcagatcttaccactgttcagcaaatacagtgtcatccattttaacaaaacagatgctcgcttagccaataatggtatcagtacagagattcaactgcttagatgccgtgttaattttcatgccctgaaattcacacctcaaattgagggattagggaatgaactggtacataaactgcgagccaagggatcatttgtagccttgcatttacgttatgagatggatatgctggcgttttctggttgcaaccatggcctttcacctgaagaagctgaggagctcaaaaaaatgagatatgcttatccatggtggagagataaagaaattgattcccaagccaagaggttgcaaggactatgcccacttactcccgaggaggcatcacttgttttgaaagctcttggatttcaaaaggatgctcttatatacatcgcagctggggaaatttatgggggagataggagactagagccactacgggctgcttttccaaaccttgtacgaaaggtgatgctgctaaactctgaagttctgcgtcaattccaaaatcactcttcccagatggctgcacttgatttcattgtatccacagctagtgatgttttcattcccactttcgatggtaacatggcaaaacttgttgaaggtcaccgaaggttcctgggtttccggagaagtgtggtgctagaccgacggaaattagttgaacttctagacctgtacaccaacaagacaatgtcttgggacaattttgcatcttctgttcaggaagcacataagaactgtgtagctcagccatcctgcaggcgagaacttaaaaacagaccaaaagaagaggattacttctatgctaacccccacgaatgcctagccaattcaaccttgtgcagctaaactgagtttctggtttctttaaggtaaccaggtgggcgtgaaatcatttccgagcacgcagtggctcacagtcgttttggtgtcgtgttgtcaagggaccgagccagcttacacggagcatcacatatcttttggctttacattccttatttcactgttatataggtcagtttttttgcttctctgttgattcgttggcttttccaacatgccaaaagcggcctgtttggggcatgtaaatttcggtctgttgtctaccatgcttgttcattggtgactattgactaactagtgctgctaggccgaagggttagctttttattccttttcaatttatttccctaatttttacaagtgcttagtgaaattatcaccttctaaaattgtgctatgtcaaagcaggagtgctgcacctgcctgcctttttatggaaaatgctgtccagtttgcttgttgcatca

SEQ ID NO: 154108 - DNA, 1918 bp, Zea Mays
aatagcgttcagtccccactccccactcctcactctcgcggtcgcggcctcaccggtcactgcttctcgaaccgccgggagctggaatcgcctccatagggaactgctctaatgcccgcggcgatctggaggcggccgcccgcccacctaggccacgtgcgatggtgaggtcgaggcctagggtttggctagtggcgggctgcgccgccgtcctgctgtgggcctccgtcgcgcagctcgtcgccgtcggccgccttctcctcctttttggcctcgcgggcgacgcggtttcatcgccgccacctactgcgcttccgcccccgagaatatacaagagcaatggttatctgaagatatcttgtaatgggggtctgaatcagatgcgctcagagatatgtgacatggtagcagttgctcgccttctaaacctcactatggttgtcccagaacttgacaagagatcattctgggctgatcaaagtaattttggggacatatttgacgtgaagcattttattgactcattgagagatgaggtccacatcattgaacagcttccggagaagcttggtccaagagattcagacattattatacttgaaatgtcacctgtgagctggtcagatgaaaaatattacttgcatcagatcttaccactgttcagcaaatacagtgtcatccattttaacaaaacagatgctcgcttagccaataatgggaatgaactggtacataaactgcgagccaagggatcatttgtagccttgcatttacgttatgagatggatatgctggcgttttctggttgcaaccatggcctttcacctgaagaagctgaggagctcaaaaaaatgagatatgcttatccatggtggagagataaagaaattgattcccaagccaagaggttgcaaggactatgcccacttactcccgaggaggcatcacttgttttgaaagctcttggatttcaaaaggatgctcttatatacatcgcagctggggaaatttatgggggagataggagactagagccactacgggctgcttttccaaaccttgtacgaaaggtgatgctgctaaactctgaagttctgcgtcaattccaaaatcactcttcccagatggctgcacttgatttcattgtatccacagctagtgatgttttcattcccactttcgatggtaacatggcaaaacttgttgaaggtcaccgaaggttcctgggtttccggagaagtgtggtgctagaccgacggaaattagttgaacttctagacctgtacaccaacaagacaatgtcttgggacaattttgcatcttctgttcaggaagcacataagaactgtgtagctcagccatcctgcaggcgagaacttaaaaacagaccaaaagaagaggattacttctatgctaacccccacgaatgcctagccaattcaaccttgtgcagctaaactgagtttctggtttctttaaggtaaccaggtgggcgtgaaatcatttccgagcacgcagtggctcacagtcgttttggtgtcgtgttgtcaagggaccgagccagcttacacggagcatcacatatcttttggctttacattccttatttcactgttatataggtcagtttttttgcttctctgttgattcgttggcttttccaacatgccaaaagcggcctgtttggggcatgtaaatttcggtctgttgtctaccatgcttgttcattggtgactattgactaactagtgctgctaggccgaagggttagctttttattccttttcaatttatttccctaatttttacaagtgcttagtgaaattatcaccttctaaaattgtgctatgtcaaagcaggagtgctgcacctgcctgcctttttatggaaaatgctgtccagtttgcttgttgcatca

SEQ ID NO: 154109 - DNA, 1890 bp, Zea Mays
tctttggagacactgaaccattcgtgcgcgccctctgccgcgcttccgacagctgatgctgcgcaagtcgggcacccagcgccagcagccggcgttgtggcggcggtgccgcagcctccggcagatcaagcaggtccacgcgctcatggtcctccagggcttcctctcggactcctcggcgcttcgcgagctcatcttcgcctccgctgtcggtgtccggggcggcaccgcgcacgcccgcctcgtgttcgaccgaatcccgcaccccgaccggttcatgtacaacaccctcatccgcggcgccgcgcacagtgatgcgccccgggacgccgtctcgatctacgcgcgcatggcccggcacagcgccgactgcgacctgatgacgctgaggccggacaagcgcaccttcccgttcgtgctccgcgcctgcgccgccatgggcgcgggcgaaaccggggcgcaggtccacgcgcacgtcgtcaaggccgggtgcgagtcggacgctttcgtcaggaacgcgctcatcggcatgcacgctaccctgggggacctaggtgccgcggctgcgcttttcgacggagaagcgcgcgaggacgccgtggcgtggtcggcgatgatctccggcttcgcgaggagaggggacattggtgccgcccgggagctgttcgacgagagccccgtgaaggacctcgtgtcgtggaacgtgatgatcacggcatatgcgaagctgggtgacatggccccggcgagggagctcttcgacggggctcctgatcgtgatgttgtgtcgtggaacgccatgatctctgggtacgtgaggtgcggctcgcgcaagcaagcgatggagctctttgagcagatgcaggccatgggagaaaagcccgatactgtgacaatgctcagcttattgtcagcctgtgccgactctggtgatctggatgctggccgcagactgcacgggtttctatcggggaggttttctagaattgggcctaccactgctcttggaaacgcgctgatcgacatgtatgcaaagtgtgggagcatgacgagtgcactggaggtgttctggttgatgcaagataagaatgtctcgacctggaactcgatcataggaggattagcgttgcatggccatgccacagagtccatagctgtgttccggaagatgctgcaggggaatgtcaagccagacgagatcacctttgttgctgtccttgctgcgtgcagccatggcggaatggttgacaaggggcacgagtacttcagtttgatgcaacaacggtacaggattgagcccaatatcaaacactacggttgcatggttgacatgctgagtcgtggcgggctgctcaaagaagcatttgagtttattggcacaatgaagatcgagcctaatcctgtcatatggaggaccctgcttggggcttgtaggatccatggtgagatcgaactggctgagcatgcgaatcgggaacttctaaaggcaaggagtgatgcaagtggggattttgtgcttctgtcgaacatttatgcatcggttggagaatggccggggtcagagaatatgagaaagttgatggatgacagtggtgtcaacaaggaagcaggccgtgcagttatagatagcagttcaaaggatctaatgcgatcttctagactattctaattgaattctgtatttaaaagattttttcacctgtttaccaaacttccatctacagggcaagaaatcgaacacctcgtcctgttcttctgtcaatgaagagaaaaatgtccattatcactcgttgtgctatcattggctccaatgagactttgctggattttttaagatatatccagctaaaaagggcatgtaagtctgatcaatacatgtgcattcatcta

SEQ ID NO: 154110 - DNA, 1188 bp, Zea Mays
ggggaaggaacgccacagactccgggaaattgccgttgcatttgcagcaggttagacatgtcgtcgtcgtcgtcgtcaatgctacgccttcctccatgccgtcccgcagtccatccagtgtgtaggggtgctggatcatcaggagggagcagtagcacgcacccactccgatcaagctcaagatcaaggccgtcgtcgctcaccgctgcgtgcgctctcaagacgccctcgaatggcggatcgagggggaaggtcaaccccagggacctcttcaccttctcccacaagttcagcaccgacatcccgatgagcgaaacgcaaggggcgtccatcgatgagtacctgcggaacagtcccaggatcgtcggagcggtgtttccggaccagcgcaagagaaggaagatcaacgacgaagaatggagcgtgcagctcctgcccatccggttcctgttcctgtcggcgtcgccggtcatcgtcatgcgcttcgtcagcaagtccggcgggaaggagtacccgcccaacgtccccgtccacgccaccagcctcctcctcatggaagtgacagactacaagctgaatggtctggacagcaacgccatgccgtcgcacctggccctcaccgtccgaggcctcatgtacccgcagcggcagcgggaggggaggaagagcctcaagggccacgtcgagatgaccgtcggcttcgacctcccgccggtgctcgccttggtcccggcgagcatcatcagaggcgtcggcgagacggtgctgaggcagatggcggagcagatgaagcaggacatggacacaggacttgcagcagatttcaacaagtacaggagggagaagctaacagagaggcgctcatcgccctgaattctgagacacatttcacaatcacatcccggcctgtatcgatgtatcatcaacaagtagccatgactaggaatttcttcagactcgccttgtcgtcaagcagggtcgtcaacctcttgcactatttattcattcataagttggatgacatcaaataatgatattaacttgatgtattcgcatcttattcattgtaaaaacgttgctcataattaaagagcatccatccaatctcaaagagatttctggagcaattatgtctgtatgtactgttcattcaccagttggaagacatcaatcaaataatgacaataa

SEQ ID NO: 154111 - DNA, 331 bp, Zea Mays
atggagccattcgcgtccacgtccgctcccccatatccgatccactgtacctcgcgagcgtagggcgactcccttcatggatccattgctcctcgtccctgcgccgccgtcgctcgacggagccggcctcatcgtcgctcggaagcaagtcttcgcccccccttcccaccccttgcccacgcacacacacgttcgccagatcccctccgtctccaccgccgtgatcgagcaggtgggtcaagtcactagtggccctcaaggcgcccgagaaggcgacgggggcataagggtggccacacgtagtgtctcaggtggagctagccggtcgtgt

SEQ ID NO: 154112 - DNA, 1915 bp, Zea Mays
gtggagcaaggaggcccacctggcgggcggggttctcgaccaatcactccagtatccagtctctctctcggctctcctctccccgatttccttccccacccgctgtcagtctcactccccgcgcgcgcgctctctctttcctcgccttcgccgccggcgacgagcttgagctcgagctggttcctcgtatagaagacgacggccgcggtatggagcccatgaacgtagacaacggcggcagcggtggccttgacgcgcagatcgaacagctgatgcagtgccgcccgctcgccgagcaagaggttaaggcactgtgcgagaaggccaaggagatattgatggaggaaagcaacgttcagcctgtcaagagtccagtgacaatatgtggtgatatacatggacaattccacgatcttgtagagcttttccgaattggcgggaaggtaatgactatgttgactcaactttgcttcttttttttcccttgaaaatttgttctgcccaagattgaagccaccatttccatcctctaatccctgccagttttattctcttctgtttccagtgtccagacaccaattacttatttatgggagattatgtagatcgtggctactattctgttgagactgtcactatgctagtagcactaaaagtgaggtatccacatcgaattacaatccttcgtggaaaccacgagagtcggcagatcacacaggtgtatggattctacgacgaatgcctacgaaagtatggcaatgcaaatgtatggaagacatttacggatctttttgattattttcctctgacagctctggtggaatctgagattttctgccttcatggtggtctatctccatcaattgaaaatcttgatagtgtgcgcagcttagatcgagtccaagaggttccccatgagggacctatgtgcgatctcttatggtcagatccagacgaccgatgtggttggggcatctcccctcgcggtgctggctacactttcgggcaggacatatcagagcagtttaatcacacaaacaatctcaaactcgtagctcgggctcatcaattagttatggagggatataactgggctcatgagcaaaaggttgtcaccatattcagtgctccaaattactgctatcgatgcggcaatatggcatccattttggaagttgacgactgcaacagccacacattcatccagtttgaaccagcccctaggagaggtgagccagatgtgacgcgaagaacaccggattatttcctttgagctgtcgatgttaccgtttcccagcctgtgtcgtgataatcgatgtcaacgtctgctggatcaagggccagacagaaataacaggggaatgccgaagcactatgcccagagtttcacccttttcaggcgacagagaagggcggccatccacctacaactctggccgccctctgttttatgcagtttttacagagtcgtggaactggccaaaaagaccggagtaccatttgcacctgtgtagcgtaagcttgtactacaaataggcgtgtgctaatctgtatcaccattcatcaattgcaaggaactgttgaactccttccatcagtaaagtaaattttggtaaaagaacggcttacagtgtcgggaatgacactatcagacagccacgatgtttcgtcagatttgttactgacgaccatcacagagttcattttgttttgaagtacaagcgcaagaatcaacagctcaacatggaggagagatgaacagcatggtatatctatctttagtgcaatgcaagcgcaaccttaggttgctgctacgtacgtagcagtagtatgaggatggaacgtacggcaagattggtcgtcggtcaccggccgtgtggtgtgacggcggcatggcaatggcatgtagcagcag

SEQ ID NO: 154113 - DNA, 2047 bp, Zea Mays
gtggagcaaggaggcccacctggcgggcggggttctcgaccaatcactccagtatccagtctctctctcggctctcctctccccgatttccttccccacccgctgtcagtctcactccccgcgcgcgcgctctctctttcctcgccttcgccgccggcgacgagcttgagctcgagctggttcctcgtatagaagacgacggccgcggtatggagcccatgaacgtagacaacggcggcagcggtggccttgacgcgcagatcgaacagctgatgcagtgccgcccgctcgccgagcaagaggttaaggcactgtgcgagaaggccaaggagatattgatggaggaaagcaacgttcagcctgtcaagagtccagtgacaatatgtggtgatatacatggacaattccacgatcttgtagagcttttccgaattggcgggaagtgtccagacaccaattacttatttatgggagattatgtagatcgtggctactattctgttgagactgtcactatgctagtagcactaaaagtgaggtatccacatcgaattacaatccttcgtggaaaccacgagagtcggcagatcacacaggtgtatggattctacgacgaatgcctacgaaagtatggcaatgcaaatgtatggaagacatttacggatctttttgattattttcctctgacagctctggtggaatctgagattttctgccttcatggtggtctatctccatcaattgaaaatcttgatagtgtgcgcagcttagatcgagtccaagaggttccccatgagggacctatgtgcgatctcttatggtcagatccagacgaccgatgtggttggggcatctcccctcgcggtgctggctacactttcgggcaggacatatcagagcagtttaatcacacaaacaatctcaaactcgtagctcgggctcatcaattagttatggagggatataactgggctcatgagcaaaaggttgtcaccatattcagtgctccaaattactgctatcgatgcggcaatatggcatccattttggaagttgacgactgcaacagccacacattcatccagtttgaaccagcccctaggagaggtgagccagatgtgacgcgaagaacaccggattatttcctttgagctgtcgatgttaccgtttcccagcctgtgtcgtgataatcgatgtcaacgtctgctggatcaagggccagacagaaataacaggggaatgccgaagcactatgcccagagtttcacccttttcaggcgacagagaagggcggccatccacctacaactctggccgccctctgttttatgcagtttttacagagtcgtggaactggccaaaaagaccggagtaccatttgcacctgtgtagcgtaagcttgtactacaaataggcgtgtgctaatctgtatcaccattcatcaattgcaaggaactgttgaactccttccatcagtaaagtaaattttggtaaaagaacggcttacagtgtcgggaatgacactatcagacagccacgatgtttcgtcagatttgttactgacgaccatcacagagttcattttgttttgaagtacaagcgcaagaatcaacagctcaacatggaggagagatgaacagcatggtatatctatctttagtgcaatgcaagcgcaaccttaggttgctgctacgtacgtagcagtagtatgaggatggaacgtacggcaagattggtcgtcggtcaccggccgtgtggtgtgacggcggcatggcaatggcatgtagcagcagcaacggtctgggcctggcagatagtgtacacgcccgccgtcgcgcatgccgggcggtcacacggaggtgctggcgagcagctggttggcggcgacgcccctgcccttcatgacgtgcttccggagtccagggatgtggacgttggtgatgtagtccgcccagtccacgccccgcacgtcgaagtggaaccgcgccctctccgccggcgacatggccgcgagcagcgcctccgtgttggcgttgtcgaagcggcc

SEQ ID NO: 154114 - DNA, 570 bp, Zea Mays
atgtcctgcaggcatttgaacagctccgtgtccacgacctcgtttcgcaatctcgccaacgctgcttcgctgtccttggccttgatgagcacgtacaccttgccgacgtcagggtttgtcctcaaaatcttctcgataagaacttttgccaggaaaccggtcccgccggtgatgaggaagttcttggcgccgagaaactcggcgacaccgatcccgccgccggcagctccaggcggatccccgtgcgccgggtcgacgaaggacggcagcggtggcggcggcctcgatgagccggcagcagtagcggaggacgacgacgagcagcacgccacggcgccgccgccgtgcaggcgcctcgacgacgacgacagcagcgggagaaggaggccacggcggcggcgggatccctcggcggcgccgaagccggggaggacggcgcgggagaggttcacgcaggaactccccattggcccgcgcgcgcgcggccgcaaagaaatgcaggtgcgggcttggtggtgcgcgagggtaagctctcccgcgcgggcgcggttgcggtttgcagcagggtag

SEQ ID NO: 154115 - DNA, 2444 bp, Zea Mays
cgcctcgagggcccacatcgctctctcagccatcacaccaccgcctcccccgtccccgcctcgccgccgccgccgtcgtggcctgccggcctccgatggcgaagacccgcatgcctgcgtccccaccccccgcagaaacgccgactccgcagcggcggcgcaagaagaagggccgcccgtccctcctcgacctccagcgccgcagcctccgcctccaggcccaaaaccctagccccgacccctcgcccacccgccgggagcccaaccccttcgacgacgatgaggacgggaccgggagcgggcggcggcgccagaagcgcttcaagagcgtcctatccggcgttgttaaggaggagctgggggagggggagaaggatgccgcgaaagcgacggggaaaggggacgctgcgtcggatggtgggcccgcggggactcccctcccagacaaaaagttgctactcttcatcctcgataggctccagaagaaggatacttatggagttttctcggagcctgtcgacgcagaggagcttccagattactttgacattattgatcatccgatggacttctcaacgatccgtgagaagctgttgaatgactcgtattctaagttggaacagtttgaggatgatgtatttctactcacatcaaatgccatgtcttacaattcagcagacacaatctacttccggcaggcacggtctattgaagctcttgccaaaaaggattttgagaacttgaggcaacccagcgatgaagaagaacccaagccaccagctcgaagaggtaggccaccaaagaatccgaagatggagggtgatgcgtcaccagacctatccaatatgaaaacaagcaaacctgaagacagtatcgatacattcaggaaaaaatcaactggagatataactcgaaatacaaatactacgatgaaagagccatccagttttcacagtatgcttggttcttttagtgcaaaaagagcagataaaatcggtgattattcaggttcatccaagtggggaaagaaacctgttggtgtagatgatgaccgcagaagtacatatgatcagcactattcatgtaatagctctctgtttgctgccctggacgacgggaggaaactactagtgccagtaggggttcagcagcaacatgcatatgctaggagcttggcacgatttgcatcaaaattgggcccagttggctgggatgtgacagcaaatcgtatcagaagggcactaccccctgggacaagttttggcccagggtgggttgtagatggtgaaccacctcaaaactctcagcggggtcctgtcgcatcaaccgacccctcctctgaatccactgatccacccaatatgccatccaagaatgatgtactccaccagaagtgtgggctgtcttcaaatgggtacgttactggtgaggagcatttaactagaactcaaacagtggcttctacatcagcgagctctgaaatttccagcaaagtaaacaagcttgagaatggggttaccaaatcatgtggtggtatgggcaatacgggatcagcagggcctccaatgcagcagctctgcctacgcggtccagaaatccgttctaacatcaatggctttcctgctatgtcaaacgccacgagtcagtatgccgggcaaggtttgtttggatcaggcatccctatgacacacgcccaagtgctggggatgttttctggaatgaacggcaaagccaatggctatgtccataggcacccagtggctgctgatagtcttaaaacagcagcgcagaacggagatgtcggaaaggcagctgtcaaccctgtgcaaggtgcaggtcatgatccaaagattgccaacggtaatagttctgctcacccaggcttaaattccggtgtccagtcgtcaggttccccacctaggcgaacgctggcaaacccaaagcaccctgatctggccttgcagctatgaggtagccattgacatagtttgccttagtactgtgatctgtgacagaggcatgagttcaacactgcttcgtccggtaccttgccaagcggagcacgagaccgatcgaagaggtaagaagtgtttggtttgtcgtcagagagaggggtggcggcagcgggacatcgtgtagggtccctcgatttaattgatcatttgaccccctgtgagttgtttgtaaaagggtagggtagcttctgtacaggttctaatcttactggagatgataatgcttcggatgaaggcagcgcccgctgtccagcttgtaacattattgatagtagaaagaagaggagggaagcatacaggcgaaaaggcagtgaataatttgtgccttttttgttttgcccctcccccccccccccccccccccccccggccctgagttgacgcactccgtttccaaatgtacgagtggctaacctcggtcagcttttc

SEQ ID NO: 154116 - DNA, 1308 bp, Zea Mays
cacgcaccccgacccgacccgtttccaggccatcacaccaccgcctcccccgtccccgcctcgccgccgccgccgtcgtggcctgccggcctccgatggcgaagacccgcatgcctgcgtccccaccccccgcagaaacgccgactccgcagcggcggcgcaagaagaagggccgcccgtccctcctcgacctccagcgccgcagcctccgcctccaggcccaaaaccctagccccgacccctcgcccacccgccgggagcccaaccccttcgacgacgatgaggacgggaccgggagcgggcggcggcgccagaagcgcttcaagagcgtcctatccggcgttgttaaggaggagctgggggagggggagaaggatgccgcgaaagcgacggggaaaggggacgctgcgtcggatggtgggcccgcggggactcccctcccagacaaaaagttgctactcttcatcctcgataggctccagaagaaggatacttatggagttttctcggagcctgtcgacgcagaggagcttccagattactttgacattattgatcatccgatggacttctcaacgatccgtgagaagctgttgaatgactcgtattctaagttggaacagtttgaggccctcaggcgaaggagcccataggagaaggggtcctcgccaaggacaacattcgctaaccggaggtctacaagcgaaggggtctacgacccaacgggcgacgacaacttgtcagcaaaacccgaggccttcgccatctcatcgactgaaggaccatccggccgggcgcaaccggagggagcgaaaatgcgaaggctgttggagcggaggctacgtgttgaccccaaacacctctagtgcaccagaagacaccgccaagggcccacccgtcagcgtagcgtgtgagtgtgttgtctggtatacgtggattactgtacgggaagtgatgtaatactccgttacaggggatattccctggatatagttggtagccgggggcagggccgtattttagaccacctacccccagacggatctataaatactctcgtcctgtagcgggatgggacacaagaagctacagttcccccagtttgtctcattgtgcaactgagctctcaccgctccccgagtgtttgggtccacctgtcagcccagccgcgtgacagtgcccaacaatagaattatttgctctttgtaactcccagcttcatccactgacatagggttgcactgaatgctgtattgctttgttgaatttcattttcttgatgcagaatatataaatatattacaatat

SEQ ID NO: 154117 - DNA, 2725 bp, Zea Mays
cacgcaccccgacccgacccgtttccaggccatcacaccaccgcctcccccgtccccgcctcgccgccgccgccgtcgtggcctgccggcctccgatggcgaagacccgcatgcctgcgtccccaccccccgcagaaacgccgactccgcagcggcggcgcaagaagaagggccgcccgtccctcctcgacctccagcgccgcagcctccgcctccaggcccaaaaccctagccccgacccctcgcccacccgccgggagcccaaccccttcgacgacgatgaggacgggaccgggagcgggcggcggcgccagaagcgcttcaagagcgtcctatccggcgttgttaaggaggagctgggggagggggagaaggatgccgcgaaagcgacggggaaaggggacgctgcgtcggatggtgggcccgcggggactcccctcccagacaaaaagttgctactcttcatcctcgataggctccagaagaaggatacttatggagttttctcggagcctgtcgacgcagaggagcttccagattactttgacattattgatcatccgatggacttctcaacgatccgtgagaagctgttgaatgactcgtattctaagttggaacagtttgaggccctcaggcgaaggagcccataggagaaggggtcctcgccaaggacaacattcgctaaccggaggtctacaagcgaaggggtctacgacccaacgggcgacgacaacttgtcagcaaaacccgaggccttcgccatctcatcgactgaaggaccatccggccgggcgcaaccggagggagcgaaaatgcgaaggctgttggagcggaggctacgtgttgaccccaaacacctctagtgcaccagaagacaccgccaagggcccacccgtcagcgtagcgtgatgatgtatttctactcacatcaaatgccatgtcttacaattcagcagacacaatctacttccggcaggcacggtctattgaagctcttgccaaaaaggattttgagaacttgaggcaacccagcgatgaagaagaacccaagccaccagctcgaagaggtaggccaccaaagaatccgaagatggagggtgatgcgtcaccagacctatccaatatgaaaacaagcaaacctgaagacagtatcgatacattcaggaaaaaatcaactggagatataactcgaaatacaaatactacgatgaaagagccatccagttttcacagtatgcttggttcttttagtgcaaaaagagcagataaaatcggtgattattcaggttcatccaagtggggaaagaaacctgttggtgtagatgatgaccgcagaagtacatatgatcagcactattcatgtaatagctctctgtttgctgccctggacgacgggaggaaactactagtgccagtaggggttcagcagcaacatgcatatgctaggagcttggcacgatttgcatcaaaattgggcccagttggctgggatgtgacagcaaatcgtatcagaagggcactaccccctgggacaagttttggcccagggtgggttgtagatggtgaaccacctcaaaactctcagcggggtcctgtcgcatcaaccgacccctcctctgaatccactgatccacccaatatgccatccaagaatgatgtactccaccagaagtgtgggctgtcttcaaatgggtacgttactggtgaggagcatttaactagaactcaaacagtggcttctacatcagcgagctctgaaatttccagcaaagtaaacaagcttgagaatggggttaccaaatcatgtggtggtatgggcaatacgggatcagcagggcctccaatgcagcagctctgcctacgcggtccagaaatccgttctaacatcaatggctttcctgctatgtcaaacgccacgagtcagtatgccgggcaaggtttgtttggatcaggcatccctatgacacacgcccaagtgctggggatgttttctggaatgaacggcaaagccaatggctatgtccataggcacccagtggctgctgatagtcttaaaacagcagcgcagaacggagatgtcggaaaggcagctgtcaaccctgtgcaaggtgcaggtcatgatccaaagattgccaacggtaatagttctgctcacccaggcttaaattccggtgtccagtcgtcaggttccccacctaggcgaacgctggcaaacccaaagcaccctgatctggccttgcagctatgaggtagccattgacatagtttgccttagtactgtgatctgtgacagaggcatgagttcaacactgcttcgtccggtaccttgccaagcggagcacgagaccgatcgaagaggtaagaagtgtttggtttgtcgtcagagagaggggtggcggcagcgggacatcgtgtagggtccctcgatttaattgatcatttgaccccctgtgagttgtttgtaaaagggtagggtagcttctgtacaggttctaatcttactggagatgataatgcttcggatgaaggcagcgcccgctgtccagcttgtaacattattgatagtagaaagaagaggagggaagcatacaggcgaaaaggcagtgaataatttgtgccttttttgttttgcccctcccccccccccccccccccccccccggccctgagttgacgcactccgtttccaaatgtacgagtggctaacctcggtcagcttttc

SEQ ID NO: 154118 - DNA, 2161 bp, Zea Mays
ctcggagcatctccaacaatacctcaaactagtgcctcaaattgaaatatggagctctacacagaaaaaactactccaacaacagtgccctatttcataattttttattaaaaaaattatagtacaccctctcaagtgactcaaatatactacaccgtagtgggctgccctataatctatatttagggctttactgttggagcggagtgttttgttggtgccctaaattctataaaatatacttattttcaaattataggacatttttatagttcacgttgttgtagatgctctcacacagacacagtccgcagtccacacgcacctcttccttctcccgccggagggcgcgccgcggaagacgccaatgagtttggtccggtccggtccgttggctccatgtaggcgcacgggagagtggagacacctgcctgatcctgcaatgcaatccgtcgccggctgctgatcaggcaacctcctgattcggagccatttcgcgggtgtcttgggggggcccatgcccatcgccgtgtttcgtttcctgctctgcccgctttggccgtgcattaatagccgcttccttgtgatagtcctccccttccgtcctctctccctctctctcttccacctcctctcctctcgctcagtcgctcgtcggctctgttcttgggagtgccagtcgggttgcgttgcggcagcacaaaaaaaccccccttcttggacagcatctgtctgcgccggtctgatgggcttgggttgcttcgggtgcttcgcgccggaggtggatgaggacctcaagccctccaagcccgacgactcgtcaggttcgttctcgattcccatccgcagcatcattcggttgggtcttgtggcttggattgctgtacttgattcttgccggggaaacagggaccgatgcgagaaggaaggtcgcgccggatgtggccaacggctacgcgcacagcttcaccttcaaggacctgcttgtcgctaccggctacttcaaccacgccaatttcatcggagaaggtgggttcgggaaggtgtacaagggcaagatcaacggacagatggtggctgttaagcagctcactcaagatggcgtgcaggggaggaacgagttcctggtcgaggtgctcatgctgacaatgctcaaccatcgcaatctcgtcagcttggtcgggttctgcgcgcagggggacgagagactgctagtgtacgactacatgccgttcggaagcctggagagccatctgtttgacgtgcctctcggcaagaaaccgctggactggaacacgcgtgtgaggatagccgtgggagtcgcggaagggctctcttacctgcacaacgtagccgatccgcccgtcatctaccgcgatatgaaggctgctaacatcctgctgggcgaggacttcagcccgaggctgtctgacttcgggctcgccaaagtcggacctgtcggagacaggacccatgtgtccacgagagtgatgggcacctatggctactgcgctcctgactacgttgtgagcggcaagcttaccatgaaatccgacatatacagcttcggcgttcttctgctggagctgatcacggggaggaggatctacgatgcttcaaggcctaaaccggagcagagcctgctgacatggtcgaggccgttcctgcatgataagaggaagttccaccggcttgctgacccgtctctgctgggctgctacccgtcatcggcgctgaaccagctagtggtgatcagcatcatgtgcctccaagaccagccccatgtccgcccaatcatctccgatgttgtgataggcctgaaccacgtcgcgagccagccatgcaccgctgagcgcacgctgccggcgtgcatgacctccccaccgagcagcgggtcgccgcagctcgtcagcacgccggcaagaaggagaggtggtaggttgatcgggcagtagtatgcttagggctcaagctcacgtctaaagaggtcagatgagaccggtaggggagggcagttgaaattgaagccgtcaagttcagttccatcgagtcagcctttttgattgaagcggtctcgagtgacttgcttgagcagttgagcttgaccatgcatgcctattgctcttttttcgacttcttcattgttttcagttttgaattc

SEQ ID NO: 154119 - DNA, 2076 bp, Zea Mays
ctcggagcatctccaacaatacctcaaactagtgcctcaaattgaaatatggagctctacacagaaaaaactactccaacaacagtgccctatttcataattttttattaaaaaaattatagtacaccctctcaagtgactcaaatatactacaccgtagtgggctgccctataatctatatttagggctttactgttggagcggagtgttttgttggtgccctaaattctataaaatatacttattttcaaattataggacatttttatagttcacgttgttgtagatgctctcacacagacacagtccgcagtccacacgcacctcttccttctcccgccggagggcgcgccgcggaagacgccaatgagtttggtccggtccggtccgttggctccatgtaggcgcacgggagagtggagacacctgcctgatcctgcaatgcaatccgtcgccggctgctgatcaggcaacctcctgattcggagccatttcgcgggtgtcttgggggggcccatgcccatcgccgtgtttcgtttcctgctctgcccgctttggccgtgcattaatagccgcttccttgtgatagtcctccccttccgtcctctctccctctctctcttccacctcctctcctctcgctcagtcgctcgtcggctctgttcttgggagtgccagtcgggttgcgttgcggcagcacaaaaaaaccccccttcttggacagcatctgtctgcgccggtctgatgggcttgggttgcttcgggtgcttcgcgccggaggtggatgaggacctcaagccctccaagcccgacgactcgtcagggaccgatgcgagaaggaaggtcgcgccggatgtggccaacggctacgcgcacagcttcaccttcaaggacctgcttgtcgctaccggctacttcaaccacgccaatttcatcggagaaggtgggttcgggaaggtgtacaagggcaagatcaacggacagatggtggctgttaagcagctcactcaagatggcgtgcaggggaggaacgagttcctggtcgaggtgctcatgctgacaatgctcaaccatcgcaatctcgtcagcttggtcgggttctgcgcgcagggggacgagagactgctagtgtacgactacatgccgttcggaagcctggagagccatctgtttgacgtgcctctcggcaagaaaccgctggactggaacacgcgtgtgaggatagccgtgggagtcgcggaagggctctcttacctgcacaacgtagccgatccgcccgtcatctaccgcgatatgaaggctgctaacatcctgctgggcgaggacttcagcccgaggctgtctgacttcgggctcgccaaagtcggacctgtcggagacaggacccatgtgtccacgagagtgatgggcacctatggctactgcgctcctgactacgttgtgagcggcaagcttaccatgaaatccgacatatacagcttcggcgttcttctgctggagctgatcacggggaggaggatctacgatgcttcaaggcctaaaccggagcagagcctgctgacatggtcgaggccgttcctgcatgataagaggaagttccaccggcttgctgacccgtctctgctgggctgctacccgtcatcggcgctgaaccagctagtggtgatcagcatcatgtgcctccaagaccagccccatgtccgcccaatcatctccgatgttgtgataggcctgaaccacgtcgcgagccagccatgcaccgctgagcgcacgctgccggcgtgcatgacctccccaccgagcagcgggtcgccgcagctcgtcagcacgccggcaagaaggagaggtggtaggttgatcgggcagtagtatgcttagggctcaagctcacgtctaaagaggtcagatgagaccggtaggggagggcagttgaaattgaagccgtcaagttcagttccatcgagtcagcctttttgattgaagcggtctcgagtgacttgcttgagcagttgagcttgaccatgcatgcctattgctcttttttcgacttcttcattgttttcagttttgaattc

SEQ ID NO: 154120 - DNA, 2328 bp, Zea Mays
gtagcaggctagcagcacacacagtcggagaacgcgcgcacagcagcagcagcacaagagcacacgccctgagatcagggaggaggaagtaagagagaaacgcgcggttggttgctcggcaccacaccgtacgcgcgcgccatggggaactgctgctgcggctccgctgacgccggcacgaagccgccgggtcgtcgtcctactcctaccaaaggaacgccgccgaaggggacgacggcatgggcgccggcgccgaagccgaagccgagcgacgacggcagcagcggggcgaagcagcgagagatgggaggcgacgacgacgacggtgctccgggcccgggcccggtcgtcgggcgggtcctgcaagcgccgaggctgagggagttcacgctcgccgagctgcgggccgccacgcgcgggttcaagccggagatggtgctcggggagggcggcttcggccgggtctacaagggctgggtcgacgagcgcacgctcaacccggccaagagcaacgccggcgtcatcgtcgccgtcaagaagctcaacccggagagcgtccagggcctgcaggagtggcagtcggaggtgaacttcttgggtaggctgtggcatcccaacctggtgaggctgctgggctactgcggcgaggacagggagctgctcctggtgtacgagttcatgtccaagggcagcctggaaaaccacctcttcagaagccggggtggaaacttggaggcgctgtcgtggagccggcggctcaagatcgccacgggcgcggcgcgcggcctcgccttcctgcactcgtcggagaagcaggtcatctacagggacttcaaggcgtccaacatcctcctcgactcggatttcactgccaagctgtcggacttcgggctcgccaagaacgggccctccgccgggaagtcgcacgtcacgacccggatcatcggcacctacggctacgcggcgccggagtacgtcgccaccgggcacctgtacgtgaagagcgacgtgtacggcttcggcgtggtgctgctggagctgctgacggggatgcgcgcgcacgacccgaaccgcccgagccaccagcacaacctggtggagtgggcgcggccctacctctccggcgccggcagcaagctcaagaccctcatggaccagcggatcgacggccagtaccacaccaaggccgcgctccgggccgcaaggctcgccggcaagtgcctcacgggcgaccccaagagccggccctccatggacgacgtcgtcgccgcgctcgaggacatcgaggcccttcagcagcaggccgccggggggcaccgggacctgccgccgcggcctggagcgcgccggtctgccgccgtaccatgattcttcacgcggcgcccctgttgatgcagtgcagcatggtcgttgcttggcttgagcaagcctagctgctgattcagacagaacactagcattggttcttcagcttcgttcaactaatcgccggtgttttcattctttactcgattattaatccctcattgttacagcagtatataggttcggtaatgttcttgttggaatcggacaggatgcagggataacgaatgatcacaatcatagcaacatacatgcaggtcccattctgcatttcaacggatgatgagctcgtattgtggccctgtcatcactccagctgctctctgctttgctctgggatatgaagtgacgaaggtagcggtagggcgtccctgttggattaatgtaaactactctggttccaccctctgacctacaatgctgtaaactagcttgttacatgcaacaaacaaactacctgtactgttaagaaactgaactagaagtacaaagtcccatactctgttaccacagagactgtatgcagcagcttactgcatacagactaatcccagttgatgatagggaacaccaacagtcactttgtctccgattctgccacacaaccaccaagcagcaacagacagaagtcactaggcacttgaccattggatgatgacacaagtgtactaggcattaacagatgctgcttgtgcaatgccaacaaattctttacttccaagagagaagggatgcttttactgcatcctgatgagctttgttccattgtcaggacaaatcagtttcacccaaggaaggaacaactgaaaagtacttactggccgttagagtgtaacaagattcttactgttggagtatttgatggcttgtacacatcatcaatacactcaagcaggtttagggttaaaagaacccactctgattcatcatccaagtacttgaggtccacatacatctcctgag

SEQ ID NO: 154121 - DNA, 1641 bp, Zea Mays
gcaggctagcagcacacacagtcggagaacgcgcgcacagcagcagcagcacaagagcacacgccctgagatcagggaggaggaagtaagagagaaacgcgcggttggttgctcggcaccacaccgtacgcgcgcgccatggggaactgctgctgcggctccgctgacgccggcacgaagccgccgggtcgtcgtcctactcctaccaaaggaacgccgccgaaggggacgacggcatgggcgccggcgccgaagccgaagccgagcgacgacggcagcagcggggcgaagcagcgagagatgggaggcgacgacgacgacggtgctccgggcccgggcccggtcgtcgggcgggtcctgcaagcgccgaggctgagggagttcacgctcgccgagctgcgggccgccacgcgcgggttcaagccggagatggtgctcggggagggcggcttcggccgggtctacaagggctgggtcgacgagcgcacgctcaacccggccaagagcaacgccggcgtcatcgtcgccgtcaagaagctcaacccggagagcgtccagggcctgcaggagtggcagtcggaggtgaacttcttgggtaggctgtggcatcccaacctggtgaggctgctgggctactgcggcgaggacagggagctgctcctggtgtacgagttcatgtccaagggcagcctggaaaaccacctcttcagaagccggggtggaaacttggaggcgctgtcgtggagccggcggctcaagatcgccacgggcgcggcgcgcggcctcgccttcctgcactcgtcggagaagcaggtcatctacagggacttcaaggcgtccaacatcctcctcgactcggatttcactgccaagctgtcggacttcgggctcgccaagaacgggccctccgccgggaagtcgcacgtcacgacccggatcatcggcacctacggctacgcggcgccggagtacgtcgccaccgggcacctgtacgtgaagagcgacgtgtacggcttcggcgtggtgctgctggagctgctgacggggatgcgcgcgcacgacccgaaccgcccgagccaccagcacaacctggtggagtgggcgcggccctacctctccggcgccggcagcaagctcaagaccctcatggaccagcggatcgacggccagtaccacaccaaggccgcgctccgggccgcaaggctcgccggcaagtgcctcacgggcgaccccaagagccggccctccatggacgacgtcgtcgccgcgctcgaggacatcgaggcccttcagcagcaggccgccggggggcaccgggacctgccgccgcggcctggagcgcgccggtctgccgccgtaccatgattcttcacgcggcgcccctgttgatgcagtgcagcatggtcgttgcttggcttgagcaagcctagctgctgattcagacagaacactagcattggttcttcagcttcgttcaactaatcgccggtgttttcattctttactcgattattaatccctcattgttacagcagtatataggttcggtaatgttcttgttggaatcggacaggatgcagggataacgaatgatcacaatcatagcaacatacatgcaggtcccattctgcatttcaacgg

SEQ ID NO: 154122 - DNA, 180 bp, Zea Mays
atgatctcacaatgccaactaaaaatcacaatatctgagtacagttatgatcatcatattctattagcccatatttccaagaagtcgctccactgcagcatgaacatttccagcggtagcggccaaggctcggatgttctcttgtgtgtcaaagaaacccatttcttggagctgagctaa

SEQ ID NO: 154123 - DNA, 1439 bp, Zea Mays
ctagctactgcacccgcacggcggcgcgaggagcgtgtgggtaagcttaggtgccatttgtgggtggctcgtggtggtggtgtgtataaaagcagtcgtcgttcgtgaagcacaagctgccccccctcctctccctcttctcgtgtcagcgcctggaccaaagacgatggccgtccctgttggtcgcctcgccgcctccacgctcctccagctcctcgtctggctcccgctccccgcgtccgcctgcgaccgctgcgtgcgccactccaaggccgcatactactacacctcctcgctcaccctcgccggcggctcctgcgggtacggcaccgaggccgcctccttcagcgccgggctcctcgccgccgccggccccgcgctgtaccgcggcggcgccggctgcggcgcctgcttccaggtgcggtgcaaggacaggaagctgtgcggcgcggcgggcgccagggtggtggtcacggaccgcgccaggaccaacggcaccgacctcgtgctcagcagcaccgcgttcgcggccatggcgcgccccggcatggcccggcgcctcgccggcctccgcgccgtcgacatcgagtacaagagcgccgcgcgcgcacatgtgcagggtgccgtgcgagtacaagcacaggaacctgtcggtgagggtgcaggagaagaggcgctccccggggggccctggcgacctcgccatcaggtttctctaccagggcggccagaccgacatcgtcgccgtcgacgtcgcgcaggtgggctcgtccaactggaagtccatgacgcgccacagcggcgggccggcgtggagcacgaggcaggcgccggcggggccgctccagctcagggtggtggtgacgggcggctacgacggcaagtgggtgtgggcggagcgcgaggtgctgccgcggcggcggcgcgccggcgaggtctacgacacgggcgtccagatcaccgacgtcgccctggagggatgcttcccctgcgacacgcgcgagtgggagtgatgcgcatgtggacgaaccacgccagtgacggcagaagcagaagcagaagcagaaaaccaaacgctgaagcttcgactcaactgaagagcctgcctgtagaattgctctagctagctcctccgtgccactgcccttttgggcttgcctcaaaggtcaccggagacgacgagggagacgactaattaacagacgctgacagagtgacgcgcgagaggagaggagagttccgaaccccccctctccgctgtactgtacatgagctgctgacgtgtcggataagtagtagtaggctagcgtcccggcgggtgctggaaagaataataataataatgtaacgaaagatggccggcatgaggttgagggagcgaccgagcgtgaagcaacttgggcgccatggacaatacagttgggacacagacacaccgg

SEQ ID NO: 154124 - DNA, 1417 bp, Zea Mays
ctagctactgcacccgcacggcggcgcgaggagcgtgtgggtaagcttaggtgccatttgtgggtggctcgtggtggtggtgtgtataaaagcagtcgtcgttcgtgaagcacaagctgccccccctcctctccctcttctcgtgtcagcgcctggaccaaagacgatggccgtccctgttggtcgcctcgccgcctccacgctcctccagctcctcgtctggctcccgctccccgcgtccgcctgcgaccgctgcgtgcgccactccaaggccgcatactactacacctcctcgctcaccctcgccggcggctcctgcgggtacggcaccgaggccgcctccttcagcgccgggctcctcgccgccgccggccccgcgctgtaccgcggcggcgccggctgcggcgcctgcttccaggtgcggtgcaaggacaggaagctgtgcggcgcggcgggcgccagggtggtggtcacggaccgcgccaggaccaacggcaccgacctcgtgctcagcagcaccgcgttcgcggccatggcgcgccccggcatggcccggcgcctcgccggcctccgcgccgtcgacatcgagtacaagagggtgccgtgcgagtacaagcacaggaacctgtcggtgagggtgcaggagaagaggcgctccccggggggccctggcgacctcgccatcaggtttctctaccagggcggccagaccgacatcgtcgccgtcgacgtcgcgcaggtgggctcgtccaactggaagtccatgacgcgccacagcggcgggccggcgtggagcacgaggcaggcgccggcggggccgctccagctcagggtggtggtgacgggcggctacgacggcaagtgggtgtgggcggagcgcgaggtgctgccgcggcggcggcgcgccggcgaggtctacgacacgggcgtccagatcaccgacgtcgccctggagggatgcttcccctgcgacacgcgcgagtgggagtgatgcgcatgtggacgaaccacgccagtgacggcagaagcagaagcagaagcagaaaaccaaacgctgaagcttcgactcaactgaagagcctgcctgtagaattgctctagctagctcctccgtgccactgcccttttgggcttgcctcaaaggtcaccggagacgacgagggagacgactaattaacagacgctgacagagtgacgcgcgagaggagaggagagttccgaaccccccctctccgctgtactgtacatgagctgctgacgtgtcggataagtagtagtaggctagcgtcccggcgggtgctggaaagaataataataataatgtaacgaaagatggccggcatgaggttgagggagcgaccgagcgtgaagcaacttgggcgccatggacaatacagttgggacacagacacaccgg

SEQ ID NO: 154125 - DNA, 1505 bp, Zea Mays
ctagctactgcacccgcacggcggcgcgaggagcgtgtgggtaagcttaggtgccatttgtgggtggctcgtggtggtggtgtgtataaaagcagtcgtcgttcgtgaagcacaagctgccccccctcctctccctcttctcgtgtcagcgcctggaccaaagacgatggccgtccctgttggtcgcctcgccgcctccacgctcctccagctcctcgtctggctcccgctccccgcgtccgcctgcgaccgctgcgtgcgccactccaaggccgcatactactacacctcctcgctcaccctcgccggcggctcctgcgggtacggcaccgaggccgcctccttcagcgccgggctcctcgccgccgccggccccgcgctgtaccgcggcggcgccggctgcggcgcctgcttccaggtactgtcccccgaccgcgctcccgcttcccggccagtagagtagtcgcctatacctatacgtattaccttcgcccccccgctcgcaggtgcggtgcaaggacaggaagctgtgcggcgcggcgggcgccagggtggtggtcacggaccgcgccaggaccaacggcaccgacctcgtgctcagcagcaccgcgttcgcggccatggcgcgccccggcatggcccggcgcctcgccggcctccgcgccgtcgacatcgagtacaagagggtgccgtgcgagtacaagcacaggaacctgtcggtgagggtgcaggagaagaggcgctccccggggggccctggcgacctcgccatcaggtttctctaccagggcggccagaccgacatcgtcgccgtcgacgtcgcgcaggtgggctcgtccaactggaagtccatgacgcgccacagcggcgggccggcgtggagcacgaggcaggcgccggcggggccgctccagctcagggtggtggtgacgggcggctacgacggcaagtgggtgtgggcggagcgcgaggtgctgccgcggcggcggcgcgccggcgaggtctacgacacgggcgtccagatcaccgacgtcgccctggagggatgcttcccctgcgacacgcgcgagtgggagtgatgcgcatgtggacgaaccacgccagtgacggcagaagcagaagcagaagcagaaaaccaaacgctgaagcttcgactcaactgaagagcctgcctgtagaattgctctagctagctcctccgtgccactgcccttttgggcttgcctcaaaggtcaccggagacgacgagggagacgactaattaacagacgctgacagagtgacgcgcgagaggagaggagagttccgaaccccccctctccgctgtactgtacatgagctgctgacgtgtcggataagtagtagtaggctagcgtcccggcgggtgctggaaagaataataataataatgtaacgaaagatggccggcatgaggttgagggagcgaccgagcgtgaagcaacttgggcgccatggacaatacagttgggacacagacacaccgg

SEQ ID NO: 154126 - DNA, 1489 bp, Zea Mays
tgtgggtggctcgtggtggtggtgtgtataaaagcagtcgtcgttcgtgaagcacaagctgccccccctcctctccctcttctcgtgtcagcgcctggaccaaagacgatggccgtccctgttggtcgcctcgccgcctccacgctcctccagctcctcgtctggctcccgctccccgcgtccgcctgcgaccgctgcgtgcgccactccaaggccgcatactactacacctcctcgctcaccctcgccggcggctcctgcgggtacggcaccgaggccgcctccttcagcgccgggctcctcgccgccgccggccccgcgctgtaccgcggcggcgccggctgcggcgcctgcttccaggtgcggtgcaaggacaggaagctgtgcggcgcggcgggcgccagggtggtggtcacggaccgcgccaggaccaacggcaccgacctcgtgctcagcagcaccgcgttcgcggccatggcgcgccccggcatggcccggcgcctcgccggcctccgcgccgtcgacatcgagtacaagagggtgccgtgcgagtacaagcacaggaacctgtcggtgagggtgcaggagaagaggcgctccccggggggccctggcgacctcgccatcaggtttctctaccagggcggccagaccgacatcgtcgccgtcgacgtcgcgcaggtcgggagtcgggttattgctgaaacaacggagctttctgaagaagaagaaaaaaaggaggttattgttgctcttgggacgtggtgcaggtgggctcgtccaactggaagtccatgacgcgccacagcggcgggccggcgtggagcacgaggcaggcgccggcggggccgctccagctcagggtggtggtgacgggcggctacgacggcaagtgggtgtgggcggagcgcgaggtgctgccgcggcggcggcgcgccggcgaggtctacgacacgggcgtccagatcaccgacgtcgccctggagggatgcttcccctgcgacacgcgcgagtgggagtgatgcgcatgtggacgaaccacgccagtgacggcagaagcagaagcagaagcagaaaaccaaacgctgaagcttcgactcaactgaagagcctgcctgtagaattgctctagctagctcctccgtgccactgcccttttgggcttgcctcaaaggtcaccggagacgacgagggagacgactaattaacagacgctgacagagtgacgcgcgagaggagaggagagttccgaaccccccctctccgctgtactgtacatgagctgctgacgtgtcggataagtagtagtaggctagcgtcccggcgggtgctggaaagaataataataataatgtaacgaaagatggccggcatgaggttgagggagcgaccgagcgtgaagcaacttgggcgccatggacaatacagttgggacacagacacaccggtcgtctccacttgcttttgcttacggttccttttccattcc

SEQ ID NO: 154127 - DNA, 2471 bp, Zea Mays
tgcacgcacgcacgcgcggcggcttgcgcttaagataccgagaacccatacaaaggtagaggcgcagggccaaggccaaccaacccacccaccgcgaaaccttcctccctctccttctctgtccccttctctcccctcctctcctccgccgctcgacagcctactctccaagccaggagaacccaacccggccagccccacacgcacacgcccacgcccacgcccacgcagccgcggcggaggccatccggcgggcgtccatgggctgctgcggctcctcgctacgggcggggacgcagccggagaagaagccggcggcgggggcgctgcccccgcgccgcccctcctactcgctgagccagaaccagaaccaggcgccgccggcagcccgcgcgggcgcccaccaggtgccgccgctcagggagttctcgctggcggagctgcgcgccgccacggccggcttcgcgccggacaacatcgtgtccgagagcggcgacaaggcgccgaatttcgtgtacaggggccgcctcgagcccagccgccgcgcgatcgccgtcaagaagttcgccaagatggcgtggcccgaccccaagcagttcgcggaggaggccaagggggtcgggaagctgcgccaccgccgcctggccaacctgatcggctactgctgcgacggcgaggagcgcctgctcgtcgccgagttcatgcccaacgacacgctcgccaagcacctcttccactgggaaaaccagacaattgaatgggctatgcgcctgagagttgcatactacatcgctgaagcactggaatattgtagcaccgaaggaaggcctttgtatcatgacctaaatgcatatagggtcctctttgatgagaatggtgatcctcgtctttcatgctttggcctgatgaaaaacagcagggatgggaaaagctatagcacaaaccttgcatatacacctccagaatatttgagaaatggaagagtaacatcagaaagtgtcatattcagctttggcactatactgctggacctcctaagtggaaaacgtatacctccatcccgtgctcttgatatgataaaaggcaacaatatccaagtactgatggattcacatctggagggaaactactcaacagaagaggcaaccacattggttgaccttgcctctcagtgcctacagtacgaacctagggatcgtcccaacactaaaaagctggtttccgtacttgagcccttgcaaataaaatcagaggtaccatcctacgagatgcttggcattccgaagcatgaagaagaagcacctccccctccacaaccgcaacaccctctttctcccatgggcgaggcctgttccaggatggatctgactgccatccatcagattctagtgaacacgcattacagggatgatgaagggagcaacgagctatcgttccaggaatggacgcagcagatgagggacatgctggaagctaggaaacgtggggactttgctttccgtgacaaagatttcaaggcagccatagactgctacacgcagttcgtcgacgtggggacgatggtgtcgccaacagtgtacgcgaggcggagcttgtgccacctcatgtgcgaccagcctgacgccgccctccgtgacgccatgcaagcgcagtgcgcgtacccagattggccaaccgcgttctacatgcaggccgtcgcgctctcgaagctgaacatgcagagcgacgctacggacatgctgaacgaggcgtcgcagctcgaagagaagcggcagaagaacacgaaaccttgatgaaagaccagacccctctctctcgtcccggggttacggtccttctgcggctcaaataggtttgtgttgagacatgctgctcggtccttccgaaacattgtggttagttcctggtgcaagggttgggttgggacttgggaatgttaactggggggaatgtgctgtagagtaactacctggtttggcatttctgtgatgcatttttttggggcccgtgtacatgttacactgacaaaagtagtcgaaacagccagaatgcaagggaatttaattctggttatcaaatcctgagcttgtttgtttattcagtgaactccagagtcaagggaatctacttctggttgtcaaaatctgaggttgtttgtttattcagtgaactcgagagtcgtctttgtctagataacgaaccctagtgctgctcgtactgatgacatggggaaggggaaccacatcattttgacaagcagcaaagctctatgctcattctagatttctgttatggcagtggctagatgttaaggcggcgggtagggtttagagagcataaggaggccagcaagagttttttttattagatacttcctccttttaaaatagtagtcattttagctctagatttttatgaccatattcataagaatgattatgaaccttgacatatatataaaacacatacat

SEQ ID NO: 154128 - DNA, 2118 bp, Zea Mays
gtagaggcgcagggccaaggccaaccaacccacccaccgcgaaaccttcctccctctccttctctgtccccttctctcccctcctctcctccgccgctcgacagcctactctccaagccaggagaacccaacccggccagccccacacgcacacgcccacgcccacgcccacgcagccgcggcggaggccatccggcgggcgtccatgggctgctgcggctcctcgctacgggcggggacgcagccggagaagaagccggcggcgggggcgctgcccccgcgccgcccctcctactcgctgagccagaaccagaaccaggcgccgccggcagcccgcgcgggcgcccaccaggtgccgccgctcagggagttctcgctggcggagctgcgcgccgccacggccggcttcgcgccggacaacatcgtgtccgagagcggcgacaaggcgccgaatttcgtgtacaggggccgcctcgagcccagccgccgcgcgatcgccgtcaagaagttcgccaagatggcgtggcccgaccccaagcagttcgcggaggaggccaagggggtcgggaagctgcgccaccgccgcctggccaacctgatcggctactgctgcgacggcgaggagcgcctgctcgtcgccgagttcatgcccaacgacacgctcgccaagcacctcttccactgggaaaaccagacaattgaatgggctatgcgcctgagagttgcatactacatcgctgaagcactggaatattgtagcaccgaaggaaggcctttgtatcatgacctaaatgcatatagggtcctctttgatgagaatggtgatcctcgtctttcatgctttggcctgatgaaaaacagcagggatgggaaaagctatagcacaaaccttgcatatacacctccagaatatttgagaaatggaagagtaacatcagaaagtgtcatattcagctttggcactatactgctggacctcctaagtggaaaacgtatacctccatcccgtgctcttgatatgataaaaggcaacaatatccaagtactgatggattcacatctggagggaaactactcaacagaagaggcaaccacattggttgaccttgcctctcagtgcctacagtacgaacctagggatcgtcccaacactaaaaagctggtttccgtacttgagcccttgcaaataaaatcagaggtaccatcctacgagatgcttggcattccgaagcatgaagaagaagcacctccccctccacaaccgcaacaccctctttctcccatgggcgaggcctgttccaggatggatctgactgccatccatcagattctagtgaacacgcattacagggatgatgaagggagcaacgagctatcgttccaggaatggacgcagcagatgagggacatgctggaagctaggaaacgtggggactttgctttccgtgacaaagatttcaaggcagccatagactgctacacgcaggtgcctcgactttagttaatatcaggagcactttggtattctagagagctgctagaaacgcagccaactcactgtgtcacctcttcatgctgcagttcgtcgacgtggggacgatggtgtcgccaacagtgtacgcgaggcggagcttgtgccacctcatgtgcgaccagcctgacgccgccctccgtgacgccatgcaagcgcagtgcgcgtacccagattggccaaccgcgttctacatgcaggccgtcgcgctctcgaagctgaacatgcagagcgacgctacggacatgctgaacgaggcgtcgcagctcgaagagaagcggcagaagaacacgaaaccttgatgaaagaccagacccctctctctcgtcccggggttacggtccttctgcggctcaaataggtttgtgttgagacatgctgctcggtccttccgaaacattgtggttagttcctggtgcaagggttgggttgggacttgggaatgttaactggggggaatgtgctgtagagtaactacctggtttggcatttctgtgatgcatttttttggggcccgtgtacatgttacactgacaaaagtagtcgaaacagccagaatgcaagggaatttaattctggttatcaaa

SEQ ID NO: 154129 - DNA, 285 bp, Zea Mays
atgccgagggcgtcgacgacggacgacggtgatgatcttggcagccgcagcgctgctcgccggggccggcggtgccagcgcgcagcagggcgtgtggaacatcatgttccagagcatgctgagccaccgcggcgaaagcggctgctagggcgccttccacatcacctgaccacctatgacgcgttaatcgaggccgccagcaagttctccggctttggcaccaacggcgacgagcagacgcgagctagctgccttcttcggccacccagacgtcccatcccatga

SEQ ID NO: 154130 - DNA, 1562 bp, Zea Mays
cagtagtagcagcgctgcaattcattcctagcaatgatcaggtatcaggacctctcagagaaccgcaagcatcatttccagttttaagattaaccaaaaatttcaacgtcagcaatattggacaacgggttcagctagaaagccctaaaacacaagtgttcaaagcaaagcaaagcatagctatagaagatgccaccggaatttggacattcagaccacagaaaaatactgaacttcagccgcagaagacaggtctcagagtggacaacgcctactcccagccttgggcagtcggtggcggggctgcttggtcccaaccagtaggagcaaccagaggaggtacagtgccgtccaccacaggtgcaggggccccagcttgatcccagccatcaccggtaggaaccggagctgcaaccaatattgggacagtaggagcaacaggcggcgcagtcacatcagaggtccactggtcaccaccccactgatcagctccttggtaatcagtgattgcggcaaactcaggggcaacagcagcttcctcctcctgctcctttgcttcctctgggtccctgtagaagaacaaatccacctgcaaacaacattatcatataagaatgccaaggttataagtctggactcatcacatctccaatgtcattttgaacgacatcataagctagcatcataccatgacctcccacttgtgcccagggaggatagtgcccctcatctgcagaaccatcctggccaaaagccagaacaggcatccaatgctgttcctccccttgttgttcgctgggatgccgatatcgacataccgcatgggagagtcagtatcacagaaggcaatggtggggatgttccccagagcagactccttaattggctgcaaacaatcaccaccataacaattagttcaccatcacactgcagggtccactcactaaatatttctgaactttgaaactgaaattctgttcacctgatggtcagtccttgggtcggtaaggatgagcagccgaggctcgctgaaggaggtctggagctggttagtgaaggtaccaggggtgtgcctcccagcgatggcatgagcgccagtgtactgagcgaacttgaggacagcacgctggccataggggcgggcggactggacgatgatgtcctgcgggttctcgatggcaacgataaccctcgctgcaagctgcagtttctcccatgtcttgccaaggttgatgatgcagataccgtcggtgcggcgcttaaaggcatagcgctccatctggaaatcgcagttcttggtgccaaggtggacgtcggcggcgagcatcatctgtatgtcctgctccttctgggacagcgcacgcaccgcgcctccgcctgctgccgctgccatgactgacggggatgcgggtggtcagggctggacgagcgaagcaaggggaggagggagggtcgccgcctcgctggatcgggatcgggctctgacgctctgtgtcttgggagtggcggctcggaggtgcgggagggatctcttatctgcgacgcctcgaaaaccctaggaa

SEQ ID NO: 154131 - DNA, 616 bp, Zea Mays
accaaattggcacttccgtaccccgaccccggccaccgtgtggaaacagaaacagcaatggcggggaggctggtgccgagcacgaagaaggcgatggagcaccgggaggagaagcccaaggtgccgtcgagcgacccgggctccgacctcgacctggtgcagctggtggccgggcagcagccgcccaacatctcggagatgaagccgctgacgcgggaggcgtacggcggcgggatgtacgcggccgaggaggagggcggccggcggaggggccccgcgcggccgcgcgcgagcgccacgcagagcgccgacgggcccgaggagcagcgcgctggcgcgaggcccagccacccgccgccgccgtccaccggcgaccgcgacctcgacatcaccggccagtcctacatccagtagccgcatgtgccggctgccgagcgccgcgcttgggcgttggccattggcgttgtgtgtgtgtacacagtacagtacagtaagtacttgctagtatacttggttgtgtacttgccaaagtgtccttgtacacgtcgctttgttaagatgtgtacgtacgtactagttgccgacgaataaaggtttggacttgggctttcagaaa

SEQ ID NO: 154132 - DNA, 1548 bp, Zea Mays
atggccgcgtgctccaggggcctcgcgtggccgccgttcgatctgaccacggcgaggggggcggcgtcctggccgcgccgccgcgccacgatccggtgctgctgcgccgggacggacccagagccgcggaggcgactctcgagggcggccgcggccgcgcccgagcgtgccgaggagtggcgcgtcgatgggaacaagccgtctgccgcggcaccggcccggcggcgcgctagtctcaccgccatgcccccgctccccttcccggcacctcgtatagttctagaagacagttcaagcaacaggacttctacccacggtgcacgccgaggggcccggctcctcaatcctgtgattccccacccaagagagatctctgatttgctaaggaaatgcatgtgtttgtttggcacctgccttatagacactggtattgctagtgagaaggaatggggaatcaacttgctggacgaagccgtcaaggagtctggaataaatgaagatggaagcacttggtatagggagagtggagaagatactggcgagaatgggtaccgctgccgctgggcaagaatgggaggacagaaccatgatggttccaccgaatggaaagagacttggtgggagaaaagtgactggactggatataaggaattaggtgcagagaaatctgggaagaatgctgaaggtgattcttggtgggagaagtggaaagaagtactgtaccaagatgaatggagcaatcttgcaagaatagagaagagtgctgaaaaacaagcaaaatcaggtgcagaaaatgctgggtggtatgagaaatggtgggagaaatatgatgccaaaggctggacagaaaaaggtgctcacaaatatggaaggttgaatgagcagtcgtggtgggagagatggggtgaacattatgatggccgtggatttgttttgaaatggacagataagtgggcagagacagacttaggcaccaaatggggggacaagtgggaggagaaattctttgcaggaattggttctcgacaaggggagacatggcatgtatctcctggcagagaacgttggtcaagaacttggggagaagaacactttggtaacggtaaagtccacaagtatggaaagagcacaactggcgagagctgggatttggtagtcgacgaggagacatactatgaggcggagccccactacggatgggccgatgtcgtgggggactcgacacagctgctgtccatacaacccgtggagaggccaccgggagtgttcccggccatcgacttcagctcggcgcccccgccaaaggacgctccgccgggcatgcctccttcccctctggatggagggaactagagctgccagcacaagcgaattttttctttctagaggctccaaattttgcctgtaagggaacagcattctttgtaggaagttaatggacccaatttcctgcgttcattggttggttcactctctgctacgctttcctttcctcccaaacatgccgttgcgttcctctggttggcgaccgggtgaatgcaataatca

SEQ ID NO: 154133 - DNA, 851 bp, Zea Mays
gcaaagagccaaagacacctgccatggtgagagcaaggggcttgttctgcctcgtgtcgccggtccgcggcgaccccgccgaccgccgcagcagcgccgcgtgcatatgctgcgtgggccctcaccacaagccgtcgtccggcgctcccgacgccgacctgagcgcgaggctgccgctcaccgggtgctgcggcgcggacgtccgcggccggagcagcgccgcgcgcaccccgaggacgccgtgcacgcccaccgccaggcgcctctgcggcgtccgccctcgcacgccgcgccgcgggcaggtctgctgcttccctgccgccaccgtcgagccggcaggaccggaggccgccgccgccgtcgcgaggacgccgcgaacccctaccacgcaggcgcagcagggcccgggctggcggcgccgttggttgttccgctccgctcgccaggcggcggcgcagatgacgccgcgctttcggggcgccggccgcgacagcgcccacgctggcaacaacaacacaagtgcctacgacgcgcgcctcccggaggcggaggcggagacggagacgtgctccaacgacgagtatgcgctgctctgcagggagggcttctcccgggaggacgtggccgcggtcaccatccaggcctacttccgaggccacctggcgcggcgggcgttcatggcgctcaagagcctggtgaggcttcaggcggtggcgcggggcgcgttcgtgcggcgccaggcggaggtggccatgcaatgcatgcaggcgatggcgcggctgcatgggcgcgtgcgcgcccggcggatgctgaccaccaaacccgaggccgagcagctgttgcagagctga

SEQ ID NO: 154134 - DNA, 587 bp, Zea Mays
tttaatttgctttatcctttccatttcctttcaaaacaatatagtttaaatcattacaataacttgcttacttatcacttatcagtacaataccaacttgccaagccttgcacagacacaaaacctatacgaactttcggtttttggaagcactacgaaagcatggaaactcccatgagaaaactcagtttacacgggaacgagcaaacctcaacaagcgccacttttacggtcactaacaacaaaaaaggtccaaaattctaagaaaggtgaccatgcacactgcaggtcaagaagcgcacatggcacgacacctgctgccatagctggagcagcagcaggcttgctcgtttctgcagcgagatgacggtctgtcggtctcaaaggcaccgacgagtgccttcaccttgctcttcctcgcatcagcgactcaatcacgttgttgaacaaccctgactcctactttttcatctccttcccgtcctaccaccaccacagcacgacaacctcggcacccgcgtctctcgctacaacatcgtcgcttctcctcctacttgtgatcctgtcgcatctgctcctggatgtcg

SEQ ID NO: 154135 - DNA, 870 bp, Zea Mays
tatacagtcctttgctcataaacttgctccagtcatcattaattctgcggtttttattttcaccagtgcaatgtaacatgtaactgcaataacccactccatatttgaggtaatccatagatgtcgaatatgttgatcaagtagttgcacgtttgagggatgagctaggtagattacattcataagcattctggaccaagcccttgaatcagtgcatttgcaacggaatcaggttactccattatctcgacgccgaaccataccaacaactgtaggtacatggataaactaaaggaccagaagaacagattcaaccatacatagatcaatagttaagaccgataagagaacatggaacatgaaacgttacaagcaaggacttgatgacaaaacaaggacaataatgcaactaattgccatcagaaactgctcaaagaaacaaacaaaaaaataaagggctccaagagagcctcggtgcgctatgcgtctcgtctcagtaaccttttcccatgcaggacgagccaagacatcgtcccaccagattctttctttcggtgatcaatccagccttgttgatcatgttcacaaggaaattcacattgggcaagtgcacaaggtcggccagggagaaatcatcaccagcttggcttcattctgctcaaccacagccaggtcagtggcccggcggcccatcatcggtgcaaatgcaagctggaagataatagccaggctcggtgggttaaagctctggccttcagactcgatccattgttcaatggcagcgcggccaaccgcgccatcttctttgttgccaaagagggcctggttaccactgtctgcctactcatatatgtgacggcagatgggcct

SEQ ID NO: 154136 - DNA, 743 bp, Zea Mays
cccctccattttatgagaacagtatttgtaaccatgggactgaatttaaattacaggagaaagcagagacatacgaacacccatctgaaataattttgccaagtatgagtagaaatatcaatatgttaaaatcataaaacagcacactagctttatgcttggaatggccagcacgactcctcaatgtgtcaatgtcacgtgagaactggaccagaacaaaaatctgaatcaaacatacataacgtcaggttgccatatgcacacagaatggctgcccaaggaatgatacatatatattgagaatatcttcactactagtacaacagatcatcgcatagctaattcgagcttggtgacatcgtatttggtcaagcaactatggcaggaacatgacaccagcttaccaaacagtttcctcattcttccatgatggtgtcatcatctgaaaccggttcaccttccaagagccactgttcaagctcgtcgagatcgtcgtcattatgccgataccagtcagaggaggtgtcccagagcatagtccctaattcttcaccacggcaagccatatgtaagaatggccggcttcgagacagtgcatccaccataaccctattcaagctacctgtaattcccagccaccgcaatctagggaagtaaggtttcttaaaccaacgtgctgcaaggggtgtaatcccaccacagtcaaaaagatccagcagctgcaaggtactaccgtaggttcc

SEQ ID NO: 154137 - DNA, 653 bp, Zea Mays
taattttgccaagtatgagtagaaatatcaatatgttaaaatcataaaacagcacactagctttatgcttggaatggccagcacgactcctcaatgtgtcaatgtcacgtgagaactggaccagaacaaaaatctgaatcaaacatacataacgtcaggttgccatatgcacacagaatggctgcccaaggaatgatacatatatattgagaatatcttcactactagtacaacagatcatcgcatagctaattcgagcttggtgacatcgtatttggtcaagcaactatggcaggaacatgacaccagcttaccaaacagtttcctcattcttccatgatggtgtcatcatctgaaaccggttcaccttccaagagccactgttcaagctcgtcgagatcgtcgtcattatgccgataccagtcagaggaggtgtcccagagcatagtccctaattcttcaccacggcaagccatatgtaagaatggccggcttcgagacagtgcatccaccataaccctattcaagctacctgtaattcccagccaccgcaatctagggaagtaaggtttcttaaaccaacgtgctgcaaggggtgtaatcccaccacagtcaaaaagatccagcagctgcaaggtactaccgtaggttcc

SEQ ID NO: 154138 - DNA, 1880 bp, Zea Mays
ggcacggccaaaaatcacggcacttcctcccataaaaaacttggctggccgctgcccctgacgcatcggcatctgtctcggcacggccgtccgatcaaatcgggctagcacagcacagccagcacgcgccgcgctcagcgctgtacttgcacaaaatatcgccttgctcacgcgctgtctagcctgtctggactctggattagtatatccttgagcgcagacaaatcacccccttcctcctgttcatttcctcctgctcccctctcctcccttccccccctcctcgccgctcgccgttgaagaggtaggcccacgggccggcgagaatggaggcggcgacgatggtgtggacggcggcggtggtcggggcggggctggtgtactggttcgtctgggtgatgggcgcggcggaggtgaagggcaagcgggcggtggatctcaagatgggatccatcacgcgggacaaggtgcaggacaagtacacgcagtactggtccttcttccgccgccccaaggagacggccaccacggcggcgtcggcggagaaggtgccggccttcgtcgacaccttctacaacctcgtgaccgacatctacgagtgggggtggggccagtccttccacttctccccgtccctccccggccgctcccaccgcgacgccacgcgcgtccacgaggagcgcgtcgccgacctcctcggcgccaggccgggccaccgcctcctggacgtcggctgcggcgtcggcgggcccatgcgcgccatcgccgcgcactcgggatccaacgtcgtcggcatcaccatcaacgagtaccaggtgaaccgcgcccgcgcgcacaaccgcaaggccggcctcgactccccgcgctgcgaggtcgtctgcggcaacttcctctccatgccgttcccggacgcctccttcgacggcgcctactccatcgaggccacctgccacgcgcccaggctgcaggacgtgtacggcgaggtctaccgcgtgctcaagccggggggactctacgtctcctacgagtgggtcaccaccccgctgtaccgcgccgaggacccggaccacgtcgagtgcatccacggcatcgagcgcggcgacgcgctcccggggctccgccgccaggacgagatcgcgtccatcgccaaggaggtcggcttcgaggtgctcaaggagcaggaccttgcgctgccccccgcgctgccctggtggacgcgcctcaagatgggccgcatcgcctactggcgcaactccctcgtcgtccgcgtgctcaccatgctccgggtcgcgcccaagggcgtctccgaggtgcacgagatgctctacgagaccgcgcagcacctcacccgcggcggcgagaccggcatcttcacgcccatgcacatggtgctcctccgcaagcccgccgccgccgcctccaccgaggaggccaactagtgtaagactacacaccgccaccaatcagttactactcgcccaccgcaagggggagaaaatggggagggaggaaaaagatgcaagcagcagcagcaccagaggtaagaagagcaggctaatcggcgacttgaagaagttacaaattgatctattagagaagaagatactactaggaacgatgcttctctccgtttactcttttccctgttcgtagctttgagttttaatttttgttttttggtggacggattgttccggggaggtcgaggttgggatctaaatttattttcaatcggtggagatccatctatcagcagcagcagcagcagccatgttttctctccaacaatacactggaattgaattcctaacgggcagatcggatccttgaaattgaatttaattctaataatatgaatttagataaagatcttttaaact

SEQ ID NO: 154139 - DNA, 1793 bp, Zea Mays
ttttttttttgcttcttaactcgctttgattgcatctgttgtttcggaaggaagaggctgagagcgcgttggagatttggactataagagcgagcgagcgagctgggtgccttgctgccttgaggacgccgtcaagaaaccgcgtggaggggagggcgatgagatgagggatgctggccgcggtgatggactacttcagcacctgctggggcccgcggtctcgtgcggggcaccggggcaagggctccgacgccgccggccggcaggacggcctcctctggtacaaggacgccgggcagctcgtcaccggggggttctccatggccgtggtgcaggccaaccagctgcttgaggaccagagccaggtggagtccggatcgctctccctggctgactacggcccgcagggcaccttcgtcggcgtctatgatggccatggcggcccggagacgtcccggttcatcaatgaccacctcttcaaccatctcaggagatttgcaactgagcacaagtccatgtcagcagacgtgatccggaaagctttccaagaaactgaggagggctttctttctctagtcatcaaggaatggtctttcaagcctcagattgcatcagttggctcctgttgccttgttggtgtaatctgtgctgggactctctatgttgcaaacctgggcgactcgcgtgcagttcttggaaggcttgtgaaagcaactggagaggttctggccactcagttgtcagcggagcacaatgcatgctatgaagaagttagacaagagctgcagtcatcacatcctgatgatccacgtattgtggttctcaaacataacgtttggcgagtgaagggtctcatccagatctcaagatctatcggagatgtatatctaaagaaaccggagtataacagagaacctcttcacagcaagtttcggcttcgagaaaccttccagaagccgattcttagttctgaacctcaaattactgaacaccgaatacagccaaacgatcagtttgttatatttgcttccgatggtctatgggagcacctcagcaatcaggaagctgttgaccttgtccaaagtagtccccgtaatggaatcgctcggagactagtgaaagccgcgatgcaagaagctgccaagaagagggagatgagatactcagacctcaagaagatcgaccgtggcgtgaggaggcatttccacgacgatataaccgtcgtcgtggtgttcctcgactcggatgccatgagcaaagctagctggagcaagagcccctcggtttctctccgagggggcggcgtcacccttcccgccaagtccctcgcacccttctcggctccggcacagttgaacggcacccactgaagctgctactgctcttgaaaagaagggcacagtgcagatctgctagagatgatgagagaagcagcaatcaagtgtagctgttgctcgtacacctgctgtgctgttgctgtttgcaaagctgccgtcttgactccgcctggtaattagtgtactgatagcgaggtatagaaattaggttatttgttagcgacgcaaatcctttctttttttttcttctccctctgttcttatctcttttctcttcatcatggaggaaacaggtggctgtaaatttgtccagaacatgttttccctaatagcccatcatatcccgctctttttcttgttgatatgaccaaggctggcagcatcgctgctcaagataatgtttggggcgcatgatttgaccagtccgaatcattacttttgatgatgtgttgtagc

SEQ ID NO: 154140 - DNA, 2996 bp, Zea Mays
acctcttctccactccacctccgcgtccccaccttcagcgtcacgcacctcgacgcgcagcgcatggcgactcggctctcgtccacgggcccctgatctaggcagccggaccccgatcggttgcccgtgcagcgcgacccccacgaccaggatccagggagtcgggccacggtcctcggcaaggcatctcatcggcgaacgttttttcgaggccgggctcctgctcccccggaatctagggttcgcctcgccccgcgtcgccctcgatgggcccggccgcgcagccgccggacgccggcggcggtggggacccggaggcgtggtacggcagcatccagtacctcatcaacatctccgccgtgggggccgcctcctgcgtcctgctgttcctcctcgttaagctccggttcgaccaccgccgcatcccggggccctccgcgctcgccgccaagcttctcgccgtctaccacgccaccgcggcgcagatcgctctccactgcggcgccgacgccgctcagttcctcctcttcgagcgcgcctccttcctcatcctcgccgccgtcgccgctgccgccgtcgccgcggcgctcccgctcaacctcctcgcgggggacgccgccgtcgtcgaccagttcgcttccacgaccatctcgcacatccccaagtcgtccccgctcctctggctccacctcctcctcaccgccgccgtcgttgccatcgcgcacctcggcatctctcgcatggaggacgcgctacgcatcacgcgcttccgcgacggcaacggcaaccccagcgaccccaactccagctccgtcgccgtcttcaccataatgatccagggcatccccaagacgctggccgcggacaagaccccgctcaaggactacttcgaccacaagtaccctggcaaggtttaccgtgtcatcgtgccatttgatctatgcacgctggagcatctcgtcgagcaattggggaaggtccgtaacaagatctcttggctggaggcaaggttgggcgcccgcgacctgtttgatgacattgtgcacgataacgacgacacagtgcagtcagaagagcattggtttgtgcgaaggtgcagagggctgtgggcaatggcaggggagaggctagggttcactgacgaggagagattgaggaagttgcagactaagaaacttgtgctcgcaagcaggctatctgattataaggaagggtgcgcccctggcgctggtgtagcttttgtggtgtttaaagatgtctacaccgcaaacaaggcggtaaaggatttcaagatggagaggaagaagacaccgattggtaggtttttcccagtgatggagctccagctcgagagaagtcgatggaaagtggagagagcaccaccggcatcagatatctactggaatcatctaggtcttagcaagatatcttcacggctgaggaggattgcagtcaacacctgcctaattttgatgctcctgttcttcagttcacccttggcaatcatcagtgggatgcaaaacgcggcacgaatcatcaatgtggaggctatggatcatgccaaatcatggcttgcctggcttgaaggttcaagctggttctggaccataatctttcagtttcttcccaatgtgctcatctttgtgagcatgtatatcatcatcccgtcggtgttgtcgtacttctccaagtttgagtgtcatctgacagtgtcaggggagcagagggctgcattgctgaagatggtttgcttcttccttgtcaatctcatcctattgcgtgctcttgtggaatcatcacttgaaagttggatacttagcatggggcggtgctacttggatggtccagactgcaagcagattgaacgctatttaagcccatcctttttatcaagatcatcgctttcttccctggcattcctgatcacatgtacctttctgggaatatcttttgatctgttggcaccaatcccttggataaagcatataatgaagaaatttaggaagaatgatatggtccagttggtccctgaagagaatgaagactacctacccatgcagaatggtgaagaaactaataatttgacagcacctctaatgcctgagagagaagacggtggccttttggataatatcgaggggcatgatctttccctgtacccactaaacaggagcttccatatgccaaagcagaaatttgacttcgcacagtactatgcttttgacattactatatttgccctcacactgatctactccctgtttgctccgctcgtggttcctgtgggtgcgacatactttggctaccgttatctcgtggacaagtacaacttcttgttcgtttacagagttagagggtttcctgccggcaatgatgggaagctgatggacagagtgttgtgcatcatgcaattctgtgtgatcttcttccttgctgcaatgctgctcttctttgctgttcagggtgactcgatgaagctacaggctatatgtactcttgggatgttagtgttctataagttgcttccctctagaagcgatcgcttccagccatctttgttagaagggatgcagacagtgaatagctttgtagatggtcccacggattatgaagttttttcacaacctgacctggattggagtctgtatcaatcctgaagatcaatacacacttttgttcattacaatgacatctttcacgacttcgaacctggtgtatcaaagtcatttattcttcttgtacagctatgtagattaactcttgtcttcttagatatgtatttgttttgtcagatatgacaggcacatgcagttttggtgatgaacatggcctgtcaaaaaattactttaaatgatacatagtcattttcttgttttttttttttgtttaaggatctaaggtcctataaccagaagatgtcatatttatgcatccttgtgttgtagattccctatcataatggatggtgactagaagagataatttacatgactgat

SEQ ID NO: 154141 - DNA, 1451 bp, Zea Mays
atcggtgatcggtctcctatgttcacacctgtttgctctcttttcttcccccgttcacctcgcgtgcgccacccacctagggtgaccgccgccgcccttcgcccagccgcccgggttgcgctttgccggcgacgagcgcccaccgcacccccaccatattggtcactggaggattgctgccgttggtaaggatgagcaaaggcccagttccgtttgccaacatcgggaagagagcaaaagatcttctgtacaaggactacaactttgaccaaaagttttctttgtcgacgtctagcggctctggtttgaatctcacagccactggtgtaaagatcaacgaagacttcattggtgatatacggacacaacataaaagcagtagaactactattgatgtcaccgttgatagtgattctaaagtgtcaaccacagtcactgttgatgaagcactaactggtttgaagacttcattcgccttcaaggttcccgatcacaagtctgggaagcttgatctgcaatatgcgcacaatcgtttttcattgaactcgaccattggtttgacatcagcacctttggttgaactggctgcaactgtcggcacaagtgaacttagcattggtgctgaggttgggtttgacagtacttcagctgctgttactaagtacaactcaggaattggatacaacaagtccgatttctcagcttccttactactggctgataaaggggagactttgaaggcatcttacgttcatttgttcaatccgaccaatggagctacagttgcagccgaggtaacacacaagctgaagaccagagagaactatttcacagttgggagctcccatgcccttgatccttcaacattgctaaagatgagattcagcaactccgggaaggtcggtcttctctgtcagcatgagtggaggccgaaatctcttgttactctttcagctgagtatgatctgaaggtggtaagtgcgccttcaagaatcggcatggccatatccctcaagccttgagctgggttaagtcaccttctataaaacagtacaagcataccgtctcccaagaacacaagctttggagcgatacctagaacaaccctccattttagccttttttattttgtaagagtcttttgcaaaggagtattgtcacttgtcagggagttagacttgttttgtggaacgtttccattagagccaactccacacgaaggattgaaaatacagaggtttgcattagaacagaagctccactgcgatattttcccatgttttgctagtcgacgcaaaaaatgattttttggaggtgatttgaacacctaacatcttgagtcgatggtggttttaacagctctggaaatcaacaagggccatttgtacccagcaacagcagaattagttctggaaattggttattttgatgagttttgtttgtgagttggg

SEQ ID NO: 154142 - DNA, 1343 bp, Zea Mays
ctcgcagtcgcagccgcctcccctgctctctctctctttctccccgtctctctctctctctctctaaatagcagcgcccgcccgcgccttttcccgctagccaacgcacggcaccgcagcacaaggcacggcgcgcgcgcccgcccgcccggtctgctcctacgccctgcagagccctcgtcttcccctccccgttattcccgggattcccctgttgctgcgtgcgactgcgccccgccccacccacacccacctacctacctacctaccaccaacgcctcggctcccctctccagcgagccgcgaccgcgcggcaggggaagcttagcacggacgggaccagctgacgaccaggccatggggaagtacatgcgcaagggcaagatgtccggggaggtggccgtcatggaggtccccggcggcgcgctgctgggtgtccgcacccgctcccgcacgctcgcgctgcagagggcgcagaggccgctcgacaagggggacgcggatgacgccgccggacagtacctcgagctcaggagccggaggctcgagaagcctcataaggagcatcagccgctgccgccgccgccgcccgcccccgcagccaagaggggcgccgggaggaaggccgcctccgccgccgccgcgccgcacgcgctggcggaggacgaggtcgaggtcgaggtctccttcggggagaacgtgcttgacttggacgccatggaaaggagtaccagagagacaacaccgtgtagtttgatcaggaacccagagatgataagcaccccaggatccacaactaaaagtaaaaccagcaactcgacgacttcccgtcgcaggatggaaacctcagtctgccgtttcataccgagttcgctcgagatggaagagttcttctcggccgctgaacaacaggagcagcataacttcagggagaagtataacttctgtcctgtgaacgactgccctctcccgggtcgatatgagtgggcgaggctagactgttagattcctccaagcacaagagcaccatttatctgatgtgtctaccacatgactagcgccgccgccgccgaggaggcgtaatcaactggatcgcattagctttcttgcctgttgtaaaaattagagtagttagcctgtagttgaatggtcctgtgtaacgaaacaggcgtggttctgagttacaccccgatccccaacctcactgtaaccgtttgactgctcgctcaagctgtagccgaaccatccatctcaagtagcgtaggcctagcgtattcatctgttcctagttctagttcttgaatggattaatcgaatgagatcattgttagaatctgcatgac

SEQ ID NO: 154143 - DNA, 1200 bp, Zea Mays
atgggattagggagcagcaaggccaccgcgatgggatatgggaggaggcaagcggtcctcctccatcttcgacgacgagctcgtacgttccccttcatcccctccgtacccttcccaccaccatcacccgaccaagcgggcctggtgctccccatcacgggaggttctgctctgccacctcctccccatattcccggacatggaccccctcgacagcgtcggccccccggcgacatccccaacccatatgcaacctcgctcttccccccggcgcgatgggatctgggagcagcaaggacaccacaatgggatctgagagcgacaaaaggtcctcctccatctttagtgacgatctcgtaccttccccttcctcccctccgtccccttcccaccaccatcaccccgccaagcgggcccactgctgctcgtcccactggagggaggttctactctgccaactcctccccctcttcctggacatgccccaccatcgacggagtcaggtggcgactcacgctctggcggtacaggccaccatgcaatgctcttgtcaggaataactctttgatgttgttgttaggagtcgggacggacgtcatcagatttgatctctcacccaggtttttctttattctaaatttagtcaaaaaatgtgttgttataactggctgggagtcaagttctctttcgcactctgcaatgagaacaaccttccacaccttctattttctggaacaagagaacaaccttggacttgagtgccagggaaattgtgagacgcacggtgcagcagtgccaggaactaaggatgcaggcacaggaaaggcagggcaatccagtggcgatcgacaggaggagaagttacccaagtgtgagcaggtcgactatggaagtgaagttgaaggcttcgcagatgatgagaaccctggcaagagggctgctttagttactttggtggaaatgaatactgcagcgacgaggatgagagagttcaagtgctcaccattgtcaataaggatgagcctgcagatgacattgtcgaccgtattaatcctgggatagttgcagggtacagtgaagcgaagggtgctgtaggtgcttctgccgccacttctacggtgtgacctgctggctcccgatcgtcaagtttccatggtgtgactaggcatagatggagtgggaaatatgaagctcatctat

SEQ ID NO: 154144 - DNA, 1418 bp, Zea Mays
cggcttcatcgccaccaggcaccagcccaccaccaccagttttcctccccttcccgctcatcagacccagatgccgcctcctcatcactaatcaccactgccccgcgctcccctcccactcgctttgtgctgcctctcgccgtcgctcgcggttcccgatgggctgcttccttggctgcttcgggggggccaaggagcgccgccgccgccgcaagcggtcgccttcacagtcccccaacggccgcgcccgggctgtgccgcgggttacgccgaagaaggttgatgtggatggggaggccgcggcctccgccgccgcgccgctcctagcgacgctcctcgagttgagggactccacggacggcatgtgcctagccgtcgtgaagaagaaggtgacgttcgaccccaacgtcaccaccttcgaggcggccccgatcccggaggacgacggcgagggaaccgatccggaggatggtggggctagcagggagaaggggtggatgctggtgccggagtgtgccaagtccgaggccttccccttgaaccacaggtacagcaactgcgccggcagcgacaccgacagcgactacgaggacgccgaggaggacgagttcgaaggcgacgaggacgacgaggaggaagacgaagacgggattgatgagtgcgcgatcgacggcgacgaggacgaagacgagcacggcctcctcggcatcggacgcagcgaggaggatgcgtgcgagtcgctcttcctgcttccgtttggcaagacatccaaggattccttcggccaggtagtggcgcccgccgtgcccccggcggcggaggcccccgcggtgctcggctccgtagagaatctcaacctcgcccggtggaaggaacccaagccccgggctgccgctgcactcaagtcctcggacaaggagaacgtcactgtggggcaagagaaccggatggacgacctcctcgccgagccaccagcggccaagaggaaggaggagaggccggcggtctcgggctacacccccagcacgccgagcaagcaggaggcctccgtggacgccagcctctccacgtggctcggttcctcggggacgcccgagagcaactccgtccggtcctactcgccgatcagccgggaggaccgcccgatccttggggacctcaccgtggaggacatcaagatatcgtcggccagctcaacgccgaggaggtcgaggtccccgagcccgagcccggatgacatgccgatcctggggacggtgggcgcttactggaactgcagcgccaaggaggccgatccggtgacaaggggagggtttatgaggaccagaaccagatttgggcaggtgaactttgtctcagcaatctgactgcaattccagctcttccaggtataatcttctgagttctgatgttaaatc

SEQ ID NO: 154145 - DNA, 1648 bp, Zea Mays
cggcttcatcgccaccaggcaccagcccaccaccaccagttttcctccccttcccgctcatcagacccagatgccgcctcctcatcactaatcaccactgccccgcgctcccctcccactcgctttgtgctgcctctcgccgtcgctcgcggttcccgatgggctgcttccttggctgcttcgggggggccaaggagcgccgccgccgccgcaagcggtcgccttcacagtcccccaacggccgcgcccgggctgtgccgcgggttacgccgaagaaggttgatgtggatggggaggccgcggcctccgccgccgcgccgctcctagcgacgctcctcgagttgagggactccacggacggcatgtgcctagccgtcgtgaagaagaaggtgacgttcgaccccaacgtcaccaccttcgaggcggccccgatcccggaggacgacggcgagggaaccgatccggaggatggtggggctagcagggagaaggggtggatgctggtgccggagtgtgccaagtccgaggccttccccttgaaccacaggtacagcaactgcgccggcagcgacaccgacagcgactacgaggacgccgaggaggacgagttcgaaggcgacgaggacgacgaggaggaagacgaagacgggattgatgagtgcgcgatcgacggcgacgaggacgaagacgagcacggcctcctcggcatcggacgcagcgaggaggatgcgtgcgagtcgctcttcctgcttccgtttggcaagacatccaaggattccttcggccaggtagtggcgcccgccgtgcccccggcggcggaggcccccgcggtgctcggctccgtagagaatctcaacctcgcccggtggaaggaacccaagccccgggctgccgctgcactcaagtcctcggacaaggagaacgtcactgtggggcaagagaaccggatggacgacctcctcgccgagccaccagcggccaagaggaaggaggagaggccggcggtctcgggctacacccccagcacgccgagcaagcaggaggcctccgtggacgccagcctctccacgtggctcggttcctcggggacgcccgagagcaactccgtccggtcctactcgccgatcagccgggaggaccgcccgatccttggggacctcaccgtggaggacatcaagatatcgtcggccagctcaacgccgaggaggtcgaggtccccgagcccgagcccggatgacatgccgatcctggggacggtgggcgcttactggaactgcagcgccaaggaggccgatccggtgacaaggggagggtttatgaggaccagaaccagatttgggcagggttttgcaggatgaaatggtggattgctactgaacagtggacacacctctcctcccgctaggagggtagaatgcaagagtgaaaaccagtttgcatttctttcatatgttgtaaaacattacatggtcaccagatcagtattctagtatgatattttttgtggcacttgtcaatatgatgcagtatttcatattattcttttgtcaatatgatcaatttgtatttgtgcgtgttatataccctctcttttttggaatattttgtaccagcatctgcagtaccagaatcgctcaaaatttcaaca

SEQ ID NO: 154146 - DNA, 859 bp, Zea Mays
gcagcgagccaggcgaaaccctaccgattgggtccaacaccagccgccgccatgtcgaagcgaggcaggggaggttcggcggggaacaagttccgcatgtcgctgggtctgccagtggccgcgacggtgaactgcgcggacaacaccggcgccaagaacctctacatcatctccgtcaagggcatcaagggccgcctcaatcgcctcccgtccgcctgcgttggcgacatggtcatggccaccgtcaagaaggggaagcccgacctcaggaagaaggtgatgcccgccgtcatcgtccgccagcgcaagccgtggcgccgcaaggacggggtctacatgtacttcgaagataatgctggagtgattgtgaatcccaagggtgagatgaaaggttccgctatcactggacctatcggcaaggagtgtgctgatctttggcctaggattgctagcgcagcaaacgccattgtttgagagcttgttggaatatgttcagacttctatatgatcatcttattatcagttgctagactgcaattgggcttatgtttgttcactcaattttgtagtaaacagaatttggtataccaaggggatctatataacaatgtatgccataaattttctgtctaccatttctcatgaaatgcttatattgtttatattgctttggtgacagcaaaatttttggtagtttgtttcccatcctttatgtttgttcactcaatttttatttgtttcccatccagcagaaatgttttaatgtcatcattcttcctcatttgcatgaacatgtacaagagagttttttgtgattagttgtatttccagctagtttacaagcatgtaaaatgttaca

SEQ ID NO: 154147 - DNA, 846 bp, Zea Mays
accgattgggtccaacaccagccgccgccatgtcgaagcgaggcaggggaggttcggcggggaacaagttccgcatgtcgctgggtctgccagtggccgcgacggtgaactgcgcggacaacaccggcgccaagaacctctacatcatctccgtcaagggcatcaagggccgcctcaatcgcctcccgtccgcctgcgttggcgacatggtcatggccaccgtcaagaaggggaagcccgacctcaggaagaaggtgatgcccgccgtcatcgtccgccagcgcaagccgtggcgccgcaaggacggggtctacatgtacttcgaaggtagcatcccgatctggcgtcaccaataattgcttagatttacgctcaatttacctttggtcctggtgaaacatgctgtctatctagtttagacgtgaaattatttattcttgaccgcagggccgcgaggctctttagctttttctggagcagaagtagttagtttctgcaacgctattgcgttgatggtttccattgaatgtttttatccgtcaggggtagtccgtagtctcatactccatcgccttgtgtagcagcgtcgctgacatcaaaatttgggactgacacatttcacacatttttgtattctgttatttttactggttcacattgttctgttaatttttacatgtttttgcttgtattgatgttgaaaagaatgttacacattcggatttatggattacagaacatgccattgccactcgacaacagttttctgacggttggacgtccatgtccttcggcttaattgtggagcaaacaaaaaatgtttgtatattcccaagcaaacgtcaa

SEQ ID NO: 154148 - DNA, 959 bp, Zea Mays
cattacatgtttgtatgttccaaagcaaacgtcagaaatcaagttttatctgtagaggtttgctggcgaggattttcatccttgaagccatcctccatttgaaatggtctcatattccattgccttgggtagtggcattgctgcattgaaactttgggactggccatgagacatatatttcttctttcaatacttatgatgattccatgctaacttctggtgctttgtaacatttgattgtttaagtcttctattgatttctactgtctattcttatgccttttctcttgttattaactgttgaactggcctggctctaccttttttgttattaactgttgaactgacctgctctaccttttttgttattaattgttgaactgacctgtatctatccttttttgatattaaatgttgaactgacctgggttgctgcctttcatttgcagataatgctggagtgattgtgaatcccaagggtgagatgaaaggttccgctatcactggacctatcggcaaggagtgtgctgatctttggcctaggattgctagcgcagcaaacgccattgtttgagagcttgttggaatatgttcagacttctatatgatcatcttattatcagttgctagactgcaattgggcttatgtttgttcactcaattttgtagtaaacagaatttggtataccaaggggatctatataacaatgtatgccataaattttctgtctaccatttctcatgaaatgcttatattgtttatattgctttggtgacagcaaaatttttggtagtttgtttcccatcctttatgtttgttcactcaatttttatttgtttcccatccagcagaaatgttttaatgtcatcattcttcctcatttgcatgaacatgtacaagagagttttttgtgattagttgtatttccagctagtttacaagcatgtaaaatgttaca

SEQ ID NO: 154149 - DNA, 668 bp, Zea Mays
gtttgttcataatgttcatgactctgggagcctgattgcgctgcttcacagagttcatcattcttggcaaaccttccacggacacggggcctgctatccgccaaggtttttctacatgcgtactgcatttcgttgtatgtcaggctgtcagcacagctgaatacgtaagatgtccatgcggaggcgacaagcggacgaccttaaacgtggagtcttccagtactgatagttccgtcggaggtaacgttgctgggttcccgttgcatccgtttatcagcctggaagaactgctccagtttgctgatacatggctccatccagacccatgaaccctccagctgctacggctgccatgaagcactcatcatagtctgtagcgagcggcatcaaggcagatgcactgctgctcatctgcactggaggaggcacctgctcgtctaaggtctctggaagtcccatctggtcgaactgccctatgctggcctcatcggtggcagttggatagtatgctgctacctctgataggccatcgatctgcgggaggaacccggcgtcaaggccatggtgctgctcttcctccaggagggctgtgagagtggtgtcgaaggatgtcaacggggtgtaggctgtggctccaccagcagctgcggtgtcttcactgtagccgc

SEQ ID NO: 154150 - DNA, 514 bp, Zea Mays
acaattgcggtcgggagagagactgcttattccggcctgggaagaagtcctgaaagaattcggtcactcctcggaccccgatgaacggggacgtcttagctggctgtatggcagggttggacacattatcaagctagggcgggagggagacgacttacaatgcacaaggcatctgggatggccatggcggctgcgtcctcctcgaacaacatcatcattatttgtatacgatggtaccagagccgctcgatcaataatggaggctgggggagagtggagggttgatggtgtcccccatggagaacgcatgagctcgatacttatatatgcggaagggagaacaagaacaactgcacgggcatctttttttttatttttatgtttttctctccctaaccttttgctataattgggtggtgccgttggtgagacgaaccgagccgacaaacaacagcctagcctggtggcgctcgatggagtttttggcgtttactactcatatatggtgcatata

SEQ ID NO: 154151 - DNA, 2024 bp, Zea Mays
aaattccatggcctacgcatcctagtactcggccgctcagtcgcttacaaatagccatggtgcatcgtgctccttccatctcatccaaacatggagccgttttttctgttcatagagcttgcccttgttctctgcttcatcactctgtactaccgccacttgcaatccaagaaaacgagccctctggagccgaccgaatggccagtagtcgggcacctccccggcttggtcgccaacatccaccgcttccacgactgggccaccggcgtcctcgccggcgtgggctgcaacttcgaagcccgcggaggccgcaccggcctgcggtacttcatcacctgcgacccctccaacgtgcgccacatcttcacgtccaacttcgccaactacccaaaaggcgaggagtacgccgcgatcttcgacgttctcggcggcggcatcttcaacgccgacggggagtcgtggcggcgccagcgggtgaaggcccagatgctcatgaccggccctcggtttcgagccttcacggcgcggtgcagtcgcgacaaggtggagaggagcctcctgccattcctcgcgcaccacgccgccgccgacgacgaggggaggccgacgccgtgcgacctgcacgacgtgttcctgaggctgacgttcgacatgacgtgcgctctcgtcttcggcgtcgaccctgggtgcctggcgctcggcctgcccggggtccccttcgcgcgcgcgatggacgatgcgctggagacgctgttcctccggcacatcacccccacggcgtgctggaagctgatgagcgtgctgggagtagggcaggagaagaagatggccgcggctcggaggacgatcgactgcttcgtcgccaccaccgtcgcgaaacgcagggccgacatgctcagagaaggagaaggcgagggcgtctgcagctcgttcgacttgctgtcatccttcatctgccacgaggacgactcgagtgaaaatgacgacgacgacgacgtgttcttacgggacacgacggtgaacctcctgctcgccgggcgggacaccacgggcgcggcgctgtcgtggttcttctacctcgtctccaagaaccctcgcgtggagcagaaactactggacgaactggcgcccatcgtcgcttcacggcggagagccggcggtgctgctgcagacgcggccagcggcatggtgaccttcgacgcggacgagctcggcagcggcctggtgtatctgcacgccgccctgagcgaatgcttgaggctgtacccgtccgtgccgttcgagcacaaggtcgcggcggccgccgacgtcctgccgagcgggaaggagctgaaggcgggcgacaaggtgctggtgttcaactactccatgggcaggatggagggcgtgtggggcaaggactgcacggagttccgccccgagagatggctcaacgaggacggaaccaagctccggtacgagccgtcctacaagttcatctccttcaacgccgggccgcggacgtgcctcggcaaggagatggcgttcgtgcagatgaaggccgtggcagcggccgtgctgtggaacttcgccgtcgaggtggtaccgggacacgtggtggagccgaagctgtccatcatacttcacatgaagaatgggcttgccgtcaaggtgaggagaagggacgggacgtacggcgccgcgccgccgtcgagcgtcacgccttgcttttctgagttctagtcttgtgactgaacacagtgacgacagtgcgtctcgcctatgttatgtgagcattgcgtggttttttagtcatatcctccggccggaatatatatagtataccaataccaacacgtctatgcatgtgcatggccgtcttcttgcacaaactagtagcggaacaacgatgaaactcttacgttcaaaaaaaaagaacaacgatgaaactctgtcgtgctcccaatgttcgtcatcggcaatagtctctgaaggtatctgcgtgtattttttatatattatattaatataaatcaggatttgtt

SEQ ID NO: 154152 - DNA, 1032 bp, Zea Mays
gtccaggggcaccaacccaaaaacaaagcgatcccccgccccgccccaccccaccgccgccaccaccaccttaaaaaaaaagcatggactcaccagccaagtaacgtttagcccattacggcccattgtaaaactagcatagagacatcgctaccaggccacggcccaaacttcacctatagataagggcgacctccaggcccttgcgaaccctagcgccgcaccctcccgcccaccgccgtcgccgcccaaccgcagtaaggaggaaggagcaggaagatgccggcggggcacgggctgcggtcgcggacccgcgacctgttcgcgcggcccttccgcaagaaggggtacatcccactcaccacgtacctgcgcacctacaagatcggcgactacgtcgacgtcaaggttaacggcgccgtgcacaagggcatgccgcacaagttctaccacggccgcaccgggagcgtctggaacgtcaccaagcgcgccatcggcgtcgagatcaacaagcaggttaatggccgcatcatcaggaagcggatccatgtccgcgtggagcatgtgcagccctcccgttgcacggaggagttccgcttgaggaaagccaagaatgaccagctcaaggcggatgccaaggcccgcggtgaggtgatcagcaccaagaggcagcctgtgggacccaaacctggcttcatggttgagggtgctacactcgagacagtcactcctattccttatgatgtggtcaacgatctcaagggcggttactagagagaatttttgtaccttcagcagttcaaacgagctggcaaacttatctgaatctttttgataattggctagttcttctgttctggtgttatgaactcatgtggctattgctgttggcgtcaaaagattttttttattgccatggttgattgcaacctgttattttaccttctgttttgagtttgtagattttactgagatccgtctgcattttcatttaccgatgccgaggctcaatccaagatggatttgatcagt

SEQ ID NO: 154153 - DNA, 847 bp, Zea Mays
atgatacatatgtaatgtttttctgcaatcgcttttcctgtttatttacacagtacaagtttcgtgttaatattgatcaatacagttattctcaagccttgttttgttcaagtttgcttcatagtaaaacatgtctcccattcctgaactgttggatatgtgatttaattcctttaaagttatatggtttattgtagagccagtgtttgcaaagctgcatacgccctactattcttttttggatagaaacaacccttgacatgcgtattttttgtggcatgagttaagtgcatctaattagactgaactgccatgttaacacttgacctattctggtgtctctaggttaatggccgcatcatcaggaagcggatccatgtccgcgtggagcatgtgcagccctcccgttgcacggaggagttccgcttgaggaaagccaagaatgaccagctcaaggcggatgccaaggcccgcggtgaggtgatcagcaccaagaggcagcctgtgggacccaaacctggcttcatggttgagggtgctacactcgagacagtcactcctattccttatgatgtggtcaacgatctcaagggcggttactagagagaatttttgtaccttcagcagttcaaacgagctggcaaacttatctgaatctttttgataattggctagttcttctgttctggtgttatgaactcatgtggctattgctgttggcgtcaaaagattttttttattgccatggttgattgcaacctgttattttaccttctgttttgagtttgtagattttactgagatccgtctgcattttcatttaccgatgccgaggctcaatccaaga

SEQ ID NO: 154154 - DNA, 1411 bp, Zea Mays
cccgcttagggctagagccgaccatgcatgtaaggacgacgacattctcatacacgatgagaacgacaacatctagagtttttttttggagagcgaggcacgaaattggttgcctccaatcacggtgagaccaacaatgttgtagggctactggtggtcacctggctccgacatatggagctaattaactggtggccaagagcaaagaccgctcgggcatgatgcatgcatgctcaacctcacttgtgcatgcgctgttacgtagaaagttctctcgatcgatcgctatcccgactaggcctgatataaatatgacctctgcctactcattcatcacatcacggtaccattcaccggagatgactgttgtgagtatcatgtggtcgttagtgcaggtgcaggtgctggtggcggtggcattagcatttctggtaggcggtgcctggtgtggtcctcccaaggttcccccgggtaagaacatcacagccaaatatggtagtgattggctagatgccaaggcgacatggtatggcaagccgacaggtgctggccccgacgacaatggtggcggctgcgggtacaaggacgtgaataaggcccctttcaatagcatgggcgcgtgtggcaacgtccccatcttcaaggacggtctaggttgtggatcctgcttcgagatcaagtgtgacaagccagcggagtgctctggcaagcccgtggtggtgtacattacggacatgaactacgagcccattgcggcataccacttcgacctagcgggcacggcgttcggtgccatggctaagaagggtgaggaggagaagttgcgcaaggcgggcatcattgacatgcaatttcgaagggtcaagtgcaagtatggatctaaggtcaccttccacttggagaaggggtgcaaccccaactacctggccctgttggtcaagtacgtcgacggcgatggcgacattgtggcggtggacatcaaggagaagggctccgacacgtacgagcctctaaagcactcctggggcgccatctggaggaaggacagcgacaagccgatcaagggacccatcaccgtccaactcaccaccgagggaggcactaagaccgtctacgacgatgtcatccccgccggctggaagcccaacactgcctacaccgccaaataaactaaccaaataataataagtatcaaatggcacacttgatagacctttattttttattttttatttaataaaaggatataaggagtgtgacaaacaacaacacgaatattgtattgtctatgtatctcctatatatgcaatcccaattttatcatggccacattttaaaatggaatatatgatatatatatgtacatatggattctacatgtatgaccatccttaacggtggtaagatgtcc

SEQ ID NO: 154155 - DNA, 1249 bp, Zea Mays
cgaaacgggcccgaaagaatgggccatgtggcgcctcgggcttatctgcagaaaggggatctccgattcgcacctccaccacctgccgcgccggccggcgagcctcttcctcttcctccggtcgctccccttcccatctccatcttgatttcgattctctggtggctgggaaagcctgcgagagcgcgataaccggaaagatctgagctgctgcaaccgatctccggcgccatggggttcctcgaggacttccaagccagtgttgaagcattgccatctatgctgcatcggaactattcattaatgcgagagttggataaaagtttgcatggtgtgcaactagaaaatgagcagcgctgtcaacaagaaatagaggacattaagcatggacttgaatctggaagtattacatatgacccagcaaaattgaaattttccgaagaagcaatggaggagcagaaacattgtgttagaattgctgacgagaaggtggctttagccactcagacttatgacttagttgatgctcacatccaacagctagatcagtttatgaggaagcttgaagaaatccggcaaggaaaagaggcagctgctgctgttactgcagggactgctgttgctactactgccactccaaccgtgaatgctggagcgacaactgctgatgctaatccgaagagtggacgatctggcgaaagaggcagagggggtcggaagaaggccaaggtacccacggagcagtcagtgccagtgccagtgccactgccacctattgacttagagttgcctgtggatcctaacgaaccgacatactgcctctgcaaccaagtcagctatggtgagatggtggcatgcgacaatcctaattgcaaaatcgagtggtatcactatggctgtgtgggcgtcaaggagcaacccaagggaaagtggtattgcccaaactgcatcggattccagaagaagcgaaaaggcaagtgatatgcagtccacaggctgctgtgctagtgtgtccttgcttgttaattgtgttgctgatgttgggtaacaaatgtagtagtagttgctgcctgtgacagtgcataccgttgtagatccagtgttctgtacatgttactcctccttcggtgctcgtagtttagggccatcaaccatttgttaacttcatggcctttttggcgattcatgccccttgtatgggtttcgcaatatcatgtctccttttcctggtatcacaatattatgcaat

SEQ ID NO: 154156 - DNA, 1364 bp, Zea Mays
cgaaacgggcccgaaagaatgggccatgtggcgcctcgggcttatctgcagaaaggggatctccgattcgcacctccaccacctgccgcgccggccggcgagcctcttcctcttcctccggtcgctccccttcccatctccatcttgatttcgattctctggtggctgggaaagcctgcgagagcgcgataaccggaaagatctgagctgctgcaaccgatctccggcgccatggggttcctcgaggacttccaagccagtgttgaagcattgccatctatgctgcatcggaactattcattaatgcgagagttggataaaagtttgcatggtgtgcaactagaaaatgagcagcgctgtcaacaagaaatagaggacattaagcatggacttgaatctggaagtattacatatgacccagcaaaattgaaattttccgaagaagcaatggaggagcagaaacattgtgttagaattgctgacgagaaggtggctttagccactcagacttatgacttagttctgctgcataatcatggctcatgacgcctctgcactgttgctaaattgtgaatgtgcgggattttgattatgctgatctataggttgatgctcacatccaacagctagatcagtttatgaggaagcttgaagaaatccggcaaggaaaagaggcagctgctgctgttactgcagggactgctgttgctactactgccactccaaccgtgaatgctggagcgacaactgctgatgctaatccgaagagtggacgatctggcgaaagaggcagagggggtcggaagaaggccaaggtacccacggagcagtcagtgccagtgccagtgccactgccacctattgacttagagttgcctgtggatcctaacgaaccgacatactgcctctgcaaccaagtcagctatggtgagatggtggcatgcgacaatcctaattgcaaaatcgagtggtatcactatggctgtgtgggcgtcaaggagcaacccaagggaaagtggtattgcccaaactgcatcggattccagaagaagcgaaaaggcaagtgatatgcagtccacaggctgctgtgctagtgtgtccttgcttgttaattgtgttgctgatgttgggtaacaaatgtagtagtagttgctgcctgtgacagtgcataccgttgtagatccagtgttctgtacatgttactcctccttcggtgctcgtagtttagggccatcaaccatttgttaacttcatggcctttttggcgattcatgccccttgtatgggtttcgcaatatcatgtctccttttcctggtatcacaatattatgcaatacagccggtttgtaacttttccctctttg

SEQ ID NO: 154157 - DNA, 759 bp, Zea Mays
ttgaaatatggcttcaataacaagcaagatgatgagcaatcagaacacaaacaagtgaagacacagatttacgtgggaaactcatttcgtagagaaaacccacggacaacagcgagcataaactccaccatacagattaaaagtacaaaaggtgggagtcaacaggtgtggagagactccagatctctaaatcactctctcaaatacgtagatttggtgccttctaatctctccctctcaactctctaatcctagctgaacgttctctctgttggactgagcagccatgggatggagttgggaatatttcatatttatttacacatttacagcagaccctgagaggcagtgggcagccgaccccttgctgtcaatgggagctgctctgctgctcctcacagctgacgaggggtggtacgccacggagcacttcggcctcgacgtcatcttccacagccggatgaggcagtagtacgactgcctcacgggcgactcctcccgcgccgccgacgtcttcgtgcccttctaggcttctacgccggcttcgacgtcgtgcagcacagcacctgtggggcgctaactctacggccgcggagattgtcgctaactccgcctacgaagattggagtgcaacaaatcaaaaactaatttgcatatttttcgtctaatggcaaaagatttcaggcacaggtggcgacaagcgccatcgcgagcggcatggagcacaatagagagaaagttttcccctatggctaggac

SEQ ID NO: 154158 - DNA, 2488 bp, Zea Mays
gccctccctccgccagtccgtcgtccggagcgcaagcctaaccaaaacctcccttttcccctccgttccactccacccccacccccacccgaaccccacctgccccggtctcgcgcgatccgccgatccggtttccgcgtcgccagcgcccccgtcccgacccccccgccgttgtttcgtcgccttgttgccgtgtcggtgcggcgttgcctggctggcgcgagggggagacgcgcggaggtctcccatgaggcggcgaccggtgctaccgtcccaccacgacgacacggacaagggcggcgggaagccggcgccggcgcgcctctgtttcctcgccacgctctgcgccatgttctgggtcctcatcttctacttccacttcgccgtcctctccgacgagcccgccgccgaggcccgcattgcgcgcgcccacacccgcgttcccgaacaggacggcgccggcgccggcgcgtcccgcgtcgaccttccccgcgcagaggagccggaggacgagcgcgccgccggagtccgccgggaggtggcgccggcgtcgtacccgttcgagcgggcgctcaggacggcggagaacaagagcgacccctgcggcggccggtacatctacgtgcaccacctgccgccgcggttcaacgaggacatgctccgggagtgcgagaagctcagcgtctggaccaacatgtgcaggttcatcaccaacgacggcctcggcccgccgctgggcaacgacgagggcgtgttctccgaaaccggatggtacggcaccaaccagttctccgtggacgtcgtcttcggcaacaggatgaagcagtacgagtgcctgaccgaggactcgtccgttgccgcggccgtgttcgtgccgttctatgccgggtttgacgtggcgaggtacctctggggctataacatcacgacgagggatgccgcgtcgcttgatttggtggagtggctgatgaagaagcccgagtggagcgtgatgggtgggcgggaccatttcctcgtcgcggggaggatcacttgggacttccgaaggctgacggaggaagagtcggactggggcagcaagctgcttttcctgccggctgcaaggaacatgtcgatgctcgtggtggagtcgagcccgtggaactcgaatgattttgggataccatatcctacgtacttccacccaggcaaggacgccgaagttttcctttggcaggatagaatgaggagcctggaacgcccgtggctcttctcgttcgcaggcgctccacgtcctggcgatcccatgtccatcagagggcagctcatagatcagtgcagggtctcgagcgtttgtaagttgttggagtgtgaccttggggagagcaagtgccactccccgagcacggtcatgaagatgttccagagttctttgttctgcctgcagccccagggcgactcctacacgagaagatctgccttcgactccatgttggctggctgcatacctgttttcttccatcccggttcagcgtacgtccagtatacatggcatcttccaaagaactatacaaggtactctctgttcatccctgaagatgacatccgatctagaaatgccagcattgaggagaggctgaagagtgtccacccagatgtggtcaagcaaatgagagaagatgtcatcaacctaataccaaaggtgatatacgctgatccaagatcgaaactagagaccttgaaagatgcattcgatgtttccatagaggcgatcatcaacaaagtgacaaagctgagaagagatatcatcgcaggacaggaagacaaaggttttgttgaggagaatagctggaagtatagtctgttagaagacggacagcggacaattggacctcacgagtgggatccattcttctcaaaacccaaagataaaggtggagattctggcggtccatctgctgaagctgccaagaattcttggaaaagtgaacaaagaggacataattgaaccatgagcttgccatctttgagatgagaccaagggagtagagttagccatgctctctggaagatgctctgatgcatgtactttgcagtttgcacataggagaagatcaaatagctatggtgatcatgaacatcattaatggtctatgtcacccctacagactacagtagtacgaagccactccaccaaaaacgcttttttggggaaatttggaacacagcctttactcaccccctataaataccatttttttcacactgattttgctgtttttgcttaataatcctttgtaaaccattacaggatttagaggtgtatcaatttttgttcttgtattactttgtttgttttgctctgttcaaacttaagagctatatgttttagaatttgtggatattactaacaatttgttcacatgttcaatatgtaatccaagagggacacatttaggcaaattttctcgtacatattgcaattgtatactttaaagaaatgttttgc

SEQ ID NO: 154159 - DNA, 1580 bp, Zea Mays
ttttttttcttttaggaaacaagattgacccacgataaggtgaaacagctttctgtacattaatacaacaccatgaaacagcccatcgaaaacaagaaacagttcgtctccaactccaagtacggggcagttgtatccgtgtgaaaaagctcggaccctcgtgtcacgaaatgcatgcgccgccgcggcctggatggagccaggcagcagggtcatcttccttccgtttctgttcttctccactgcctgtgtttaatcctgaagcaaaccctaatggaggggcaatgctgttctaagcgggccaacagatccaaatcgtatccagccacgggacctgagacagaggcagccccacgtgagcgtcgtggggttatttccctcgttaaaacctatggatttgtagcattatctctcaagaaccccagaccaaaaaaaaaactcgcttgcttaacttgtgaaaccgctgaggtagaagcaaaacctcccaaaaaaagggttggaaagcagatgataaaaagccccacgggatcaccccgaatacaagtgttgaagcaatcgaataaaaaaatccatttctttatccctcagccttgacggtggcggcgaccatggcggggtgcggggcggcggcggacgagaacccggcggcggaggagctcgcgagcggcgcggacgccagcttgaatgccttctttgaccacgcggggttggagctggcggcggcagccggaggcgggcagggggcggacgacgacgaggaggaggagctggagtggctctctaatatggacgcgttcccttcggtggagaccatgtcggcggaggtggaggctgcgccgtcggctgcgccgccggcgcgcctggagccgctgccccacgcgtcgcacgcggtggggccgaggaccaagggcttgcggcggcggcggcgggtgacggcgccgtggagcgtcccgccggtcctgccgccgcccgcgggcagcggcgcgccgcggcgccggtgcacgcactgcgcgtcggaggagacgccgcagtggcggcagggcccagcggggcccagcacgctgtgcaacgcgtgcggcgtgcgcttcaagtccgggcgcctgttccccgagtaccgccccatcctcagccccaccttctccccgctgctgcactccaactcgcaccgccgcgtcatggagatgcgccgccaccctgtagggattggatgggatgggacggaggagagtcaatcatggagagcatgggaggagagcatacatggagggcgacatgtctgccactcaacggcctttgctttctgtttcgcatgggaggagcatacgatttcgacgggtttttgcttccgtctccccatgagtgatgaggccggcaaatcacgctcatcttctacctaccacacacggaagagaagaagagatggccgccttcgttgcaccgtccgcggatatatgctcttgccccgtctgtcagtggccgtgcagcgcttcctgtcattcttcttccctcctggaactggaagtggcgatggcgactggcaacgtgctcgcggtcgcaggtcgcaggtcgcagccttctag

SEQ ID NO: 154160 - DNA, 1402 bp, Zea Mays
cgaggctgcgcggcactccgctgatccgctccgctccgctccaacacccctacgcggacacgcgtgttgtcatcaaaaatgaaaaaacaaaaccacgcgcgccacgtggccgtggctggcggcccctcgccgcagcccggcacgccgcccgcccgcgctagccggccatcaaccgcatctgaaaggaggagtccacctgacgccgcccgcctcctcgtcaccccgtttcgcttcgccttccttcccctctctccctttattcctatcggcgctcggccaccttcccgcaccaacccactcgcccccgcattcccgggtgcctcgcttcgctttgcgcgcgattcgatccaggcttctttggttggaggcatggcctcgtcgcccgcgagcagctacgactgctccttcaaggtcctgcttatcggggattcggccgtcggcaagagcagcctcctcgtcagcttcgtctccgccgctcacatcgacgacgacatcgcgccaaccataggggtggattttaaaatcaattttctcagtgtgggtgggaagaaactaaaactgacaatatgggacactgccggtcaagagaggttcaggacaattaccagctcttactacaggggtgctcatgggattattttagtttatgacgttacaaagagggagagtttcacaaatttggctgatgtgtggaccaaggaaatagagttacactcaacaaataaggaatgcatcaaaatgcttgttggaaataaagtggacaaggatgaggacagaatggtgacaaaagaagaaggtcttgcatttgcacaagaacgtggatgtctctttgtcgagagtagtgctaaaacaagagaaaacgtggaaaaatgttttgaagagcttgcattaaagattctccaggttcccagtctattggaggaaggttcttcggttgttaagaggaacactctgactctgaaacaaaagcaggagaatgcaaaccgaagtggaggatgctgtcagtaggtcggccagttcttgttgcaagccactcgaggtatcatatatttaggtccttgtaagttgtattgggatgtagatgagttgtatctaaatgcacagcggcagagccaatgcaagtgatgggagaactaaccacttgaggttttggtgtgaattgatctgtacagaagaaaaaccttctcttgtttttcctgtttcttgatgtggtaatttgcgcaagtgatgggagaactaaccacttgaggttttggtgtgaattgatctctacagaagaaaaatcttctctctttttttctgtttcttgatgtggtaatttggtttgttgcttgtaacggatcctgtcagctgatcacttcattgattgtatatgtggaagtgtggtacatagttcatggct

SEQ ID NO: 154161 - DNA, 264 bp, Zea Mays
atgggtcagatccagtactccgagaagtacttcgacgacacctacgagtacaggcacgtcgtcctcccgcccgaggtcgccaagctcctccccaagaaccgcctcctgtccgagaacgagtggcgcgcgatcggagtgcagcagagccgcgggtgggtgcactacgcgatccaccgcccggagccgcacatcatgctgttccgccgcccgatcaactaccagcagcagcaggaggcggctgccgcgcagatgctggccaagtga

SEQ ID NO: 154162 - DNA, 1425 bp, Zea Mays
ggacgcgcgcccgcgccgccagggaccgggagagagggcggagccgcgccgctatgtaagggcggactgacgggtggagcaggagggccgcgtgcccacgccaaagcggaagggagaggagggtcgccgccgccgataggaaagctgctgccgccgccgccgccaccaccaaaggtcctcgcagtctcggtaccctgacaacgacctccacccgctctcctccgccccgaacgacgaggagtcggccgctgcctcgaagtcgaaggtgttcccctgccggccgtcgtcgtccttgtcgtccgcgccggcgtgctcgaacgcgtggcacggcgactgctgcaagtagtccgactccgacctcagcagcgcggtcagggactcgtgcccgacattgccgtacgtggccggcgcgacgcttccattgctgctgcaccctagctgccccgcggcggcggtgcccacgtagcccttggcgtcgtcgacgtcgtgcacgcgctgctgcccctgcgccgtgaccgtgagcgacgccagctgcgtctgcagggccatcacctggatccatcggaatcggggtgcacggcggcacgggtcatcagcaaattaaaccccgtcacgagagacaaagcggagacggcggcggcggcagccgccaggcacttcgtgcacgcagccgtagtgcacctgctgctggagcgcgaagatgtgggcgacgcagccgtaggtggggtcgcgcagcctcgcctgcgcctcgtaggagatggtggcggcggcctccgggcggtcggcgagcggcaggtgcgcgagcagcttggacgcgttgctggcgccgaacaccttgtggatggcggcgaagtgcgccgcgccctgctcgtcgcagaagtagggcgcgaagacgcagccgcgcgcgcacctgcgccgcaggaacttgcacgctccgcacggtgacccgaaccccgtcatctccatctgcaagactgcaagcacagctgttctgtactgcactgtgctgcacgtgatagctcgctcagctcgagctggatcgatcggtggcgacgatcacttcgtgttcttgccctgctgactgcggctgtggtgcggtggaggatgggggcggggcggcaatgcttataaggaggagaaggagacggcagcagggctgggggattagggccaaaggattaaacaaaccaggcgtgtctgcccggtggacaaccagctccattattttgagcttccaatcgccctcgctccttaccgctaagtttttttttggtgacaccctccctgcaccgcatggggcaccctactacaataagcctagcaggagtactatttccttatctctctctctctctctttttgttttgggagactaaggacctatttgatacactgtgctaaagtctagcatttcattttatgacc

SEQ ID NO: 154163 - DNA, 251 bp, Zea Mays
tttcagaaaatatggtttaagtgatgatacagtggatttcgttggacatgcacttgctcttcatagagatgatcgttatctcgatgaaccgacacttgatacagtgtgaaagggaaactatatgcagactctcttgcacgctttcaaggaggatcaccttatatctatccactatatgggctgggtgagctaccacagggttttgcacgaccgagtgttgtttatggtggtacttacatgttaaacaagcc

SEQ ID NO: 154164 - DNA, 4569 bp, Zea Mays
atgtcgcctccgccggcggtggcgacgggcggttccggagaacccacggtgccggcgtggctccgcggcctcccgcgcgccccggagtaccgccccacggagtcggagttcgccgaccccatcgccttcctctcccgcgtggagcgcgaggccgccgcctacggcatctgcaaggtcatcccgccctacccgcgcccctcccgccgcttcgtcttcgcgcacctcaatcgctccctcgtctcctcctctgaagccgccaaccccaccactgcctccggctcctccgccactgccccctcgctgccggaatccgccgctgtgttcacgacccgtcaccaggagcttggcacgccgcggcgtgggcgaccgcctccgcaggtgctcaagcaggtgtggcagagcggcgagcggtacacgctcgaccagtttgaggccaagtcccgcgccttctccaagatccacctcgctgggcttcgcgagcctactccactagaggtggaatcccttttctggaaggcgtccgctgacaggcctatctatatcgagtatgcgaatgacgttccggggtctggctttgccgccccaaaacagtcccagcggcacaagaaacggagacgagagagcgatcaggtggaagagggggagaaaggctctgggtggcggctctcaggaagcccatggaacctccaggcgattgcgcgggctcctggttcgcttacgcgattcatgccagatgatgtgcctggggttacctcgccaatggtgtacatcgggatgctctttagttggtttgcatggcatgtagaagatcatgaattgcacagtctcaacttccttcacaccggtgcacccaagacatggtatgcagtccctggggaccgagcctcagagctcgaggaagttattcgtgtacatggatatggaggaaaccctgaccgccttggtatttgtcctttctcatgctcgccgtctgaatgtttcggttgtggtctagcaggtacaagctctgaaatggccagcgtttccattgggtcaaatgttcatgatattattcagacatcagattcttatgaattctttgctgatatgtactgtttcagctttattgaattgattgtgatgtgctatttgttaactatgtttattccagctttgctagattttcaccttcatggatttaattgtggtgaagctgccaactttgcaactccacaatggttaaaatttgctaaagaggctgccgtacgaagggctgtgatgaattatcttccgatgctctctcatcagcagcttctgtacttgctagcagtttcttttataaccagaaccccaaatgtattgtctggaattcgttctcgcttgagagatcggaaaaaagaagaaagagaactgctggtgaagcaggaattcttgcaggacatgattagtgaaaacaagcttttgtgttctttcctggaaaagaaatcaattcgtcatgttgtgctctgggagcctgacttgttaccatcttcgactgctctacattcctgttcttctggctcaaaagctcctgagaagaagtctgaggatggttgcagaattgaatctagtgaacgtggcaccaaagataacagctctgatggcagtgcacatatgattggcgcacaaactaaatttatgtccgggaatagcaaatcatctggaactgcatctgcttccatggatgaggtcaatgctgatactgatgatgaggatgacctaccttttgatttgagcattgattctgggtcattgacctgtgttgcttgtggaattcttggttatccattcatggcaattctgcaaccttcaagagaagtattggaagggatttcccttgctcacacgagtagatacaagatgagttctgaaaaagataattgttcaaacacaattccatgctgtcccactgacagatgttcatttgttcccagtagaccttcttggcctgcggaacagcaatgtctggctactcctttggggcaagctaacatcagtcatcagaatgtaaattcacataaagatgtttgtttaagggagaatgaacctaatgggcctgtgccacaatgtaacaatatttcacattcttgcagaagtgaaaatactcttcattcatgtagtgacaggggaaaatccgagaataagatttctgaggacagtcttggcccagaagtaggtgaacaaacaggcaaatatgtcatcaatgcgcaagctgcagaaagttctgatggtactattaactggaatacttattgtacatttgcacggccccggatcttttgcctgcagcatgcccttgagattgaaaagttgcttgagggcaaaggcggtgtccatggtctcattatttgccactcagactttgtcaaactaaaagcacttgcaatatcagtagctgaggaaattgagtttcaatttgattgtacagacatttcacttgcaaaagcatcaaagtctgatttacatctgatcaatatttcaattgacgacgagggacatgaggaagatggaagagactggacgtcacagatgggtctaaacctgaaatattctgccaaactcaggaaagagaaatcagaaaatcaagaacagtctcctttgccatttgggggactgctttcctgcccttcgcctgtttcggttgttcctaatcttaagtggctttgcaaaagagcgcggacaccatacacagttattggtactatgaggggttctagtgcaacagcaactgctgcggaacttaagcctggagtgaaaacagaaatattcactaatggaaatgtttgcgaggatgacaatagacatcattcttttcgacaaactggcctcgagcaaccaggtggactgcaagattgtgataagccttcatgttccgaggagaatggccatggaagacattgtcttgttaacattcctatcgctgttgctgaatatcctatgatgcatcaagtccgtgagggtccagtgagtgttagcacgtgcaatgactccatttgtttgtcaggttccctggatttacctccacacgcctctccagttgaagtaactagatacctaggatgtatacagtcaactgagctgagcagtttaccagccttttctgttcaacatttctttaatgatgaaagtacctctgtggaaggaagcatagactgtgtaagcaatggctgcttagaatctcaggatgatattttagggagcagagatgaacgtttgcaagttcaacaatatcaagagaagatggggcttcgcaataaccccaatatgaagtcagttgattcacacctgatagaaggtttggctgtatcagaaggaaagcatggggaaactgtggcagcattccttgaaaacaaggagcgttgtgctaagacatcctactgttctaatactgaaacaaaaactactaaatctgcaatagacaatcgattggagactcatcatctgggtactggtccagtgaaactaaattcaagctttaatgagatgcacagtgctgatagacaatgcagtttagtctttggctgccttgactcagctgatgttcctgcttcaactcaggctctgtcagtttcacctgttttgatgagtgacgagcagcaggtcgatgacgcccattctgctgtcaaggccattgagcacctgggcaataatctggctaacataaagcacaaatccctgcatatggatgtcctcatgttagaggacgcccaagttgcttccatggctgcagtccctgggcatgagggagaatctgtcgaggctggatcaaattcttttgatattttacttggagctctggctgaagagtccaaggcagcagatgctcctgggaaagatgaagttggcaaagcttccttgacattaataacactggctagcaacgagccctctgttacagaaggcagagttgtagacgtggtggaaacagacacaattttgggagcaggaaaagatgataaacaacttgaccagccacatggcttccatttgtcagatctggtgtctagatgcatcgggagctcaaatagatccgatatcatatgctatgtcagacgcaaacacaaaaggaagagggattactcgtgtttcgtccgctctccctgtgagagcttgaggccaaggtccaagcctgcagtagtcgaggagtcggaatggagcagaacagccgaggcttcttttgctaaaaggggtaagaggacacaagcagtgggatcatttcagtgtgatattgatctgtgtgacatggcatttgagactagggccgaactcaatgcccacaagcgcaatatttgcactgacgagtcatgtggcaagcgtttcagctcacacaaatacttgaagcgacatcagtgtgtccacagcgagatgaggccatttaaatgcccctgggaaggttgtaaaatgaccttcaagtggttgtgggctcagactgagcatgtcagagtgcacactggagagcggccatacaagtgctcggctcctgactgcgggcagacattcagatacgtatcggattacagccggcacagaaagaaatttaaccattactga

SEQ ID NO: 154165 - DNA, 873 bp, Zea Mays
atggtaagtactcttatgtgtcctgctttactgttcatccattctcaagtatactctttgatcttttgatatgtgtgcaggcccagaacatctgcaatttattttttgataagtcctccaagatttggttagttgcttcatgatttctctttttctctcttaatactctttgatcttttctccaagatttgggcaatgaacaaacacgttgagtatgatagtgatgctaaaattattgcaatcgattgaagccctaccatgtggcaaccattgatccatgcccaaaatttgcctgccactggtgttcttatcccaacactcgatcaacatgcaagtagaaatgaagcctagagccaaacgatgcgagaggaggtacattacttgatggattgttttagcattatgattatgacatgctttgttctcttctcttgatgatgattatatttgcacctaaaatgcagtatggtctagacacgagccagttcacataaacccttcagacccaagcaggtaccagcagaatggcacgccagctaaagaaaggtgtcatggtgttgttcaaacttcgagtggtgtgtggaatagaagaatcccaattcccaaccatattatttgtcacgcttggtatgtcttctatataaatgttctatgcacctgtaattttattgtgaatgaggaactgttagccattgacatcatttatttgtgtttttagggagtttgtttattgttgccaatctcaaccttttttcatgtagctctatttaaccttgatgatttactcaaatatatgtaagatttggttgtgccatgaagtgagatgatattgatagatctcttttgctttgtgtacatcagaaatgagtaaga

SEQ ID NO: 154166 - DNA, 294 bp, Zea Mays
atgtcggcatcactgacactgcggcgggcgtacttcatggactcctcgaagtgggcagccatgatctcggcaatgtcgtccacctcgtcttcctccatggcctcagggttgtccttcctgcgcctctcccgctcgatgtccttctcgatgttctccctgatggcatacttgcacgcacgctggcagatctcggtgatatctgctccactgaaaccctgggtgtacttggcaagagcatgcaagtcaacgtccttagccacaggagacttcctgaggcaggctttgaagatctga

SEQ ID NO: 154167 - DNA, 627 bp, Zea Mays
gttttagaaaggcatcaaacaaattgccagtgatgccttcaatggtgtcatcaattggaagtatgtgcacacgcttcccgtatttgacatctgggcattgatggacagatacaacatcaccaagccgtaccctcaagttcttcctgacaatcttgttcatccggacctttggctcctcacatgtctcatctgcaagcacaatgcagacagtgtcctttctcttcttaccctgcaatgaaacagtgtcaccgcggaagagctggagcctctccatggtgtccgggtgcagagcgacgacggagttgtcatcattggtggcctcgtcgaccaccagccggttcggcgacttcttcctctccaggatcgccgtagagtaatccttcttccccttcctgccccccacaccccatcaatgtcaaaaaatcaccaccaaaaccctcttctcgcaccaacaacagatctaagccctagatgcgtgcggccagatcggagcggctactcacggatcggaggaagacggctcgccttggctcgccatgacggtcgaattcgaggaggcgcggttggtgctgttggcgagacggcgacagatatttgcgggtgctcgggttcggggggcgaagtgaa

SEQ ID NO: 154168 - DNA, 1676 bp, Zea Mays
aggtcccgtgcctgcccgctctctcgacgatttccatctctccctccattttgccccctcgctcttctcttcacttcctccgctccgcttgctgtctcctagtccttcccttagggtttgtccagctccgcgctccgcctcgctcgctagctccctctctcgtcgatcccacggccccgatcagcgcgatctccgcgcggccatggtctccggcgcggcgcacaacccgggcgggggcgccgccgcccagaccacccagcgctcgccgccgcagctgggggcccggacggccctcgccacgccgccgccggtctccggcggcgctgcgcactccgcgtctactagcggcggcaccgctggttcaccaccgtccagccgcagcgagcagcacgcccccgacggtgctgtcaagggtcccgccctcggcactgcgcccgcagcggcggcggcgtccacgcctgccagcgacagcacgttcctccgcttgaataatctcgacatcaacggcgacgacgcgccgtcgtcgcaggctcccacgagcaagaagaaaaggagaggcacacgggcagtgggtcctgataaaggaaaccggggactgcgccagtttagtatgaaagtttgtgagaaagttgaaagtaaagggagaacaacatataatgaggtggcagatgaacttgttgctgagtttacagaccccaataataatattgaggcaccagaccctgataaccctaatgcgcaacaatatgatgaaaaaaatattcgacgaagagtttatgatgctttaaatgttctgatggctatggacattatatctaaagataaaaaggagatccagtggaagggcttgccgcggactagtataagtgatattgaagaattgaagactgagcttgtgggactgaaaggtagaattgagaagaaaagtgtttacttacaggagctacaagatcaatatgtaggtttgcaaaacctgattcaacgaaatgagcaattatatggttcaggaaacacaccttctggtggagtggctttgccattcatcctagtccagacccgacctcatgcaaccgtggaagttgagatatcagaagatatgcagctggttcattttgacttcaatagcactccatttgagctgcatgatgactcatatgtcctaaaggaaatgcggttctgtggaagagaacaacatgatggaactcaagagtcgatatcaaatggaggtgagagttcaaacgtgtcaaatatttattggcaacaagcacagcgtatggagatgccaaacaatggcacagttaggttatcaagctcaccgcctattccagggatattaaaagggcgtgtgaagcacgagcagcactagcgcttcggttttggttaactggcgttgtcgtcctgagagcagtttgttttattacttttctccgttgtgtaaagcgcctgtaaattattaggcaagggggagggtagtagctctgatctgatttagctctgattggtagaacgacgggtgtaactatatccttgattcggttctctcggtatggttgagaaaagggttgacatgtaatttgtagagcattataaaaactaaaattgttgatgtcttctggggctgcgtgcttcgttctgggcacaagcatatttatttcctgttcctttttcttctctct

SEQ ID NO: 154169 - DNA, 1860 bp, Zea Mays
cgcgttccaggcgtgtccaccgctccgcctctctcggaggctgacgaccggcggtataagcatggcccggacgagccctagcatcgcaccgagcccttctctcatctctgcgtgcagcgtgcgtgatggacgcctgtctccgcctcggcttcttcctcctcctcgtggccgcggcgttcgcgccgctggtctccgcgcagctctcggcagatttctacaagacgtcgtgccccgacgccgagaagatcatcttgggcgtcgtcgagaagcggttcaaggcggaccccggcacggccgccggcctcctccgcctcgtcttccacgactgcttcgcaaacggctgcgacgcgtccatcttgatcgaccccatgtcgaaccaggcctccgagaaggaggcgggccccaacatctccgtcaagggctacgacgtgatcgaggagatcaagacggagctggagaaggagtgccccaacgtggtgtcgtgcgcggacatcatctcggtgagcgcccgcgactcggtgaagctgtcgggagggcccgaatacgcggtgctcctggggcggcgcgactcgctcgtgtccaaccgcgaggacgccgacaacctgccgggcccggacatcgcggtgcccaagctcatcgacgagttcgacaagcagggcttcaacacggaggagatgatcgcgatgctgggcggcggccacagcatcggcgtctgcaggtgcttcttcatcgagaccgacgccgcgcccatcgacgaggcgttcaagaagaagatcagcgacgcctgcgacggcaaggactcgggctccgtccccatggactccacctcgcccaacgacatggacgggagctacttcggcctggtgctggagaagaagatgcccctcaccatcgaccgcctgctggggatggacaagacgacggagcccatagtgaaggccatgtcggacaagactaccgacttcgtccccatcttcgccaaggccatggagaagctcagcgccctcaaggttctcacggggaaggacggcgagatcaggaagacgtgctccgagttcaacaacccgcagaacaccagcggcagcacgtcggtgatacggatcagctccatcgacgccgaccagatggccggcctgtcgcagccagggtcgacgtccaggaaggtgggcggccgcgcggatgtcagcactcccaccgcggtggaaacgcccgccatggcggccactgaggcggccgccaaggttcctggcggggtggtcgtcagcgccggagaccaggataggtccggctccggcccgaagctccgcggcagcgggggacctgtagtgaacccggtcccggcggcgcccggcggcgccgaggaagctgccaagcagcaggaggtgacggacctggaggagaagaagaagaggaacatggccaagctccgcggcgccggtcaggccaagcagtagatggatcatcggagtaggtgttcgggccttcggggtgccactgccactgtgccaggccgcgcgcgccgtttcgctgtgcgcgtgctcctctcgtcatcttgtcacccaagtcatattttttttctctctctctctgtccctttcgtttgtgcaagaagggacgagcaaagtacctaccgcagcggattactaaattgtctaattacgcaattgtcgtgtcgagtttactaaagatgaccacaggtaccttcttggtgtccccggtcggtcaggagaagtcctgtggaggcatgctcaagtttagtatatcgcttttgcttaataattgtctgcgtgcaaaactacgtgaggatgtggtaatgaatcgttaatgtaataaagtatttaaatttgacattatttcata

SEQ ID NO: 154170 - DNA, 1600 bp, Zea Mays
gaagaaagtgttctcttgcttgatccgccattcagaagccggccactaatccgagctaggcacgctcccatccgacgtcgtcccagctagcacagccatttctgtttcgtttcttccactgcagtcagaacccagaagcagaggccgccgttgcaagcatgccgccgatggaggccgccgaggacgtcgtcatcgtcggcgccggacttgccggactcgcggtggctctcggactgcacaggggtgaggagcctggtgctggagtcgtcgccgtcgctgcgcgcgtcggggttcgccttcaccacgtggacgaacgccttccgggcgctggacgccctcggggtgggcgacaagatcaggaggcagcaccagcaggcgcaggcgtatgtcgtcgtcaccaccaccaccagggtgtttccccgtgcctgctgaacttgtctccatatatatgtgtttgtttccaggctacgcgtcatggcttcttccaccggagaaatcgtacaggaagtggacctcacgcagcaggggaaacgagggcccaacgagatccgttgcgttcggcgggacctgctgctgcaggccttggaggaggagctaccgagaggcgccatccgctactcgtccaggatcgtgtccatcgaggaggaggacggcaacggcgacaaggtcctgcaactaaccgatggttcagtcatcagagcaaaggtgctcgtcgggtgcgacggggtcaactccgtggtggccaaatggctcggcctcgccacgccgtcctactcggggcgctcggcggcgagaggcttcgcgcgttacccggacggccacggcttcgagcccaagttcctgcagttcgtcggccacggcttccgctccggcatgctgccgtgcaacgacaccgacatctactggttcttcacctggactccttccgagaacgacaagggcgtcgacgagagcgcggccaagatgaagcagttcgtgctggccaagctccggggctccaataaggtgcccgcggaggcgctggcggcgatcgacaggagcgagatgagcgacgtgctcgccgcgccgctgcggttccggtcgccgctgtcgctggccaccgcgagcatcgccaggggcagcgcgtgcgtggccggcgacgcgctgcacccgatgacgccggacctcggccagggcggctgctcggcgctggaggacggcgtcgtcctggcccgctgcctcggcgacgccctgctgccgccgcctggcagtggcagtggcagtggcaggggcaaggaggaccgggtccaggcggccttgcgcgagtacgcctggatcaggcggtggaggagcgtcgagctcgtcgccacctcctacaccgttggcttcgtccagcagagtgacagcgcggtcgtcagcttcctgcgggacaggctcctgtcgggagtgctcgctcgaaggcttctgaaaatggcggactacgactgcggcacgctcgaaagctactagcccccttgtactgtttcctgtgtgtacatcagtacactacacgtgttgtgttgtgcctgctgctggaataatatgcctactgttatgtgttattagtagaaaattgtactgc

SEQ ID NO: 154171 - DNA, 1524 bp, Zea Mays
gaagaaagtgttctcttgcttgatccgccattcagaagccggccactaatccgagctaggcacgctcccatccgacgtcgtcccagctagcacagccatttctgtttcgtttcttccactgcagtcagaacccagaagcagaggccgccgttgcaagcatgccgccgatggaggccgccgaggacgtcgtcatcgtcggcgccggacttgccggactcgcggtggctctcggactgcacaggaaaggggtgaggagcctggtgctggagtcgtcgccgtcgctgcgcgcgtcggggttcgccttcaccacgtggacgaacgccttccgggcgctggacgccctcggggtgggcgacaagatcaggaggcagcaccagcaggcgcaggcgctacgcgtcatggcttcttccaccggagaaatcgtacaggaagtggacctcacgcagcaggggaaacgagggcccaacgagatccgttgcgttcggcgggacctgctgctgcaggccttggaggaggagctaccgagaggcgccatccgctactcgtccaggatcgtgtccatcgaggaggaggacggcaacggcgacaaggtcctgcaactaaccgatggttcagtcatcagagcaaaggtgctcgtcgggtgcgacggggtcaactccgtggtggccaaatggctcggcctcgccacgccgtcctactcggggcgctcggcggcgagaggcttcgcgcgttacccggacggccacggcttcgagcccaagttcctgcagttcgtcggccacggcttccgctccggcatgctgccgtgcaacgacaccgacatctactggttcttcacctggactccttccgagaacgacaagggcgtcgacgagagcgcggccaagatgaagcagttcgtgctggccaagctccggggctccaataaggtgcccgcggaggcgctggcggcgatcgacaggagcgagatgagcgacgtgctcgccgcgccgctgcggttccggtcgccgctgtcgctggccaccgcgagcatcgccaggggcagcgcgtgcgtggccggcgacgcgctgcacccgatgacgccggacctcggccagggcggctgctcggcgctggaggacggcgtcgtcctggcccgctgcctcggcgacgccctgctgccgccgcctggcagtggcagtggcagtggcaggggcaaggaggaccgggtccaggcggccttgcgcgagtacgcctggatcaggcggtggaggagcgtcgagctcgtcgccacctcctacaccgttggcttcgtccagcagagtgacagcgcggtcgtcagcttcctgcgggacaggctcctgtcgggagtgctcgctcgaaggcttctgaaaatggcggactacgactgcggcacgctcgaaagctactagcccccttgtactgtttcctgtgtgtacatcagtacactacacgtgttgtgttgtgcctgctgctggaataatatgcctactgttatgtgttattagtagaaaattgtactgc

SEQ ID NO: 154172 - DNA, 1985 bp, Zea Mays
gaagaaagtgttctcttgcttgatccgccattcagaagccggccactaatccgagctaggcacgctcccatccgacgtcgtcccagctagcacagccatttctgtttcgtttcttccactgcagtcagaacccagaagcagaggccgccgttgcaagcatgccgccgatggaggccgccgaggacgtcgtcatcgtcggcgccggacttgccggactcgcggtggctctcggactgcacaggaaaggggtgaggagcctggtgctggagtcgtcgccgtcgctgcgcgcgtcggggttcgccttcaccacgtggacgaacgccttccgggcgctggacgccctcggggtgggcgacaagatcaggaggcagcaccagcaggcgcaggcgtatgtcgtcgtcaccaccaccaccagggtgtttccccgtgcctgctgaacttgtctccatatatatgtgtttgtttccaggctacgcgtcatggcttcttccaccggagaaatcgtacaggaagtggacctcacgcagcaggggaaacggtgagcctgtgccacgtatctgcttcacacacagtagtgtgcgcggacaccacaccactgaacgtctgtgtgtctgtctgacgcagagggcccaacgagatccgttgcgttcggcgggacctgctgctgcaggccttggaggaggagctaccgagaggcgccatccgctactcgtccaggatcgtgtccatcgaggaggaggacggcaacggcgacaaggtcctgcaactaaccgatggttcagtcatcagagcaaaggtaccctagttgcttccccttccccctgaacaagcaatagctgcttgcgcagcgcctcaacgtgctgcacgcaggtgctcgtcgggtgcgacggggtcaactccgtggtggccaaatggctcggcctcgccacgccgtcctactcggggcgctcggcggcgagaggcttcgcgcgttacccggacggccacggcttcgagcccaagttcctgcagttcgtcggccacggcttccgctccggcatgctgccgtgcaacgacaccgacatctactggttcttcacctggactccttccgagaacggtactagtctagtctagtcgtcactcgttaccctcatccaagatcctaggagcagctacgtacctcatgcatgtcgttgtccgtctcgtttcagacaagggcgtcgacgagagcgcggccaagatgaagcagttcgtgctggccaagctccggggctccaataaggtgcccgcggaggcgctggcggcgatcgacaggagcgagatgagcgacgtgctcgccgcgccgctgcggttccggtcgccgctgtcgctggccaccgcgagcatcgccaggggcagcgcgtgcgtggccggcgacgcgctgcacccgatgacgccggacctcggccagggcggctgctcggcgctggaggacggcgtcgtcctggcccgctgcctcggcgacgccctgctgccgccgcctggcagtggcagtggcagtggcaggggcaaggaggaccgggtccaggcggccttgcgcgagtacgcctggatcaggcggtggaggagcgtcgagctcgtcgccacctcctacaccgttggcttcgtccagcagagtgacagcgcggtcgtcagcttcctgcgggacaggctcctgtcgggagtgctcgctcgaaggcttctgaaaatggcggactacgactgcggcacgctcgaaagctactagcccccttgtactgtttcctgtgtgtacatcagtacactacacgtgttgtgttgtgcctgctgctggaataatatgcctactgttatgtgttattagtagaaaattgtactgcaatatcatcacctctgttgcacatttttttctacccttgtttatgcatagcataggaaccgtcacatcgatgtaacttttgatttctctgcttatcaaccatgcactaacatcacctgatcaccgt

SEQ ID NO: 154173 - DNA, 1090 bp, Zea Mays
gccttcatcagttcgttctgcgcgggaaccgccgatgggggacgccgtggaggacatcgtcatcgccggcgcgggcctcgccggcctcgcgacggcgctcgggctacacaggaaaggggtgaggtgcctggtgctggagtcgtcgccggcgctgcgcgcgtcggggttcgcgttcaccacgtggaccaacgccttccgcgccctggatgccctcggcgtcggggacaagatccgggagcaccatttgctctacgagcgtatgatcgccttctctgcagctactggtgaagcagctgcagaagtgagcctaaagattcagagcaaaagcgggccacacgagatccggtgcgtgaagcgggacttcctgctgcggacgctggccgacgagctgccggagggcaccatcaggtactcggccaaggttgtcgccatggaggaagacggcgtcggcggcgccaagaccctgcagctgcacctggcagacggttccaccataaaggccaaggtcgtgatcgggtgcgacggcgtgaactccgtggtggcccagtggctgggcctgccgaagccgatcctgtcggggcgctcggccaccaggggcctcgccgagtacccgggcggccacggcttcggccccgagatcctgcagttcatcggccacggcttccgctccggcgtgctgccctgctccgacacctccgtctactggaactacacctggtacccgtcccccgcggacggcgacgccgaggagagcgtggccaagatgcggagccacgtggtcgccaagctgcggggcgccaaggtcccggccgaggcgctggaggtggtggagcggagcgagatgagcgacgtggcgtcgtcgccgctgcggttccggtccccgctggcgctggtccgcggcagcatcagccgcggcggcgtgtgcgtggcgggcgacgcgctgcaccccatgacgccggagctcgggcagggcgggtgcgcggcgctcgaggacggcgtcgtcctggcccggtgcctgggcaaggccttcgccctgctcggccaggagcgggatgaggggcgggtcgtcacggcggcgctggaggagtac

SEQ ID NO: 154174 - DNA, 1007 bp, Zea Mays
gccttcatcagttcgttctgcgcgggaaccgccgatgggggacgccgtggaggacatcgtcatcgccggcgcgggcctcgccggcctcgcgacggcgctcgggctacacaggaaaggggtgaggtgcctggtgctggagtcgtcgccggcgctgcgcgcgtcggggttcgcgttcaccacgtggaccaacgccttccgcgccctggatgccctcggcgtcggggacaagatccgggagcaccatttgctctacgagcgtatgatcgccttctctgcagctactggtgaagcagctgcagaagtgagcctaaagattcagagcaaaagcgggccacacgagatccggtgcgtgaagcgggacttcctgctgcggacgctggccgacgagctgccggagggcaccatcaggtactcggccaaggttgtcgccatggaggaagacggcgtcggcggcgccaagaccctgcagctgcacctggcagacggttccaccataaaggccaaggtcgtgatcgggtgcgacggcgtgaactccgtggtggcccagtggctgggcctgccgaagccgatcctgtcggggcgctcggccaccaggggcctgctccgacacctccgtctactggaactacacctggtacccgtcccccgcggacggcgacgccgaggagagcgtggccaagatgcggagccacgtggtcgccaagctgcggggcgccaaggtcccggccgaggcgctggaggtggtggagcggagcgagatgagcgacgtggcgtcgtcgccgctgcggttccggtccccgctggcgctggtccgcggcagcatcagccgcggcggcgtgtgcgtggcgggcgacgcgctgcaccccatgacgccggagctcgggcagggcgggtgcgcggcgctcgaggacggcgtcgtcctggcccggtgcctgggcaaggccttcgccctgctcggccaggagcgggatgaggggcgggtcgtcacggcggcgctggaggagtac

SEQ ID NO: 154175 - DNA, 765 bp, Zea Mays
atgggcatgggcagcagagtcttggcattgctcgccgtcctggcggcgacaacgacgtccttcgcgccggcgcagggctggaactacgggacggcgacgttctacggcggccgcgacggctccggcacgatgggcggcgcgtgcgggtacggcaacctgtaccaggccgggtacgggacgaacacggcggcgctgagctcggtgctgttcaacgacggcgcggcgtgcgggcagtgctacctggtcatgtgcgacggcaacgcgtcgccctcgtgcaggccgggcgccgcggtgaccgtgacggccaccaacttctgcccgcccaactgggcgcagcccagcaacagcggcggctggtgcaacccgccgcggccgcacttcgacatggcgcagcccgcgtgggagcgcatcggcgtctacggcgccggcatcatccccgtccgctaccagcaggtgacgtgctggcggcagggagggatgcggatcaccatcggcggctccagtttcttccagctggtgcagttctccaacgtggccggcagcggctccatccggtccgtgtcggtgaagggcgccaagacggggtgggtcgcgctcaaccgcaactggggcgccaactggcagtgcaactcggcgctcttcggccaggcgctctccttctccgtcacctccaccggcggccagaccatctacatgaccgacgtcgtgccggcgtggtggcagatcggcatggtcttcacgagcaactataatttctactactga

SEQ ID NO: 154176 - DNA, 1131 bp, Zea Mays
atggctagcaacgccgaccagcatgctgccgttgtctcggctgccccgtccgatagcccggttggggcgaagaaggctggggcggcggccgccgtctggaaactccccgcggccgcggcggttcccgtcgcggaggtggttgaaaaccccatcatggacgcacactcctggccggcgctgcccgggctgtcgtctccgccgccgccgccgccgccgcatgcggggccaacagccaaagcgtcaccgaaggccgcttctccagctcccactggggcggcgacgtcgcccgtctctttgggcaatcctggcgcgccggatgctagccatggtaacgatgctcgggtgcgcaatcctgtggcccggcgtgccctggtgatgcctgcggcggatgggctggagaagagtgcccctgcaccggaaccgtcccctgtttatgtgcctaatgcccggagcaatggtgcagatcctcatcagaatggacgtcctggctcgcatcaccatggccgaggtggtggctatggtgggggaaacaggaggggtaatggtggaggtggggggcgtcgcgggagtgagcaccacggtggttttgatgggcaacggcgcggaggtggccgcagagatggccatggaccggttcatcagctgcgtggccatcagccaacatacattaaggctcctgttgtagcaggagcacctccaccgcctccaccatttgttagccccgctactcctcagacaccaccttatggaccacctatgggcttccatgacatgtcagcgcatgtttactatttcccggcacccacctcggaaggcattcaaggcctgccttttgtgcctcttccagcaagcccccaagctgttctaattgacccttctcgaaagaaccttctggagcagatagaatactatttcagcgatgacaatttgtgcaaggacctttacttgcggcaacacatggatgggcaaggttgggtgccattatccctgatcgctggctttcgccaagggtcagtagcttcaaggcgcattttttttcaaggttcattgcaagctgagttcatcccaactaacagcagtggtacctccatttttagtgtattcagctacacatttgtacaggctgtttga

SEQ ID NO: 154177 - DNA, 462 bp, Zea Mays
atggccctggtcgtagtcattctcacatgggttacggtgcctctgtgtatgtgtggagcagaggtccagaaaattactaataatattcagtttatcttggaaacagtcatgctatctaacattgtggaagtgcagggagacaagctacggaggcgtggagcatgggagaattggttgcttccaaaactgaactattctgctgggagttcttctggttcgatgacccctgtgacatctaacattgatgctcttgcatctcagtttcgttctgttggacttgagggggcaacgtaccatccaagcatgcctgggatgtctggtgaagctctcctgacaagatcagcaacttcagttagtctaggttaccatgcatcaaccttcggtgggctacagagcaatgggagtgaacctctctttgggccgaagtctgcaagaaatctactcaggagcgataccttttga

SEQ ID NO: 154178 - DNA, 105 bp, Zea Mays
tactatctttattacaaatttgggacatatatgcactgaggacgaactcaagaaagttttatccaaggcacctaggtttcatgtccttaaaatgcgtaggcgtgg

SEQ ID NO: 154179 - DNA, 1530 bp, Zea Mays
cggggtatttaaacgagtacgacgattgccggagtatattttttggcgagcgccagcggcaaacgaaccgtctccattccgttctccacttctccagatcccctccgcaatctaccttcgcgcggctaccacggcgccggtgctgaagccagcgaccgtggccatgcagtcgccggagccctcctcctcctccccggttctcctcaatatagggggcaagaagtacgcgacaaccgtggagacgctgatgcagcgggagcccgactccatgctcgccgccatgttcagcgggcggcacacgctccatgatcacccaaccacggggaagggagtggtcttcgtggacagggacgggaagcacttccgccacgtgctcaattggctcagggacggcgccatccccgtgctgtccgagtccgactaccagcagctgctgcgagaggcagagtactaccagttgctcggtttagtcgactacataaacgagaggctgggttggaaggaaaccgacaattcggaggctgaattgacacgaaaggacgtgatcaagtgcatacaaacgcaaagagtcaggttccgtggcgtgaatctatctggccttgatctgtctaagcttgacttatcagaggtggacttcagctatgcatgcattaagaacactgatttttcatatgctaacctttacaaagcaaaatttgggcaggtagaagcttcgtcttcatctttccaaaacgcaattttgcgtgtgagtttattggagctaatcttgaagaatctattttggatggagcaaaccttcgaagtgccaatttacaagatgcttgcttaacacgatgtagcctcattttaacagatcttcattctgcccatttacagactgctaatcttacacaagccgacttaagaggagctaatcttgaagcggccaatctcaagggtgccaagttgtcaggtacaaacttgcaaggcgcaaatcttcagagagcttacttgcgagaagttgatttgcgtgacactgtatgttcttttgtcgtgtcccgtttattaaggatcttgggttcttctgtttacaatctgcctcacgttctgtgcaagtagtttctacacctctcatgacaccagcatatagacatcggaggatgaattttaattgcgtttactttggtcaacagcaattgactggtgctaagctcggaggtgcaaatcttcttggagctatcagatgatctacagattgttcgtgtagcttcatactgtgtatactgtactacacaaattcattggaggtaatgcggcaggaccatctgcggagttctggtctcaatcatgatcgagaacacaaatattccttctgttcaaaaataaatcagttcctagaatgattctaagtcgaactatcttaagttcgaccaactttataggaaaggatggagtttatgtgctgttctttgtacgccgccctctgattggaagtttagaatctagcatgttagctgtcagagctgaaaccatcacagcaagcacatttgc

SEQ ID NO: 154180 - DNA, 1444 bp, Zea Mays
cggggtatttaaacgagtacgacgattgccggagtatattttttggcgagcgccagcggcaaacgaaccgtctccattccgttctccacttctccagatcccctccgcaatctaccttcgcgcggctaccacggcgccggtgctgaagccagcgaccgtggccatgcagtcgccggagccctcctcctcctccccggttctcctcaatatagggggcaagaagtacgcgacaaccgtggagacgctgatgcagcgggagcccgactccatgctcgccgccatgttcagcgggcggcacacgctccatgatcacccaaccacggggaagggagtggtcttcgtggacagggacgggaagcacttccgccacgtgctcaattggctcagggacggcgccatccccgtgctgtccgagtccgactaccagcagctgctgcgagaggcagagtactaccagttgctcggtttagtcgactacataaacgagaggctgggttggaaggaaaccgacaattcggaggctgaattgacacgaaaggacgtgatcaagtgcatacaaacgcaaagagtcaggttccgtggcgtgaatctatctggccttgatctgtctaagcttgacttatcagaggtggacttcagctatgcatgcattaagaacactgatttttcatatgctaacctttacaaagcaaaatttgggcaggtagaagcttcgtcttcatctttccaaaacgcaattttgcgtgagtgtgagtttattggagctaatcttgaagaatctattttggatggagcaaaccttcgaagtgccaatttacaagatgcttgcttaacacgatgtagcctcattttaacagatcttcattctgcccatttacagactgctaatcttacacaagccgacttaagaggagctaatcttgaagcggccaatctcaagggtgccaagttgtcaggtacaaacttgcaaggcgcaaatcttcagagagcttacttgcgagaagttgatttgcgtgacactcaattgactggtgctaagctcggaggtgcaaatcttcttggagctatcagatgatctacagattgttcgtgtagcttcatactgtgtatactgtactacacaaattcattggaggtaatgcggcaggaccatctgcggagttctggtctcaatcatgatcgagaacacaaatattccttctgttcaaaaataaatcagttcctagaatgattctaagtcgaactatcttaagttcgaccaactttataggaaaggatggagtttatgtgctgttctttgtacgccgccctctgattggaagtttagaatctagcatgttagctgtcagagctgaaaccatcacagcaagcacatttgctgggccccgattgcagtggacagatgtacctgtattgctgttgattcaatcttggtgtcattacc

SEQ ID NO: 154181 - DNA, 1309 bp, Zea Mays
cggggtatttaaacgagtacgacgattgccggagtatattttttggcgagcgccagcggcaaacgaaccgtctccattccgttctccacttctccagatcccctccgcaatctaccttcgcgcggctaccacggcgccggtgctgaagccagcgaccgtggccatgcagtcgccggagccctcctcctcctccccggttctcctcaatatagggggcaagaagtacgcgacaaccgtggagacgctgatgcagcgggagcccgactccatgctcgccgccatgttcagcgggcggcacacgctccatgatcacccaaccacggggaagggagtggtcttcgtggacagggacgggaagcacttccgccacgtgctcaattggctcagggacggcgccatccccgtgctgtccgagtccgactaccagcagctgctgcgagaggcagagtactaccagttgctcggtttagtcgactacataaacgagaggctgggttggaaggaaaccgacaattcggaggctgaattgacacgaaaggacgtgatcaagtgcatacaaacgcaaagagtcaggttccgtggcgtgaatctatctggccttgatctgtctaagcttgacttatcagaggtggacttcagctatgcatgcattaagaacactgatttttcatatgctaacctttacaaagcaaaatttgggcaggtagaagcttcgtcttcatctttccaaaacgcaattttgcgtgagtgtgagtttattggagctaatcttgaagaatctattttggatggagcaaaccttcgaagtgccaatttacaagatgcttgcttaacacgatgtagcctcattttaacagatcttcattctgcccatttacagactgctaatcttacacaagccgacttaagaggagctaatcttgaagcggccaatctcaagggtgccaagttgtcaggtacaaacttgcaaggcgcaaatcttcagagagcttacttgcgagaagttgatttgcgtgacactcaattgactggtgctaagctcggaggtgcaaatcttcttggagctatcagatgatctacagattgttcgtgtagcttcatactgtgtatactgtactacacaaattcattggaggaaaggatggagtttatgtgctgttctttgtacgccgccctctgattggaagtttagaatctagcatgttagctgtcagagctgaaaccatcacagcaagcacatttgctgggccccgattgcagtggacagatgtacctgtattgctgttgattcaatcttggtgtcattacc

SEQ ID NO: 154182 - DNA, 1474 bp, Zea Mays
cggggtatttaaacgagtacgacgattgccggagtatattttttggcgagcgccagcggcaaacgaaccgtctccattccgttctccacttctccagatcccctccgcaatctaccttcgcgcggctaccacggcgccggtgctgaagccagcgaccgtggccatgcagtcgccggagccctcctcctcctccccggttctcctcaatatagggggcaagaagtacgcgacaaccgtggagacgctgatgcagcgggagcccgactccatgctcgccgccatgttcagcgggcggcacacgctccatgatcacccaaccacggggaagggagtggtcttcgtggacagggacgggaagcacttccgccacgtgctcaattggctcagggacggcgccatccccgtgctgtccgagtccgactaccagcagctgctgcgagaggcagagtactaccagttgctcggtttagtcgactacataaacgagaggctgggttggaaggaaaccgacaattcggaggctgaattgacacgaaaggacgtgatcaagtgcatacaaacgcaaagagtcaggttccgtggcgtgaatctatctggccttgatctgtctaagcttgacttatcagaggtggacttcagctatgcatgcattaagaacactgatttttcatatgctaacctttacaaagcaaaatttgggcagcaggtagaagcttcgtcttcatctttccaaaacgcaattttgcgtgagtgtgagtttattggagctaatcttgaagaatctattttggatggagcaaaccttcgaagtgccaatttacaagatgcttgcttaacacgatgtagcctcattttaacagatcttcattctgcccatttacagactgctaatcttacacaagccgacttaagaggagctaatcttgaagcggccaatctcaagggtgccaagttgtcaggtacaaacttgcaaggcgcaaatcttcagagagcttacttgcgagaagttgatttgcgtgacactcaattgactggtgctaagctcggaggtgcaaatcttcttggagctatcagatgatctacagattgttcgtgtagcttcatactgtgtatactgtactacacaaattcattggaggtaatgcggcaggaccatctgcggagttctggtctcaatcatgatcgagaacacaaatattccttctgttcaaaaataaatcagttcctagaatgattctaagtcgaactatcttaagttcgaccaactttataggaaaggatggagtttatgtgctgttctttgtacgccgccctctgattggaagtttagaatctagcatgttagctgtcagagctgaaaccatcacagcaagcacatttgctgggccccgattgcagtggacagatgtacctgtattgctgttgattcaatcttggtgtcattaccatatcatgtagaggtggtatccacact

SEQ ID NO: 154183 - DNA, 675 bp, Zea Mays
gggtttttaatacgccgtaaaccataaatattgaaatctgattgttacctgtgcatcttattgtccattcaaatggattttcagactgctaatcttacacaagccgacttaagaggagctaatcttgaagcggccaatctcaagggtgccaagttgtcaggtacaaacttgcaaggcgcaaatcttcagagagcttacttgcgagaagttgatttgcgtgacactcaattgactggtgctaagctcggaggtgcaaatcttcttggagctatcagatgatctacagattgttcgtgtagcttcatactgtgtatactgtactacacaaattcattggaggtaatgcggcaggaccatctgcggagttctggtctcaatcatgatcgagaacacaaatattccttctgttcaaaaataaatcagttcctagaatgattctaagtcgaactatcttaagttcgaccaactttataggaaaggatggagtttatgtgctgttctttgtacgccgccctctgattggaagtttagaatctagcatgttagctgtcagagctgaaaccatcacagcaagcacatttgctgggccccgattgcagtggacagatgtacctgtattgctgttgattcaatcttggtgtcattaccatatcatgtagaggtggtatccacact

SEQ ID NO: 154184 - DNA, 1722 bp, Zea Mays
agctccaatctaacccactttcattcagatccattcaatgtaacgacgaacacagcagggtatactcggatcccagttacgcaacacacccacagggacagaccctggcattccgacactacgggagaaaagagtcttcggggctataagcaaactgaaacggggaacacaagaggaagagaaactagggaaaccgctaacaactagccaactgctctccatccagtagcgatgaggagatcgagcaacgcttatggggccatgctgccagttccacagcctgccttggttggtcaccagttcccttgcaccgcatcctggctatggagctctggttgcacgatcgagttaaccggtcttggcgactccgttggagaggacgggtttctctggtgctgtctgggccacctttgctgcataggaaacaacaggagcagtgatgccgttctctgcgggagccttcaccgccttcacctctgccgtgacaccatctggtacggacggattgggcttcccattagcaggttcctgcggtcgctcaccggtgacagaaacgggggtcctagtgtcccagacctggacgattcaagacagtcgaacccacaggtattatagacagggcaaggtgatgaaatctgcagttgacaaatataagccatgtatttggggctccaaacctacctgcttttggagctgctgctgtttcgacctcttatcctgcatcaacttctggcggctctcgtagaaggcaaagtcgtcgaggatggaagtcttgctgacatgatccttgaatatcttgagcatctgaaggccttgttcgaggcgtatctacattgttgtagaagaggtaaggaggcaagacaagcaaaaaaaaatggaattcagaaaagttgaaaaacaaaatcatggactatgttttacctcctgagtgtcgcggctgtttgtgacaggcttgttctcattgttctccaggatgatgtgcttgagaatattgttgggcacgtccttcacaatgtgccacttaacagagaaggagccgttccacttgtcctgttgccaatactctagggttttctcaaaatcaacggcgccagtcatttcagcaacaccaacaaactgcccacttatccttactgagaagaacaagaatatagggcatgcagatccctttgactgagcttcttggtaagcagcatcaagcttcttgtttccgttggttgtgcttgcccacacattgtattttacgctcttgtggatgtcatcctcgctgtacgatttaatgacaaagaactttgcagcatcgtactgaacagggaagtcatctctattgtactttgctctatcaggcacagcactatcattcttgctttcactagaagggagagactgccctttcacagcaatagtgacagtatgaccgtacaatttctggttcttgaaccggccagatctaggacctctgtttaactcaattgttccatcctgactctcattgccataaccatagtatccactacatgccctgggcctgtacctgttatccataccattaccaagaccacatcgaccatatatcctggaatcataaccgttactcccgtagggaagaccagtttttactgaattcccatactgggtgtacggtcgggggctagggtacatcctattgggataggtaggagctgctgatgtagttgtaggtcttctattctgcataccctg

SEQ ID NO: 154185 - DNA, 1128 bp, Zea Mays
cttcagatcaaagggcccaattccacccatccccatcgcgatcgcctctctccagctaagcgatgaagaaccctaaccctcctccctcgcgtccctccgccgcaggcaaggagccccccgcaggcatggcgccgccccgcaaatctcgctggggcccaccgccaccgggcgttgccggcgacaaggccgcgccatccacctccgcccgccgcaccccgaccccgacccccacccgcacagcggactccaggcgccatccgggggcccctcacgcgccagcaccgcacgcccgcaaccccgggtcgcaggcggtcgctctccggccgcaggctcgtccgcaacctccggcggtggagactcctcccccgcagccgtacggcttccacaacctggaccgccgcgtcatgcccctcgccgacggcaccgtccgaacctacttcgccctgccccctgactacagcttcgagccggtgcccctgccacccctcccacaccgcctcctcccccgcgccgccccggacctctggccgccgccgctacatttgcagatgccgccgcacgaggctaggcgcaaacaccctgccgaacaggacgagggcttcgcgaggcaccccaagcagccgcggctcgacgagccgcatcaaccgccgccgcatgccaaggtggacgggcatgcgctcaggagggcgttcctcaaatacgccaagatgctcaacgagagctcggcgcagaggcggagctatctcgagggcggccgtgtcccgtgcctcgcctgtggcaggtttggcgagcccacatcgtttgttgccttcttcctgctaagctttctagactttctagtatcatctgtagtcaagtttctgtgctggcttcttgctattgttaagttggctcttactctgacttgatacgaccttttttcgctatgagcctatagttaaactggaactgactatgttatgtctgtgtctggctggagaaatccaccaaacagtatctcctcattgctatggtctagttgagctggcactgattatgttatgtctatgtctgggtggagaaatcaaccgaacaatatctctttactgaaaattgttgccaataggtctttctttactctttagtata

SEQ ID NO: 154186 - DNA, 1713 bp, Zea Mays
gcccaattccacccatccccatcgcgatcgcctctctccagctaagcgatgaagaaccctaaccctcctccctcgcgtccctccgccgcaggcaaggagccccccgcaggcatggcgccgccccgcaaatctcgctggggcccaccgccaccgggcgttgccggcgacaaggccgcgccatccacctccgcccgccgcaccccgaccccgacccccacccgcacagcggactccaggcgccatccgggggcccctcacgcgccagcaccgcacgcccgcaaccccgggtcgcaggcggtcgctctccggccgcaggctcgtccgcaacctccggcggtggagactcctcccccgcagccgtacggcttccacaacctggaccgccgcgtcatgcccctcgccgacggcaccgtccgaacctacttcgccctgccccctgactacagcttcgagccggtgcccctgccacccctcccacaccgcctcctcccccgcgccgccccggacctctggccgccgccgctacatttgcagatgccgccgcacgaggctaggcgcaaacaccctgccgaacaggacgagggcttcgcgaggcaccccaagcagccgcggctcgacgagccgcatcaaccgccgccgcatgccaaggtggacgggcatgcgctcaggagggcgttcctcaaatacgccaagatgctcaacgagagctcggcgcagaggcggagctatctcgagggcggccgtgtcccgtgcctcgcctgtggcaggtcttctaaggactttgctgatgtccatggacttgtcatgcatgcttacaacccaccaaatgcagattcacttgttgatcatcttggtttgcacaaggcattgtgtgttcttatgggatgggattatacaaaagtccctgagaactttaagggctaccaatcattaccttctgaccttgtccaagcaagtagggaggacctcattgtctggccgcctactgttatcattcacaatacttcgactgggaggaagaaagatggtcgcttggagggtttagggaacaaagaaatggataaaaaaatgacagaactagggttttctggtgggaagtcgaagtccttgtatggaaaggaaggacatatgggtttgacacttatcaagtttgcaaacaactcatctggcttgaaggaggctgagcgtcttgctgagtatcttgagaggcaagatcgtggacgtataggttggtcacgcgctcatgccagtcgttctgtagattcagatcagaaccctttgttggtcgagacggataccaggacagctgagaaaaagaggatactttatgggtacctagcaattgcatccgatctggacgaactagactcagattctagaaaaagggcttccctccagagcagaagagaattcgacccaaacgaatgatctcttgtcataaagcccacccccatcagttcattaaatttgcactgaggcgtgcatacctatctctgatcccaatttataaattcatactgctgctgtggagaaaaggtgttaccttgaatataatatctgccgctagttgagttataaccactagttctggaagctgtatttgcactatgtgtattttcttgcacgcgtctatggctcacgatttgactggctatttggaagagatctgtcttcctatttaagtatcgcccgttgcatgattcattgctcttc

SEQ ID NO: 154187 - DNA, 695 bp, Zea Mays
caataatgtcatatatatcacagtaatatttgctgtgtcaatctcgtatctttgttttcagaactagggttttctggtgggaagtcgaagtccttgtatggaaaggaaggacatatgggtttgacacttatcaagtttgcaaacaactcatctggcttgaaggaggctgagcgtcttgctgagtatcttgagaggcaagatcgtggacgtataggttggtcacgcgctcatgccagtcgttctgtagattcagatcagaaccctttgttggtcgagacggataccaggacagctgagaaaaagaggatactttatgggtacctagcaattgcatccgatctggacgaactagactcagattctagaaaaagggcttccctccagagcagaagagaattcgacccaaacgaatgatctcttgtcataaagcccacccccatcagttcattaaatttgcactgaggcgtgcatacctatctctgatcccaatttataaattcatactgctgctgtggagaaaaggtgttaccttgaatataatatctgccgctagttgagttataaccactagttctggaagctgtatttgcactatgtgtattttcttgcacgcgtctatggctcacgatttgactggctatttggaagagatctgtcttcctatttaagtatcgcccgttgcatgattcattgct

SEQ ID NO: 154188 - DNA, 3009 bp, Zea Mays
cctccccgcttccaccccctcgcccgtcgcttcctcgtcacgagtcgtcgtctccccttcgccgaccgggacgcggaaacgctcgacgcaagcaaaccctagccaccgagctagcggggagcctggagggatgaagagcctgttcaagagtaagatcaggtggcagcaccggtccaacgaccccgcgtccccggcggcgccgccgccgcagacgtcggggccgccgcccgcgagctccccgtcggggacggcgccggcgccggcgctctccgtctctacgccggtctcgccctcgccctcctccgcggcggcgacgcccacgggcgctgctgctgctgcggcggcggctggagcgggaggggaggactacatatcgtcggaagaggagttccagatgcagcttgccatggcgctgtcggcgtcttccaacagcgactgcgcggggggcctggacggggagcagatcaggaaggccaagctcatgagcctcgatcgcttcgccgcccaccgggacgagacccacaccgcggagttcctctcccgccgatattgggattataactttcttgattaccatgagaaagttattgatggcttctatgacatctttggctcctctattgaatcctctaggcaggggaagatgccatcattagcagatctccaaacaggcataggggacctaggctttgaagtcattgtagtaaaccgagccattgatagtaccttgcaggagatggagcaagtggcacagtgcatcctgttggacttccctgttgccaatattgcactcttagtgcaaagaatagctgagcttgttacagataatatgggtggacctgtcaaagatgctaacgacatgctcacaaggtggctggagaagagtactgagctgagaacatcgctacaaacaagtttgttgcctattggttgcatcaagatagggttatcacgtcaccgtgccctacttttcaagatccttgccgatagtgttgggattccatgcaaacttgtcaaagggagcaattatactggtggtgatgatgacgatgctataaacataattaagatggacaatgaaagggagtttttggttgatctgatggctgctcctggtgctcttattccagcagatatcttaagttggaaaggcaattcgttaaattctaatcgaaaactcggcctgaatcgaacagctggatcatcaagtactgttgatgctaatgtggatcctactgtattgccacttgaacctaaaggtggccaactgcctttgttcagcagtggtgattggatgtcagacattgattctggatatgaggcagcagaaattgcagcttctactcaaacctcttcgggtgtcacaccatctgtttctgctggaagtgtttttggcagttcatggatgctggttaatcatgaccaatcagatggaccatcaacttctgctggtacatcatcgcagcagaaagttgtacctcaaagcgagcatcagcggaatttaaaccgccttccagatctgcaggaaattccagagtcaaaatacctttttgctgatcttgttccttctggggataataagtctaagaaaacttcagtaccattcaaaggaccagatcataggaacaatgagttgcaaaagcgcagagagaacattgtccctaatgctggaagaccacagcagcggttagttatgaagaattggtctccttacaatgatgtttccaacaacaaacagtacaattatgtcgaggattcgtttgctcgtagaaatgttggtaataatgctgcatcatcatcatcccagatgccacgaccagccgtaagatctaaccttaattctggattgcataatgatgcatcatatcataattatgatagcattatggctggtacctctgccatgaagattacatctacagctgagaccgggaaggttcctgaaagggttctgcgtggtgatttggacaagggtcaaacaaattatagattggaggatcaacatgtcatagttcaaccaccacagggaagacttccatggggtaatcctgcagaaggaagagttccaatgaatagagttcagagtcaagcaaaacaacacttggaaaacatggatgcaaagcaagaccataagaaattgctccctgatccaaaaaaatctccccttgacagattcatggacacatcattgccttcaagaaacatggacatgaggtcacagaggcttgacttcgatgatgtctctgagtgcgaaattccttgggaagatcttgtgattggtgaaaggattggcttaggttcatatggagaggtttaccgtgctgactggaatggaaccgaagtagctgtaaaaaaattcttggatcaagatttttatggcgatgctctggatgagtttaggagtgaagttcgaattatgcgtcggctgcgccatccaaatattgttctctttatgggtgctgttacacgccctccgaacttatctattgtatctgaatatcttccaaggggaagcttgtataagatccttcaccgccctaattgcctaattgatgaaaagcggaggatcaagatggcccttgatgtggccaaaggtatgaattgcctgcacactagcatgcctacaattgttcatcgagatctgaaatctccaaacttgctggttgacaataattggaatgttaaggtttgtgactttggactttcgcggttgaagcacagtacatttttgtcatccaaatctacagctggaacacctgagtggatggcacctgaggttctgcggaatgaacaatcgaatgaaaagtgagtgattttcagatgcattctagctcccatcttattcgggaatcaggatattcgggttattgagcatttccgtggagcgtggatataggattccatgttcctgtcgaatttttgttcttgtggttttgtgctcagaccaaagatttttttgttttctcgtagttggatctgactgcttagtaatttcatgttgtgggatca

SEQ ID NO: 154189 - DNA, 103 bp, Zea Mays
ctttgaccgtttccttgcccactctagcatgcatcaaacggatcgctcgccgcgccgttggtacaacatggcttcatcttcttcatttggttctagtagtgac

SEQ ID NO: 154190 - DNA, 1799 bp, Zea Mays
agcacctgcatcatctcgggtcgggccatggagactctgctcatctcggaggagcgcaaccaccagctccaccacttctcgggtcgccggaagaaggcgttagcagcgtcgcctcagtccacgcgcagctaccatgctggcaactgccgggcgttccactccggcatcaccgtcggcatcctgccatccccgcccgcgcagagggttgcactgacccgctcctctcctgagcccaagacaccgaaacatcagcttcaccatgggaaaaagcgcagccgagcaatctctataaacctttcgacgtcccctccctctcgccctgagctctgggctggcccggggttctgcaattcgccgcctcccagctccctcccgatccccaagttctcactccaccagaagcgcagtgtctcacttgaatttccacctgctgaccggtcagacgacgaagaggtgcccgtgcatgccaagtcggcaccttcatcgccgactgcaggctcaggtgttaccttcttcagtggtactgatgctaccattgccaccgagaatctgaggaggatccttaacctcaaaattgaggataactgaatggcggttgggtagttctgtgtacatagtttaactacaactgacctttgtagtatgtatagggtaaccggggataaccactgtgtacctggcggtggttccttctgcagcagtactgtaggcggttagcaagcacagcgaggagtttaggaagtttggaaatgcagtgagaaggatgttgtggtaatggagatttggtggatttgcatatcactgcagtttcagagtcacctttgttccttgtaccttgtagttgcctattagtagtccaatactccatttagatgttatagtatttgcatcttccctgcccatcattaaccagtagccacagccttcatatcataatccttgtcatgtagttcatctcaggcagggcattgtaggctagctagtactgttcaagttctgtcatatatgtagtcttctgtaggattgctgcatcccttgaaacttgcattctgtatcacattgcatcctgctgactcacctcccttcataacatctccctgtgttatgcaaagcgcacaaggatctcccctctggcacttctgttttttggaatgaagatgctcagaggagttgttatgaagtcccgatccaatgttctttgtcctccatgtctgtactgactttagctattcatctcctttgtcaccccagtcccattgcatgtgccatccaatccgtttcgaaccattcatctcaaaattgcatttagtggtggttttcccttcgtcttattatcttttgtgcctcatgatcctggagcatgcccaggattctagtctcctccatgtattctcataaaggacttcacgtatcagagatctgcgaatgctcaaccctgaatatggtaattatctatttcatgcctctctacccactactatcgtacatataatctgacagtggtaacgtgatgtgtggggcttttcgtgctgcaggtttgcttgtccgatgccacttcgcctcatccatacctggagttcagaattggcgaagcacctatcacttagctatctgtttcatagtcagtattgtgtcagactgttgtttttgtgcaatatttgattggctactagtctgtttgtgttactgttcaagtttatggtagtgatcatatatggcggccggagtgttccacgccgatgctgtggcattctgttgctttcaagtaaaactagtcaatgttatgtaccttcatgtta

SEQ ID NO: 154191 - DNA, 1891 bp, Zea Mays
agcacctgcatcatctcgggtcgggccatggagactctgctcatctcggaggagcgcaaccaccagctccaccacttctcgggtcgccggaagaaggcgttagcagcgtcgcctcagtccacgcgcagctaccatgctggcaactgccgggcgttccactccggcatcaccgtcggcatcctgccatccccgcccgcgcagagggttgcactgacccgctcctctcctgagcccaagacaccgaaacatcagcttcaccatgggaaaaagcgcagccgagcaatctctataaacctttcgacgtcccctccctctcgccctgagctctgggctggcccggggttctgcaattcgccgcctcccagctccctcccgatccccaagttctcactccaccagaagcgcagtgtctcacttgaatttccacctgctgaccggtcagacgacgaagaggtgcccgtgcatgccaagtcggcaccttcatcgccgactgcaggctcaggtgttaccttcttcagtggtactgatgctaccattgccaccgagaatctgaggaggatccttaacctcaaaattgaggataactgaatggcggttgggtagttctgtgtacatagtttaactacaactgacctttgtagtatgtatagggtaaccggggataaccactgtgtacctggcggtggttccttctgcagcagtactgtaggcggttagcaagcacagcgaggagtttaggaagtttggaaatgcagtgagaaggatgttgtggtaatggagatttggtggatttgcatatcactgcagtttcagagtcacctttgttccttgtaccttgtagttgcctattagtagtccaatactccatttagatgttatagtatttgcatcttccctgcccatcattaaccagtagccacagccttcatatcataatccttgtcatgtagttcatctcaggcagggcattgtaggctagctagtactgttcaagttctgtcatatatgtagtcttctgtaggattgctgcatcccttgaaacttgcattctgtatcacattgcatcctgctgactcacctcccttcataacatctccctgtgttatgcaaagcgcacaaggatctcccctctggcacttctgttttttggaatgaagatgctcagaggagttgttatgaagtcccgatccaatgttctttgtcctccatgtctgtactgactttagctattcatctcctttgtcaccccagtcccattgcatgtgccatccaatccgtttcgaaccattcatctcaaaattgcatttagtggtggttttcccttcgtcttattatcttttgtgcctcatgatcctggagcatgcccaggattctagtctcctccatgtattctcataaaggacttcacgtatcagagatctgcgaatgctcaaccctgaatatggtttgcttgtccgatgccacttcgcctcatccatacctggagttcagaattggcgaagcacctatcacttagctatctgtttcatagtcagtattgtgtcagactgttgtttttgtgcaatatttgattggctactagtctgtttgtgttactgttcaagtttatggtagtgatcatatatggcggccggagtgttccacgccgatgctgtggcattctgttgctttcaagtaaaactagtcaatgttatgtaccttcatgttattttttggtcctgtttctgtgacatgtttgaagttccatgttatcgcactgtatttgctcccaagatcttttttgtttggtccgcttttctagtggtcctaatcatcgtgtgacaaatggttgttactatacttaagggtctcctttttaaggataaatatcaacgttgcgaattgcgatgct

SEQ ID NO: 154192 - DNA, 521 bp, Zea Mays
agagggtggcggcggtgagcacggagctggtggagccgcactcgctgtccttgagcgacgcggcggagacgtcgagcctggcagccgacgacgaccacggggaggagtagttgccggccagcgacgacgagcgctgcaagtgcatcctggcggcggccctgggcggcgtcccctgcttcctgcggctgggcagccgctccagcgcgtcggtgcgctggcggggcgcgctctgggaccgcgccttggcgcgggacgactccgtgttggccatgtagcccgggcagcaggcctccggcgcctgccgcgggctgctctgcgccgtgttggccaccgagaggtcgtcgaagtgggcgctgtacgcccgcgggctcagcagctccgtcgccgccagcgacggcgccggggaggaccggccgccggcgtagagctgcctgtccttccccgccgcgccccgccgcacgggctcgcccacgtccacctccacgatcttggcgttgtcctcgcacgaccggtccatctcc

SEQ ID NO: 154193 - DNA, 745 bp, Zea Mays
ctctcccattccccccctcccccgcgggcgcgggcgcgggggtccgggattagggtttcgtgctcgcctcgaccagcttctagggacacgctcgcccggtcggggctctgcgcgtcgtcgtccgcgatcgatccgagcgcgcccctaccgctccgcgcctcggttcggttccgccgcgcctcgcgatctctggcccactcggctcgatcgtgctcttcgcggacgcgatcgatttgaagggtgaggcaatgaagagtggggagagtggtagggaatggcaacttcagatcccggaggaatcccctgtacatactgctctcttcttggtcttggaggagataacctgagactccctcaggttaagccccaacgcagcgagccctcgcaagaggagctattcgtctgcacgtgcccatgaactactcctgcaactattctccacactaacactggtgagctcatccgggtgggttctccatcaagttgagatctagtgatagctaactacataagtacgctactaccaccaccgtccaccattagtttctcatttctgcaaaagcttgacagcgtgctcaagactggagatggggtgttgtgccttgctacttgacccctgttagaccaactactagaatggagattggtggactaaatgcttaaatttgtaaagtaatgtagtgtaatcctgatcctgaatcatcggtttcactcgcgctatacaattctgatgtggttatcttaa

SEQ ID NO: 154194 - DNA, 467 bp, Zea Mays
ttcacctgcatctttctccgttccaagaaagacgacatgtgtcacgggtacacagctactaacaccacagcaaaagaatgcataatcagtcactcttctgcctccactcctctctctctctctctctctctctctctacagctgcattcctggaccagctacaacattatccagccggccgctttgaacaattcatggagatgcagcagactacaaatcctaatctggaatccgacaacgaatgctgctaacctctcaagccagccacatctaataatcaaagtcgacgatacttacagttccactcaccctgcactggtttcgaccattttttatttttttttttttgtcgaccgccttccaaatccattgcttggagaagtaaggctacgcgacgggagaacatactgcctggaccgccacccttttcgtcacgctcgggcaggggtctcctccaaagctctcgg

SEQ ID NO: 154195 - DNA, 123 bp, Zea Mays
tttttttttttttttgcaaactgggattgtgtagacttgatagatttcgatcgagacaatacttcatccctattctatcaattttctcgcagaaatagaggggttccatcgaaaagacggtga

SEQ ID NO: 154196 - DNA, 1356 bp, Zea Mays
gcaaaatgttacctccgagtatagatgtgggtataaagttttgtcaattataaaattgtcacaaaaaatattcatttcatctgtgttctactcgacacgctatcattcctaaatgcaacacaatggtagcaaataaccacaatcctactaaacataccttgcatgtccaaaacaaccaaatactaacttgttgcatagtttatgctagtatgtactatatattgtatgaggcaccatgcatgctaggactagcacaataaactagtcacaacttagcctacttctatgcaatcccctcttagttaaggataaacatggtattttaaaaaaatgaaaagaaaaataagcaaggagcatgcaaccacaagatacacaacacccaccacaagtctaaatttagcattacatccatggttcctagccacaacaattctctaccacctccaaacacaacggccatcccccatccttcaccactcccgcccatcccttcgctccaccacctctgagactcctccttcacaggccggcgtcgtcggtggtcggagagatggggcaacaacgcacgttggtgtatagcttcgtggcgcgaggcaccatcgtcctagcggaccatgctgaggtctccggcaactttgcctccgttgctgcacaatgcctacagaaactccccgccaacaacaatcgcttcaactacaattgtgatgggcacacattcaactaccacatttatgatggattcacgtactgcgttgttgctaccgagtcagctggtcgccagcttccagttggatttattgagagagtcaaagaagatttttccaagaaatatagcggaggtaaagccaaaaatgctagtgccaatggcctcaagcgagaatacgggcctaaactcaaggagcacatgaggtattgtgaccagcaccctgaggagatcgacaaacttgcaaaagtgaaggctcaagtcacagaggtcaaaggagtgatgatgcaaaacatcgagaaggtattagatcgtggcgaaaaaatcgagctccttgtggataaaacggaggatctccgatcacaggcacaagatttcaggcaacagggaacaaagatacgacggaagatgtggtgggaaaacatgaagatgaagctcatcgttttcggcatcgtggttgcgctgatcctcctcattgtcttgacagtttgcaaggacttgaattgctggtgatgtggaattatagagccgaaatctcacatgttacgactgatgtattgtacctatgcttttccttcagtttgatgttgttttgttcatgcagataagaagcagacacacaggaaagaaaagaagaacgtggaaaagggaag

SEQ ID NO: 154197 - DNA, 1419 bp, Zea Mays
aacacttccgactgcatgctcgctcactctcattcgtagagtactctttttattttcgccctcgatcctctctctagtggcaaaattaaaggtgttagagaggcaggcgttgcactggcactgctatagctagcctggctgatggatgcatggtcgctcatgtgcctaaacgtgcatgtgaagtgaccaaatatatagctgccggctggttcgtgttcttggagctgagactgggagctggccatggtgaggacgacggtggtcggcagggagaggagcggcggcgtgaggcagtacaacaggtccaaggtgcctcgcctcaggtggacgcccgatctgcaccactgcttcgtccacgccatccacaagctcggaggcccggacagggctacgccgaagcgagtgctgcagctgatgggggtgggaggactcaccatatctcatgtcaaaagccatctgcagatgtacaggaacatgagaaatgatcttggaatgcaagggacggaggatcaggagcacgtatacgtaggtggaggaggcatgcataccaatatacagcagcagcgggaccatgggtgtggcgatgccccctgctgcatctgctgccgccactcgccaaataagcctgcaaaggaggaggaggaggcgacgctgttccaacgccaactgaaaaggtcgaggacggagacgaggcgtgggcgtggccagcgggaggagatcgatgatgggagcgcgagccccaagaggcggctgctgctgctgcgaggagggcgaggccgcccaggaatatgtgagagcgacggctcaggctcacccagcagcggcacgctcgcaagtggctacgacaactacatgcgcatgatgcaagcggccatgggcgtggctgccgctgccggcgctgctgctgctgctgctcctcatcatcatcatcatcatcacgcggagacggtggagcccggtcgagggccgagaataaagcagcacttggcgcggcccggcgcagacggcggcgaacacgctcctcccagcagcaggcagctcttcacgttcttgggcttcgtggtggcgccggggccgccgcctcctccctgctgcagccgtgaccaccctttcgaggctgagaggctaaatttgcacgcccacagcctggctcccgagcaagccaggcgacacaaacacggcctccagacaccgcccaccaaggccgccgtggcccaacaagtcggtggcgatccctgctggtcgtcggcggccgcttccgaacacgacgaccaccaccacgaccgcgaccgcgacggctgctggctctcgctgtcccttgcgctggagacgagaagcagccgcagcgccgacgagggcggccggctctcgccgacggggagccggatcagcctcgacctatccttgtccacgatatag

SEQ ID NO: 154198 - DNA, 354 bp, Zea Mays
atgccaactgagacggtgacccccacggtcggtgtcaccatgaccagggcaggatccatggtcggcccacccgtctcggccgggacgttagagcgaactgctgcatcgccacgacacgacgggccacccaccaacgctatgactttcgcccctccgaaagcggtggaagatggtgtggaggacgcaccctctgagtcagaagaggaggcgattccctcgcccaactcgatagggtgcaaggctttcttgcctttcttctgcactcgaaggcgcctctggcgcccccaaggtatcattctcactgaacggcgaccccctcagggagcggtggaagactgggcactagaagtttga

SEQ ID NO: 154199 - DNA, 297 bp, Zea Mays
atggagatggaacagagaccggaagactacgggagccgagagggagacggggtggatgtgggtgaaatacctgagaggctgagacacggcgagcccgtggagcagcgagccagcgacacggcgtcggcgatggaacacagaccggaagacgaggggagccgggaccgggagggagacgaggtgaaatacctgaggcccgtggaggcggaggcgcggagcacagacgcggcgatggagcagagactggaagccgaggggaaccgggagccgagagggagacagggtggatgtgggtga

SEQ ID NO: 154200 - DNA, 3054 bp, Zea Mays
gcgcgaactccgcaggactagacaggagacaggatgcgacgtgcccgtgcgtgagcgtggcgccgtccaccagactgtctagttccggtcctcaccccgcccgtccatttccgacttggccgttcctcctccacgccccggcgcgcgttccggcaaaacgggaggcgaggccatccgcgcgcgcgcgatggcgccggacccgtgcggcgacctcgtggtgacgccgaagacggcggccaaggacgaggcgtcctgctccgtgcccacgccgcccaaggtcactcccgacgaggtgcgcgcggtggcgcgcaagttcgcggaccagcctatccaggagacggagcccgacgtttgggccgtcctcaccgccatctccaagaaggcccgcctccggccccaggggatgaacatacttttgagtgctgacgagcactgcctaggacgatctgttgaggagcggtttcggatttttgcccagcagatcagcgggatgcattgcaaaatatacagggacactgtcttaggggagctgaaccgccacgagcctgtgcctgttttcctcaaggacacaagctcaaatggcacattcatcaactggaaaaggctcaagaaaaattcatccccggtcaagcttaatcatggcgacattatatcattatcatcacctcctcatgacgacaattcctttgtatttgtctaccgcgaagttaatgcaatcagtcgtgtagagaatggggctcccattcttaaaaggaagtcagtggagggtggttctggaagcaagaggctaaagggtcttggtattggttctcctgatggtcctgtttcactagatgatgtccgaagactagaaaaatctaatgctgatctcagggaacaacttgaggcacatgttgtgacaattgagactttgagggctgaaataaaaacagcccaagtgcagcatggaaaggaacttgaggagctaagagaaactatatcgagttcttatctggatcaaactaaatctcttcggtcagcacttgaggagaaacagaagcaaatagattcactcagtacatcaaatacagagttacagaactctataaaagatctggatgaaaggcttaatgcatctaaacaatcacgtgcagatgctgacgagataatttcaagccagaaaggaatgatatgtgagcttgagggacagctaaatgaggagagaaatttaagaagagaagagcgtgataaggctgcacatgacatgaaatctgcattgcataaagtgcaagccgaggctcaagaagaaattaagaaacaggcggagtcttaccttaggcaacaaagggagcagaaagaagttattagcaagcttcaggaatcagaaaaagaaacccgtttgtttgtggaaactttgaggtccaagctggaagatgctcgagataatcttgtaacatccgagaaaagagtaagagagctggaagctcagcttcaggacgagcagatggtatcagccaataatcgaaagaagacagaaaatctggaagctgaattgagaaaactgaagaaggaactcgacaatgagaaggctgctcgagaagaagcatgggcaaaggtttcagctcttgagcttgaaatagctgcaacgattagagatctatcaattgagaaacagaggtatcagggagctagagaacggattattctacgggagactcagctgcgtgctttctattcaaccacagaagaaatctcttctctgtttgcgaaacagcaggaacagctgaaagctatgcagagaactttggaggatgaagagaactatgagagcaccttaatgggtgtggatcttaataaagtacctctaaccactgataatgctggtatgaagccagtagactgctcaaaaaatacagtgggagcttcaagtgcttcaccagaaaatactcaggtaagtgaacatgattccagtgacgaagatgccaacatgactgagcagcaggatgatgatggtactgccattggtggcagcactcaaggtctagaatgcaccagtccagaaaggtcagaggggagattgaagtcaggttttcatggcaatccggtttctacagctcctgagagagaggttacagataccgagcaagttcccgagacagatagccaagctggtaatgctggttgcgatgaccaaagatgtgacaacacgggaggagagactatgccactagaagatgatatgctgctcccagataacgaggaacctactgcattgctgaaagatgtagggcagccacaagcaaatgtggttcctattccaatccccggtgatggcgttgggcactgtttcgaagaaaaacatgagggtgcctgctctgagagcaaacgggaggacacacatgctggagccatcagaacggctgatctgttggcctcagaagtcgctgggagctgggcagtggaaacagctccgtctgtcaatggggagaacgaatctccaaggagcttgggcgatgctacagagcacgatgaagctggaggcagcgtggcaggcgatgctttggtaactctggtgaactcagagggccaggcggctgggagccagaacaatgttgagcgtggcagctccaaaataacccatcatcatcatcatcatcgtcatcaccatcgtgttcttagtgccatgattggaattgttgatcctgagttcaggaagcaaatgtccggcagaagcggagttggaaacgaggaacccatgtctgacgccgagacgggtgagggcatcgaggaaggcgattcagattcaggttcagacggcagtgacagcgaggaggctatggttgaggattctgtcgtttagcttaaacagaagtgactgctcactgtaaatatacctcaattcgttttgtgtacctttcgttgtatcatcatgcgtagcgtaagcccctcgtgtgcgtttgattattttattcgttaagtgtcctcagcagctcgtggtgcatgttgtacgaaatcgaggccttttggtcttcaacacaaataaatatatgtactcacttggtttacaattataaa

SEQ ID NO: 154201 - DNA, 2749 bp, Zea Mays
attgttttgtgatcatgactactccctccatccaaaaagaatgcaattgtaggtttgggacaagtcaaacttccttaagttcgatcaagtttgtagaaaataatagaaatgtttatatttccaaaataggtttactatgaatttatctggtgatacttatttgacatcataaatattagtactttgttgtatgaatttggtcaaacttgaatttgtttgattacttgaaatgataattgcatccatttttggaacagaggcagtatgttacaagttttgatagttatcattgtttgatggtcatgctatgttacaagttttgatatgtgcactgttattttgtttgattctgaagtggagggtggttctggaagcaagaggctaaagggtcttggtattggttctcctgatggtcctgtttcactagatgatgtccgaagactagaaaaatctaatgctgatctcagggaacaacttgaggcacatgttgtgacaattgagactttgagggctgaaataaaaacagcccaagtgcagcatggaaaggaacttgaggagctaagagaaactatatcgagttcttatctggatcaaactaaatctcttcggtcagcacttgaggagaaacagaagcaaatagattcactcagtacatcaaatacagagttacagaactctataaaagatctggatgaaaggcttaatgcatctaaacaatcacgtgcagatgctgacgagataatttcaagccagaaaggaatgatatgtgagcttgagggacagctaaatgaggagagaaatttaagaagagaagagcgtgataaggctgcacatgacatgaaatctgcattgcataaagtgcaagccgaggctcaagaagaaattaagaaacaggcggagtcttaccttaggcaacaaagggagcagaaagaagttattagcaagcttcaggaatcagaaaaagaaacccgtttgtttgtggaaactttgaggtccaagctggtatgctatttcagaatgactgcttcgaatttaccattcctttgctgcactacaactatttgttatttgttcttctcatgcaggaagatgctcgagataatcttgtaacatccgagaaaagagtaagagagctggaagctcagcttcaggacgagcagatggtatcagccaataatcgaaagaagacagaaaatctggaagctgaattgagaaaactgaagaaggaactcgacaatgagaaggctgctcgagaagaagcatgggcaaaggtttcagctcttgagcttgaaatagctgcaacgattagagatctatcaattgagaaacagaggtatcagggagctagagaacggattattctacgggagactcagctgcgtgctttctattcaaccacagaagaaatctcttctctgtttgcgaaacagcaggaacagctgaaagctatgcagagaactttggaggatgaagagaactatgagagcaccttaatgggtgtggatcttaataaagtacctctaaccactgataatgctggtatgaagccagtagactgctcaaaaaatacagtgggagcttcaagtgcttcaccagaaaatactcaggtaagtgaacatgattccagtgacgaagatgccaacatgactgagcagcaggatgatgatggtactgccattggtggcagcactcaaggtctagaatgcaccagtccagaaaggtcagaggggagattgaagtcaggttttcatggcaatccggtttctacagctcctgagagagaggttacagataccgagcaagttcccgagacagatagccaagctggtaatgctggttgcgatgaccaaagatgtgacaacacgggaggagagactatgccactagaagatgatatgctgctcccagataacgaggaacctactgcattgctgaaagatgtagggcagccacaagcaaatgtggttcctattccaatccccggtgatggcgttgggcactgtttcgaagaaaaacatgagggtgcctgctctgagagcaaacgggaggacacacatgctggagccatcagaacggctgatctgttggcctcagaagtcgctgggagctgggcagtggaaacagctccgtctgtcaatggggagaacgaatctccaaggagcttgggcgatgctacagagcacgatgaagctggaggcagcgtggcaggcgatgctttggtaactctggtgaactcagagggccaggcggctgggagccagaacaatgttgagcgtggcagctccaaaataacccatcatcatcatcatcatcgtcatcaccatcgtgttcttagtgccatgattggaattgttgatcctgagttcaggaagcaaatgtccggcagaagcggagttggaaacgaggaacccatgtctgacgccgagacgggtgagggcatcgaggaaggcgattcagattcaggttcagacggcagtgacagcgaggaggctatggttgaggattctgtcgtttagcttaaacagaagtgactgctcactgtaaatatacctcaattcgttttgtgtacctttcgttgtatcatcatgcgtagcgtaagcccctcgtgtgcgtttgattattttattcgttaagtgtcctcagcagctcgtggtgcatgttgtacgaaatcgaggccttttggtcttcaacacaaataaatatatgtactcacttggtttacaattataaaccgttttggtttttttat

SEQ ID NO: 154202 - DNA, 680 bp, Zea Mays
acaacatttgggccttctcagtccagtagcgcgcgctttcccgtatgcgtccggcgctttcgtccacttcgtcctccaggtttcctttccacccccgccggtccagcgccaacaccagtcggcggagcggatctccggtgaggtcgagggatggcgaatggctgcggctacgtgtgggccctcgcggcgggtttcaacgccgcactcgccgccatctccgccaagttcttctccactctgttgctcaaatatggcatggtgatacttttcaacgtgacaatgtgggggtgctatgtcaacagcctcaaagctttgtcatccctccaggcaacagtgacaaacttcgccgccaacttcatttcatctgggcttgcggggtgtttcctgtttgatgagcccttgccttctaagtggtttgcaggtgccagtcttatcatttttggcgtctttatcctcagcaagtcaagcatcgaggagaaacagaactcagattaggaggaagttttgaccactagcgttagctgtaacataaggtgaggctgcttatacttagggctagtttgaaaaccccattttctcaagtgatttctatttttctaagggaaattagctcatttttccttaagaaaagtagaaatttcttggaaaaatagacttctcaaactcgcccttgtatatat

SEQ ID NO: 154203 - DNA, 211 bp, Zea Mays
atggttctcatgacatatcgatgaatttgctaggagtttatgatgacaggaccttgcttttcgacctagggaagtacacatttggtgtggcatcgttaatagaatgtatatcttatatgcgagttggtatatttcaagtgcctgaatttagatagacaattattagtacatttataaggtaagagagtttacttctttctgtactcaaaca

SEQ ID NO: 154204 - DNA, 1989 bp, Zea Mays
ccacgcaaaagccccgaccgccagccgcctccgtacgtctcactccacgcgttccctccacaacagaacggaccgggaccaccagcgccgtgtggctttacaaagccgcacgcgcgcggagcggacagcggaggtcaccactcttggcgaagcgaaatccaccgtacaccgctgcctccctctccctgtctcgtctcgtcgaaccagccgaggaagccaacgcagacccagcgatcctcgtcgcgcgccctcctcccccacggagggaaggatggcggagcccaaagcggcggcggcggcgaggaagacgcgggtgggcccgtacgaggtcggcaagaccatcggcgagggcagcttcgccaaggtcaagcacgcgcgcgactcccgcaccggcgccgtccgcgccatcaaggtgctcgaccgcaaccacgtcctccgccacaggatggtcgagcagatcaagcgggagatttcgactatgaagctgatcaaacatcccaatgtggtacagctgcatgaggttatggcgagcaaaacgaagatatacatggttcttgaatttgttgatggaggcgagctattcgataagatcgtcaattctggaaggctaggagaggatgaagctaggatatactttcatcaacttataaatgcagttgattattgccatagccgaggagtgtaccatagagacctgaagccagagaatttgcttctggattcaaatggagctcttaaagtttcagacttcggcctaagtgcatttgcaccacaaacaaatgaggatgggcttctgcatactacctgtggaactccaaactatgtagcacctgaggtgcttgctgataaaggttatgatggtatggctgcagatgtatggtcctgtggcataatcttatttgttcttatggctggatacttaccctttgatgatgccaatctgatgagactgtacaaactgatctgccaagcatatttttcttgcccaccatggttttcttctggagcgaagaagtttattaagcgcattctcgatcctaatcctgatacgaggataacaattgcagaaattttggaagatgaatggttcaaaaaagattataaaccaccacgttttgaacaaggtgaagatgttagccttgacgacattgatgctgcattcaatgattcagaggaccgtcttgtggcagagaaaagagagaaaccggaatccatgaacgcgtttgctcttatttcgaggtcgcagggtttcaaccttggaaatttgtttgagaaggagatgatgggaatggtaaagagggaaacatctttcacgtctcaatgcacagcacaggagatcatgacaaaaatagaggatgcatgtgggccactcggtttcaacgtgcggaaacaaaattacaagatgaaattgaaaggtgacaaatctggaagaaaaggtcacttatctgttgcaactgaggtttttgaggttgccccatcacttcacatggttgagcttcgtaaaaccggaggagacacattggagttccacagcttctacaagaacttctcatcggagctgaaagatatcgtgtggaaagctgaatctgacgcaaataataaacagacgaataagtgatacccagagaatctgtgtagccctcatgaggccacattcagatagatcacctcttcgggtgataccacctgcttggtactgtatgcttttttttttactggtaccacattagcagccaaaatctcttgtaaacgggaactccttctgaatgagcgcaattgtacaaaacacatatgaagaggccctccgtgagatgctccgaacactgcaatgggatgtcaaatagttctgaatggtgagtgctgtttttgcatctataggggcatatatgtttccattccatgtgcatgtaccgttgttgtatgcgcatgggggtacgtgtgcagcaggagagagagaacatctgaacgtgtcctgagaggaaaaaaaaa

SEQ ID NO: 154205 - DNA, 1698 bp, Zea Mays
ctgccccgtgacctccactgcgcgcgcgggcaccaatggcggccgcgtcgctcaagttcgcctcccccaaacccttggcctccgcaccgtccgcgctcctttgcgggcgtcgcgcccaggcgcggcccctcccagcaagtcgcctccctccgcctacccgcgtcgccgtgcagccccccgccgcgccggtcgcgacgcgcatcggctcctttgacaaggtgctggaggcgctgatcggcgggaccgacttctccgaggaggatgcggaggcgacgctgaagctgctcctggacgagaaggacgaggcgcgcatctccgccttcctcgtcctcctcagggccaagggcgagaccttcgaagagatcgtggggcttgcgaaggcgatgttgagctgctgcatccgagtcgatggtctggacgacgccgtcgacattgtcgggacaggcggcgacggcgcagacaccgtcaacatctccaccgggtccaccatcctcgccgccgcggccggcgccaaggtcgctaagcaaggaagcagggctagctcgtcggcgtgcggcagcgccgatgtgctggaggcgctcggggtcaacatcgagcttggacccgagggtattaaacgatgtgtcaatgaggtgggtgttggattcatgatgtctgcaaattatcatcctgcaatgaaaattgtcagacctgtgaggaagaagcttaaaataaagacagttttcaatatccttggtcctctactgaatccagcaagggtgcctcatgctgttattggtgtttaccatgagaatatagttaccaagatggctaaggctgctcagaaatttggaatgaagagagcattggtcgtccattcaaagggtttggatgaaataagcccacttggtcccggatatatccttgatgttactccagagaagattgaaaaaatgttcttcgatccattggattttggcattcctcgctgcacattggaagatctgaaaggaggcgatccagcgtttaatgcaaaagttctccaggatgttcttgctggtcaaaggggggcgattgcagatgcccttgttctaaatgctgcggcgtccctacttgtcagtggtaaagtgaaaaatttacatgacggtgttgctttagcacaggagacacagcggtccgggaaagccatcaatacacttgagtcttggataaaaaaatcaaatagttccagagactgagtgaagttgagtagcaatagatggatttctgcaataagacatgaggaatggtagcaaataagggctccgctgagtccatccatcatccgtgtatgattggctttcttctcgtgttttgttcatgatttgtgtcagaaacctaggtggcatctagtctggtttatgtattgccagtgctgttgtgtagaaaaatctccgtcgatattctaagctttttggttagaaaggtgcgctcttcattgtccttgacggaactcggggtagatgaacataggccatctgttgtgatcttgtgatgctgcattacgtttgcaatggatcatatattatgcaatggcatgggaagattatacccatttgtaatgggggagaatcagggcttaaacatttctacaataacgtgcgaagagttgtccccattggtaacgcatgtcctgaaatatgaataaagctgcaggcagttgatattttgcaactgaaa

SEQ ID NO: 154206 - DNA, 1509 bp, Zea Mays
ctgccccgtgacctccactgcgcgcgcgggcaccaatggcggccgcgtcgctcaagttcgcctcccccaaacccttggcctccgcaccgtccgcgctcctttgcgggcgtcgcgcccaggcgcggcccctcccagcaagtcgcctccctccgcctacccgcgtcgccgtgcagccccccgccgcgccggtcgcgacgcgcatcggctcctttgacaaggtgctggaggcgctgatcggcgggaccgacttctccgaggaggatgcggaggcgacgctgaagctgctcctggacgagaaggacgaggcgcgcatctccgccttcctcgtcctcctcagggccaagggcgagaccttcgaagagatcgtggggcttgcgaaggcgatgttgagctgctgcatccgagtcgatggtctggacgacgccgtcgacattgtcgggacaggcggcgacggcgcagacaccgtcaacatctccaccgggtccaccatcctcgccgccgcggccggcgccaaggtcgctaagcaaggaagcagggctagctcgtcggcgtgcggcagcgccgatgtgctggaggcgctcggggtcaacatcgagcttggacccgaggttaccaagatggctaaggctgctcagaaatttggaatgaagagagcattggtcgtccattcaaagggtttggatgaaataagcccacttggtcccggatatatccttgatgttactccagagaagattgaaaaaatgttcttcgatccattggattttggcattcctcgctgcacattggaagatctgaaaggaggcgatccagcgtttaatgcaaaagttctccaggatgttcttgctggtcaaaggggggcgattgcagatgcccttgttctaaatgctgcggcgtccctacttgtcagtggtaaagtgaaaaatttacatgacggtgttgctttagcacaggagacacagcggtccgggaaagccatcaatacacttgagtcttggataaaaaaatcaaatagttccagagactgagtgaagttgagtagcaatagatggatttctgcaataagacatgaggaatggtagcaaataagggctccgctgagtccatccatcatccgtgtatgattggctttcttctcgtgttttgttcatgatttgtgtcagaaacctaggtggcatctagtctggtttatgtattgccagtgctgttgtgtagaaaaatctccgtcgatattctaagctttttggttagaaaggtgcgctcttcattgtccttgacggaactcggggtagatgaacataggccatctgttgtgatcttgtgatgctgcattacgtttgcaatggatcatatattatgcaatggcatgggaagattatacccatttgtaatgggggagaatcagggcttaaacatttctacaataacgtgcgaagagttgtccccattggtaacgcatgtcctgaaatatgaataaagctgcaggcagttgatattttgcaactgaaa

SEQ ID NO: 154207 - DNA, 772 bp, Zea Mays
gtaaccatccttttcccagaccaaaacagaagaaaggaaagtgctactgggcattggctactggcctactgccaactacccgtggggtcccgtggaagagaagagagcatcgccggagttggggtcggcgcgccgacgaggaacaaaagaagacggcggtggggcggagatggggagtcctctgggcgggtggccgtcttacaacccgcacaacttcagccagctcgtcccggccgacccatccgcacagccctcgaatgtcacaccagccacttatgttgcgacccacaggactgatccgccacccaatcaagtgataacaacggagtcgaggaacatcctgctgaggcacttctaccagaaatccgagaagctgaggcccaagagacctgccccggacaacctcgctccggagaacaacaacagcaacaacaagcagcccaggggaccggtcggcgacgtcggtgggcagtcgtcgagcgcgagaagctgaagccacagctggtggccgtccactcctccccctgcctgcttgtttctcatctctgggtttcgtcatgcagaggcagaggcagatgcagccctgtgttgtcctcttcgctcctcacgtctgtacgtacgacccaaagagctactaacctaatctgaagttagggttacatacatggatatcggatagatgggtgtacataagcacctgagagcagtgttgtgttatcctaaatgctaaacggtaaacagtcgttcaacatcctctgtgtttagcgtataa

SEQ ID NO: 154208 - DNA, 1852 bp, Zea Mays
ggccggcgcacgtctcgcggatgtccatgcgcgcaacttgactcccaccactaccaccatccaccgactgacgactccggcccacttgttcgtcctcgtcctcgtccccgtccagtgcccctcccgtgcgccgaggccgccacacccacacgtatacccaggccggccaaaacgaatcgggtccgtcggaccggacggcttgagagcaaccatggccgtcgcgaggctggtgtccgccccgttccctctcgccccgctccgcgtccgggccccccgcccggccttgccccccggcgcgcacgcgggcccacggccgccggtcctggcgctcgcgcctcccgctgcctcggcggcgccccggcgcgccgtgcccgcgcgcgcggcgccggaggacggcggcagaggggacgcggcggcggctgcggcgcgcgcggcgcggaagcagtcggagcggcggacgtacctcgtggcggccgtcatgtccagcctcgggatcacgtccatggccgccgccgccgtctactaccgcttcgcatggcaaatggagggcggcggcgcgatcccggtgacggagatggtcggcacgttcgcgctctcggtgggcgccgcggtggggatggagttctgggcgcggtgggcgcaccgggcgctgtggcacgcgtcgctgtggcacatgcacgagtcgcaccaccgggcccgcgacgacgggcccttcgagctcaacgacgtgttcgccatcgtcaacgccgtcccggccatgtccctcctcgcctacggcttcttcaaccggggcctcgtcccgggcctctgcttcggcgcggggctggggatcacgctcttcgggatggcctacatgttcgtgcacgacggcctcgtccaccgccgtttccccgtcggccccatcgagaacgtgccctacttccggcgtgtcgccgcagcccatcagatacatcacatggacaagttccagggcgtgccatacggcctgttcctggggcccaaggagctgaaggaggtgggagggaccgaggagctggagaaggagatcaagaggaggatcaggaggagggaggcgctagacgccacccaataagacctgcttgctattgctatacacacagtgctttggctactgaatcccactgtgttctagcgttccctttttttttatgtagcctagatgtatagtatacgagtgctagcgtgtgcacgtaaaaaaccaggttgcgagggtctcaacaggcgacctgcaggaccagcgtcgtcgtggcgctgtttgtcgtcgccggaacagtgaccgtgcagctgccgccgccagtcgccggtggaacaagacacggcacagccgaagcgtgaagacacaagacaagcggctgggggaccttccgaatcaggtccgggacacgcatgtgcatgtgacgagggatcgtcctcgtgatactgtttctccttttttcatgacgatgaacatgggatgggatgggatgggacgggactatgaatcttgtaaaattgtcgcagccgctgtcagagtctgcggcggattgtcggtccacctggcgtgctcggcgcaggcggcggcggcggcgaagagctgtgcggggaggcctcctcggaaggagttcagaaccacagccagcaaggggattgaaggcccgggacccaggtgatggtgatatggctcaatggctgtcgtcagcccatgtgcccaacctaagaaaatgtgataatgttagcaattagtaagaggttagaatcatcatgtttttcttatttcattaaattgcatgtaatatcatcatgtttttcttatgtgtcatgtcatttaatgaggataaaacttccataaaaa

SEQ ID NO: 154209 - DNA, 579 bp, Zea Mays
aaacattcctaattgccaattggagccagagcgcagagcgcgaaaggcgagcggcgactccctggcgttgaccagagccccaccccactcgccgtctcgccctaaaccaaatcctccccaaaggcaaatacgaaggtacagtgccccagccccgcgccccctagaccaaagcagaccagaatccgccctaccaatcgcctccccagatcggcggtccacccggaggcggcgatggcgtcgtcgcaggcgaacctcgacaagatgcagctccgccagagctaccgcaacgtctggcacaccgacatgacgaacgccatccaggccgacttcccctactgctgcctcgcgctgtggtggtgagccatccatcgaccctgcctagcagatctcaccgtcaccgtcttctgcgggctttgagtctcgaacccctagccttccgtagatccgaggacacttaatttgtcgctgtggctagggtttttggggattttggtctccaagggttccgcgttgtgcattgccgctttttcgaggagcatatcctgaactaaattgttgcagtataaaagctcattctac

SEQ ID NO: 154210 - DNA, 1516 bp, Zea Mays
aaacattcctaattgccaattggagccagagcgcagagcgcgaaaggcgagcggcgactccctggcgttgaccagagccccaccccactcgccgtctcgccctaaaccaaatcctccccaaaggcaaatacgaaggtacagtgccccagccccgcgccccctagaccaaagcagaccagaatccgccctaccaatcgcctccccagatcggcggtccacccggaggcggcgatggcgtcgtcgcaggcgaacctcgacaagatgcagctccgccagagctaccgcaacgtctggcacaccgacatgacgaacgccatccaggccgacttcccctactgctgcctcgcgctgtggtgtggaccttgcgtgtcgtacatgcttcgcaaaagggctctctacaatgacatgtcaagatatgtctgttgcgctggctacatgccatgcagtggaaagtgtggcgagagccggtgcccagagttctgtcttgcaactgaggtgttcctttgctttggcaattcagttgcatcaacccgcttcttgctgcaagatgaatttaacatacagaccactcagtgtgacaactgcatcattggcttcatgttatgccttcaacaagttgcttgcatcttctctatagttgcagctattgttggtagcgaggagctttcagaggcttcccagatccttaattgtctgtctgatttggtctactggacggtttgtgcatgtatgcagacgcagcacaaagtcgaaatggacaagagggatggaaagttcagcccacagcctatggcagtgcccccggtgcaacaaatgtcacgcatcgatcagcctatgccgcctcctgctggatatgcaccgcaaccagcatatgggcagccttatggtggctatccatctcctcctggccaaggttatccgcctcctcctggccaaggttatccgccagctggatactcgcagggcggtgcataccctccacccgctcaaggttacccacatggtggtggatatcctccacctggtcaaggttacccccagggtcagggtggtgcatatcctccgcctggttcttaccctccacaaggttcctaccccccagcagagggctcctacccagcacaaggttcctaccacccagcacagggctcctacccagcacaaggttcctattccccagcacagggctcctacccagcacaaggttcatatcccccacccccagcacaaggttcatatcccccagcacagggctcgtacccagcacaaggttcctaccccccacaggcttaccctggcaagtaaagatgacacgacaggtgaaccaaatatcgtgaacatgtaaacagtaggaccgctttagcgctataggttattttgataaaattcttgttactgttcagggtggcattcggtgaacaatatttctattttatacggtcaacatcttgtgttgatcatgtcgtgttgagtctatcctcttttttcttttcctgaataaggaatggcattcaac

SEQ ID NO: 154211 - DNA, 1650 bp, Zea Mays
attcctaattgccaattggagccagagcgcagagcgcgaaaggcgagcggcgactccctggcgttgaccagagccccaccccactcgccgtctcgccctaaaccaaatcctccccaaaggcaaatacgaaggtacagtgccccagccccgcgccccctagaccaaagcagaccagaatccgccctaccaatcgcctccccagatcggcggtccacccggaggcggcgatggcgtcgtcgcaggcgaacctcgacaagatgcagctccgccagagctaccgcaacgtctggcacaccgacatgacgaacgccatccaggccgacttcccctactgctgcctcgcgctgtggtgtggaccttgcgtgtcgtacatgcttcgcaaaagggctctctacaatgacatgtcaagatatgtctgttgcgctggctacatgccatgcagtggaaagtgtggcgagagccggtgcccagagttctgtcttgcaactgaggtgttcctttgctttggcaattcagttgcatcaacccgcttcttgctgcaagatgaatttaacatacagaccactcagtgtgacaactgcatcattggcttcatgttatgccttcaacaagttgcttgcatcttctctatagttgcagctattgttggtagcgaggagctttcagaggcttcccagatccttaattgtctgtctgatttggtctactggacgataaatgcaaatgcagacgcagcacaaagtcgaaatggacaagagggatggaaagttcagcccacagcctatggcagtgcccccggtgcaacaaatgtcacgcatcgatcagcctatgccgcctcctgctggatatgcaccgcaaccagcatatgggcagccttatggtggctatccatctcctcctggccaaggttatccgcctcctcctggccaaggttatccgccagctggatactcgcagggcggtgcataccctccacccgctcaaggttacccacatggtggtggatatcctccacctggtcaaggttacccccagggtcagggtggtgcatatcctccgcctggttcttaccctccacaaggttcctaccccccagcagagggctcctacccagcacaaggttcctaccacccagcacagggctcctacccagcacaaggttcctattccccagcacagggctcctacccagcacaaggttcatatcccccacccccagcacaaggttcatatcccccagcacagggctcgtacccagcacaaggttcctaccccccacaggcttaccctggcaagtaaagatgacacgacaggtgaaccaaatatcgtgaacatgtaaacagtaggaccgctttagcgctataggttattttgataaaattcttgttactgttcagggtggcattcggtgaacaatatttctattttatacggtcaacatcttgtgttgatcatgtcgtgttgagtctatcctcttttttcttttcctgaataaggaatggcattcaactggaatgtatttgaatttggtgacaactcacgtggatattgttttggttcagagttgtcactttgctgtgtatgatagtcgcaacttttgatgacgtttgataatggagtgaaggaatggaatgcttatgacttgtgagc

SEQ ID NO: 154212 - DNA, 1372 bp, Zea Mays
cccactcgccgtctcgccctaaaccaaatcctccccaaaggcaaatacgaaggtacagtgccccagccccgcgccccctagaccaaagcagaccagaatccgccctaccaatcgcctccccagatcggcggtccacccggaggcggcgatggcgtcgtcgcaggcgaacctcgacaagatgcagctccgccagagctaccgcaacgtctggcacaccgacatgacgaacgccatccaggccgacttcccctactgctgcctcgcgctgtggtgtggaccttgcgtgtcgtacatgcttcgcaaaagggctctctacaatgacatgtcaagatatgtctgttgcgctggctacatgccatgcagtggaaagtgtggcgagagccggtgcccagagttctgtcttgcaactgaggtgttcctttgctttggcaattcagttgcatcaacccgcttcttgctgcaagatgaatttaacatacagaccactcagtgtgacaactgcatcattgtaacaccacttgcctcttaaatttcctgtctgatgcgattcaacgtcctgtggagggttcctgttctttcttccgatgtcacttggactgaatataaccttttatgcagggcttcatgttatgccttcaacaagttgcttgcatcttctctatagttgcagctattgttggtagcgaggagctttcagaggcttcccagatccttaattgtctgtctgatttggtctactggacggtttgtgcatgtatgcagacgcagcacaaagtcgaaatggacaagagggatggaaagttcagcccacagcctatggcagtgcccccggtgcaacaaatgtcacgcatcgatcagcctatgccgcctcctgctggatatgcaccgcaaccagcatatgggcagccttatggtggctatccatctcctcctggccaaggttatccgcctcctcctggccaaggttatccgccagctggatactcgcagggcggtgcataccctccacccgctcaaggttacccacatggtggtggatatcctccacctggtcaaggttacccccagggtcagggtggtgcatatcctccgcctggttcttaccctccacaaggttcctaccccccagcagagggctcctacccagcacaaggttcctaccacccagcacagggctcctacccagcacaaggttcctattccccagcacagggctcctacccagcacaaggttcatatcccccacccccagcacaaggttcatatcccccagcacagggctcgtacccagcacaaggttcctaccccccacaggcttaccctggcaagtaaagatgacacgacaggtgaaccaaatatcgtgaacatgtaa

SEQ ID NO: 154213 - DNA, 517 bp, Zea Mays
ctgcttgagctcgatcttaagctcctgtcggaccctctccatgagtgagcgctcggagtcggtgggcaggagcgggccgaagcccatcatgtcgtgcccgtcggagcccatgtccaccagacccacctccagcatcggcgcctcgtcctcgtcctcctccgacatggtcgctcccgtcccttcctccagcggtttaccagttaggtcttgcagggactgctcgatctcgcggcatgccatgacggcctccacggcgtgcacccggacgtgctgctgcagctgctcccggaacgagcacagcagcatcaggtactgcgcctgcacccacatatatggacgcatgccagcgcgcatgtggaggaagaagaactagtcagctcgatcgatcgatgacggaaacctgcaggggtagttagtacgtacgaggaaggagtcgaggtcgtgcttgtcgtgcggggagaggaaggggctgtggtgggcggcgtaggagtggaggaggccgctggactgcgcgagc

SEQ ID NO: 154214 - DNA, 1477 bp, Zea Mays
cacccccggccacacctgacccctcccgcgctcttttcttttactctccctatttttttaggtggtggttcgtctccgccccgtccagcaccgcccgcagccggaaacggcacccctaccgaatccgccctcctctttccgttcgttccgcctcgtcgctctcgctctcgctgcaccgcccggccccagcctgccttgttcacggcaacaccggcagggacggaaaaggaaagcccaggtgtgcaaggcaggcacacatagccacaggccacggcacaggcagcgcggcgctggctacggccaaaaaccctacgcggcccctcggcccagctgcttccccctccctcttctctctcccaccaaccaacgccctttcccttgccatttttgccgagccgatccggtagagagagggagagggagggactgagggaggaggagctgggttccggtcccggccgcccggccggctgcgcgattcgattgcagctctcgtccccgggcggcgtccaggatggtgcggggcaagacgcagatgaagcggatagagaacccgaccagccgccaggtcaccttctccaagcgccgcaacggcctgctcaagaaggcgttcgagctctccgtcctctgcgacgccgaggtcgccctcgtcgtcttctccccgcgcggcaagctctacgaattcgccagcggaagtgcgcagaaaacgattgaacgttatagaacatacacaaaggataatgtcagcaacaagacagtgcagcaggatattgagcgagtaaaagctgatgcggatggcctgtcaaagagactcgaagcacttgaagcttacaaaaggaaacttttgggtgagaggttggaagactgctccattgaagagctgcacagtttggaagtcaagcttgagaagagcctgcattgcatcaggggaagaaagactgagctgctggaggagcaagtccgtaagctgaagcagaaggagatgagtctgcgcaagagcaacgaagatttgcgtgaaaaggtaatggtgccgaaacatcttacagccatgaggaccacaagacgctgcacgctttgattatactgcttacctcgacatcttatgtgcatatacagtcatgcatggatttctctcaccaattcgcgtgctgcgtgcatctgatggaaaccatgtctgcagtgcaagaagcagccgcctgtgccgatggcttcggcgccgcctcgtgcgccggcagtcgacaacgtggaggacggtcaccgggagccgaaggacgacgggatggacgtggagacggagctgtacataggattgcccggcagagactaccgctcaagcaaagacaaggctgcagtggcggtcaggtcaggctagcagctacctcagccacgcacaggcccaatcaacgcaagctagctagctgagaataatcttttagatctctggtagtgtggagatcgagatgcaagccaagcaatg

SEQ ID NO: 154215 - DNA, 1561 bp, Zea Mays
cacccccggccacacctgacccctcccgcgctcttttcttttactctccctatttttttaggtggtggttcgtctccgccccgtccagcaccgcccgcagccggaaacggcacccctaccgaatccgccctcctctttccgttcgttccgcctcgtcgctctcgctctcgctgcaccgcccggccccagcctgccttgttcacggcaacaccggcagggacggaaaaggaaagcccaggtgtgcaaggcaggcacacatagccacaggccacggcacaggcagcgcggcgctggctacggccaaaaaccctacgcggcccctcggcccagctgcttccccctccctcttctctctcccaccaaccaacgccctttcccttgccatttttgccgagccgatccggtagagagagggagagggagggactgagggaggaggagctgggttccggtcccggccgcccggccggctgcgcgattcgattgcagctctcgtccccgggcggcgtccaggatggtgcggggcaagacgcagatgaagcggatagagaacccgaccagccgccaggtcaccttctccaagcgccgcaacggcctgctcaagaaggcgttcgagctctccgtcctctgcgacgccgaggtcgccctcgtcgtcttctccccgcgcggcaagctctacgaattcgccagcggaagtgcgcagaaaacgattgaacgttatagaacatacacaaaggataatgtcagcaacaagacagtgcagcaggatattgagcgagtaaaagctgatgcggatggcctgtcaaagagactcgaagcacttgaagcttacaaaaggcaattacctagctatcaaatactgatatccttatgtacctgcccacggactaatctgcgttgaggcggtgcaggaaacttttgggtgagaggttggaagactgctccattgaagagctgcacagtttggaagtcaagcttgagaagagcctgcattgcatcaggggaagaaagctcacgacttcatatcttctgatcttgcatggcagactgagctgctggaggagcaagtccgtaagctgaagcagaaggagatgagtctgcgcaagagcaacgaagatttgcgtgaaaagtgcaagaagcagccgcctgtgccgatggcttcggcgccgcctcgtgcgccggcagtcgacaacgtggaggacggtcaccgggagccgaaggacgacgggatggacgtggagacggagctgtacataggattgcccggcagagactaccgctcaagcaaagacaaggctgcagtggcggtcaggtcaggctagcagctacctcagccacgcacaggcccaatcaacgcaagctagctagctgagaataatcttttagatctctggtagtgtggagatcgagatgcaagccaagcaatgtgatatcgcgttgtgtgttaccaacctgtcagtctgtgtatcatcccgtcccgtccgtcagagtctcagagaacgaacacttcttctccctgtagctagctgctcctgcttgtgtccagatcttctgttcgatc

SEQ ID NO: 154216 - DNA, 1264 bp, Zea Mays
cggccaaaaaccctacgcggcccctcggcccagctgcttccccctccctcttctctctcccaccaaccaacgccctttcccttgccatttttggtgagtgcgccctttcccttcctccccagatccccccccccgttttccacttttgcctccgccccaattcggataacaaacccctccgcctcgtcgcgtctcctcccagccgagccgatccggtagagagagggagagggagggactgagggaggaggagctgggttccggtcccggccgcccggccggctgcgcgattcgattgcagctctcgtccccgggcggcgtccaggatggtgcggggcaagacgcagatgaagcggatagagaacccgaccagccgccaggtcaccttctccaagcgccgcaacggcctgctcaagaaggcgttcgagctctccgtcctctgcgacgccgaggtcgccctcgtcgtcttctccccgcgcggcaagctctacgaattcgccagcggaagtgcgcagaaaacgattgaacgttatagaacatacacaaaggataatgtcagcaacaagacagtgcagcaggatattgagcgagtaaaagctgatgcggatggcctgtcaaagagactcgaagcacttgaagcttacaaaaggaaacttttgggtgagaggttggaagactgctccattgaagagctgcacagtttggaagtcaagcttgagaagagcctgcattgcatcaggggaagaaagactgagctgctggaggagcaagtccgtaagctgaagcagaaggagatgagtctgcgcaagagcaacgaagatttgcgtgaaaagtgcaagaagcagccgcctgtgccgatggcttcggcgccgcctcgtgcgccggcagtcgacaacgtggaggacggtcaccgggagccgaaggacgacgggatggacgtggagacggagctgtacataggattgcccggcagagactaccgctcaagcaaagacaaggctgcagtggcggtcaggtcaggctagcagctacctcagccacgcacaggcccaatcaacgcaagctagctagctgagaataatcttttagatctctggtagtgtggagatcgagatgcaagccaagcaatgtgatatcgcgttgtgtgttaccaacctgtcagtctgtgtatcatcccgtcccgtccgtcagagtctcagagaacgaacacttcttctccctgtagctagctgctcctgcttgtgtccagatcttctgttcgatc

SEQ ID NO: 154217 - DNA, 494 bp, Zea Mays
gcacaccgatggcggccgtccgcgtggggtgagtctcgatcggccagtcggcctccgcccgctttgcgtcgccgacgccggccgacctgccgtcgctccgatccccttcctcttcccctgccgcctccgcgccgcgctcgatgtcgctggtttttctcccctgtctgctagagcctagcctgctgcagggaggtctgcccggctggggctctcctcggacaccgtgcgggcagggggtggaccgggttggccatgcgatcgatcaggattaggattaggatcaggatcaggcaggtatgtttcaatttcaaagctcggcgaaaggacgttcaggtttgcatgcaaggtatatgtctatacattgatatgcatccgcaggtatccaatcggttttatgtcaagtttaataatatagctgatcacctaagaatctttacatctagagtcggagacacgattccgacacaaggagtacccaccaatagggattaaga

SEQ ID NO: 154218 - DNA, 1359 bp, Zea Mays
cgcgtcggggattgacctcgcctcctcttcctctctcaccggcaccgcccggcaacccggcttccaacggccgcgaccgaaacgggacccaccagacgcaattccccaacacggcaacacgtccgcctcgacgaatttcgatcgattccaacttgggatttccgccttccaatcgctccgtttccttcgtattctagaatctagcatttggtttgattccgccgcttggtccggccccgaggaggaggcaagggagggagcggtggccgcgcggccatggcgggctcgtctacggcggcgatggacgcagccgcggcctggtgggacgacgtgaacaactccacgctgtggcaggaccgcaccttccacgccctcgccgcgctatacggcatcgtcgcagtcgtagccctagtccaactgataagaatcgagtgccgggttcctgagtatgggtggacaacgcagaaggtgttccatttcctaaacgtcattgtcaatggcgtgaggtcaaccgagtttgtactgcggcgggatgtgcaacttgtacaccctgagatacttcaacacgtgcttattgatttgccgggcctagcgttcttcacgacctacgctctgctagtgctcttctgggctgagatttactatcaggcacgtgcagtgtcgactgatgggctccggccagctttctacacaatcaatggaatgatatatgtcattcagatactactgtggctgctcatgtggtggaaaccagttcaagccgtggtaattttgtcaaagatgttctttgcagctacatccttgttcgctgcctttggtttccttctctatggagggaggttattcctgatgttgcagcgtttccctgttgagtcaaaaggccgccggaaaaaattgaatgaggttggctatgtgaccaccatttgctttggttgcttcttgatcagatgcataatgatgtgcttgagtgcttttaacaaagatgctgatcttgatgttctgaaccatccaatcctgaacttcttttactacctgctggccgagattgcaccctcatctttggtgctgttcatcttaaggaaactgccgccaaggcgtgggattgcacaataccatccaatccattagtttgtcttcaacaacatcctctatatcctttttttttacagtttcttctaaaaaaatcacttcattctctgtagcagcgtcctctatacttaaatacctatattagagacatattttgctctagattttgtatgtatgtatgtatttgttatactcaagtattttatacatattttagttttatttaatatgttgtttaaaatattaaaatagatagagaagatgagagaa

SEQ ID NO: 154219 - DNA, 1345 bp, Zea Mays
cgtcggggattgacctcgcctcctcttcctctctcaccggcaccgcccggcaacccggcttccaacggccgcgaccgaaacgggacccaccagacgcaattccccaacacggcaacacgtccgcctcgacgaatttcgatcgattccaacttgggatttccgccttccaatcgctccgtttccttcgtattctagaatctagcatttggtttgattccgccgcttggtccggccccgaggaggaggcaagggagggagcggtggccgcgcggccatggcgggctcgtctacggcggcgatggacgcagccgcggcctggtgggacgacgtgaacaactccacgctgtggcaggaccgcaccttccacgccctcgccgcgctatacggcatcgtcgcagtcgtagccctagtccaactgataagaatcgagtgccgggttcctgagtatgggtggacaacgcagaaggtgttccatttcctaaacgtcattgtcaatggcgtgaggtcaaccgagtttgtactgcggcgggatgtgcaacttgtacaccctgagatacttcaacacgtgcttattgatttgccgggcctagcgttcttcacgacctacgctctgctagtgctcttctgggctgagatttactatcaggcacgtgcagtgtcgactgatgggctccggccagctttctacacaatcaatggaatgatatatgtcattcagatactactgtggctgctcatgtggtggaaaccagttcaagccgtggtaattttgtcaaagatgttctttgcagctacatccttgttcgctgcctttggtttccttctctatggagggaggttattcctgatgttgcagcgtttccctgttgagtcaaaaggccgccggaaaaaattgaatgaggttggctatgtgaccaccatttgctttggttgcttcttgatcagatgcataatgatgtgcttgagtgcttttaacaaagatgctgatcttgatgttctgaaccatccaatcctgaacttcttttactacctgctggccgagattgcaccctcatctttggtgctgttcatcttaaggaaactgccgccaaggcgtgggattgcacaataccatccaatccattagtttgtcttcaacaacatcctctatatcctttttttttacagtatttagagaacgctttagagcaactgctgaaggtatatgggagatagttgtttatagcttcttgcgggagatagtatgtctggcaaatataacttgttaaaaatgtaacctcagggtttgttgtaatcttaactgtcaccaatataacatgtttcacgaattgatttttgcggctgt

SEQ ID NO: 154220 - DNA, 861 bp, Zea Mays
catttaagaaaatatacgatgaatttgaggattaacttttatgaatctttacaagctcaatgttataaacaagaatacatgtatagtgcattatatatcctatttattcgcaatcaaagaaaaacgaccaaaaaactgattaccgaataaataacgtttccgaccgttttcatccctatccagaaactacagttgtaaccttagcttcttgtatccaccatttgacaggaaaaataaattgtgtgttaagttatttagaacaaattatgctgcagcctatgatttttattttgtgtacttatttatttcttctacactaaaatagtgctacttttcagctacatccttgttcgctgcctttggtttccttctctatggagggaggttattcctgatgttgcagcgtttccctgttgagtcaaaaggccgccggaaaaaattgaatgaggttggctatgtgaccaccatttgctttggttgcttcttgatcagatgcataatgatgtgcttgagtgcttttaacaaagatgctgatcttgatgttctgaaccatccaatcctgaacttcttttactacctgctggccgagattgcaccctcatctttggtgctgttcatcttaaggaaactgccgccaaggcgtgggattgcacaataccatccaatccattagtttgtcttcaacaacatcctctatatcctttttttttacagtttcttctaaaaaaatcacttcattctctgtagcagcgtcctctatacttaaatacctatattagagacatattttgctctagattttgtatgtatgtatgtatttgttatactcaagtattttatacatattttagttttatttaa

SEQ ID NO: 154221 - DNA, 332 bp, Zea Mays
gcaaacatcgcaagtccacggcccgcccccaatcggccaatcctcaccccgcatcttaaggttcctgtcgcctcagcggctgcctccagtcctccgccctcccgctccagcggggctcgccattgatggagtacgagcgcatccacgggccgctcccgcgccatcagctttccgtcgctggcggttgtaaggatgggtctcgattgggatgggtcgagcgttccagtgcacatttgactaaaggctgagtgagatcttcttgtcccttgcggtgttgtttcagctttttccggtctgaagtgggttgtcggttcaattcgccttctgtttca

SEQ ID NO: 154222 - DNA, 2212 bp, Zea Mays
gcaaacatcgcaagtccacggcccgcccccaatcggccaatcctcaccccgcatcttaaggttcctgtcgcctcagcggctgcctccagtcctccgccctcccgctccagcggggctcgccattgatggagtacgagcgcatccacgggccgctcccgcgccatcagtccgggggattctctccagctaagctgcgagcaatgcttcgcgggatagagaaacgccagcgcaacaacggcgaggactcgtctccggaggccaacgactccggcgagctcgacgaccggaggagcttggaatgctccacctccaccgagatgtcgagcaacagcggccacaggtcaagaaaccgtgccccggacgacgacagcttcgactcggagagcagctcgtcggggccgccgacggtgaagaggtcggccgcggtggccgcgttgctgccgcccttctctcggccaacgccgtccaagtgggacgacgccgagaagtggatctccagcccgacgtcaaaccgtactggccgtacggggcctaccgctggagctgtgccgaagaagtctgcattggccttccctgactatggaggccgcccgccagccgttgctaaggtggtagcggatgtgcctaccaacgctggaccagatggtctcgcccatcctgatttacttaagcctggacacaatgcttcagtagttgttgacggaacagcacctgcagttaggtctgtctgtatgagagacatgggaacagaaatgactccaattgcgagccaagagccttctcggaccgcgactcctataatcgcatctagtccaacctcctctcggacaccaaccccgcaacgcaccgcagaattcagtgtgagtaatatagatcctaaaaagatcgagatgcctgaagaggaggaggtacagatgagtacgagacaggaaattatggatcttggtgaaaggttagggaagaccactatagccgcatgggcaagcaaggaagagaaatctgccgcacgtttcacggataccacagcctacaaggctgccgatatcggtagggagaatcgagccgcagattggcaggagacggagaaggcgaagtatcttgcaaggtttcagagggaggaagcaaagatccaagcttgggaaaatctgcagaaagcgaaaattgaagctgagatgaaagggatagaggccaagatagagcggaaacgggcgcgcgagcaggacaggctcgccagcaagctggcagccgtaagccaccgagcggaggcgaagagggagaccgcggaggcgaggcggaaccaggaagccgcgaggacggaggagcaggcggcccggatccgatacaccgggcatacgccttcgtccttctcctgctggtgctggtgcccgtgacacccagcatggacagtggtagaaaaattccaacggttctatctttccccatgcatgaacatggagaaggaaaccttcccgttatcgcgtcgtcgtcactcacgcggttgcatggagtggactggggtagtagggtggcgccacctgtcctcgtccaccttccacccctctcgcccggggctataaatggttacgagatccggatagcgcgaacccacttggatccaaaccctgacgacggacggctcccccctcgcccccacgacaaattcctcccgttccgttcttcgtcgcagatacaccggccggcagcaaccaccctatggagtcgtcggcggcgatgacgatggaccaccaccgcgcggcgccgtcgctgtcgacggaagagaaacggcggatcgagcgggtggcccggtgcgtggcgcgggaccgggacggcggggacctcacggagaagctgctgctgcggctgctcggcctcacgcgcaacgcccgccgctggggcttcctcgcgccggaccacccgctccacccctactacctccagcacaaggtctccgagcgctgccggatcctccgcccgcgccacgccgccgccgaccggcggtgatcccatgcatatgcatgcggacgtgcagcggatcgaccattgataggactcgatcggccattaaaaaaaaactatgcgcgcaccacctggtctccttctcttttatgacatgagtaattggtaatccaacaatcatgcaacggattcggaaatacattgatgtgcctaattgcagcgtcaattatatgatagcagttggccattgatattt

SEQ ID NO: 154223 - DNA, 1437 bp, Zea Mays
gacggagccgccgtatcctgctcgcgaggcaacggaagggtacgtgatcctctgtctacatggaaggtgaggcagatcgaggggagtggctcgtggcagtcacctcgacggcgtcctcgccgtccaccgcggtgtcgtccaagcacggcggcggcggctacaggatcgtgggcgggcccaacggcaatgccgtcgcgcccgccaccaagtccaccatcgtcgagaccaccgtcaagaggacgtcgccgcggatggcggtgggccggatcaagctgctgcggaatcgcaaggaggtgcaggtacgccagatgcgtcgcgaggtcgcgcagctcctcgaggccaaccaggacatgaccgcgcgcatcaggaaccaatgtcagctgattatacttgttccatatttactcttgcatgcctgtctctgcaaacatgtgtatcttgctggaacggtcatccctagagcagtgcaccatatctttgaaatacttgcagcacggaaggctgattatagcattgaaggcaattcacagagtgggttccagattgttgggtttgaggtcgtgccttgcagcgtaagacatgatcctgagtccatgtccaagctcaagatgtatgacaagatttgtgtttggtgctggcaccacatcatagacatggctgagaaggaggaaacaaagggccgctgccctgcctgccgcacacgctatgacaaggatatgatcgtcaagatggccgccacttgtgacagggttatccagagaaatctggtgtacataattgggctacctgcgcatttatgcaatgaaagcgtacttgagcgcagggagtactttggtcagtatggggaagttttgaaggttttagtttcccgtctgactgggcctccctctcagcaggcatcagcaaacagcagtattagtgttttttcccttaaggacaggcctggtgcagtggtgagaggcctttccactgagccaaagggcctgggtttgacgcagcctctgcgcaaaaatgtagggttaaggattgcctcggttattacttccccagacccgactcatgcgggagccgtcagcactgggagatatacgtggagcgtcagaattatatgtgcatctacaagaacagttacaacaattctccatcaggttggtgttcatacatatcagatgtaaatatggggagacggtgcctcatcaatgacgagtaggttgattctcatctagcggcaccattgctcatcacaactgatttgcttgagcaacttaatgtcactctcaagaggaccctcctttcgaccgacaccctgaagcaccacacaagctttagaaagtcggaattgtactccgtatacataaattaccatgatattatatgttcatgtaattctatgttgattctttagaaataatatatatgatattgtaatgtgtgttc

SEQ ID NO: 154224 - DNA, 1178 bp, Zea Mays
actgtgtccggtcccggatgccgatccgcttctatccctgcggccctccctgcccatctcccgatttccccgcgtgcgctctctctctccgtcggcgacgagcctgggcgaccagcgccgccgcccctagcccaggtctccatcggacgcttcgccaggtcttgtttagacccaccgccggcaacgagcaactcttgcactcttttgatttcagttatcggatcccgcatcgtggaatgcttgccaaagggaggaaggtagctggaaggcgtgaagaaatgtctgcaaattatgcgtttggaccacaggatgatgatgcgattattaaacacaggcttctgactaggacaacgaccaccaggggtgaaccgccactaaagaagcttcagaagaagttcatgtcctttgcaactgagatcgagaaggatgcagataacataagtgactgtgaaagactgtacaaggcctttctacatgaaattaacacctttgagctacctcttctgaaaagcaaggctgtggttgatgcaaacattagggagaaagaaagctttaatgagctgcaggttgagattgagcggcagatcttgcatgctaagactgatattgaggaccttaagaagcaacttgagcagagcaagattgagaggcagcacaaagaagagtgtgaagccatccggaagctgattagtttgcagcctccacggtcagaaactgaaaaactcattgcagaccttgagaaggagataactgatttgaaggcggagaatgtagcatgcataaggactttggaactgaggaagaagcagtttgcccttcttctacatgtggttgaggaattgcagatctcgattgaagatgagcagaagagtatagcagatgagctgagagctattgctggagagcagaagatgagcatggaagaagggagcgtcggtgcttcagattccatggttgttgactgatcgagatacattcacatatgttgcagacctgcttgccaaaatccatcacatggtttttggacaatatggcgatttggtagatgtcttttgcggtgtctttgtacctcatgtaaattgaactgtatgctagtatgaagtgaaattgaagtacacgttgttgtgtaacaaagtcagttcttattgatgaattcagtcaatatatgttacttcaca

SEQ ID NO: 154225 - DNA, 1167 bp, Zea Mays
actgtgtccggtcccggatgccgatccgcttctatccctgcggccctccctgcccatctcccgatttccccgcgtgcgctctctctctccgtcggcgacgagcctgggcgaccagcgccgccgcccctagcccaggtctccatcggacgcttcgccaggtcttgtttagacccaccgccggcaacgagcaactcttgttatcggatcccgcatcgtggaatgcttgccaaagggaggaaggtagctggaaggcgtgaagaaatgtctgcaaattatgcgtttggaccacaggatgatgatgcgattattaaacacaggcttctgactaggacaacgaccaccaggggtgaaccgccactaaagaagcttcagaagaagttcatgtcctttgcaactgagatcgagaaggatgcagataacataagtgactgtgaaagactgtacaaggcctttctacatgaaattaacacctttgagctacctcttctgaaaagcaaggctgtggttgatgcaaacattagggagaaagaaagctttaatgagctgcaggttgagattgagcggcagatcttgcatgctaagactgatattgaggaccttaagaagcaacttgagcagagcaagattgagaggcagcacaaagaagagtgtgaagccatccggaagctgattagtttgcagcctccacggtcagaaactgaaaaactcattgcagaccttgagaaggagataactgatttgaaggcggagaatgtagcatgcataaggactttggaactgaggaagaagcagtttgcccttcttctacatgtggttgaggaattgcagatctcgattgaagatgagcagaagagtatagcagatgagctgagagctattgctggagagcagaagatgagcatggaagaagggagcgtcggtgcttcagattccatggttgttgactgatcgagatacattcacatatgttgcagacctgcttgccaaaatccatcacatggtttttggacaatatggcgatttggtagatgtcttttgcggtgtctttgtacctcatgtaaattgaactgtatgctagtatgaagtgaaattgaagtacacgttgttgtgtaacaaagtcagttcttattgatgaattcagtcaatatatgttacttcacaagcata

SEQ ID NO: 154226 - DNA, 2812 bp, Zea Mays
gccaccactcaagatcctctcagccttatcccaaaccgcctcctctctgttgattccgtggagcaccagccaagctcctcccctgcggctcgcctccctcacggcgccgcctgctccccattgccgacctccactcgagcacctgagcaagcgctcctgaggtcatcttccccatcttcctctagtgccggccgccaggtcgtcttccccatccctcccatggcgccctcacctctgctcctcccagcgccctggctctgttcaaccttcacagtgagctcgccctcagccatggcggatgatgcctccacctcccccttggtgctcgccgagctcgccctcagccctgccgcgcccctgctttctgttcccagtgcgccctctgttctgttccaaccgttctccacgccgtgttcccccatggctccccttgcctctccggtcagcactagcccgaacggtacagcagcatactggtgccaaacccgtgtccgcgacgctcgccaagtgctcgatgaaataccgcagtgagctccacctcgacctgtgcagccccaacccgcgacgtcgcaacacccttgccctccgtcgatgtcgcgcttcgcgcattgctcctcgacgaagagccagaaccgtggtagacatgcatgcgcaatccgaactaatttcacctggttgttcgctttatgtgattgtggtttgctctaattacgtgtggtcgatggcgtgaatatgtgtgtgaaaatgtaagcacatactctcatgcttaacaaaacaatccaaaatattaccatatatggttgcaacagcagagtgccaaacaatggaaatcaaaatcgacttacttcttcgtgtgcttcatccactgtggtgctacatgactcttgttttcattcttctcctcgctagcgtctacatctggcctcacctcccaggaaactccagatggaactgcgttgcatggctccatggagtccactgaacatggttcttgtaccttacccagttcaatagttctcttctgctgagattaatttgtggcgttatcatgcataaattatatttaattgaacaattgcaaaataaggttagagaacatcgttaatacaagcaacacatactctatcagaagcttcagttattacagtaggagctgcagtttggataatgttcttggtcccctcagattcatcatcattactatctgtgtgattcaagtctccagatgcggctttgcataaagtatcaagcttctcctgcaagcaaatcagttctcgagcaacagacttcctagcttcccttacacttggatgcaagccctgtgtcaatattaccaaggtcttagaaacaacccagcaagtaccaaaaaagtttaccaaataagaaataagtctatgccactcagagaaaaacaggctggaatgaaaaatatacctggattgcgtcaagcttcaggagtaaattcataatagtttcacctatggccacttgctctttttgtgttggcttactgcaagaatctaaaaggcattgaatctgcttcctcacaacttgcatctgttcatgcacatgcttgatcttccagagcttatccaaaggttgccattttcgaacatcataccctctgtaggcagactgaataccaactgcaacatctgattctgacaaattaactccatatgttctggcatcatctttcgcagtttcactttcaatcactgtcccatcttcattttttcttttgtcacatccattcaagcttcctgcaccagcatcttcttgcacatgatcttcccctatgctcttcagggctgcattttcttgatcaccaactgtagtgctagcagcttggaccttttggccatctttacttgtgggagcttcttcctcctgcagatgttcaacaaaagcagcttccactgtttcatttctgaacccaacttccttcttcatttcataaggcgatttttctttcacttcagacacagtgatatccttacttgtactagactgtttaggctccaggatacttcttgtttgggtgttgaattatactgtcactatcagcattcttgtagataatctttttatcttgcttgtgttaaaatttcatgaccataggtgtagtagtttatgagttatgatttttccaagtccagtttcagaatctgtccaaattctgtacaggtttcgaaaattggattgtttggctaaactaaactgagaatcagcccttagtaattatagaaaaattgtagtatttttcttaagctttccaacaaattttggagcaccatttttggtggtctagagatcaagttacatctgtttgaactagagagtctgaatctgtccaaatttggacagcgaagtctgtttgtagtaactgactttgatatgtattgtattaaccagagatgtttataaatgaattgtagacaattctattagctttctaaaaagtctaggatcacctgatttcgatgcctgaaactccagttatgatttttttgaagtgagtagccgaattctgtccaaatctggacagaattaaagtttagcactgtttgacctttcaaactgtcgaatcatgttgtgatgataatataagagttatagaggactttctaagctttccaaaaagtcctagtttactatttttggatcattggatgcatattttgtgagctatgaataaaacaattaaccgatgcggctgtgctgctgtctaaaaattctgcaagtattaaattgttggcttgaagttactattgtttggctaagtaagtttagctgattcttaattggtgaa

SEQ ID NO: 154227 - DNA, 113 bp, Zea Mays
ccctcctgttaagactgcagcttagtattctgtttgaaattggtcgtctcatttcaccaggactcgctcttaaaagaggacttgccattatatgtcctactcagttagggagg

SEQ ID NO: 154228 - DNA, 765 bp, Zea Mays
gtccagtgacacgaccttgacagtcaagatgttcttttaggagatggtcccagttaccttacatggttctgttggacacaatgaagccatccagatatgctattaaaaatcctgctagtcattatggctttaaactgtaccacgtatgttctattttcagctaagcagagcatgttctatttacagcaggccagcagacaccaggcagtaaggtgatgtatgagtcaattatcaggtgacaaaatggttatgtttaatcatgcatgttatcttcctggctctctatgtttttttgaggcattcaactacttgtagtaccagtgcatcactgatatgtatatatgtgttgatgttcgtcatccaagatcaaatacatcctgataggtcattacttgctaatgtgcatctgattttgctgttgccaagatggaaaatttttttggcagctttctcagtgaatcagtatcaccgcagaacctttttggacacccaaatgtcgaaagatgcccattcctgaggaatatcaatggagctacaaccttttcccctcacttctgctttgccagtagctgctcaaagaggcaagggtccaatttttgaggaagggtcaggctttgagtcagcattcaagcttttctatggccgagatggaatagttcccctttgagaaagatcatatgtatctgatgaaaaccacaatttagagtacacttatgtatgagttatttgacaatgcttatttatgagatattgaatgttatttat

SEQ ID NO: 154229 - DNA, 192 bp, Zea Mays
acatactccctccggtgcagtaaaagaagtcatcctgcgcgtgaccgagcgtgcacaaaaagaagtcatagcgcgcgtgggtctgggatttggacgttgttgcccctagtaattgcacaaaaaaagatgcatttaagaggaatcgaacttgagacctctagtctagaatgccttggagctgctgcagcaacc

SEQ ID NO: 154230 - DNA, 345 bp, Zea Mays
atggccaacggaaaccacggcgacggctacaaacaccggcacatgagatggaagacttcaggttctgatcttaaggccagggtcactacagtgaacatcatagttaactctggaatgaaactccacttcaagcttcagcctcaacgaacctatgttaggacaaggaagcgttcaataaatgcagaagctcaagatattggagaagatgacagtgatgctcaagaagatggtgctgctgcagtacaagcagaagtagaacaacaacaaacacaagaaacagctggagatacggatgaagatggtgttgctgctgatgcattttgcttggatgctgatctgctctag

SEQ ID NO: 154231 - DNA, 2247 bp, Zea Mays
atgaggacccaaagaaacctccttcccctcctcctgctgctgtccgccgcgctgctcgccgtcgccgacgcgcaggagcgcaagaactacgtggttcatctcgagccgagggacgacgacggcggcggcgggtcggtggaggagtggcaccggtctttcttgccggaggccacgctggactcggcggcggatgacgggcccaggatcatccactcgtacagccacgtgctgacggggttcgccgccagcctcactgacgcggaggcgcagacgctgaggcgcaaggaggggtgcttgcggctgtacccggaggagttcctgccgctggctaccacccactcgccgggcttcctcggcctccacatgggcaagcacggcttctggggccgatccgggttcggccgcggcgtcgtgattgggctcctcgacaccggcatcctgcccacccacccgtccttcggcgacgcggggatgccaccgccgcccaagaagtggaagggcgcctgccagttcaggtccgtcgcccgcggcgggtgcagcaacaaggtcatcggcgcgcgcgcgttcgggagcgcggccatcaacgacacggcgccgcccgtcgacgacgcgggccacggcacgcacacggccagcaccgcggcgggcaacttcgtgcagaacgccggcgtgcggggcaacgcgcacggcagggcgtccgggatggcgccgcacgcgcacctggccatctacaaggtgtgcacgcggagccggtgctccatcttggacatcgtcgccggcctggacgccgccgtcagggacggcgtggacgtgctctccttctccatcggcgccaccgacggcgcgcagttcaactacgacctcatcgccatcgccacgttcaaggccatggagcacggcatcttcgtcagcgccgcggccggcaacgacggccccgccgcggggtccatcaccaacggcgcgccgtggatgctcacggtcgcggcgggcaccacggaccgcgcgatacgcacaaccgtgaggctcggcaacgggcaggagttccacggcgagtcgctgttccagccccggaacaacaccgcggggcgcccgctgccgctcgtcttcccggagtcccgcgactgcagcgcgctggtggaggccgaggtgaggggcaaggtggtgctgtgcgagagccgctccatcagcgagcacgtcgagcaggggcagacggtggccgcgtacggcggcgccggcatggtcctgatgaacaaggcggcggaggggtacaccaccttcgccgacgcgcacgtgctggccgcgtcgcacgtgagccacgccgcggggtcgaggatcgcggcgtacgccaggtcggcgcccaggcccacggcgtccatcgcgttccggggcacggtgatggggtcgtccccggcgccgtccgtggccttcttctcgtcgcgcgggcccaacagggcgagcccgggcatcctgaagccggacatcacggggcccggcatgaacatcctggcggcgtgggcgcccagcgagatgcacccggagttcgcggacgacgtgagcctgcccttcttcgtggagtccgggacgtccatgtcgacgccgcacctgagcgggatcgcggccgtcatcaagagcctgcacccgagctggtcccccgcggcggtgaagtcggcgatcatgacgtcgtcggacgcggcggaccacgcgggcgtgcccatcaaggacgagcagtaccggcgggcgagcttctacagcatgggcgccgggtacgtgaacccgtcccgcgccgtggacccggggctggtgtacgacctcggcgccggcgactacgtcgcctacctctgcggcctgggcatcggggacggcggcgtgaaggagataacggggcgccgcgtcgcctgcggcggcaagcggctgaaggccatcaccgaggcggagctcaactacccgtcgctggtggtgaagctgctgtcccgcccggtcaccgtccgccgcaccgtgaccaatgtcgggaaggccagctccgtgtacagggccgtggtggacatgcccagcagggccgtgtccgtggtggtgcggcccccgacgctgcggttcgacagggtgaacgagaagcggagcttcaccgtgacggtgcggtggagcgggccgccggccgtcggcggcgtcgagggcaacctgaagtgggtgtcgagggatcacgtagtccgcagcccgatcgtgataccgccggcgaaggccaccgcgtag

SEQ ID NO: 154232 - DNA, 1316 bp, Zea Mays
gcccaccacgggaaagggaaaatagcgcaggaacagtggagcacggggcccacgggcacaaatcacgatcggacggcgcgccgcactttgccggtgccctggaacccaatcagagcctgtgtggaaggatgccaaaaaacaggctccctgaaggaggcttctattaaacactgtatggtgccaaccgatggccagcctgctgacaaatcgtggtacgcgcacgagccgctgtacttgcaatggaaggactggaactgcaagagcgaatgcagataccactgtatgatggaaagggagggcgaaagagcaaagcttggccttcagcctgttaagtatcatggcaaatggcctttgaaacgcgcctctgtgtttcaggagcctttatctgcagctctctccgctcttactctcgttgtgcaatttaatgggtggctatcgttcttcctcttgctttattataagcttcctctacggccagaaactcacaagacatactacgaatacactggcctgtggcacatctatgggctccttgccatgaattcatggttctggagtgccatatatcacagttgtgacacaatttggacagaaaagctatatttttcatcagctgctgcctttctggggtactctctcattttggcgatactgcggacttcaagtttaagagacgaagcttctagagtcatggttgccgctcctattctggcatttgtgacaacccacattctgtacctcaacttctatgagcttgacaaaggcctaaacatgaaggtttgtactgtgataagcattgctcagtgtctcctgtgggcactgtgggctgtcatgagtgggcatcgttcgcggctcaagatcatatctgtcgccgtcggaggtgcggttgcagtacttgtggaagcctacgacattccaccgcgatggggatacgcagatggccgtgctatctgcctcgctgtggctatccccctgtcgtacctttggtggagctttgccaaggaggatgctgagatgcgaacatcagcaatcctaaagaagacacgataacgaggaaatgcgacatgccgcctgtgtgcacccacccagccattgtaaagataaaagtttcacttgtaatcttagcaactgaacacttggtaggctcgtgctcatcaactgcaatctcagaagattgttaccatgcgttagtgaatggccgcttatcataataatgtctgtgggcgcttttgttggctatttcttgtgagatcctgagcaaatttggtgtgcaattgttgtataaaacatgaagaaaaagatgaagttgaaacgca

SEQ ID NO: 154233 - DNA, 1668 bp, Zea Mays
acgaaccaagtccaaggcacgccaggcaaaagaacacgccgagcacgcacacccacacgcgagtccctttcccttcccttccaggctgcccgcccggctgcctgttgttatcgtcgtcgtcgtcgcatcccccaccccactccgcgtgtcgatctgctccccccaaaccacacggacgcacacacacggacgcacgcacgaatcaatcaggcaccacaccacccccttccctgcgtcccggagacagaaaagtctcctcccatctccgccctggccccctctcaaacatccccgcggcgatggatctccgtctcgcccactagcccgccagcgcgaccgtgggtgtgggtgggtacggggatgggactcctcgggcggaggccgtggctgctgctcctcgccctcgcttccgcggccgtcgccgtcgccgtcgccgtggaagcctccgagggcgacgctgatccgctctacagatctcccacgggggcagaaaacagagcctgtgtggaaggatgccaaaaaacaggctccctgaaggaggcttctattaaacactgtatggtgccaaccgatggccagcctgctgacaaatcgtggtacgcgcacgagccgctgtacttgcaatggaaggactggaactgcaagagcgaatgcagataccactgtatgatggaaagggagggcgaaagagcaaagcttggccttcagcctgttaagtatcatggcaaatggcctttgaaacgcgcctctgtgtttcaggagcctttatctgcagctctctccgctcttactctcgttgtgcaatttaatgggtggctatcgttcttcctcttgctttattataagcttcctctacggccagaaactcacaagacatactacgaatacactggcctgtggcacatctatgggctccttgccatgaattcatggttctggagtgccatatatcacagttgtgacacaatttggacagaaaagctatatttttcatcagctgctgcctttctggggtactctctcattttggcgatactgcggacttcaagtttaagagacgaagcttctagagtcatggttgccgctcctattctggcatttgtgacaacccacattctgtacctcaacttctatgagcttgacaaaggcctaaacatgaaggtttgtactgtgataagcattgctcagtgtctcctgtgggcactgtgggctgtcatgagtgggcatcgttcgcggctcaagatcatatctgtcgccgtcggaggtgcggttgcagtacttgtggaagcctacgacattccaccgcgatggggatacgcagatggccgtgctatctgcctcgctgtggctatccccctgtcgtacctttggtggagctttgccaaggaggatgctgagatgcgaacatcagcaatcctaaagaagacacgataacgaggaaatgcgacatgccgcctgtgtgcacccacccagccattgtaaagataaaagtttcacttgtaatcttaggtatgtgaattatcgtattatttttgttcgacgatgtttctttcttggctcacttcagaaggccatattgtttaatgggcccatttctattctttaatttatacagcaactgaacacttggtaggctcgtgctcatcaactgcaatctcagaagattgt

SEQ ID NO: 154234 - DNA, 1792 bp, Zea Mays
acgaaccaagtccaaggcacgccaggcaaaagaacacgccgagcacgcacacccacacgcgagtccctttcccttcccttccaggctgcccgcccggctgcctgttgttatcgtcgtcgtcgtcgcatcccccaccccactccgcgtgtcgatctgctccccccaaaccacacggacgcacacacacggacgcacgcacgaatcaatcaggcaccacaccacccccttccctgcgtcccggagacagaaaagtctcctcccatctccgccctggccccctctcaaacatccccgcggcgatggatctccgtctcgcccactagcccgccagcgcgaccgtgggtgtgggtgggtacggggatgggactcctcgggcggaggccgtggctgctgctcctcgccctcgcttccgcggccgtcgccgtcgccgtcgccgtggaagcctccgagggcgacgctgatccgctctacagagcctgtgtggaaggatgccaaaaaacaggctccctgaaggaggcttctattaaacactgtatggtgccaaccgatggccagcctgctgacaaatcgtggtacgcgcacgagccgctgtacttgcaatggaaggactggaactgcaagagcgaatgcagataccactgtatgatggaaagggagggcgaaagagcaaagcttggccttcagcctgttaagtatcatggcaaatggcctttgaaacgcgcctctgtgtttcaggagcctttatctgcagctctctccgctcttactctcgttgtgcaatttaatgggtggctatcgttcttcctcttgctttattataagcttcctctacggccagaaactcacaagacatactacgaatacactggcctgtggcacatctatgggctccttgccatgaattcatggttctggagtgccatatatcacagttgtgacacaatttggacagaaaagctatatttttcatcagctgctgcctttctggggtactctctcattttggcgatactgcggacttcaagtttaagagacgaagcttctagagtcatggttgccgctcctattctggcatttgtgacaacccacattctgtacctcaacttctatgagcttgacaaaggcctaaacatgaaggtttgtactgtgataagcattgctcagtgtctcctgtgggcactgtgggctgtcatgagtgggcatcgttcgcggctcaagatcatatctgtcgccgtcggaggtgcggttgcagtacttgtggaagcctacgacattccaccgcgatggggatacgcagatggccgtgctatctgcctcgctgtggctatccccctgtcgtacctttggtggagctttgccaaggaggatgctgagatgcgaacatcagcaatcctaaagaagacacgataacgaggaaatgcgacatgccgcctgtgtgcacccacccagccattgtaaagataaaagtttcacttgtaatcttaggtatgtgaattatcgtattatttttgttcgacgatgtttctttcttggctcacttcagaaggccatattgtttaatgggcccatttctattctttaatttatacagcaactgaacacttggtaggctcgtgctcatcaactgcaatctcagaagattgttaccatgcgttagtgaatggccgcttatcataataatgtctgtgggcgcttttgttggctatttcttgtgagatcctgagcaaatttggtgtgcaattgttgtataaaacatgaagaaaaagatgaagttgaaacgcatcgcacgctt

SEQ ID NO: 154235 - DNA, 962 bp, Zea Mays
aataacgtaataatggcaaaatagcaaatgcccctatcaccgcctccgacccatggacgtcgagggcgaggtccccgccgccgctgcagcggcgatggcgaacggcctgggcggcgccgatgaggcctctccggcgccggtctcgcccgagcagctcgacgtggaggcgtacgcggcgcagtactcggggcggacccgcctcgcccgaggcgtcttcgtcgcggaccggtgcggggtggaggcgatacagctcgaggcgctgcggatggcgtacgacgagatcaagcgcggggaggacgtgcagctcgaccgcgacgtcgccgccaagatcggcggccgcctcggcccgcgctacggcctcgaccaggcgtgggtcgacaccatcacccgccgcgccgatcagcgcaatgagaagctcgagaacgagctcaacggatacagaactaacttaatcaaagagagcatcagaatgggctacaatgacattggcgatttcttctatgcccatggccaactttcaaaagctacatcaggactcgggactattgcaccacttccaaacatatagttcagatgtgtatgaatgtgattcaggttagcattgagctggggcaatatgcacacatgtttcaaactatgtcagcaaagcagagcaaaccccggactctctggatcctatcattgttgcaaagctgaaagcagctgcaggcttggccaacatggaaacaaagaaatacaaacttgctgcacgcaaggttagtcattaattcactacacctttaaagcacgggtttcttcatgcgtctcctccacctgaaatagcgagtggtttctaccactacaacgtgtctttttatgttgtattaagaagagatattgtgtatgtgtgtgtatatatacacactaataattggaaaacaaaaaatcgtgtttgaataaatatctcatttaatcaaggtcta

SEQ ID NO: 154236 - DNA, 391 bp, Zea Mays
ttattcggtgtttctggtactattagtttatatgagtttacaatttcacattgtaatctgaatacgatcaagatacttagtttattttcctatgttgaaggtatacaaataccttccaagagtaccacccagtgcaggcaacgttctcggtcaaataaagcgccattaaggaatcacttgcataaattgttgccttcgaggtgccatacttgataaagaatggaactggcaaagcttttggatcgtgtgccaatacctgtgaaagagggcttggaggaacccagtgcaaagatcaatggtctgctgcaagcgtatatttctaggttgaaactagaaggcctttctcttagttctgacatcgtctacattagacagtcagtggcgggcttgg

SEQ ID NO: 154237 - DNA, 262 bp, Zea Mays
caagatgtggcggtctatggtgccctttgtgcacttgcttcttttgaccgttcagacctgaagaacaaagtcatcgacaatatcaacttccgtaactttctagagctggtgcctgaagtaagggagctggttaatgattttaatgcaagtcgctatggatcttgcttgggtcatctggagaagctaaagcctaacctgctcctggatatccatttgcacgagcatgtagagagtctgtatatggatattcgccacaaagcga

SEQ ID NO: 154238 - DNA, 833 bp, Zea Mays
atggagtatcctcgtggtggtgcctcgctctcggcctttagggcctgtttgggacagctgctgcttgttgaaaaagcagcttatctgataagctgtatcctgcacagacttaactgttgtccacgttcatcaacgactaatcagccgcaatcctccctttcaactgaaagaccccgtttcgcaagacgcttggagcagacttcgtcacatgctaactcgcagcggaagaagaaggccaccgcgacggcggccgccgcctcctccaagcgggagagggagagggagcgggagcggaacaaggaggcggacgaggtcaccgtggagctccgcgcggtggggttcggcaaggaggtggtgctgaagcagcggcggcggatgcggcggaggcgccgcctgggcgaggaggagcgcgcggccatcctgctcatggcgctctcctccggcgtcgtgtacgcctgacttggctagcaatcgcgccggcccccgagacgccgctcccaaaggcggcgaaaggagagggggcccgattcactggacgtgcggcatgatctgagccccagacagatccgtccgtctggatctatgctaagttttcccggctaagtagtagctcgtcggttcgaacaaggcgagttaataatccgtgtccgtgctaggctagctgctctgttccccctcccattgcttgctgtgttcttgccaccgcctcctctagttgtaatcctgccgctagtagtgtgctagtagtagctgtcctgctgtaacctctcttgcaatgtaaggagagattatatggttggtcattcttgcaatcctaacgctagtcctgtgct

SEQ ID NO: 154239 - DNA, 1373 bp, Zea Mays
aatcccatggtttttttttttccactgctgcttccagtttagcgtccgactgctcgctccctgcccctccctctacctctctccctagggtttctaccacgcgcccgcttccgactagcagcgctagcgtcgcctaactccgaccgaggggacaacgagggttttgggacggacggagggagatttgaaggaggcagcggagggccggagaccagaccatgaggccggtgttctgcggcaacttcgaccacgacacccgccagtacgacctcgagcgcctcttctccaagtacgggcccatcagccggatcgacatgaagttaggctatgctttcatttactttgaagatgagcgtgacgcagaggatgctataaggcgtctcgacaatgtgtcttttggttacaaccggcgcaggctttctgtggaatggtctaggcaagttgaaccggtgccaaagagccgtgataggcctactggggatgtaaagccaacgagaaccctctttgttatcaattttgaccccatacgcactaaggttcaagatattgagaagcatttcgaaccgtatggcaagattgccaacattcgcattcgaaggaactttgcatttgtacaatatgagacacaagaggaagctagtgccgctgttaagaacactgacaagagcaccatattggacagggtagtgaccgttgaatatgccttccgggatgatgacggcgatagagatgaccgatacgacatccccaaacaaggtgcttatgacaggcgtggtggtagcccctacatgcgctcacctagcccaaggtaccgaagggactacgttccagattatggtcggcgtggacgttatcctggctatggtcgccgtgatggagcaatgtatgaaaggcgaagccctgtatatgatcgctacggcgggggcagaagccccgcttatgatcgctatgacaggaggagaagccccggttatgatcaatactagtccggtcgattctgaggaacccagtaaggaagtagtttccaaggaagaggtggcgagcaacaacatgatttttgccacgccaagtatacctggaggagccgtggtgttccaagtatgtctgagtgctgtcatggtaacgcgatgctggttccctggttgttgattggaacgaatcctaagcgtctgaaagagattggtttgcatggattgcttgccgttgccaccttgcctgttttgaagtgtaacctttgctggtgaatgtaatggctgtcgactaacttgtacaccgtacctttgcgtgcccatttttttaggcgggtgaacttttactcgttgcctgttttgatgcgcaaactgccagcaagcacggagagttcagtgcgcaga

SEQ ID NO: 154240 - DNA, 1415 bp, Zea Mays
ccatggtttttttttttccactgctgcttccagtttagcgtccgactgctcgctccctgcccctccctctacctctctccctagggtttctaccacgcgcccgcttccgactagcaggttggtgctctccattcctctccagtgcaagctattagtcctctcaatcgatctattacacggggcccgcttttttttccagcgctagcgtcgcctaactccgaccgaggggacaacgagggttttgggacggacggagggagatttgaaggaggcagcggagggccggagaccagaccatgaggccggtgttctgcggcaacttcgaccacgacacccgccagtacgacctcgagcgcctcttctccaagtacgggcccatcagccggatcgacatgaagttaggctatgctttcatttactttgaagatgagcgtgacgcagaggatgctataaggcgtctcgacaatgtgtcttttggttacaaccggcgcaggctttctgtggaatggtctaggcaagttgaaccggtgccaaagagccgtgataggcctactggggatgtaaagccaacgagaaccctctttgttatcaattttgaccccatacgcactaaggttcaagatattgagaagcatttcgaaccgtatggcaagattgccaacattcgcattcgaaggaactttgcatttgtacaatatgagacacaagaggaagctagtgccgctgttaagaacactgacaagagcaccatattggacagggtagtgaccgttgaatatgccttccgggatgatgacggcgatagagatgaccgatacgacatccccaaacaaggtgcttatgacaggcgtggtggtagcccctacatgcgctcacctagcccaaggtaccgaagggactacgttccagattatggtcggcgtggacgttatcctggctatggtcgccgtgatggagcaatgtatgaaaggcgaagccctgtatatgatcgctacggcgggggcagaagccccgcttatgatcgctatgacaggaggagaagccccggttatgatcaatactagtccggtcgattctgaggaacccagtaaggaagtagtttccaaggaagaggtggcgagcaacaacatgatttttgccacgccaagtatacctggaggagccgtggtgttccaagtatgtctgagtgctgtcatggtaacgcgatgctggttccctggttgttgattggaacgaatcctaagcgtctgaaagagattggtttgcatggattgcttgccgttgccaccttgcctgttttgaagtgtaacctttgctggtgaatgtaatggctgtcgactaacttgtacaccgtacctttgcgtgcccatttttttaggcgggtgaacttttactcgttgcctgttttgatgcgc

SEQ ID NO: 154241 - DNA, 938 bp, Zea Mays
gcccgcttccgactagcagcgctagcgtcgcctaactccgaccgaggggacaacgagggttttgggacggacggagggagatttgaaggaggcagcggagggccggagaccagaccatgaggccggtgttctgcggcaacttcgaccacgacacccgccagtacgacctcgagcgcctcttctccaagtacgggcccatcagccggatcgacatgaagttaggctatgctttcatttactttgaagatgagcgtgacgcagaggatgctataaggcgtctcgacaatgtgtcttttggttacaaccggcgcaggctttctgtggaatggtctaggcaagttgaaccggtgccaaagagccgtgataggcctactggggatgtaaagccaacgagaaccctctttgttatcaattttgaccccatacgcactaaggttcaagatattgagaagcatttcgaaccgtatggcaagattgccaacattcgcattcgaaggaactttgcatttgtacaatatgagacacaagaggaagctagtgccgctgttaagaacactgacaagagcaccatattggacagggtagtgaccgttgaatatgccttccgggatgatgacggcgatagagatgaccgatacgacatccccaaacaaggtgcttatgacaggcgtggtggtagcccctacatgcgctcacctagcccaaggtaccgaagggactacgttccagattatggtcggcgtggacgttatcctggctatggtcgccgtgatggagcaatgtatgaaaggcgaagccctgtatatgatcgctacggcgggggcagaagccccgcttatgatcgctatgacaggaggagaagccccggttatgatcaatactaggtaagccccggttacatgctttacggccatagagttaatacactgaagtgcaaa

SEQ ID NO: 154242 - DNA, 1341 bp, Zea Mays
aaagcccgggccatagtctcgacccttcctccaagtcaagttgttggtcggttgcgccagaaagaaatatcagacgcgacgggggagttcttcgcaaatatatcccgcactggatacacgcggcgcggccaagcaagtaagcaacccaaaccctccctcccctcccattcgattcttgcctcccacgccgccgccggatcccgcgatggccgaccctcggctgtaccccacggagtccgggtccgacgaccggcgcgatgccgcctatcccggctccgagcgccgcctctacaacccgtaccaggacctcaacctcccctatcggcagctctacgaccttcccacctccccggagttcctcttccaggaggaggccgtcgcgcagcgccggtcctggggcgagaacctcacctactacaccggcgtgggatacctcggcggcgccggggccggggccgcgctggggctccgcgacgccgcccgaggcgccgagcctggggagcccgccaagatccgggccaaccgcgtcctcaactcctgcggcagctccggacgccgcgtcggtaacacgctcggggtcatcggcctcatgtacgccgggatcgagagcgccatggtcgccgcccgcgaccgcgacgactggatcaacagcgtcgtggccgggctaggcaccggcgcgctcttccgcgccgctaacgggccgcgctcggcggtcgtcgccggggccgttggtggggttcttgctggcgccgccgccgctgccaagcaggttgggaagagatacctccccgccctctaaatctgattgcggtacttgtctctgccctgccatgccgtgatcaagggaaatcatttcgtcgcgtggatgttatttcttcgttctcgttaattatttgggaagagtcatgttcttctcgacattcctatatattgttgacatccatatgctggtactatatatgtcaaagaacgatctgatctcaccagatcacgaaatttttggtccacattgcaatgtaacattagacgctagctggtatcgacacaataatactgctttttccattatgctggagaacccatgacattgtgaaatgtaatgctgagtgtagtgtagttttgctagattgtcgctgttttcctatatctctttaaagacgaaattcttcgcctgcccgatgtatgtaaaaaaagacatgccttgatctcagtgagatgttttatacgacaaatgttgtacttctcgagttcatgcatagtctggtattctctctgatccaaaggtcggccattttacttttgttctaaagttctctaactccgacttgagttttttttttg

SEQ ID NO: 154243 - DNA, 513 bp, Zea Mays
caggtccaagaacccggtctgccggagcacggcgttgcggacgctgcggaggtcgcggcccttgagcgtgcgcccggcgccctccagcacggacgacgaccgcgcgtggcgccgcgccgcgaccacgtgcggcggcaccacctcctcgccgtcctcctcgtcctcgtcggccctcctgccgcctggccacggcgccggcacgcgcaccggcgccgactgcctcggcgcggcgctcggcgccatcgccatcgccctccccggcacgggcacgggcaccccaccgccgcagtcttcggcgagcagcgacgacagcccgaagctgtacagcggcatggcgtgcgcgcgacgccgcctcgccggcggggcggcccaaccgtcctgctgccccccgcccgtcggccacaacacgtcgcgctcgtcgagctcgaatggggcggcggcgtcggactccggctgcttcagcaggcccaggaagcggagcgaccccgcgcccggcgccctcggcatcgccat

SEQ ID NO: 154244 - DNA, 1580 bp, Zea Mays
acacgaggctccagggcctccatcgccacaccggtgcgtgcgagcgcgattaccagaggcgggcggcagggacgatgctgctgcaaaggcgcggcggcctcctctgctgcgggtgcggcgccagcgccgtggccgtggccgtcagtggccgcgttccggaagacgacggcggtgccgtcgtcgatggccagccgcctgacgccaagagcgtgtctggtaccagtgtctccgctgccgtgacgaccgcaaacgcgaggcagctctcgtgggcgcaggtggaggccatgacgggaggcttcacgtcagccatcgtcggcgagggcggcttcagcaccgtttacctcgcccgcctcgctggctccctcgccgccgtgaaggtccatcgtagtagcgagcgtcttcatcgcgcgttccgccaggagctcgacgcgctcctccgcgttcgccatccccacatcgtccgcctcctcgccttctgcgaccagcgagacgaaggcgtgctggtgctagagttcgcgccgaacggcagcctgcacgagcagctccacggcggcggcgcgggcgcggcgccgatgccgtgggcgcggcgggtgccggtggcgctgcaggtggcccgcgccctggagtacctccacgagcggtgcgagccgcaggtggtgcacggcgacgtgaaggcgtcgaacgtgctgctggacgcgggcatgggcgccaggctgtgcgacttcgggtcggcgcgcgcggggttctcggcggccgtggccgttgccgctgcaggcccgcgcccgcgcgccgtgttcgggtccccgggctacgtcgacccgcactacctccgctccggcgtggtcaccaagaagagcgacgtgtacagcttcggcgtgctcctgctggagctgctcaccggcgtgcaggcgttccgcgacggccggctcctgacggcgtccgtggcgccgaggctcgccgccgccgcagccggcgacctcgtggaccggaggctggggtgccgatacgacgcccgcgaggcggcggccgtgctggcgctagcggccgcgtgcgtccgggacaaaccgggcctccggccgtcgatggccgacgtggtgcgggccctggagcagctgcagccgcagcacggccggagcttgttgggcgccggagggaagctgtagctgctgtcgtagacacgtggcgcgcattgttgtttgtggtggtcgtggggatgcgactgctcaactgaccacaccctccctctattggaattgggttggtgaggaacaggaggcgttgggatttgcgctttgggggtattggggtggggggtgatttgcttatcatctttagctgggatgatgggtcatcatgtcattagccaccaaatcaaaagtagagcaactgctgagataaaacgaacagcaggaggatggaagtatccgtcattatcaagtgtgtatacagtagtaactaaaatgtaaacagagttgcttctttttcgtctgtgttgcatgtatgatgtacctgtgtgtggtatgcacacatgtttagccaaaagaaaagaactgtgcatatacattatcattctatgaaaa

SEQ ID NO: 154245 - DNA, 3048 bp, Zea Mays
atgctgctgcaaaggcgcggcggcctcctctgctgcgggtgcggcgccagcgccgtggccgtggccgtcagtggccgcgttccggaagacgacggcggtgccgtcgtcgatggccagccgcctgacgccaagagcgtgtctggtaccagtgtctccgctgccgtgacgaccgcaaacgcgaggcagctctcgtgggcgcaggtggaggccatgacgggaggcttcacgtcagccatcgtcggcgagggcggcttcagcaccgtttacctcgcccgcctcgctggctccctcgccgccgtgaaggtccatcgtagtagcgagcgtcttcatcgcgcgttccgccaggagctcgacgcgctcctccgcgttcgccatccccacatcgtccgcctcctcgccttctgcgaccagcgagacgaaggcgtgctggtgctagagttcgcgccgaacggcagcctgcacgagcagctccacggcggcggcgcgggcgcggcgccgatgccgtgggcgcggcgggtgccggtggcgctgcaggtggcccgcgccctggagtacctccacgagcggtgcgagccgcaggtggtgcacggcgacgtgaaggcgtcgaacgtgctgctggacgcgggcatgggcgccaggctgtgcgacttcgggtcggcgcgcgcggggttctcggcggccgtggccgttgccgctgcaggcccgcgcccgcgcgccgtgttcgggtccccgggctacgtcgacccgcactacctccgctccggcgtgagtccagcagatagaagcagtcaaccagcagcagcccaagtcaagcctcctcgcgtgtccctcggctcccacgcccacaccgaaatttcccccacggagctcaactgccggtgccggcgcgcgacaggcggcacacacgcccgctcctcgcgtatggcgaccacgttgacgcccacgcagcgctatgcggcggggacgctcctggcgctggcgctccgccaggcgcagatccaccagtccgagcccctcggctccggccccgacgacgaggagcgcgccagcagcgccagcgggagctcctcctccaccatatccagcaccggctccgacactacctcgggcgccggcctctggacgcacgattcccgcggcctcctccgccccgtcttcaggtgccgtgtagctaacccggcgccggtgcccgcgtctcactcaccttcgatccgtgacttctgtgcttgtgatgtgctataggttcctggagatcgagcccaaggcatgggcggggatggaggagacggccgcgtcgccggacgccgccaagcatcacatcggtgcgtttataagcatactctttgaggaagacggcgagagctcttcagacaggctagagcaggagatcgcattggcgaaagcagttgatgtgatggtcatgagcttgggcagcgacactgcaccagatgagaatatcaaagacgagtttaaatactccacggcctgtacctatgcgaccttggagtctacggaggcaggctcatccgagaacttgcttggaatcgtcaagctgtccttggaaaatgttcctgtgaatgagcaccgcaagatggtgttgctgtatgcgcttctctctgcatgtatcgctgataagcctgtatcgcaagaggaagaggacaggaagtcgtctcacttcaggaagggctatgatgctcggcatcgtgttgctcttcggttgatagcagcatggcttgacgtcaagtggatcaaaatggaagctatggaggtgatggtcgcatgctctgccatggctgcggcaaaagaacaagaacaagagcgtgaaaatgcatcaccaagaagcaagtgggagaaatggaagcgtgggggaattattggtgccgctgccttgactggtggagcgttgctggctattactgggggtttagctgcaccagccattgctgcaggatttggtgctctagctccaacactgggcacacttgtccctttcataggggctagtggatttgctgctatggctgctgcggcaggatctgttgctggctctgtggcagttgctgcctcatttggagctgctggggctggcttgacgggtaccaaaatggcaagacgaattggtaaagtgaaagaatttgagttcaaacctattggtgataaccataatcagggtcgccttgctgttggcatcttggtttctggatttgcttttgatgaggaggatttctggaaaccttgggaaggatggaaggataacctagagaagtacatccttcaatgggagtccaagcacataattgcagtgagtacagcaatacaggattggctgacatcaaggcttgcaatggaattgatgaaacaaggtgctatgagaactgtcttaagtggccttcttgcagcatttgcttggcctgctacgttgcttgccgctacagattttattgatagtaaatggtctgttgctatcgacagatcagataaggcaggaaaaatgcttgcagaagtgcttcttaagggactgcaaggaaacaggcctgtgactcttgttgggttctcgcttggagcgcgagtcatattcaagtgcttacaggagctagctttatcaagcgacaatgagggacttgtcgagagggttgtactccttggtgcacccgtttcagtgaaaggtgagaggtgggagcctgccaggaagatggttgcagggagatttgtgaatgtgtactcgagagatgactggattctcggtgtaaccttccgagcaagcctgcttacccaaggactggctggcatccaggccattgatgtgcctggtgttgagaacgtggatgttaccgggcttgttgatggccattcttcgtacctgtcagctgcccagcagatcctggagcaccttgaactgaatacctactatcctgtttttgttccccttccggaggtcaacaaataacagatgtagataggttgacaatagcagagaaaagatgtaaatatcagggaggaatataccttcgaatttacacaaaaaatgttacagctgtctagatgatg

SEQ ID NO: 154246 - DNA, 2928 bp, Zea Mays
atgctgctgcaaaggcgcggcggcctcctctgctgcgggtgcggcgccagcgccgtggccgtggccgtcagtggccgcgttccggaagacgacggcggtgccgtcgtcgatggccagccgcctgacgccaagagcgtgtctggtaccagtgtctccgctgccgtgacgaccgcaaacgcgaggcagctctcgtgggcgcaggtggaggccatgacgggaggcttcacgtcagccatcgtcggcgagggcggcttcagcaccgtttacctcgcccgcctcgctggctccctcgccgccgtgaaggtccatcgtagtagcgagcgtcttcatcgcgcgttccgccaggagctcgacgcgctcctccgcgttcgccatccccacatcgtccgcctcctcgccttctgcgaccagcgagacgaaggcgtgctggtgctagagttcgcgccgaacggcagcctgcacgagcagctccacggcggcggcgcgggcgcggcgccgatgccgtgggcgcggcgggtgccggtggcgctgcaggtggcccgcgccctggagtacctccacgagcggtgcgagccgcaggtggtgcacggcgacgtgaaggcgtcgaacgtgctgctggacgcgggcatgggcgccaggctgtgcgacttcgggtcggcgcgcgcggggttctcggcggccgtggccgttgccgctgcaggcccgcgcccgcgcgccgtgttcgggtccccgggctacgtcgacccgcactacctccgctccggcgtgagtccagcagatagaagcagtcaaccagcagcagcccaagtcaagcctcctcgcgtgtccctcggctcccacgcccacaccgaaatttcccccacggagctcaactgccggtgccggcgcgcgacaggcggcacacacgcccgctcctcgcgtatggcgaccacgttgacgcccacgcagcgctatgcggcggggacgctcctggcgctggcgctccgccaggcgcagatccaccagtccgagcccctcggctccggccccgacgacgaggagcgcgccagcagcgccagcgggagctcctcctccaccatatccagcaccggctccgacactacctcgggcgccggcctctggacgcacgattcccgcggcctcctccgccccgtcttcaggttcctggagatcgagcccaaggcatgggcggggatggaggagacggccgcgtcgccggacgccgccaagcatcacatcggtgcgtttataagcatactctttgaggaagacggcgagagctcttcagacaggctagagcaggagatcgcattggctattactgggggtttagctgcaccagccattgctgcaggatttggtgctctagctccaacactgggcacacttgtccctttcataggggctagtggatttgctgctatggctgctgcggcaggatctgttgctggctctgtggcagttgctgcctcatttggaggttggtataaatgttcctttggaactcttatgatattatctggagctcttatttcttcattatatataacagtcaagatttgttttaagttagcaacggtcacctccattatttgtggtggttagtgtattgcttaggaaacctacacaattaatgaacatacaccactctgtataagcactggcacatttataaattactaaaagtgttcccaaatgcatttcttgtaaaagttaacttgtaatgcagtatccaaaaaagagatagaaagtggtgtacaaatgttgtacttagcttttaatgttcgttgaattgatttccgacaaattagctgctggggctggcttgacgggtaccaaaatggcaagacgaattggtaaagtgaaagaatttgagttcaaacctattggtgataaccataatcagggtgtgagtcccttttttctctctctctgacaaaaatgctactcacccattttggaatgaaattgatctcgtctttgtaaatgttgctaattcttcagcgccttgctgttggcatcttggtttctggatttgcttttgatgaggaggatttctggaaaccttgggaaggatggaaggataacctagagaagtacatccttcaatgggagtccaagcacataattgcagtgagtacagcaatacaggattggctgacatcaaggcttgcaatggaattgatgaaacaaggtgctatgagaactgtcttaagtggccttcttgcagcatttgcttggcctgctacgttgcttgccgctacagattttattgatagtaaatggtctgttgctatcgacagatcagataaggcaggaaaaatgcttgcagaagtgcttcttaagggactgcaaggaaacaggcctgtgactcttgttgggttctcgcttggagcgcgagtcatattcaagtgcttacaggagctagctttatcaagcgacaatgagggacttgtcgagagggttgtactccttggtgcacccgtttcagtgaaaggtgagaggtgggagcctgccaggaagatggttgcagggagatttgtgaatgtgtactcgagagatgactggattctcggtgtaaccttccgagcaagcctgcttacccaaggactggctggcatccaggccattgatgtgcctggtgttgagaacgtggatgttaccgggcttgttgatggccattcttcgtacctgtcagctgcccagcagatcctggagcaccttgaactgaatacctactatcctgtttttgttccccttccggaggtcaacaaataacagatgtagataggttgacaatagcagagaaaagatgtaaatatcagggaggaatataccttcgaatttacacaaaaaatgttacagctgtctagatgatgaatgctttgtagtttcttggtgactaatcctaatcgtacagtagctcta

SEQ ID NO: 154247 - DNA, 3336 bp, Zea Mays
atgctgctgcaaaggcgcggcggcctcctctgctgcgggtgcggcgccagcgccgtggccgtggccgtcagtggccgcgttccggaagacgacggcggtgccgtcgtcgatggccagccgcctgacgccaagagcgtgtctggtaccagtgtctccgctgccgtgacgaccgcaaacgcgaggcagctctcgtgggcgcaggtggaggccatgacgggaggcttcacgtcagccatcgtcggcgagggcggcttcagcaccgtttacctcgcccgcctcgctggctccctcgccgccgtgaaggtccatcgtagtagcgagcgtcttcatcgcgcgttccgccaggagctcgacgcgctcctccgcgttcgccatccccacatcgtccgcctcctcgccttctgcgaccagcgagacgaaggcgtgctggtgctagagttcgcgccgaacggcagcctgcacgagcagctccacggcggcggcgcgggcgcggcgccgatgccgtgggcgcggcgggtgccggtggcgctgcaggtggcccgcgccctggagtacctccacgagcggtgcgagccgcaggtggtgcacggcgacgtgaaggcgtcgaacgtgctgctggacgcgggcatgggcgccaggctgtgcgacttcgggtcggcgcgcgcggggttctcggcggccgtggccgttgccgctgcaggcccgcgcccgcgcgccgtgttcgggtccccgggctacgtcgacccgcactacctccgctccggcgtgagtccagcagatagaagcagtcaaccagcagcagcccaagtcaagcctcctcgcgtgtccctcggctcccacgcccacaccgaaatttcccccacggagctcaactgccggtgccggcgcgcgacaggcggcacacacgcccgctcctcgcgtatggcgaccacgttgacgcccacgcagcgctatgcggcggggacgctcctggcgctggcgctccgccaggcgcagatccaccagtccgagcccctcggctccggccccgacgacgaggagcgcgccagcagcgccagcgggagctcctcctccaccatatccagcaccggctccgacactacctcgggcgccggcctctggacgcacgattcccgcggcctcctccgccccgtcttcaggttcctggagatcgagcccaaggcatgggcggggatggaggagacggccgcgtcgccggacgccgccaagcatcacatcggtgcgtttataagcatactctttgaggaagacggcgagagctcttcagacaggctagagcaggagatcgcattggcgaaagcagttgatgtgatggtcatgagcttgggcagcgacactgcaccagatgagaatatcaaagacgagtttaaatactccacggcctgtacctatgcgaccttggagtctacggaggcaggctcatccgagaacttgcttggaatcgtcaagctgtccttggaaaatgttcctgtgaatgagcaccgcaagatggtgttgctgtatgcgcttctctctgcatgtatcgctgataagcctgtatcgcaagaggaagaggacaggaagtcgtctcacttcaggaagggctatgatgctcggcatcgtgttgctcttcggttgatagcagcatggcttgacgtcaagtggatcaaaatggaagctatggaggtgatggtcgcatgctctgccatggctgcggcaaaagaacaagaacaagagcgtgaaaatgcatcaccaagaagcaagtgggagaaatggaagcgtgggggaattattggtgccgctgccttgactggtggagcgttgctggctattactgggggtttagctgcaccagccattgctgcaggatttggtgctctagctccaacactgggcacacttgtccctttcataggggctagtggatttgctgctatggctgctgcggcaggatctgttgctggctctgtggcagttgctgcctcatttggagctgctggggctggcttgacgggtaccaaaatggcaagacgaattggtaaagtgaaagaatttgagttcaaacctattggtgataaccataatcagggtcgccttgctgttggcatcttggtttctggatttgcttttgatgaggaggatttctggaaaccttgggaaggatggaaggataacctagagaagtacatccttcaatgggagtccaagcacataattgcagtgagtacagcaatacaggattggctgacatcaaggcttgcaatggaattgatgaaacaaggtgctatgagaactgtcttaagtggccttcttgcagcatttgcttggcctgctacgttgcttgccgctacagattttattgatagtaaatggtctgttgctatcgacagatcagataaggcaggaaaaatgcttgcagaagtgcttcttaagggactgcaaggaaacaggcctgtgactcttgttgggttctcgcttggagcgcgagtcatattcaagtgcttacaggagctagctttatcaagcgacaatggtatctgttctttagttatagtaacctaaatttcatatgactttgctcttatgcttgatggaatgagtcagagggacttgtcgagagggttgtactccttggtgcacccgtttcagtgaaaggtgagaggtgggagcctgccaggaaggtacaacaataacttatcccttctccacttaaaatgcagagataccagtaatctccagctacaaatatgtcctgtgttttttacctgctcatatctcttaactagcctctgcttcactgcagatggttgcagggagatttgtgaatgtgtactcgagagatgactggattctcggtgtaaccttccgagcaagcctgcttacccaaggactggctggcatccaggccattgatgtgcctggtgttgagaacgtggatgttaccgggcttgttgatggccattcttcgtacctgtcagctgcccagcagatcctggagcaccttgaactgaatacctactatcctgtttttgttccccttccggaggtcaacaaataacagatgtagataggttgacaatagcagagaaaagatgtaaatatcagggaggaatataccttcgaatttacacaaaaaatgttacagctgtctagatgatgaatgctttgtagtttcttggtgactaatcctaatcgtacagtagctctagttacgtgtagatatctattgtgtacatagtaaaaacaaaacaataccgtctattgtgatcgcaagaaaagcttgaatctagaatagggaagtaagtacttccgtccaacaagagattaatctaataa

SEQ ID NO: 154248 - DNA, 3143 bp, Zea Mays
atgctgctgcaaaggcgcggcggcctcctctgctgcgggtgcggcgccagcgccgtggccgtggccgtcagtggccgcgttccggaagacgacggcggtgccgtcgtcgatggccagccgcctgacgccaagagcgtgtctggtaccagtgtctccgctgccgtgacgaccgcaaacgcgaggcagctctcgtgggcgcaggtggaggccatgacgggaggcttcacgtcagccatcgtcggcgagggcggcttcagcaccgtttacctcgcccgcctcgctggctccctcgccgccgtgaaggtccatcgtagtagcgagcgtcttcatcgcgcgttccgccaggagctcgacgcgctcctccgcgttcgccatccccacatcgtccgcctcctcgccttctgcgaccagcgagacgaaggcgtgctggtgctagagttcgcgccgaacggcagcctgcacgagcagctccacggcggcggcgcgggcgcggcgccgatgccgtgggcgcggcgggtgccggtggcgctgcaggtggcccgcgccctggagtacctccacgagcggtgcgagccgcaggtggtgcacggcgacgtgaaggcgtcgaacgtgctgctggacgcgggcatgggcgccaggctgtgcgacttcgggtcggcgcgcgcggggttctcggcggccgtggccgttgccgctgcaggcccgcgcccgcgcgccgtgttcgggtccccgggctacgtcgacccgcactacctccgctccggcgtgagtccagcagatagaagcagtcaaccagcagcagcccaagtcaagcctcctcgcgtgtccctcggctcccacgcccacaccgaaatttcccccacggagctcaactgccggtgccggcgcgcgacaggcggcacacacgcccgctcctcgcgtatggcgaccacgttgacgcccacgcagcgctatgcggcggggacgctcctggcgctggcgctccgccaggcgcagatccaccagtccgagcccctcggctccggccccgacgacgaggagcgcgccagcagcgccagcgggagctcctcctccaccatatccagcaccggctccgacactacctcgggcgccggcctctggacgcacgattcccgcggcctcctccgccccgtcttcaggttcctggagatcgagcccaaggcatgggcggggatggaggagacggccgcgtcgccggacgccgccaagcatcacatcggtgcgtttataagcatactctttgaggaagacggcgagagctcttcagacaggctagagcaggagatcgcattggcgaaagcagttgatgtgatggtcatgagcttgggcagcgacactgcaccagatgagaatatcaaagacgagtttaaatactccacggcctgtacctatgcgaccttggagtctacggaggcaggctcatccgagaacttgcttggaatcgtcaagctgtccttggaaaatgttcctgtgaatgagcaccgcaagatggtgttgctgtatgcgcttctctctgcatgtatcgctgataagcctgtatcgcaagaggaagaggacaggaagtcgtctcacttcaggaagggctatgatgctcggcatcgtgttgctcttcggttgatagcagcatggcttgacgtcaagtggatcaaaatggaagctatggaggtgatggtcgcatgctctgccatggctgcggcaaaagaacaagaacaagagcgtgaaaatgcatcaccaagaagcaagtgggagaaatggaagcgtgggggaattattggtgccgctgccttgactggtggagcgttgctggctattactgggggtttagctgcaccagccattgctgcaggatttggtgctctagctccaacactgggcacacttgtccctttcataggggctagtggatttgctgctatggctgctgcggcaggatctgttgctggctctgtggcagttgctgcctcatttggagctgctggggctggcttgacgggtaccaaaatggcaagacgaattggtaaagtgaaagaatttgagttcaaacctattggtgataaccataatcagggtcgccttgctgttggcatcttggtttctggatttgcttttgatgaggaggatttctggaaaccttgggaaggatggaaggataacctagagaagtacatccttcaatgggagtccaagcacataattgcagtgagtacagcaatacaggattggctgacatcaaggcttgcaatggaattgatgaaacaaggtgctatgagaactgtcttaagtggccttcttgcagcatttgcttggcctgctacgttgcttgccgctacagattttattgatagtaaatggtctgttgctatcgacagatcagataaggcaggaaaaatgcttgcagaagtgcttcttaagggactgcaaggaaacaggcctgtgactcttgttgggttctcgcttggagcgcgagtcatattcaagtgcttacaggagctagctttatcaagcgacaatgagggacttgtcgagagggttgtactccttggtgcacccgtttcagtgaaaggtgagaggtgggagcctgccaggaagatggttgcagggagatttgtgaatgtgtactcgagagatgactggattctcggtgtaaccttccgagcaagcctgcttacccaaggactggctggcatccaggccattgatgtgcctggtgttgagaacgtggatgttaccgggcttgttgatggccattcttcgtacctgtcagctgcccagcagatcctggagcaccttgaactgaatacctactatcctgtttttgttccccttccggaggtcaacaaataacagatgtagataggttgacaatagcagagaaaagatgtaaatatcagggaggaatataccttcgaatttacacaaaaaatgttacagctgtctagatgatgaatgctttgtagtttcttggtgactaatcctaatcgtacagtagctctagttacgtgtagatatctattgtgtacatagtaaaaacaaaacaataccgtctattgtgatcgcaagaaaagcttgaatctagaatagggaagtaagtacttccgtccaacaagagattaatctaataa

SEQ ID NO: 154249 - DNA, 3142 bp, Zea Mays
atgctgctgcaaaggcgcggcggcctcctctgctgcgggtgcggcgccagcgccgtggccgtggccgtcagtggccgcgttccggaagacgacggcggtgccgtcgtcgatggccagccgcctgacgccaagagcgtgtctggtaccagtgtctccgctgccgtgacgaccgcaaacgcgaggcagctctcgtgggcgcaggtggaggccatgacgggaggcttcacgtcagccatcgtcggcgagggcggcttcagcaccgtttacctcgcccgcctcgctggctccctcgccgccgtgaaggtccatcgtagtagcgagcgtcttcatcgcgcgttccgccaggagctcgacgcgctcctccgcgttcgccatccccacatcgtccgcctcctcgccttctgcgaccagcgagacgaaggcgtgctggtgctagagttcgcgccgaacggcagcctgcacgagcagctccacggcggcggcgcgggcgcggcgccgatgccgtgggcgcggcgggtgccggtggcgctgcaggtggcccgcgccctggagtacctccacgagcggtgcgagccgcaggtggtgcacggcgacgtgaaggcgtcgaacgtgctgctggacgcgggcatgggcgccaggctgtgcgacttcgggtcggcgcgcgcggggttctcggcggccgtggccgttgccgctgcaggcccgcgcccgcgcgccgtgttcgggtccccgggctacgtcgacccgcactacctccgctccggcgtgagtccagcagatagaagcagtcaaccagcagcagcccaagtcaagcctcctcgcgtgtccctcggctcccacgcccacaccgaaatttcccccacggagctcaactgccggtgccggcgcgcgacaggcggcacacacgcccgctcctcgcgtatggcgaccacgttgacgcccacgcagcgctatgcggcggggacgctcctggcgctggcgctccgccaggcgcagatccaccagtccgagcccctcggctccggccccgacgacgaggagcgcgccagcagcgccagcgggagctcctcctccaccatatccagcaccggctccgacactacctcgggcgccggcctctggacgcacgattcccgcggcctcctccgccccgtcttcaggttcctggagatcgagcccaaggcatgggcggggatggaggagacggccgcgtcgccggacgccgccaagcatcacatcggtgcgtttataagcatactctttgaggaagacggcgagagctcttcagacaggctagagcaggagatcgcattggcgaaagcagttgatgtgatggtcatgagcttgggcagcgacactgcaccagatgagaatatcaaagacgagtttaaatactccacggcctgtacctatgcgaccttggagtctacggaggcaggctcatccgagaacttgcttggaatcgtcaagctgtccttggaaaatgttcctgtgaatgagcaccgcaagatggtgttgctgtatgcgcttctctctgcatgtatcgctgataagcctgtatcgcaagaggaagaggacaggaagtcgtctcacttcaggaagggctatgatgctcggcatcgtgttgctcttcggttgatagcagcatggcttgacgtcaagtggatcaaaatggaagctatggaggtgatggtcgcatgctctgccatggctgcggcaaaagaacaagaacaagagcgtgaaaatgcatcaccaagaagcaagtgggagaaatggaagcgtgggggaattattggtgccgctgccttgactggtggagcgttgctggctattactgggggtaggactgcgttccagatcatgtatctaatgaaatgctgaacatcttggcatcatttggacacactacaccaggggctagtggatttgctgctatggctgctgcggcaggatctgttgctggctctgtggcagttgctgcctcatttggagctgctggggctggcttgacgggtaccaaaatggcaagacgaattggtaaagtgaaagaatttgagttcaaacctattggtgataaccataatcagggtcgccttgctgttggcatcttggtttctggatttgcttttgatgaggaggatttctggaaaccttgggaaggatggaaggataacctagagaagtacatccttcaatgggagtccaagcacataattgcagtgagtacagcaatacaggattggctgacatcaaggcttgcaatggaattgatgaaacaaggtgctatgagaactgtcttaagtggccttcttgcagcatttgcttggcctgctacgttgcttgccgctacagattttattgatagtaaatggtctgttgctatcgacagatcagataaggcaggaaaaatgcttgcagaagtgcttcttaagggactgcaaggaaacaggcctgtgactcttgttgggttctcgcttggagcgcgagtcatattcaagtgcttacaggagctagctttatcaagcgacaatgagggacttgtcgagagggttgtactccttggtgcacccgtttcagtgaaaggtgagaggtgggagcctgccaggaagatggttgcagggagatttgtgaatgtgtactcgagagatgactggattctcggtgtaaccttccgagcaagcctgcttacccaaggactggctggcatccaggccattgatgtgcctggtgttgagaacgtggatgttaccgggcttgttgatggccattcttcgtacctgtcagctgcccagcagatcctggagcaccttgaactgaatacctactatcctgtttttgttccccttccggaggtcaacaaataacagatgtagataggttgacaatagcagagaaaagatgtaaatatcagggaggaatataccttcgaatttacacaaaaaatgttacagctgtctagatgatgaatgctttgtagtttcttggtgactaatcctaatcgtacagtagctctagttacgtgtagatatctattgtgtacatagtaaaaacaaaacaataccgtctattgtgatcgcaagaaaagcttgaatctagaatagggaagtaagtacttccgtccaacaagagattaatctaataa

SEQ ID NO: 154250 - DNA, 3304 bp, Zea Mays
atgctgctgcaaaggcgcggcggcctcctctgctgcgggtgcggcgccagcgccgtggccgtggccgtcagtggccgcgttccggaagacgacggcggtgccgtcgtcgatggccagccgcctgacgccaagagcgtgtctggtaccagtgtctccgctgccgtgacgaccgcaaacgcgaggcagctctcgtgggcgcaggtggaggccatgacgggaggcttcacgtcagccatcgtcggcgagggcggcttcagcaccgtttacctcgcccgcctcgctggctccctcgccgccgtgaaggtccatcgtagtagcgagcgtcttcatcgcgcgttccgccaggagctcgacgcgctcctccgcgttcgccatccccacatcgtccgcctcctcgccttctgcgaccagcgagacgaaggcgtgctggtgctagagttcgcgccgaacggcagcctgcacgagcagctccacggcggcggcgcgggcgcggcgccgatgccgtgggcgcggcgggtgccggtggcgctgcaggtggcccgcgccctggagtacctccacgagcggtgcgagccgcaggtggtgcacggcgacgtgaaggcgtcgaacgtgctgctggacgcgggcatgggcgccaggctgtgcgacttcgggtcggcgcgcgcggggttctcggcggccgtggccgttgccgctgcaggcccgcgcccgcgcgccgtgttcgggtccccgggctacgtcgacccgcactacctccgctccggcgtgagtccagcagatagaagcagtcaaccagcagcagcccaagtcaagcctcctcgcgtgtccctcggctcccacgcccacaccgaaatttcccccacggagctcaactgccggtgccggcgcgcgacaggcggcacacacgcccgctcctcgcgtatggcgaccacgttgacgcccacgcagcgctatgcggcggggacgctcctggcgctggcgctccgccaggcgcagatccaccagtccgagcccctcggctccggccccgacgacgaggagcgcgccagcagcgccagcgggagctcctcctccaccatatccagcaccggctccgacactacctcgggcgccggcctctggacgcacgattcccgcggcctcctccgccccgtcttcaggttcctggagatcgagcccaaggcatgggcggggatggaggagacggccgcgtcgccggacgccgccaagcatcacatcggtgcgtttataagcatactctttgaggaagacggcgagagctcttcagacaggctagagcaggagatcgcattggcgaaagcagttgatgtgatggtcatgagcttgggcagcgacactgcaccagatgagaatatcaaagacgagtttaaatactccacggcctgtacctatgcgaccttggagtctacggaggcaggctcatccgagaacttgcttggaatcgtcaagctgtccttggaaaatgttcctgtgaatgagcaccgcaagatggtgttgctgtatgcgcttctctctgcatgtatcgctgataagcctgtatcgcaagaggaagaggacaggaagtcgtctcacttcaggaagggctatgatgctcggcatcgtgttgctcttcggttgatagcagcatggcttgacgtcaagtggatcaaaatggaagctatggaggtgatggtcgcatgctctgccatggctgcggcaaaagaacaagaacaagagcgtgaaaatgcatcaccaagaagcaagtgggagaaatggaagcgtgggggaattattggtgccgctgccttgactggtggagcgttgctggctattactgggggtttagctgcaccagccattgctgcaggatttggtgctctagctccaacactgggcacacttgtccctttcataggggctagtggatttgctgctatggctgctgcggcaggatctgttgctggctctgtggcagttgctgcctcatttggagctgctggggctggcttgacgggtaccaaaatggcaagacgaattggtaaagtgaaagaatttgagttcaaacctattggtgataaccataatcaggcgccttgctgttggcatcttggtttctggatttgcttttgatgaggaggatttctggaaaccttgggaaggatggaaggataacctagagaagtacatccttcaatgggagtccaagcacataattgcagtgagtacagcaatacaggattggctgacatcaagtaatgttcagggttttgtactctgccttgtactactgttagtgaatgccttgtaattagtgttgttgtttatgcagggcttgcaatggaattgatgaaacaaggtgctatgagaactgtcttaagtggccttcttgcagcatttgcttggcctgctacgttgcttgccgctacagattttattgatagtaaatggtctgttgctatcgacagatcagataaggcaggaaaaatgcttgcagaagtgcttcttaagggactgcaaggaaacaggcctgtgactcttgttgggttctcgcttggagcgcgagtcatattcaagtgcttacaggagctagctttatcaagcgacaatggtatctgttctttagttatagtaacctaaatttcatatgactttgctcttatgcttgatggaatgagtcagagggacttgtcgagagggttgtactccttggtgcacccgtttcagtgaaaggtgagaggtgggagcctgccaggaagatggttgcagggagatttgtgaatgtgtactcgagagatgactggattctcggtgtaaccttccgagcaagcctgcttacccaaggactggctggcatccaggccattgatgtgcctggtgttgagaacgtggatgttaccgggcttgttgatggccattcttcgtacctgtcagctgcccagcagatcctggagcaccttgaactgaatacctactatcctgtttttgttccccttccggaggtcaacaaataacagatgtagataggttgacaatagcagagaaaagatgtaaatatcagggaggaatataccttcgaatttacacaaaaaatgttacagctgtctagatgatgaatgctttgtagtttcttggtgactaatcctaatcgtacagtagctctagttacgtgtagatatctattgtgtacatagtaaaaacaaaacaataccgtctattgtgatcgcaagaaaagcttgaatctagaatagggaagtaagtacttccgtccaacaagagattaatctaataatatttatgttatata

SEQ ID NO: 154251 - DNA, 727 bp, Zea Mays
acttccagcaaaccatatactagcatagcagccagaaatagatacacagagcttctcatcgaggctgcggagcctcgctctcccctcctctacactgtcatccaaatccaatccaagaagctgaaaagagatcgatggcccagcagaaggtggtgctccggatctccaccatgaccgacgacaggacgaagcagaaggccatggaggccgtcgcggacatctacggcatcgactcgatcgcggcggacgtgaaggagaacaagatgacggtgatcggcgacatggacacggtggccgtcgccaagaagctgaagaagctcggcaaggtcgacatcgtctcggtgggcccagccaaggaggagaagaagcccgacaagaaacccgaggagaagaagccggaggcggcggcggggaagaaggacgacaagaagtgagcgccgaggccgtctgaatacgtttccggctgatttggatttggatggactctctaataataatgggcccaatacatgatatagaacattacagcccacaagggcacgtggttgcctctctaattagagtagtaccaacccaatacactacttagagggtgtttaggagtgaagttttttacagtagtttttaaaaaataatgtattattcttaaatactgcagtattatatatagaatagcgtttgacaagctatctaaaactatgttttcaaaactagagtattgcaaaaa

SEQ ID NO: 154252 - DNA, 2871 bp, Zea Mays
ccacctaatctggtaataaagaagaatcagccccccaccagttggaacctgtctgtatgcggcactgcggcgcccgtggggcccaccacggcgccgccggcagcgtcaccaacccccacctccgccctcccaccggcactcccctcgcctgctccacgacgcttatgcgctcgcgtcccgctctcgccgcccacctccggcgcctgctcctcctctctccctccgcccacctcatcatcatccgccgcgccatggcctccgccgccgccgcgcaggcgcagccaggtggcgccccaccggcgaccgcggagtacgaggaggtgctggggcggctctcctcgctcatcacgcagaaggtgcgcgcgaacagcgccaaccgcggcaaccagtgggacctcatggagcactacgtcaagattctggagctggaggagtcgatcgcgcggatgaaagtgattcacgtcgcggggaccaaggggaagggttccacatgcacattcaccgagtcaatcctgcgatcgtgtggcttccatactgggctgttcacctcaccacatttgatggatgttagagagcgatttcagctagatggggttaatatttctgaagagaaatttttgaagtacttctggtggtgctggaacaagttgaaggagaagactgatgatgatattcccatgccagcctatttcaggttcctcgcgttgctcgcattcaagatattttctgctgagcaggtagatgttgctgttcttgaggttggcctaggagggaagtttgatgcaactaatgtggttaaagcacctgtagtttgtggcatatcttcccttggatatgatcatatggaaatccttgggaatacacttggagaaatcgcaggagagaaggctgggattttcaagaaaggagttccggcctatactgctccacaaccagaagaggcaatgactgctctcaaacaaagagcttcggaattgggtgtctctctccaagtcgttgatcctctggagccccatcacctaaaagatcagcatcttgggctgcatggagaacatcaatatataaatgctggccttgcagttgctttggctagtacgtggcttgagaagcagggacataaagatacgttaccactcaatcgtactgatcccttaccagatcattttattagagggctatcaagtgcttctttgcaaggccgagcacagattgttccagattcacaagtgaattcagaagaggacaaagattgttctcttgttttttatttggatggagcgcacagtcctgaaagcatggaagtatgtggcaagtggttttcccatgtcacaaaggatgatacaaggctaccatcttctttggagcagtctcatacatctaggtctcaaaagatccttctgttcaactgcatgtctgtgagagatccgatgagattgcttccttgtctcctggatgcatcaactcaaaatggagtccactttgacctggccctatttgtgccgaaccaatcacaacacacgaagcttggttctaacacttcagcaccagcggagcctgagcaaatcgatttgtcatggcagctgtcacttcaaacagtgtgggagaagttacttcaggataaaggtataaatactacaaaatccagcgacactagtaaagtttttgattcgcttccggtcgcaatcgagtggctaaggagaaatgcccgagaaaaccaatctacttctttccaggtgctggttactggctccctgcatctcgttggggatgtcttgagaataatcaagaagtgatacgccgctcgaaatccaaactggaactggactatgatctatggtctctcccaaggctaacatgattagcaaggggagacatttgaacggtgcttgcttattggtgccaaccaagctgcgagcttcttgtgtttttttttgtggccacggtcgccttccactcgggaaaccaccgcgcccgttcttgtgaaggcatggaataggatgatcgtgccaccatagaacataactgggaaatgaatttgacatggaactgggacagtctgtatactcacaaaataagatcgcgtggggttttcttgttcaagtgcaaagaaaccagtcaattcttctccagagtagcaagaattcattcatgttgtgactttgatgatgtatccttgttctttctcccaaaccgaaacctgatgaaaatgcatgcatcgctgtccgccgcaccaaaccaaaattggtgaggcaagcgcacgcctgccccggtgtctggtatcaccgccacgggtctccagatggccgagctggatttactttctgtgccgcccttgttgtctgcgtatataaaatctttattccgttgcttgtgcgtgatgtattacaaactaccgtcccttgccatctccaacttgtgctgttgaaaccctgcctgaaaaagcatgggattgccgcaacaaagcttggtcaggctcatggtagtagtagtgctcacagtctcgctcctgggagcagagcagagaggcctcttctgccacggccgacgggttccggaatccgacgccgaggggacgtcgtctttcaggcagcacggtcaacagaaacttggctggaggcgagtcgtgcaggtgcaggatctgtccgaggctaagagaagggtgccgcaggggtcaaacccgctgcacaactgaactctcaagagggacctcaactcggtcggtgctcagcatctatctgtctatctatctatctgagctcctgagcgacaagggaggctattttctcttgttttttttgttttttttttgccgtgatgtaatgtaaccgagcactggcacttgttgaccctatcggtatcctctatattacc

SEQ ID NO: 154253 - DNA, 499 bp, Zea Mays
acgtaaggatgaacaagccattttctttattagcacatgggaatatcacacatgctgcttaggtgtgtttgccttcattcctataagtatacatacaaacaaaaagaaaaagaaaagaataccccacaaagggtgctcatgtcctagctcccagcttgaaatcatctgcttctgctttggctcagcagattcagtacagcatgtatgtgtaacagtgtaagcaatgtgtcacggtatccatcatcccatttcagcagcatgtctggccgttcgtgccttctttttttggctggggactgggggggaggtacagtgcaaaccaacttctccaggccccggccggccctttgtttcccgcactccaactaaattacccaagaagaagaagaaggaacaagtataggaaacgaagctatggacctacctcttgctaatctttggccgccttgtttcgccaagcagcgatggagttgggaatgttgtcgaggagaggcttggg

SEQ ID NO: 154254 - DNA, 490 bp, Zea Mays
tgaacaagccattttctttattagcacatgggaatatcacacatgctgcttaggtgtgtttgccttcattcctataagtatacatacaaacaaaaagaaaaagaaaagaataccccacaaagggtgctcatgtcctagctcccagcttgaaatcatctgcttctgctttggctcagcagattcagtacagcatgtatgtgtaacagtgtaagcaatgtgtcacggtatccatcatcccatttcagcagcatgtctggccgttcgtgccttctttttttggctggggactgggggggaggtacagtgcaaaccaacttctccaggccccggccggccctttgtttcccgcactccaactaaattacccaagaagaagaagaaggaacaagtataggaaacgaagctatggacctacctcttgctaatctttggccgccttgtttcgccaagcagcgatggagttgggaatgttgtcgaggagaggcttggg

SEQ ID NO: 154255 - DNA, 1291 bp, Zea Mays
agaggaacccagcgtccacaccacagcccacggctgagactcaggtgaggtccgccgcgtccccccgctgccacaacccacaaccactacctgagtacctgaccaccaccggataggatgaagccgccggtgagcagggccgccttcgcgtccgtgctgatagggccgcgcacgctcggggcctctctggtggccgcccgctgcgcctcctcctctgccgccgctgccgtcactgcctatgatcatgcatcgtttgtcaaggaaatcgccgcaaccgatcctccagagcatctcaactctctcctcaatgtgcttcaagcacgaggtgaaaagattgtttctcctggagcaaaaagagggttgattccatgtgttgttcccttatcagaaagtccagcaggtgatttgacatctctccttagatggccaaccgctccaactgggtacactaaatatactgctatttttatatccatgtatatccacagaatacttgttgaggctgacttcagtgctggaactggtgatgatttatgggctgctgtgggcgaagctggtaaaaacctttacgctaaaggcgaattcaaagagtcgcaggtggcagaccttgatgtctatttgttgaagaaggttggacttttccctgatgttatagagaggaaaacattgcgccatctcgaaaaaggagataatgtctcagctctcattactggagaattctatactagagatcaatttccaggatttggaagaccctttgtgttcaatgcagagatttttaaaagagttggacgtacatctgaagccaaagattcagctcgagtggctctgaaatcaccatggtggacacttggctgcagttacgaagaggctgctgaactagctgggtgggaggatgagcagctagagtttataagagagaaggtaactgaggagggtaagcgcgaggacctgaagagaggaaaggctccagaacaggtagctgacgagagcctccttaacttgtcacatgatagggttcaattatttcttggctggctccattgcctttgctgctctggtgcactgcaggtgattcttgacgaggcggcattcttaatggatttagcgtccgtggatggtaactgggacgaggttgtggatcggattgctgaatgttacagagaggctgggcttcatgacattgcgaatttcattgcctacagggaatagatgttagattccctatggtctagaatgttattcaagaaattttgattcatttgtgctctgctaatatatattcttatat

SEQ ID NO: 154256 - DNA, 1362 bp, Zea Mays
agaggaacccagcgtccacaccacagcccacggctgagactcaggtgaggtccgccgcgtccccccgctgccacaacccacaaccactacctgagtacctgaccaccaccggataggatgaagccgccggtgagcagggccgccttcgcgtccgtgctgatagggccgcgcacgctcggggcctctctggtggccgcccgctgcgcctcctcctctgccgccgctgccgtcactgcctatggaaatcgccgcaaccgatcctccagagcatctcaactctctcctcaatgtgcttcaagcacgaggtgaaaagattgtttctcctggagcaaaaagagggttgattccatgtgttgttcccttatcagaaagtccagcaggtgatttgacatctctccttagatggccaaccgctccaactgggatggaaatgcctgttgtggaagttcgtaaacatgggctgtggcttttggctaaaaatgtgaaacagtatatccacagaatacttgttgaggctgacttcagtgctggaactggtgatgatttatgggctgctgtgggcgaagctggtaaaaacctttacgctaaaggcgaattcaaagagtcgcaggtggcagaccttgatgtctatttgttgaagaaggttggacttttccctgatgttatagagaggaaaacattgcgccatctcgaaaaaggagataatgtctcagctctcattactggagaattctatactagagatcaatttccaggatttggaagaccctttgtgttcaatgcagagatttttaaaagagttggacgtacatctgaagccaaagattcagctcgagtggctctgaaatcaccatggtggacacttggctgcagttacgaagaggctgctgaactagctgggtgggaggatgagcagctagagtttataagagagaaggtaactgaggagggtaagcgcgaggacctgaagagaggaaaggctccagaacaggtgattcttgacgaggcggcattcttaatggatttagcgtccgtggatggtaactgggacgaggttgtggatcggattgctgaatgttacagagaggctgggcttcatgacattgcgaatttcattgcctacagggaatagatgttagattccctatggtctagaatgttattcaagaaattttgattcatttgtgctctgctaatatatattcttatatacgggaagaacgcacaaccgttatatcgcagcagtccttttttgttttgttttgacatcagctagtgaccatagtttctttcctgtatagctctgaatgtacttgttttttccatttaaatttccatgcttattcatggttagtaagtgtc

SEQ ID NO: 154257 - DNA, 1392 bp, Zea Mays
agaggaacccagcgtccacaccacagcccacggctgagactcaggtgaggtccgccgcgtccccccgctgccacaacccacaaccactacctgagtacctgaccaccaccggataggatgaagccgccggtgagcagggccgccttcgcgtccgtgctgatagggccgcgcacgctcggggcctctctggtggccgcccgctgcgcctcctcctctgccgccgctgccgtcactgcctatgatcatgcatcgtttgtcaaggaaatcgccgcaaccgatcctccagagcatctcaactctctcctcaatgtgcttcaagcacgaggtgaaaagattgtttctcctggagcaaaaagagggttgattccatgtgttgttcccttatcagaaagtccagcaggtgatttgacatctctccttagatggccaaccgctccaactgggatggaaatgcctgttgtggaagttcgtaaacatgggctgtggcttttggctaaaaatgtgaaacagtatatccacagaatacttgttgaggctgacttcagtgctggaactggtgatgatttatgggctgctgtgggcgaagctggtaaaaacctttacgctaaaggcgaattcaaagagtcgcaggtggcagaccttgatgtctatttgttgaagaaggttggacttttccctgatgttatagagaggaaaacattgcgccatctcgaaaaaggagataatgtctcagctctcattactggagaattctatactagagatcaatttccaggatttggaagaccctttgtgttcaatgcagagatttttaaaagagttggacgtacatctgaagccaaagattcagctcgagtggctctgaaatcaccatggtggacacttggctgcagttacgaagaggctgctgaactagctgggtgggaggatgagcagctagagtttataagagagaaggtaactgaggagggtaagcgcgaggacctgaagagaggaaaggctccagaacaggtgattcttgacgaggcggcattcttaatggatttagcgtccgtggatggtaactgggacgaggttgtggatcggattgctgaatgttacagagaggctgggcttcatgacattgcgaatttcattgcctacagggaatagatgttagattccctatggtctagaatgttattcaagaaattttgattcatttgtgctctgctaatatatattcttatatacgggaagaacgcacaaccgttatatcgcagcagtccttttttgttttgttttgacatcagctagtgaccatagtttctttcctgtatagctctgaatgtacttgttttttccatttaaatttccatgcttattcatggttagtaagtgtcagattgagtg

SEQ ID NO: 154258 - DNA, 1975 bp, Zea Mays
ctctctagcaggctatgcctgcctggatcatcccgactcttcgtctccagctggcagctgctgcttctccgggtgcatctgcccctgcgttccaagtaccgctggggccagctatcttgctacttgctaggcagcatatggtccgcgtttcatgaccttcatgagctgttccgcggccgtctccaacaggaccctctgcgggggccacggcgctgtctgcgcgcgcggggtgctcgctctcggttcccacagtagtaggaggagggcgaggcgcagacacgcggtggtcttcgctaagaggaggcggcggcgtctcagcaaatggcagcggccgtggtggaagaccttcttttctgactggaacgaagacgacgagagcctggccgggtggagggaggaggacgagctcttggaggagattggcgccaaccaggagctgtcggacaatgaaaagttcaaggtgtggatgagtaaggccgaggcaatcgttgaaatgcgcgaggcccagcaggatgcgatgaacgccgaggagcgatcgtgggaggattggatcagtggtggcggcacgtcagggactggaggaggtggggactggaatcgggaggacagcttgttggaccagataactgatgatcctgcagagattgtgagggacaagagcattattcagattttcagagattccatcaatgaggattacgaggacatgctgttcgaagatcgagtgtttatgtatgcctcgacaaactcggccaaatttctagcattgttgattgtggttccatgggtgatagattttctagtgcatgactatgttatgatgccctttttagagaggtatgtccagaaggtgccacttgcagctgagctactcgatgtaaggcgcagccaaaagctgcagatggttaaagacctaaatattgaaaaggatagagttgagggatgattggaggctagaaaatcgaaatgctttcgcaaatatatggtccgatactgtttatggaattgtgctatttcttcttatgtgcttcaaccagagcaaagttgcaatgctgaagttcacgggatataaggtgctaaataacatttcagacagtgggaaagcctttcttattattttagtatcggacatccttctaggagtcaggttggcatacattggtagaagttattctcgagcattatgggcttgaagctgatgaagcggcggtcacattttttgtttgtctggttccagtggctttcgatgtgtacataaaatattgggtatacaaataccttccaagattatcacccagtgtgggaaacgttttggatgaaataaagcgccattagagaactttttttagtttccttattgggaaattgcttgagaatttgtcgccttccaggtagtcaatggcttggcatataaagttttaaaatctgaacgatgtcttcgtctgaaaggccttgcctagaatgtctgtctggtgatcaatcagagtctcaggctgttcgagaagactgggaatttggagaagtaacctaggtagtccttattctaaaagaaaggttccatgactcggaatcaacgtcaggcaaaaatctcttctctcttatttacatggtgttatctacttgtaaaataagaaatcgaatgattttgcgcgaaatgagacagccgtgctgacggacgtctgttctgaccaacaagcaattgtttttcctttgcttttgagatctgaactgacggttagcttcacgtttcaaatttgcttcgctaaaaaaagatagacccagtgttagcggcttccacataaatgaggtctagtgaaggaataatcgagtcttgctcctgtatttttgcagagactcagaacaaggaggatgcactgttgctttatggacaaattgcacttctctattttttcctttgactttgccattattggacttgtgacttttttatggggtttcatgcatgctatggtta

SEQ ID NO: 154259 - DNA, 1644 bp, Zea Mays
tctagcaggctatgcctgcctggatcatcccgactcttcgtctccagctggcagctgctgcttctccgggtgcatctgcccctgcgttccaagtaccgctggggccagctatcttgctacttgctaggcagcatatggtccgcgtttcatgaccttcatgagctgttccgcggccgtctccaacaggaccctctgcgggggccacggcgctgtctgcgcgcgcggggtgctcgctctcggttcccacagtagtaggaggagggcgaggcgcagacacgcggtggtcttcgctaagaggaggcggcggcgtctcagcaaatggcagcggccgtggtggaagaccttcttttctgactggaacgaagacgacgagagcctggccgggtggagggaggaggacgagctcttggaggagattggcgccaaccaggagctgtcggacaatgaaaagttcaaggtgtggatgagtaaggccgaggcaatcgttgaaatgcgcgaggcccagcaggatgcgatgaacgccgaggagcgatcgtgggaggattggatcagtggtggcggcacgtcagggactggaggaggtggggactggaatcgggaggacagcttgttggaccagataactgatgatcctgcagagattgtgagggacaagagcattattcagattttcagagattccatcaatgaggattacgaggacatgctgttcgaagatcgagtgtttatgtatgcctcgacaaactcggccaaatttctagcattgttgattgtggttccatgggtgatagattttctagtgcatgactatgttatgatgccctttttagagaggtatgtccagaaggtgccacttgcagctgagctactcgatgtaaggcgcagccaaaagctgcagatggttaaagacctaaatattgaaaaggcaagatatcgtcttgaagtagagattggcaaatctcctccactttctgatgaggaggtctggcatgagttgcgggaaaaagcgatagagttgagggatgattggaggctagaaaatcgaaatgctttcgcaaatatatggtccgatactgtttatggaattgtgctatttcttcttatgtgcttcaaccagagcaaagttgcaatgctgaagttcacgggatataaggtgctaaataacatttcagacagtgggaaagcctttcttattattttagtatcggacatccttctaggctaccattcagagtcaggttggcatacattggtagaagttattctcgagcattatgggcttgaagctgatgaagcggcggtcacattttttgtttgtctggttccagtggctttcgatgtgtacataaaatattgggtatacaaataccttccaagattatcacccagtgtgggaaacgttttggatgaaataaagcgccattagagaactttttttagtttccttattgggaaattgcttgagaatttgtcgccttccaggtagtcaatggcttggcatataaagttttaaaatctgaacgatgtcttcgtctgaaaggccttgcctagaatgtctgtctggtgatcaatcagagtctcaggctgttcgagaagactgggaatttggagaagtaacctaggtagtccttattctaaaagaaa

SEQ ID NO: 154260 - DNA, 276 bp, Zea Mays
ttttatccaatttataaaattataactagctgcatttttgcagctaccattcagagtcaggttggcatacattggtagaagttattctcgagcattatgggcttgaagctgatgaagcggcggtcacattttttgtttgtctggttccagtggctttcgatgtgtacataaaatattgggtatgccttttgtctaaattaacagggataaacaatagtttttaaaagttaagtagcatagcttttttaaggaacctcttaattttgtaaaaaaaaa

SEQ ID NO: 154261 - DNA, 1634 bp, Zea Mays
ccctgcacggcttgcggttggagctggcctcaaaccagccttaacctgacaggctgacagcgcagagcggaatggaggaaatgcccctacctgttcacagtgactggcctcccgactcgactctcctccccctatctctatctgcttcctgctgagctcaaaccccttccgcctccccatccaccattccatccgccgccgccgccgccgcctgtgcaagatgaatgtggagaagctcaagaagatggctggcgctgtacgcaccggagggaagggcagcatgcgcaggaagaagaaggcagttcacaagaccacgaccaccgatgacaagcggcttcagagcaccttgaaaaggatcggggggaacaccattcctggtatcgaggaggtcaacatcttcaaggacgatgttgttatccagtttcagaaccctaaagtgcaagcatccattcctgcaaatacatgggtggttagtggagtaccccagacaaaaagtctgcaagaccttctgccatcaattatcaaccaactgggccctgataacctggacaaccttaagaagctggctgagattttccagaggcaggtacctggtgctgaagcagctgcacaggatgatgacgacgtccctgagcttgtccaaggagagacatttgaggaggctgcagagaaggagcctcaactggagcaggatgagaacaaagaatcgtgattttgttgtgaagggtcgtcggtttaattgttggcatcagccttgcgagagaccctacctgctcatctggcgtgcctctttacatgtgctccagctttgtgtcaagtgtgctttgggttcgaaaagcattactgcattatgttttctgaagacagtgtaggcatatattttcctcgagccatagtgagtttccgcatatgtcttgctttctcggcgtccagcagcagttccatatacatagaccaaatttgcaacaaaaaaataggagatttttgccagaaaatgcatctccctgatcgaatagaaagaaactggcgacgcggttgtttggttaatgctgggtcatgtgtaaccgtgacactattgccccatttccactccacacctagcaacatctgaatggaatgacaaacaaaaaaagcatttggaccagtttcttcaactagtgcatgcaacatatgccttttgtcacagctgatgattttccatacaaaaaaagggtcagctcgccataaccacccgacgggttgggcgtcagtcacacgaaggaccagttgacgaagcagaacgccaggcagtggatgttgctatcctcgccgagcaccttccacgctacagcttggtcgaaagaaacatggcggcccattcctgacatgcacacgcctgacggcaggtacgcgtagccctaaaacaacgaagacggaatatgttagctgttgagcgcatctcaggttcactctcaaggatggctgttttgacctctaacctgttccattagtttcgagatgtctgagaatagtgctttccttcctgactcgtcgaagatcttgtctagcgtcaggtcttgcagggcaacaagagatgtttctaacatgtccagccctgccttgtttgcaaacgtaaacataggtttctcctgaaa

SEQ ID NO: 154262 - DNA, 2055 bp, Zea Mays
ccctgcacggcttgcggttggagctggcctcaaaccagccttaacctgacaggctgacagcgcagagcggaatggaggaaatgcccctacctgttcacagtgactggcctcccgactcgactctcctccccctatctctatctgcttcctgctgagctcaaaccccttccgcctccccatccaccattccatccgccgccgccgccgccgcctgtgcaagatgaatgtggagaagctcaagaagatggctggcgctgtacgcaccggagggaagggcagcatgcgcaggaagaagaaggcagttcacaagaccacgaccaccgatgacaagcggcttcagagcaccttgaaaaggatcggggggaacaccattcctggtatcgaggaggtcaacatcttcaaggacgatgttgttatccagtttcagaaccctaaagtgcaagcatccattcctgcaaatacatgggtggttagtggagtaccccagacaaaaagtgagtgggctgtttacttctcaacctctgcatgcctgatcattgctcaagtacccttttgtttaatgcggtagcacagatacttagctttgctgcttttctatcatggagtccttagttgatattcaatggttagattaaatgctggaccgttcttgccttcgtatctttaattattgttgccatgctgtaaaagcaatggttgcaactagctactgatggtgtgaacttcaatcgcttctgttctctaaatgcaatggtgtcggtttcttctttttatcttttatatactctccatgatccctcacgacatcaagttatgttgtatacttacaattcctcaaacttgctgttctggtttctctcgcttttatatgcaagataagaaactggtttctcattggctgtcttgtttgaacaggtctgcaagaccttctgccatcaattatcaaccaactgggccctgataacctggacaaccttaagaagctggctgagattttccagaggcaggtacctggtgctgaagcagctgcacaggatgatgacgacgtccctgagcttgtccaaggagagacatttgaggaggctgcagagaaggagcctcaactggagcaggatgagaacaaagaatcgtgattttgttgtgaagggtcgtcggtttaattgttggcatcagccttgcgagagaccctacctgctcatctggcgtgcctctttacatgtgctccagctttgtgtcaagtgtgctttgggttcgaaaagcattactgcattatgttttctgaagacagtgtaggcatatattttcctcgagccatagtgagtttccgcatatgtcttgctttctcggcgtccagcagcagttccatatacatagaccaaatttgcaacaaaaaaataggagatttttgccagaaaatgcatctccctgatcgaatagaaagaaactggcgacgcggttgtttggttaatgctgggtcatgtgtaaccgtgacactattgccccatttccactccacacctagcaacatctgaatggaatgacaaacaaaaaaagcatttggaccagtttcttcaactagtgcatgcaacatatgccttttgtcacagctgatgattttccatacaaaaaaagggtcagctcgccataaccacccgacgggttgggcgtcagtcacacgaaggaccagttgacgaagcagaacgccaggcagtggatgttgctatcctcgccgagcaccttccacgctacagcttggtcgaaagaaacatggcggcccattcctgacatgcacacgcctgacggcaggtacgcgtagccctaaaacaacgaagacggaatatgttagctgttgagcgcatctcaggttcactctcaaggatggctgttttgacctctaacctgttccattagtttcgagatgtctgagaatagtgctttccttcctgactcgtcgaagatcttgtctagcgtcaggtcttgcagggcaacaagagatgtttctaacatgtccagccctgccttgtttgcaaacgtaaacataggtttctcctgaaa

SEQ ID NO: 154263 - DNA, 145 bp, Zea Mays
atgttcaagcttcaccgccaccgctcctccgaccgcgtcggcgagcgcttcgacttcagattctccaacttccgcgccgtccaggttggttcctttcctctctctctctctctctctctctctctctctctctctctctctctct

SEQ ID NO: 154264 - DNA, 99 bp, Zea Mays
tttttaaagtagaatatgccagtggaattttgtttgacttctcattcatttcatatgcgcctttcctgcagtttatcttattccatgtgctacatgaca

SEQ ID NO: 154265 - DNA, 3751 bp, Zea Mays
atgctagttatgttagtgccggcggtggtgatgatgggcttagatccaacaattcatcttttagttctcggacttcaggcccaaatttgctgcaagggagtactccaaaaacattttcgaatgacctttctcagttatctatgggggcgtctgactcatccaaagattttcttgaagctgctgaagaaacaattgaggagctccgtgacgaggcaaaaatgtgggaacgccactctcgcaagttgaaggctgatctagagatgctgaaaaaggagtgttctgaaaaatcaaagcaacatgctgaactagcagttgagctgtctgctgcacaagctgaacgggattcatataggcatgaaatagaagaattaaagtcatccttacaagatgtaaacacacgacagacaattacaggaacacctaaacgttcagactggatagacctgcagaaggaacttgaaggtgaggtgaagtttcttaaagaatcgaatacagacttaaccatacaactaaacaggactcaagagtcaaatatagagcttctttctattcttcaggaactggaggaaaccattgaagaacagagagttgaaatatctaagatttcaaaggtcaagcagactgcttatcctgagaatgggctgttagtaaaaaaagacagagagtgggctaagaaactgtcaatgaaagaggatgaaatcacaattccgagggagaaatcggatcgtgctctcaacattggaaatgcagatggtgcagcttccaatgccatttatcttgatttggagaaagaaaatgaaattttaagggctaaaatacaagagcttgagaaggactgctctgaactaacagatgaaaatttggagcttatatataagctgaaagaaaatggtctgacaaaaggtcaggttcctcatattgcaaacaacaatgagctgcaattcaaaaagcttacatcccggattcatcaactggaggaggatcttaggaataaggaaatgttaagagatgacagtttttctgagtcatcaatgtctaatgcagatgagatacagagaaaatgtgctgaccttgagctgaaggtgctaaattttaggtctcaaacctgtgagctagaagaaaagttccgaaaatgccaagaggagctggaacaaagaaatcttgagttatctgcgctgagaagaaagataaatggtttacattctaatgaactggaagtttgtgaatctggtgcgacatggaagtaccaagctagaatagcagatctagaggatactgaacctgagacagatacacttaaggctaggtttgaactgcagctacaggaaaatgatgaccttcgtcgttccaaggttgagatgcagaattttatttctgagtttcaggcagagaagagtcagcttgaggaacgcctgtccgcgtcgcttaaagaaagcagcatcacatctaaatgtctggatgaagtgcggaaagatatccttgtgctttccagcagtatagattcccatgtttcaaccaataaacttcttgagaggaacttagttgagctagagagctgcaaagctgaactagagttgcatgtatcggagctggaacaggaaaacatcgagttgtcagaacggatatctggacttgaaacacaactgacttacgtgacaaatgaaaaggagtcaagcgagctgcagttgcatgactccagatctctcatcatcaatctcaaagataaagtagagtgtcagcaatcagagatggaaactcaaaggctccagtttaagcagaaacaacaagaatctcaaagaagattgtgcgaagcacaagatgattctgaagttctgagaagatctaattgtaaactacaatctacggttgagagtcttattgaagagtgcagttctcttcagaatctaattgctgatctgaaaaggcagaagttggaattacatggtcatcttacgcaaaaagagcaggaattggatgagtcgaaaaaaaagaactttgagtttagcaaaacagtggagttccttgaggcaaaacttttgtcactacagaaggacatttcttctaaagaacaatctttattgtcagaattggagaatattttccaggagcacatggaacaagaagaaagaattaatcgcgcacatttcatgctcaataagatcgagaaagaaaagactcttgaagtagagaatcttgaaagggaggtcgtcagcctcgctgcacaggtctcctccacacacgaggagcgagaaagtgccactctgaatgctattcaagaggtatctgtcctgcgagcagacaatgctaaacttgaggctaatctccaagatgttagtgaacagctgagatgttacgagtctcaattggaagaccttcgtaaggagtctaaaagtaaaattaaaggattggttgattcccttaatgcctccaaacaaagcgaggaaatgttgacatcagatgctgaacatatgaaaaagttgatggaagctgctaaatccaatgaagatgcactaaggaagacttctaacgaactagaactgaagcttaaatccagtgattatgtgaaacaacaaatgctggaagaaatatctggcctgaaacttcaggttcagaaaataatgaatcttcaagatgaggtttccaaacttcagagttctcttgatgaggccaagttcgaaaaagggaaacttgaggagtttgtgcgctcggtgactgaggaatgtcaagaactaaaagcacagaaggctatgctaacagataaagtttcttatatgcaggagaccttgagaaatggtgaagaagaaaaccgaaacagaatagctatgcatgcaaagctcatgaggttggagagtgatctaacagcattagaagcatcacatgtacatgaagcagaattaaagaacgaactcagtaggatcaagagatcaaacagtgagtatcagaggaagatacaatctctcgggcaggaaaatgaggatctcactaggcgagttcaaattatggaaaagggttttgagcgaatgtcccacgctaaagagaaccttggaaagcaggagattggaggagataaccaggaagccatccagtcaacaattcagttactggaaattaagcttgcagaggcattggaggaaaataagatatacagagctcaacagaagagttcgatgtctgaggggcaacctgctggtggagatggcaaggagggcaataccgacaggattttgcagttggaaggagagctgagagatatgaaggaacgattactcaacatgagcttgcagtacgcagaggtagaggctcagagggaacggttagtgatggagcttaaagctatcaagaaaggcaggtggttttagcaggatgcggagttgttgcctgacataaaacatgaggctgacaccacaggtgggcatcatcaagccgtgctatgctccagcaccagtgagactaagagcaagcaagtgcaagtgcagagtcagacagtgatatagcctggacgtgctaactggtgctggagcatgtgtctctcactgaagctccgtatgatgcggtacccagcccttgtttaactggacgtgctaacttgcgttgtcccctagagtcatgatcccgttcttattggtatttatttttaatggtatataattaatatatacaccagtatgtattgagtttgactggagagtgatggtcagttgttgataccatccgatccctctgttttacatgattgattacgttggaaaga

SEQ ID NO: 154266 - DNA, 972 bp, Zea Mays
tccatcgcacgcggcacgcgtcttggtcttcgtcttcgtcctcgtcttctcccccaccccacggtccacgcctacctccttagtgcttggttggtatacataccaccatcagcacctcgctcttctgctcagctctccccctctagcctcacctgccctatacacagccactactgtcgatcgattgaatttgaacccaccaggatcaggattaggattacagcatgtcggcgtccccggagttgtacaggcccgcggaagcgccggccttctcgccgtcctgcgccacgcagccgctcgtgttcgccggcgacgactactgctgcaggacgccgacgggcagcgggatctgctacctgagggagcccaccacgtgcccgcccgcgccccggaagccgccgccgccgccgcccatgtgcaggaagcgcctcttccaagcggcggatcagcagcttgctgaggcgggccccgtccctgttatcagcatccgcctcgacgagctggagcgcctcttccgcccctgtccgccgccgaccaccaccaccaccgacaagcggcgccgctccggctccggccccagccccagatccgccacgaaacatggtgctcagctgcagctgcgcagcatgaattgaattgggttagcgtaacgtagcttgcacgcaccaaccaaccactccctttttagtttttgctgctgcatctgtctgcttcttgttgctgcaacaagcaaagcgcaagcggtggcgcttctttttatttatttatttatttattacggagtacttgcttccgttctcaaatatttgtcatttgatagttcatttcaaaaatttgacaaataaaaaagaacgacgaagcaagcagtacccacctgtgtaaatcaaatcaaatatgcaaagttaccgccatagcaataaaatcacccgtgtaaatcagatcaaaaataccaagttgttgtggtattacaaa

SEQ ID NO: 154267 - DNA, 100 bp, Zea Mays
cggagtacggctaagcacgaccctacaaggacgtcaggggcactacgtgtcaactgggcagcagatcacatccttaccgctcatgtttgtaggaaacaag

SEQ ID NO: 154268 - DNA, 1911 bp, Zea Mays
ttataattttttgaataagatgagtaggttaaacttaaatttaaaaagttaaagcaattataaattagaacggtgcgtttatacgcacagcacagcagccgaaccagcgagctctgaaaaaaacaacatgatgccacaaagccaaacaaaagcatagctgagaggagcttcggtgtgatctccgtccaccctcgcgcatcggccatgggagatcccaggccgaggagaagcccagcagcccccactctcgccgacaagctgcggaagcactccacgtggctcctcctcctgctctggttcgccgtctccctcgccctcttcctctccgccacgccgcccgcagctgctccgctccgccgctcctccttcctccgctccaagccccgcgccctcgccgccaccggcgcagccgcggcgccccccgtccgcatctacgtctacgacctccccgcccgcttcaaccgcgactgggcggtcgccgacgcgcggtgcgcgcgccacctcttcgcggccgaggtagcggtgcatgaagcgctgctcgcctacaccggccgcgccgcgcggcccgaggacgccgacctcttcttcgtccccgtctacgtctcctgcaacttctccacgcccaacggcttcccctcgctgtcgcacgcccggggcatgctcgccgacgccgtcgacctcgtccaggccgggatgccgtattggaatcgctccgccggggccgaccacgtcttcgtcgcctcccacgacttcggcgcctgcttccatcccatggaggatgtagccatcgccgatggtataccggagttcctgaagaggtccatcctgctacagacatttggtgtacagggccatcacacatgtcaggaggtggagcatgtcgtgatcccacctcatgtgccgccggaggtggagcatgaactaccagagccagagaaggctcaaagagacatatttgccttctttcgaggcaaaatggaggtgcaccccaagaatattagtggccgcttctacagcaagaaggtgaggactgagcttctacaacattatggtcgcaaccgcaagttctaccttaagagaaagcggttcgacaactaccgatcagagatggctcggtcattgttctgtctatgtccgctgggatgggcgccttggagtcctcggctcgtggagtcagtcctcctaggctgcattcctgttataattgctgataacatacgtatgccgttcccttcagtcctccagtggccggagatctcattgcaggtggctgagaaggacgtagccaaccttgaggtggtgcttgaccatgttgtggcaaccaatttgagtgtgatacagaagaatctgtgggatccagtgaagcgaaaggctctggttttcaaccgtcccatggaagtgggagatgctacatggcaagtgttgagggagcttgaggttttgctggaccagtctcaaaggaggagatacggtggatcctggagggcgtgagaaaccagaaaagatcagttttgtataatctgttgcagctgtgcagttgacattgagtctgaggcttgagcctgagatccaccggaaactcaggttattgttctcatgccagagatcccaatctcagttagtcaatgggaatatgggatgctagctcaacctttattggcttgttgcccggttagtgcctaactagagatcccgctcttgtacgtatagagaaattttatttgttctttggagaactggtgggatgagtttgattttctagccatagaaagaaatgtattacaggctgcagcatattagtgtatatttctttttcctggttgcacacttgtatagttatttatatgtccgaaccttggacttaaataggaggaatgcttagaaaagagttatttatatgtccgaactttg

SEQ ID NO: 154269 - DNA, 2197 bp, Zea Mays
atctcaacgcaaacccaactgtcttggttgcgcaagcaccaagcaggtggaagatgatggaggtggcgggggctcaggcccgcgcggttcccctcctgctccgcaacaccgcctccctgcggacctccgtctccgtctcctgcacgggctcccgccggagctgggtggcggcggccacggcggagggggacgagacccgcggcttcgacaaggtgcccatggacacccccggcgcgtaccgcctggtagaccgggacaccggccgcagcgtcatcgtgtggggcggcaccgacgacagcgacgaggcctccatgccgtccccggcggtgctctcccggaccaccgaccgccgccacagccaaggtgttgggggaggtacaggtatcgggaatttcggcaggttcaaggcacagaaaataaaatccttggtcacgaggtcagctcaccgcaagagggagagttctaatcgctcaagcactgcctggtctgatgaatcttctttcaatggctctgatgatgaagaggaaagctattttgagagaagaaagcatgtctcagactctgaacgccacccgaagatgagcagtggctccagagatggaagaactcgaagtgcacattctctgagttctgttttgagccaatacagaggcgatgatgatacagacttccctggttcagaggctacttctggttccaaacgatggggtaatgttgccgatgttacttatggacggcagaatcagaagcaaagggagcctctgaatttccctcaaagaaaagggcctctggacggcggatttttcagtcgcagatctttcaaggagattggctgcagcgatgaaatgctaggtgcgttgagaaattttgatttccctcgtccgtctcatatccaggctatggcatatgggcctatcttagaggggaggagttgtgttgttgctgatcaaagtgggtctggcaagacactggcatatctttgccctataatacaaaacttaaggaacgaagaagttcaagggctccataaatcatcccctaggaaccccagggtgatagtattgacccctactgctgaacttgcttctcaggtccttaacaactgccggttgatatcaaaatctggggttccatttaggtctatggttgcaaccggaggatttcgacaaaagactcagttagagagccttgaccaagagctcgatgtaattatagcaacacctggccgtttcttgtatctgcttcaagaaggctttgtgcaactagctaacctcagatgtgttgtgttggatgaagtggacattttatttggtgaagaaggtttcgagcaagtgcttcatcagttgatcaccgtggcaccagtgacaacgcagtatcttttcgtgactgccactcttcctcttgacatctataacaaggtcgttgaaacctttcctgactgtgaggtgatcatgggacccggtgtccaccgaacaagctctcgccttgaagagatccttgtggactgcagcggagatgacaacgaagaaaagaatccagaaaccgccttttcgaacaagaaaacagcgcttttgaagattatcgaggagtctcctgtccgcaaaacaattgttttctgcaacaagattgagacatgtagaaaagttgagaatgcgctgaggcgggtggacaggaaggcctcgcagatcaaagttctccccttccatgctgcgctggatcaggcccagcgcatcgcaaacatcaaggagttcctgaacaagcaaacggctgactccatgttccttgtgtgcacagatagggcgtcgcggggcatcgactttgcgaacgtgaaccacgtggtgctcttcgactacccccgcgacccgagcgagtacgtgcggcgcgtcgggcggactgcccgcggcgcgtccggcaacggcaaggcgttcgtgttcgcggtgggcaagcaggtgtccctggccaggagggtgatggagaggaacatgaaggggcacccgctgcacgacgtgccgtgcgtctagagaccctggagggggaggtgtctgatgcgtgcaattgctgcctaaactctaagcatgttttttgtttcggaacgttgtgggtcatctatcctatccctcgcttgactcttctcggaaaaggttctcgttcccatgaatcttgatctgcctcctggtattgatagcgattgatcgaa

SEQ ID NO: 154270 - DNA, 2308 bp, Zea Mays
atctcaacgcaaacccaactgtcttggttgcgcaagcaccaagcaggtggaagatgatggaggtggcgggggctcaggcccgcgcggttcccctcctgctccgcaacaccgcctccctgcggacctccgtctccgtctcctgcacgggctcccgccggagctgggtggcggcggccacggcggagggggacgagacccgcggcttcgacaaggtgcccatggacacccccggcgcgtaccgcctggtagaccgggacaccggccgcagcgtcatcgtgtggggcggcaccgacgacagcgacgaggcctccatgccgtccccggcggtgctctcccggaccaccgaccgccgccacagccaaggtatcgggaatttcggcaggttcaaggcacagaaaataaaatccttggtcacgaggtcagctcaccgcaagagggagagttctaatcgctcaagcactgcctggtctgatgaatcttctttcaatggctctgatgatgaagaggaaagctattttgagagaagaaagcatgtctcagactctgaacgccacccgaagatgagcagtggctccagagatggaagaactcgaagtgcacattctctgagttctgttttgagccaatacagaggcgatgatgatacagacttccctggttcagaggctacttctggttccaaacgatggggtaatgttgccgatgttacttatggacggcagaatcagaagcaaagggagcctctgaatttccctcaaagaaaagggcctctggacggcggatttttcagtcgcagatctttcaaggagattggctgcagcgatgaaatgctaggtgcgttgagaaattttgatttccctcgtccgtctcatatccaggctatggcatatgggcctatcttagaggggaggagttgtgttgttgctgatcaaagtgggtctggcaagacactggcatatctttgccctataatacaaaacttaaggaacgaagaagttcaagggctccataaatcatcccctaggaaccccagggtgatagtattgacccctactgctgaacttgcttctcaggtccttaacaactgccggttgatatcaaaatctggggttccatttaggtctatggttgcaaccggaggatttcgacaaaagactcagttagagagccttgaccaagagctcgatgtaattatagcaacacctggccgtttcttgtatctgcttcaagaaggctttgtgcaactagctaacctcagatgtgttgtgttggatgaagtggacattttatttggtgaagaaggtttcgagcaagtgcttcatcagttgatcaccgtggcaccagtgacaacgcagtatcttttcgtgactgccactcttcctcttgacatctataacaaggtcgttgaaacctttcctgactgtgaggtgatcatgggacccggtgtccaccgaacaagctctcgccttgaagagatccttgtggactgcagcggagatgacaacgaagaaaagaatccagaaaccgccttttcgaacaagaaaacagcgcttttgaagattatcgaggagtctcctgtccgcaaaacaattgttttctgcaacaagattgagacatgtagaaaagttgagaatgcgctgaggcgggtggacaggaaggcctcgcagatcaaagttctccccttccatgctgcgctggatcaggcccagcgcatcgcaaacatcaaggagttcctgaacaagcaaacggctgactccatgttccttgtgtgcacagatagggcgtcgcggggcatcgactttgcgaacgtgaaccacgtggtgctcttcgactacccccgcgacccgagcgagtacgtgcggcgcgtcgggcggactgcccgcggcgcgtccggcaacggcaaggcgttcgtgttcgcggtgggcaagcaggtgtccctggccaggagggtgatggagaggaacatgaaggggcacccgctgcacgacgtgccgtgcgtctagagaccctggagggggaggtgtctgatgcgtgcaattgctgcctaaactctaagcatgttttttgtttcggaacgttgtgggtcatctatcctatccctcgcttgactcttctcggaaaaggttctcgttcccatgaatcttgatctgcctcctggtattgatagcgattgatcgaattcctactctggtttgagaagcttttcagttttccttatctcttcctgactgaaaagaattcaaaatacgtatatttggtactaaataaaccgccttcgctggctaatcggtcaggtcggagccgatct

SEQ ID NO: 154271 - DNA, 714 bp, Zea Mays
ctgatgacaggcagacagagaaatcacactgccccctgatgattttatttccttgctagattgagacatgtagaaaagttgagaatgcgctgaggcgggtggacaggaaggcctcgcagatcaaagttctccccttccatgctgcgctggatcaggcccagcgcatcgcaaacatcaaggagttcctgaacaagcaaacggctgactccatgttccttgtgtgcacagatagggcgtcgcggggcatcgactttgcgaacgtgaaccacgtggtgctcttcgactacccccgcgacccgagcgagtacgtgcggcgcgtcgggcggactgcccgcggcgcgtccggcaacggcaaggcgttcgtgttcgcggtgggcaagcaggtgtccctggccaggagggtgatggagaggaacatgaaggggcacccgctgcacgacgtgccgtgcgtctagagaccctggagggggaggtgtctgatgcgtgcaattgctgcctaaactctaagcatgttttttgtttcggaacgttgtgggtcatctatcctatccctcgcttgactcttctcggaaaaggttctcgttcccatgaatcttgatctgcctcctggtattgatagcgattgatcgaattcctactctggtttgagaagcttttcagttttccttatctcttcctgactgaaaagaattcaaaatacgtatatttggtact

SEQ ID NO: 154272 - DNA, 691 bp, Zea Mays
gaactggtctatcggcgccgcccttcacgccgagagttccctctttctcgcttgctcactcgcgtcgacgactgggctaccggcgcctccaccctccgcctggtgtccttcgccgtcgacgagcgcacaccagggtacagtacgtattgctcgtgatttgtgtaactacggagcaagctgcatacagcacaagatagaagatgggtatccttgagaggatcaaggagattgaggccgagatggctcggactcagaaaaataaagcaacagaatatcatcttggacaactgaaggcaaaactagcaaagttgaggacacaactattagagcctccaaagggttccagcggaggtggagatggttttgaagtcacaaagtttgggcatggtcgtgttgcacttattggatttcccagtgttggaaagtcaactcttttaacgatgttgactgggacacattctgaagctgcatcatatgagttcacaacgcttacttgcattcctggaattgttcattacaatgataccaaaatccagcttcttgatcttcctggtatcattgaaggagcttctgaaggcaaggggcgtggtaggcaggttattgctgttgcaaagtcatcagatcttgtgctgatggttctggatgcctcaaagatgaggaaatcttcttttattatcaacaaatcggagaa

SEQ ID NO: 154273 - DNA, 684 bp, Zea Mays
gaactggtctatcggcgccgcccttcacgccgagagttccctctttctcgcttgctcactcgcgtcgacgactgggctaccggcgcctccaccctccgcctggtgtccttcgccgtcgacgagcgcacaccagtacgtattgctcgtgatttgtgtaactacggagcaagctgcatacagcacaagatagaagatgggtatccttgagaggatcaaggagattgaggccgagatggctcggactcagaaaaataaagcaacagaatatcatcttggacaactgaaggcaaaactagcaaagttgaggacacaactattagagcctccaaagggttccagcggaggtggagatggttttgaagtcacaaagtttgggcatggtcgtgttgcacttattggatttcccagtgttggaaagtcaactcttttaacgatgttgactgggacacattctgaagctgcatcatatgagttcacaacgcttacttgcattcctggaattgttcattacaatgataccaaaatccagcttcttgatcttcctggtatcattgaaggagcttctgaaggcaaggggcgtggtaggcaggttattgctgttgcaaagtcatcagatcttgtgctgatggttctggatgcctcaaagatgaggaaatcttcttttattatcaacaaatcggagaa

SEQ ID NO: 154274 - DNA, 273 bp, Zea Mays
gtggattctgtatatattccagacatttcagcaaaatatccattgtgtgtttctggaaggtacaatggcaagcttccggagacacttatcgccaagggtcacttggctgacatgagtgaaatatctattgaattgaaagtccaacatataaaggatatacctcttgataaaataacttgtacaaataaggatgaagttttcctctaccttaaggctgaactttattgcattactttgaagtggattcttgaccccaagaaacttacagcgtag

SEQ ID NO: 154275 - DNA, 959 bp, Zea Mays
atggctggaggctgcctgggttcgggagccttggttactggaacagatagtcttcttgcaaaccaatctccggctcaattcattagtccatgcgatatttggttgctggttacctctgacatattctgctctcatgtgttgaagacatatatctggcttcagtgctttgatggttccatacaacaagtggaggaggaggttgcaatgttctgccccatgatatgtcaggaaattgtgaaaaatggcacagggtcatcaaaaaatcatgctattgctctcccggaaagagttaatccagccaatttgagtttgattcttgactactgtcgatttcatcagatcactgggcgttcaaacatggagcggaagtcctttgatgaaaagtttgttaggatagaaacagaaagactctgcgaattgacttctgcagccgacagtctacagttaaagccacttgttgatcttactggccgagcgcttgctcgaatcattgaaggaaagacacctgaggaaattcgtgacattttccatttaccagatgatttaacagaggaagagaaattggagcccctaaaaaatataaatgatggtcctgctaggattcgcctactgaaccggttgtatgccaagaagcggaaagagctccaggagcgccataagctgaaggatgttcaagtacagaaagagcaaaaagatgagagatctttggatgagttacttagttttattaatggggatggaggtatagctacagttcaggaggcaggaaagctaccaagagtaagaaaaagaataaaaggaaggatcatgttgagaaccccccaaaagctgactctgagcctgtaaatgcgaatccagatatgcaagatgatgccgagtacccttttgaagatgctgacctcgatgatggacttgatcctgcaatgaaagaagagcttgataggtttgtttttaacatg

SEQ ID NO: 154276 - DNA, 1725 bp, Zea Mays
atggctggaggctgcctgggttcgggagccttggttactggaacagatagtcttcttgcaaaccaatctccggctcaattcattagtccatgcgatatttggttgctggttacctctgacatattctgctctcatgtgttgaagacatatatctggcttcagtgctttgatggttccatacaacaagtggaggaggaggttgcaatgttctgccccatgatatgtcaggaaattgtgaaaaatggcacagggtcatcaaaaaatcatgctattgctctcccggaaagagttaatccagccaatttgagtttgattcttgactactgtcgatttcatcagatcactgggcgttcaaacatggagcggaagtcctttgatgaaaagtttgttaggatagaaacagaaagactctgcgaattgacttctgcagccgacagtctacagttaaagccacttgttgatcttactggccgagcgcttgctcgaatcattgaaggaaagacacctgaggaaattcgtgacattttccatttaccagatgatttaacagaggaagagaaattggagcccctaaaaaatataaatgatggtcctgctaggattcgcctactgaaccggttgtatgccaagaagcggaaagagctccaggagcgccataagctgaaggatgttcaagtacagaaagagcaaaaagatgagagatctttggatgagttacttagttttattaatggggatggaggttcaggaggcaggaaagctaccaagagtaagaaaaagaataaaaggaaggatcatgttgagaaccccccaaaagctgactctgagcctgtaaatgcgaacatttatttcttacgcgatctatcatgggagtttaggaaggagctgcttgtgtggttccgtgcaaagtcgatagaagtaatgtttctagacttccatgccagaatccagatatgcaagatgatgccgagtacccttttgaagatgctgacctcgatgatggacttgatcctgcaatgaaagaagagcttgatagagaagttgaggcctttgcgaagaggttggattcagtttggaaggagtcacatattggtggtaatggttctgcacggagatttcctgggtttaatcacatgtgagtgttaagctggtaggatcagaaggcagaagcagaggagatttgtggacatacagcctggaagagagtaaaaataccaaacagtcgacttgctcctgtgtgtttgataagggcatgtacaaccctgaaatcatggatcggttttgcgaagtacaaaagacatgttaagagactgtataccctgagcctttggatcataaatgtaagtaagaggcaatgtgtgtagaattgtgtagagacagtctcttcgcggaaagagagcctgtctattgtatttttttcaattaaccctcaagagacttcatattgaaagaggttatacatgtcagagccaagcatgcagacatgctattttgttggggaggaggctgcctagttgggatgaagcttagcatggttcaaggaaaaagtgtagttttttttctttggaaagggaggattagaggtctgtcttgtctgtgttgccagggaggaggctgcctagttgggatgaagcttataatgcagtatatagtgtaaaacagtgttttgaatgactatatggctgaactgttggacacagtttgtatcaatgaaatttcgttgat

SEQ ID NO: 154277 - DNA, 786 bp, Zea Mays
attagcagttatggaaattctataaaagccccagtttggctacttaattgcacacattcatcaccttataggtactgaaagcacaaaagattgcaaaggggaaaggatattctgatgtcctttatttggatgctgttcatgacaaatatctcgaagaagtctcttcctgcaatatttttgttgtgaaagacaatgttatttctacgcctgccattaaaggaacaatacttcctggtataacgaggaaaagtatcattgaagttgctcagagcaaaggtttcaaggttgaggagcgtctggtgtgtgtagatgagttgattaacgctgatgaagttttctgcacggggactgctgttgtggtgtcacctgtggggagtgttacatatatggggaaaagggtggaatatggcaaccaaggagtcggtgtcgtgtctcagcaactatacaagtcacttacaagcctccagatgggcaatgtggaggactggatgggttggaccatgcaacttaatcagtagcggatcacagatattgccttggcagatcccagattattacagctactgggtgcgatagggttttttttggcagatccatcttgagcatatttgactgtacctgtttcccttgagactaagacgaaagtgatcttactgatcttttgtttcaaatctgtaacgataaaataaaatgtggtttgcaccttgccatgtactgtaagaatggacccaaaaaaaaattcatgctgctgttgcttgatatctgaaactgtttatttgctgcagc

SEQ ID NO: 154278 - DNA, 405 bp, Zea Mays
ttttttttctaaacgtaatagcaggagctctgcctttcaattaaaaagaacggaattgatctagttttaaagaaaatcgggtctaaaacctacacagagtgcacaaacaactcacacaacggtagccctccacacaaaactcgttcagattcatcgttgtcgagctcaacgtaaaggatgagcagctctgacttcactagacaggccgcacatggctaaaggaacttaacgactcctacacccaaacatcgacgcaaaaggatgccaagcctcaatacactccacgcaaggcagctccggttcttcaccaacaagtttgcttctccgcctcgctcccggcaattgcccaacctacgaaacaatccaatccttgataagagggtttagtctcatatcattgttgtc

SEQ ID NO: 154279 - DNA, 1799 bp, Zea Mays
gcacaggtttggaaaccatggggttggtccagcttgcttagcgatgttattcctaataaaactgcaaaaaggaagttggaagtcacatcaattgaggaaggtgaagttgtggatgatactgttgatgctaaaaggcctagcaagactccccctcatagtgttgatagaagctttgaagcgattagatccataaataaatatttaactgagaaagcccttgctgaattagtattgccatgcatcgacagaagttctgctgatatccgtggtatactttctgttgatctgatcaaacagatggggactatcagtgaacatatcaaagcaatagcacggaatggtgctaaacaagctggttcagtcccttcaggtaatgaagtgccatcaagcaaatcaagtggtcgtaaaggaattcgaggtggaagcccaaacattggcagaagagctccggttggtaatgacccaagccctccgtcggcttctgctctgagggcagcattgtggttacgcctccaattcatcattaggttgcttccagtaatcatggcagataggagcatgagacaaacacttgcttctgcaatcctaggcctgcttgcaacgcgcatgatttatgaagatgcagatctgccccttccacctaccaatgcaactgctttaaggcgggaggtggattccctgctggagcctcccctggacgtcctgcttgatcggcctggtgaaagtctttttgagaggcttttatgtgttctccatgcacttcttggcagctacaaaccaagttggctgaagtcaaggtcagcctctaggtcgacaattagaatccaacgagatttttccgcatttgataacgaagcagccgagggtttacagtctgcgttggatcacatggaattgcctgaaacaatcaggcggaggatccaagcagccatgcctcttcttccaccatcccggcacccttctttgcaatgtcaacctccgcagttgtcgttggctgcattaacaccactccagagcagtacatctggtgtaggtccgcaacagaaaagttgttctgcgagctgggtgcccactaacgtctcaggcagaagcaaggcggcgttgccttcgcatgatcctgaaatggaggtagatccatggaatctgctcgaagatggcacaagctgcccctcaacagcatctggaagccatggcgcgagtggagtgacgggtgaccatgctaatctgaaagcgtgcagctggcttaagggtgctgtgagggtgaggaggacagaactgacctacattggctctttagacgatgacacctgacgtgtgtatgattattttggtgaattgtggaggaaattagtctcacctgttggcactggagtgaatggtggaaaccaaccatggcccttggctttaggatggttgttgttggtgtagaatacatacacatcgctgcccccgttttgttttgttttgttttgttttagggccttgtgggggcggctgtatataatggaaaaacatttgatccattactgaggcatggcccgagaagacaccttcaaatgggcttctgtgtaagcttgcttatttgagaagtaggaagccatgcagtagattttgtatccaaaagccgtgtacttgtttttgtctgatatgtaatctagcgcatgtcacacatatgtattcccttcctttgattgaagggctaatggtatgatgtcttttttttttgataaaacatgaggggtgagagcccctactggaaattaaataaaaaaatatgtacaaggagttacacgtttctt

SEQ ID NO: 154280 - DNA, 2443 bp, Zea Mays
agattactgatacgaaaagaaaatgaagaaggaagtagaagaggtggagggccacggttatggcgccgccactcccatgacgccgccgccgtcgtcgctcggtcttccttccccctcggtctcgacattgacctccgccgctgccgctagggttttggcgcggccaatgcccgcctcggtcccaagcttgcgggcgccttcccccttcgtgcgggccatgcgcacccgcgttgatccgccgccgccacagccgctcacggcccctcctcttcttcgtcctcgtccggtgctaccgccgccgccgataccagagaagcagcggcgggggcgcccgcgcaactgcgaccgactcctcccgccgccgccgggcttccaccttgctccgtccgcacgggcaccgctgcctgcccgcggccaaccttcatctagggggcatccctttcgcggtcaattcggtgggctccagttgcacgtgctcaaaatacatgtgggagaggatatcgtatcaaagattgtgcaggtctcgaaaataactgggaaggctgtctgtgttctctcagtgtttggggccgttcaggattgctatctgctccactctgctgtcatcttaaatcacaagggtcctttagaaatcattcatgtgtttggatccattttgacatctgatagtcctggatttgggtgcttatctgcgactcttgcttgtggtgattgttctcttgtcggtggcattgcagttggacctctcatagctgcaacaccggtgcaggcaattgttgggagcttccacaatgatgctttccaggcaaacaagaaacctaagctcgttgcatgttaccccagttctcatgttaccgctggcactgggggcatgtgttgcgtcaattctaagattaccattggcagtttgagaaaacatgataccagttcttggtttcccattggcaatggaagcacaactcattccaattctcaagttactgttgatgatggaagcacaaatcaccccaattctcaggttactgttggcagtggaaacacacatcatcctaattcacaggtgaccattgacagtaggagcatgtgttgcctcagttttgaggctggcattggtagttggagtaaagatgatccaagttcttggtttcccattggcactgggagtacagatcactccaattttcaagttactgttggcactgggagcacacaataccccagctcccaggttcccactggcattgggagtgcatatcaatctgattttcatgtcacattgggtgacagaagcgcaagtatccccgattctcaggctactgttcactatgggattaaacatcaacccaattcctgtgtcagtgttggcaacgggagcacaggtagcgtcaattctcaggatattgttggacacggaagcacatataaccctgaatctctgcctgccattggcgacgggagcatgcataacaccaattttgaggtcgtggtaggagttgggagcacagacaagggcaattcacaggacacccttgttgatgggaacctgaatcgccccagttctatggtttctgttgacaacggaagctcctgttaccccaattgtaaggatgctgttggcgatacgtgtgctccatcctctgaaggctctaatccagaatatgcatcctgcactgtagtagtggaacagagtagattgagcagagacagatgtgaatctctcgcaagtgatggcttcttaacgtagcaacactttaggtgattgtttatgttttttctctgaagacagtagccaagtacatgtccttggacagcgagggtgactccagcagttcatccaaagtttatccataagcactgttatgcactgaagactgcactgttcgcagagtggagtttgaatatagctatgtgtatgggtaagctgttggagatagtgttatgcttttgtggatgaccgccaaagtatccttttgggatggtaggaagttttgaagtccagcagtagttgcgttctttgcagggacatggcagtgttgagaattgtggtgcagtctgttgtagctttagttgctaacagtgttggatttgtgctgaggtctgtcagatgagaaatcctaacatagcagaagggttcgttgagctttcaatatatatgatactgatgagattttatgaggcaagttgtcgggtatatctcgtgcagtaaagcagaatcaaggctccactgcaacagaaactgatcatgtgagtgtatgatagatgtcatggcgttagaccaacgatttgaaattgaaatgttgctaccatgtagaaagatgtgatatgtttagctagatggtctccagcagctcttctattacattatctattctacctcctatttcaaacttcaatctatctgcagttgcacgaccataaatacgatctgtcaaacttcgctcta

SEQ ID NO: 154281 - DNA, 576 bp, Zea Mays
ctggtcacttgggctcgctacaatgaggctcaaagcactctggtgggcagttacccgcgacttcttctcatggagggtggtctgccaacagccaccaagacagaaggaaggtccttcaaggggctccattgatacttcacaccgagagaggcagatggattttgccccgaattgtttctctaggacaacaatagcacatcatcatatttattttcatgtctttgttgtatgataccaatcttgcatatatatgcatagttagttagttactaccatttcaagcattctaacaaggttccattgccaggaagaatcacagggtactgtagaaaatatcatatcctaaacattattttttagtatcctaatcgacatttttggtcccagacttttcgttgtcctttcgactccaacagatctgcatgtataggttcaaggctagctacaactagattaatctcaccaatgaaagaatatcttttttatgcctaagaattgaagctacaacacgctagagctatcatgctcatggcaagacgaacccttcttctgcgatgatggaatccaacccgttcc

SEQ ID NO: 154282 - DNA, 2320 bp, Zea Mays
ctgtgactgtgagtgagcagccccgtggagtggcggcaatcatcgctagcaagacgtgaagagttctcaagcaggaggcgtgtgacgtcagcaaggacaccagtgttttcagtggagtggtggcgccagcaggaggccggcgaggggtcttctcttctagtagatgatgattgatgtggacttgaatttggaagttctaggaggagtaggagtatataaactggaggaggagtggaggagaggagagccgaatgcgagcgcgatccatggctccaaatcgaatccaaagaaactagtagaagtaatgcgggcgagggatttgcacccgctgtgctgcctccccgccgccgacggaggaccccctccgcctccccttgctcatgcaccgccggccgtggctgggctgctctacaagtggaccaacatcggcaagggctggcgcccgcgctggttcgccatccgcggtgccgtcctcgcctactccaagattccacgccgctccacgtcgcccccctcctccgccacttcctccacagccacccggatcattgggcacgcccgatacggccacgacagccccgtcggcctcgtgcacctcaagatctcctcgttccgtgaaagcaagtcagatgacaggcggttctacctaattactccagccaagacgctgcagctgagaacagactctgctaatgaacgagcggcttggattgaagcccttgtttctgctcgagctgaatcttctcctgatgggggtttattgactaaccagaatgatgcatcattttctacggagaggcttagaaatcgcatgcacgaggaaggccttgatgaaacaacgctgtgaagaatatgtaagctttctcagcaggcttccacagcagtttgaggtacttagcgcagatgataatgctaatatgattgagctccactcgcacttgatgaaacctgactattgcagctctggacagggaaaatgtagtgagagcagcaatacagaatcttctgatgatgttgggcaacaggagttggatgaacttttggatgacgatgactatcaattttatgatacaaggcagagtttcagtgattcagcaggactttcttgcttgaacatgaaatgttcaaattctggcaaggatacctttctttatggtgataaatttgtgaaaccaaaagctggtacaggtgacagtgagtgcctgccaccgtttttcaagcgtcgcacgaagttgcctgatccagttgagaaggaaaaaagtgttagtctttggtcaatgatcaaggataatgtcggaagagatcttacacaagtatgtcttccagtttactttaacgaaccattatcatctcttcaaaaatgctttgaggacttggagtattcttatttgttggatcgtgcatatgaatgtggcctaaaggttagtcatcatccaatggtcatggcttgtcattgtgaaggaaaagggtggaaattttggggagacagcaatgtaaagagcaagttctgggggcaaacaatccagctggatcctgttggtgtgttatctgtagaatttgatgatggagaaattttccaatggagtaaggttacaacaacaattaataacgttatcattggtcaaatttattgtaatcactatggaacgatgagtataactgggaacaggggatattcatgcaagctgattttcaaacggcaatctttcgttgagcgcaaccctcggcaggttgaaggattggttaaggacggtgatggttcgacggtggcaagcctaatgggaaagtgggatgagaggatgtactgcagcgcatcagggcagaatgtgattctgttgtgggagaaaaatgaagcttcgactaatcccactcgctataacctctcatcgttcgcaataactctgaacgagttgactccagaactcaaggagagccttccaccaacggattcaagactcagaccagatcagcgacatgtagagaacggggagtatagtaaggccaatgctgagaagctgcgactggagaggaggcaacggatgtcacggaagatgcaggacaatggttggaaaccaagatggttccgaagggatgatgacacattccgctatgtgggaggttactgggaggcacgacagcagcggaaatgggacggatgtcatgatatatttggtgaattcgtgtgactcaacagtgaggctgctcggaccttttatatatatatatatataataataataatgataatgataataataatctctggtctcccatgataatattaatatgtatgtgcagtgtgactgaacagtgaacacat

SEQ ID NO: 154283 - DNA, 2370 bp, Zea Mays
ctgtgactgtgagtgagcagccccgtggagtggcggcaatcatcgctagcaagacgtgaagagttctcaagcaggaggcgtgtgacgtcagcaaggacaccagtgttttcagtggagtggtggcgccagcaggaggccggcgaggggtcttctcttctagtagatgatgattgatgtggacttgaatttggaagttctaggaggagtaggagtatataaactggaggaggagtggaggagaggagagccgaatgcgagcgcgatccatggctccaaatcgaatccaaagaaactagtagaagtaatgcgggcgagggatttgcacccgctgtgctgcctccccgccgccgacggaggaccccctccgcctccccttgctcatgcaccgccggccgtggctgggctgctctacaagtggaccaacatcggcaagggctggcgcccgcgctggttcgccatccgcggtgccgtcctcgcctactccaagattccacgccgctccacgtcgcccccctcctccgccacttcctccacagccacccggatcattgggcacgcccgatacggccacgacagccccgtcggcctcgtgcacctcaagatctcctcgttccgtgaaagcaagtcagatgacaggcggttctacctaattactccagccaagacgctgcagctgagaacagactctgctaatgaacgagcggcttggattgaagcccttgtttctgctcgagctgaatcttctcctgatgggggtttattgactaaccagaatgatgcatcattttctacggagaggcttagaaatcgcatgcacgaggaaggccttggtgaggaaataattaaagactgtgaacagattgtccattcagaattctcacagtatcacacacagatgaaacaacgctgtgaagaatatgtaagctttctcagcaggcttccacagcagtttgaggtacttagcgcagatgataatgctaatatgattgagctccactcgcacttgatgaaacctgactattgcagctctggacagggaaaatgtagtgaatcttctgatgatgttgggcaacaggagttggatgaacttttggatgacgatgactatcaattttatgatacaaggcagagtttcagtgattcagcaggactttcttgcttgaacatgaaatgttcaaattctggcaaggatacctttctttatggtgataaatttgtgaaaccaaaagctggtacaggtgacagtgagtgcctgccaccgtttttcaagcgtcgcacgaagttgcctgatccagttgagaaggaaaaaagtgttagtctttggtcaatgatcaaggataatgtcggaagagatcttacacaagtatgtcttccagtttactttaacgaaccattatcatctcttcaaaaatgctttgaggacttggagtattcttatttgttggatcgtgcatatgaatgtggcctaaaggttagtcatcatccaatggtcatggcttgtcattgtgaaggaaaagggtggaaattttggggagacagcaatgtaaagagcaagttctgggggcaaacaatccagctggatcctgttggtgtgttatctgtagaatttgatgatggagaaattttccaatggagtaaggttacaacaacaattaataacgttatcattggtcaaatttattgtaatcactatggaacgatgagtataactgggaacaggggatattcatgcaagctgattttcaaacggcaatctttcgttgagcgcaaccctcggcaggttgaaggattggttaaggacggtgatggttcgacggtggcaagcctaatgggaaagtgggatgagaggatgtactgcagcgcatcagggcagaatgtgattctgttgtgggagaaaaatgaagcttcgactaatcccactcgctataacctctcatcgttcgcaataactctgaacgagttgactccagaactcaaggagagccttccaccaacggattcaagactcagaccagatcagcgacatgtagagaacggggagtatagtaaggccaatgctgagaagctgcgactggagaggaggcaacggatgtcacggaagatgcaggacaatggttggaaaccaagatggttccgaagggatgatgacacattccgctatgtgggaggttactgggaggcacgacagcagcggaaatgggacggatgtcatgatatatttggtgaattcgtgtgactcaacagtgaggctgctcggaccttttatatatatatatatataataataataatgataatgataataataatctctggtctcccatgataatattaatatgtatgtgcagtgtgactgaacagtgaacacat

SEQ ID NO: 154284 - DNA, 2541 bp, Zea Mays
ctgtgactgtgagtgagcagccccgtggagtggcggcaatcatcgctagcaagacgtgaagagttctcaagcaggaggcgtgtgacgtcagcaaggacaccagtgttttcagtggagtggtggcgccagcaggaggccggcgaggggtcttctcttctagtagatgatgattgatgtggacttgaatttggaagttctaggaggagtaggagtatataaactggaggaggagtggaggagaggagagccgaatgcgagcgcgatccatggctccaaatcgaatccaaagaaactagtagaagtaatgcgggcgagggatttgcacccgctgtgctgcctccccgccgccgacggaggaccccctccgcctccccttgctcatgcaccgccggccgtggctgggctgctctacaagtggaccaacatcggcaagggctggcgcccgcgctggttcgccatccgcggtgccgtcctcgcctactccaagattccacgccgctccacgtcgcccccctcctccgccacttcctccacagccacccggatcattgggcacgcccgatacggccacgacagccccgtcggcctcgtgcacctcaagatctcctcgttccgtgaaagcaagtcagatgacaggcggttctacctaattactccagccaagacgctgcagctgagaacagactctgctaatgaacgagcggcttggattgaagcccttgtttctgctcgagctgaatcttctcctgatgggggtttattgactaaccagaatgatgcatcattttctacggagaggcttagaaatcgcatgcacgaggaaggccttggtgaggaaataattaaagactgtgaacagattgtccattcagaattctcacagtatcacacacagatgaaacaacgctgtgaagaatatgtaagctttctcagcaggcttccacagcagtttgaggtacttagcgcagatgataatgctaatatgattgagctccactcgcacttgatgaaacctgactattgcagctctggacagggaaaatgtagtgagagcagcaatacagaatcttctgatgatgttgggcaacaggagttggatgaacttttggatgacgatgactatcaattttatgatacaaggcagagtttcagtgattcagcaggactttcttgcttgaacatgaaatgttcaaattctggcaaggatacctttctttatggtgataaatttgtgaaaccaaaagctggtacaggtgacagtgagtgcctgccaccgtttttcaagcgtcgcacgaagttgcctgatccagttgagaaggaaaaaagtgttagtctttggtcaatgatcaaggataatgtcggaagagatcttacacaagtatgtcttccagtttactttaacgaaccattatcatctcttcaaaaatgctttgaggacttggagtattcttatttgttggatcgtgcatatgaatgtggcctaaagggggacaatttgatgagaattcttaatgttgctgcatttgcggtttctgggtatgcttcctcggttgggcgcccctgcaaacctttcaatccattgttaggggaaacctatgaagctgattaccctgaaaatggaatccgtttcttttctgaaaaggttagtcatcatccaatggtcatggcttgtcattgtgaaggaaaagggtggaaattttggggagacagcaatgtaaagagcaagttctgggggcaaacaatccagctggatcctgttggtgtgttatctgtagaatttgatgatggagaaattttccaatggagtaaggttacaacaacaattaataacgttatcattggtcaaatttattgtaatcactatggaacgatgagtataactgggaacaggggatattcatgcaagctgattttcaaacggcaatctttcgttgagcgcaaccctcggcaggttgaaggattggttaaggacggtgatggttcgacggtggcaagcctaatgggaaagtgggatgagaggatgtactgcagcgcatcagggcagaatgtgattctgttgtgggagaaaaatgaagcttcgactaatcccactcgctataacctctcatcgttcgcaataactctgaacgagttgactccagaactcaaggagagccttccaccaacggattcaagactcagaccagatcagcgacatgtagagaacggggagtatagtaaggccaatgctgagaagctgcgactggagaggaggcaacggatgtcacggaagatgcaggacaatggttggaaaccaagatggttccgaagggatgatgacacattccgctatgtgggaggttactgggaggcacgacagcagcggaaatgggacggatgtcatgatatatttggtgaattcgtgtgactcaacagtgaggctgctcggaccttttatatatatatatatataataataataatgataatgataataataatctctggtctcccatgataatattaatatgtatgtgcagtgtgactgaacagtgaacacat

SEQ ID NO: 154285 - DNA, 747 bp, Zea Mays
agccagctgtcttgttcctccgtccgggaggacgaggaggaggaggcgcatccctccatcctctgcgacttggtgcgtctctcgagctcgagtcgattgatgattcatcttcctagtctcgtctccgcgccattctccaaatccatctatcatcaccatcccgatcccagccccagccccagccccagccccgccagacccagacccgatgcagcaacagcaggacccagcacccgccgatcccgacccactgccgccccccgacctcggtgatgccgccgcctcgtccgcaacgcagacgatcccttcccgcaacgcctcctccaagtacgatttcgtcaaggtcaaggtctggctcggggagaacgccgaccactactacgtcctctccaggttcctcctcagcaggatgctcacagtcaccaagattcctaatcatgtcgccatcaagattgcccttgagctcaagaagctgcttgtcgacaacagcctgcttgatgtatcccagagtgatctagaggctaatctgttcaagcttatggaaaaacggggatacggagaggagtatataaatcgctataaaatgatgacaaggttccatcatcaacgggttccactagtaattttggtgtgtggaactgcctgtactggaaaatcaacaatcgctacacaacttgctcagaggctcaatttgcctaatgttttgcagactgacatggtgtatgagctgctgcggacatcaacaga

SEQ ID NO: 154286 - DNA, 991 bp, Zea Mays
agggaatacatttggatccaagcatttatcttatggatgaggaaaagagtgatggtaattccaggacggagaagacagtaacagattctgaaaatccaggcatctctgtagaaaggaaggtcgaacatcaattcaaaaatggactagcagagaacagaatggattctactgaggacaacaaaaactttgtcaaaagcaaaaaaagcacgctggagaaaggtagaaccagtgaaggtctatcttatgctcagaaccacgaaaccaaggtccatgattctgcacgttctcaagaaaaaaatcccaaggatgaaagtgatgggcacaaagatttggaccaacagaagaataatgccaccaagaaagacaaacctgctgctgagccgataattgttccaattgtactgaggatgtctgattttgatcacaaagcattgctagaggaatggatagccactagagctttcagagataattgcattcctcaggatcatcggaaacttataaacaaccttaagcttattcaggactacctttgttcttttgagtcacagggattgaccattgttgatatctcagcaaattcgtttcctcaaacattagattggcttcacagctatcttcttcagtgcatcgagcgaggtcttttggctgcgtgtttagaaagctgcaatcaaggtcaatgacactcttggatgtaacctgtccaaccacacctcagtgggcattatatgctggcaatggacactaagaatatcattgtaaaggattacgcatgagtctggatatcatctccaaccaagaccgatatgaaaataccatcgtgatgttgtcaataccagccataagcgtgggtctgtctgattggggttactcgcattaatattgtactgtattgtattagaggttatgcggcatactcataatctgaataagataacaaaatttggcattgtttgctttatctgaatataaacttgtaaagatttatcta

SEQ ID NO: 154287 - DNA, 707 bp, Zea Mays
aaaagcaaaaaaagcacgctggagaaaggtgatgggcacaaagatttggaccaacagaagaataatgccaccaagaaagacaaacctgctgctgagccgataattgttccaattgtactgaggatgtctgattttgatcacaaagcattgctagaggaatggatagccactagagctttcagagataattgcattcctcaggatcatcggaaacttataaacaaccttaagcttattcaggactacctttgttcttttgagtcacagggattgaccattgttgatatctcagcaaattcgtttcctcaaacattagattggcttcacagctatcttcttcagtgcatcgagcgaggtcttttggctgcgtgtttagaaagctgcaatcaaggtcaatgacactcttggatgtaacctgtccaaccacacctcagtgggcattatatgctggcaatggacactaagaatatcattgtaaaggattacgcatgagtctggatatcatctccaaccaagaccgatatgaaaataccatcgtgatgttgtcaataccagccataagcgtgggtctgtctgattggggttactcgcattaatattgtactgtattgtattagaggttatgcggcatactcataatctgaataagataacaaaatttggcattgtttgctttatctgaatataaacttgtaaagatttatcta

SEQ ID NO: 154288 - DNA, 606 bp, Zea Mays
atgacgaaggcccttgccgatctcactgtcgccatcactcaaatgatcagtaggccgccaacaccaccaccgcccccagcgtccaccagccctacttccatccatatggcatgccaggttatggcggggatacctcccttgtcaaaccccaccacgccacccataccatcatcgcaaaaccctcccaaccagcaccaccacaaccttccctttcccacattcgacggcaaagaggatcatgttggctggttgtcccgctgtgagagcttcttctacaatcaagcgacgccagaggtggataaagtatggatggccacgtactatctcacgagcgctgcacagctgtggtccgtcatgctacggcgcgacgagcccacactacactggccatgcttcaagacgttgtgccagcaatgttttgggcctcctctgagcacgaacacattgggcgaggtggcacgcctgccgttccgctccacggtggaggactaccaagatcgattcctagctctcctgtgccacacggagcccatgccgctgccgcaccaacaggcccaactattcaccgcgggactgccatggcatctccgggtggacgtcgaactg

SEQ ID NO: 154289 - DNA, 365 bp, Zea Mays
cttattacagctcccattccaggtgtcatgtagggctctagtagagagtccagtaggccttatttattttctttcttctttttcttctttatttcttttttctgttgtgtttgtatttggtctaattttagacccttcttcttaattcaatgatacgcagctctcctgcgtgttcgaaaaaaaaatatactaccaagatcagtgtgacacacatcaaacacacattgattcctaaacttccacagctgccaggcaatgaggatgatgatagtattcatcccttttccttggggaacaccttaattattctgccccaccaggatgcaaaacaactgtatgtggcttggggtgctaagactgcgaag

SEQ ID NO: 154290 - DNA, 1354 bp, Zea Mays
taaagaagttgacttgtgataaaattagagcgaagtgtaatttgaatggcaggcacaagacagagaagcaggtgggaagtcgacgcagttgtttgttgtggatgagttgcgtgtgttgctgctgccgcgcgtgcgtgtcccccgacggccccggaccacgactccctcctcccgccgccgccttctccttcgtcggggaccgaatgcagcgggtcgtcgtcatgcgccacggcgatcgcctcgaccattccgagcccatgtggcccgccaacaagccgcgcccctgggatccgcctctcgacgacgccggcctcctccgcgcctggaccgtcggcaagtgcatcagggccgccgccgccaagcagggatgggccctccaccgggtcctcgtctccccgttcctgcgatgccgacagaccgccgcgcgcgccgtcgccgcgctatgtgccgtccccgacgacgacgcgctgctcgcggtcggcgacccggccaatgtgcccctcgacacctcacgcgtcaaggcttgttttcttgagtcttttagtcttgattgctgataaatttatttgctttatttcccacaaaacagtcaaaccaaatacagtaggcttcgttactgattgctattcacagaaatatgttattgctatccctgcctaggagtatcgtccggctattgattccttgttactgaaatgcattctgaatcttccatttccatgtaccaggtgtctatcgagtatggattgtctgagatgatgaacacccaagcaatgggcattactgttagcaagctggctcccaacgtcagcaagtggtttcctgacttgccagagcttgaagccgacttcccggctggaaccatcgaccattctgcagaaccaatctacccggagctaccaaagtgggaggaatccatcatggaggcaagaagcagatacgcaagcataatcaaagctcttgctgacaaatatcctcatgaaaacctgctattagtaacacacggtgagggcgttggtgcatccatttcctactttgagatgggactagagatctacgacgtggagtactgtgcgtactctgttctggagaggcaggtgactgcagagcctggtgatgagcatgggggctttacctttaccgcggatagcttcaaggtcatgaccaagagtggtagcacaggcatacgatacgccccggtgtgagagggctggtttcttggttgagcaatatttttttaaaagcatgaataactggactgtctttttaatactttcgacttttagggttcatatcaatatggtttgctttatgggcatgtttggttcaacttttttatgacaatttttttttc

SEQ ID NO: 154291 - DNA, 1121 bp, Zea Mays
agagcgaagtgtaatttgaatggcaggcacaagacagagaagcaggtgggaagtcgacgcagttgtttgttgtggatgagttgcgtgtgttgctgctgccgcgcgtgcgtgtcccccgacggccccggaccacgactccctcctcccgccgccgccttctccttcgtcggggaccgaatgcagcgggtcgtcgtcatgcgccacggcgatcgcctcgaccattccgagcccatgtggcccgccaacaagccgcgcccctgggatccgcctctcgacgacgccggcctcctccgcgcctggaccgtcggcaagtgcatcagggccgccgccgccaagcagggatgggccctccaccgggtcctcgtctccccgttcctgcgatgccgacagaccgccgcgcgcgccgtcgccgcgctatgtgccgtccccgacgacgacgcgctgctcgcggtcggcgacccggccaatgtgcccctcgacacctcacgcgtcaaggtgtctatcgagtatggattgtctgagatgatgaacacccaagcaatgggcattactgttagcaagctggctcccaacgtcagcaagtggtttcctgacttgccagagcttgaagccgacttcccggctggaaccatcgaccattctgcagaaccaatctacccggagctaccaaagtgggaggaatccatcatggaggcaagaagcagatacgcaagcataatcaaagctcttgctgacaaatatcctcatgaaaacctgctattagtaacacacggtgagggcgttggtgcatccatttcctactttgagatgggactagagatctacgacgtggagtactgtgcgtactctgttctggagaggcaggtgactgcagagcctggtgatgagcatgggggctttacctttaccgcggatagcttcaaggtcatgaccaagagtggtagcacaggcatacgatacgccccggtgtgagagggctggtttcttggttgagcaatatttttttaaaagcatgaataactggactgtctttttaatactttcgacttttagggttcatatcaatatggtttgctttatgggcatgtttggttcaacttttttatgacaatttttttttc

SEQ ID NO: 154292 - DNA, 219 bp, Zea Mays
ctattgagtgagagggacgcactcaagctggccgcgctggacgttgtggagcctggcattcaccacctgcttcaccttgccgttgacgctgtccctcgggatccagatgccacctttcgccagccattcgttaaagctgtgcggtgctatctgtgttctgcgatagccgagggaggtctcgtgagctttggcggcagcaaccagggatgtctgggccat

SEQ ID NO: 154293 - DNA, 1365 bp, Zea Mays
gtttcgttacccactagaatcattcgggtatttggcctacgaatttgggtattttggatttcgggctgtgaaatcgccaaacacctgagatctgctttttcggtctggtggaacgtggaattgcagcagacctgggcgggtaaagcgtgaacgcctgtacgacgcaacacgccgaggcggtggctgcggcggcggcgcgccgacgccgcggtcgcctcgtcctttccctcgtcgtcttcgttgctgtctccgccgccgcagccctcgcctacctatctttcccctctgccgggcggacatcgcccccggcggtccggacggaggccgactgctgcaggggtatggagggcctcgagctctggggcccggcggtcaagtggggctcagaccaccgcctgccctccgccgccgcctgctgcgccgcctgcaaggccatgtgccctcaccctaaggacggggcctgccgctgcgactcgtgggtcttctgcggtgacgagcgcaaatgcaaggacaggctcggggagtgctggctgaagaaacagaaggatgtcatggcccctgctgttattgcaaagggggaggacgtcatgtggacttctggtctaatctttggaaaaggagaggggattgtggggcttgaaacaaatttagggacacttcatattcaattgctgcctggttgcgcgccccgttcagtggaccacttcatcgagctcctgggcttgcgcaactgtgctggatgcagattttatcgtgcagaaggacgtgggaacgtctgggatgcaaaaggcgaccatgaaaaaaatgttgcatttggccccccatatgcattgcttcaaggaacactggaagttgatggtgtgcccttcaagaagataccaagagaagcatgtccggcggtgaaaagagggtccgttgcctgggtagggtcagggccagagttcctgatcagcttagcggaccacgaggagtggagggacgcctacaccgtgttcgggaatgtgcttcccatggacatggcgatcgctgaggagatgacactgctgccgacaagcacagacgtgtggagcaacgtgaaagtgaaggtgctgaaagatcctgtctacttcaaggtcaagagaagcagcaatgctagcgctgtctaggtgatgggcatatttcttcttgcttgtttggatggaaggctgtggcaacaccggcaaatggttgtttgaccatgaaaacctgtgttataactcacaggagacgatggtctcgcttcattgtgcaaagaaaggggagagttctaatacaacagtaatatactagcacagtagtaatatactagtacaatactcctagtacaaaggccggagattctctctt

SEQ ID NO: 154294 - DNA, 1462 bp, Zea Mays
gtttcgttacccactagaatcattcgggtatttggcctacgaatttgggtattttggatttcgggctgtgaaatcgccaaacacctgagatctgctttttcggtctggtggaacgtggaattgcagcagacctgggcgggtaaagcgtgaacgcctgtacgacgcaacacgccgaggcggtggctgcggcggcggcgcgccggtatttcgattgtgaattccctcctgtctcctgaagcaagcgcagcaatgccagcgcttcccgcttttcccctcacccgccgcccatccgatgccagacgccgcggtcgcctcgtcctttccctcgtcgtcttcgttgctgtctccgccgccgcagccctcgcctacctatctttcccctctgccgggcggacatcgcccccggcggtccggacggaggccgactgctgcaggggtatggagggcctcgagctctggggcccggcggtcaagtggggctcagaccaccgcctgccctccgccgccgcctgctgcgccgcctgcaaggccatgtgccctcaccctaaggacggggcctgccgctgcgactcgtgggtcttctgcggtgacgagcgcaaatgcaaggacaggctcggggagtgctggctgaagaaacagaaggatgtcatggcccctgctgttattgcaaagggggaggacgtcatgtggacttctggtctaatctttggaaaaggagaggggattgtggggcttgaaacaaatttagggacacttcatattcaattgctgcctggttgcgcgccccgttcagtggaccacttcatcgagctcctgggcttgcgcaactgtgctggatgcagattttatcgtgcagaaggacgtgggaacgtctgggatgcaaaaggcgaccatgaaaaaaatgttgcatttggccccccatatgcattgcttcaaggaacactggaagttgatggtgtgcccttcaagaagataccaagagaagcatgtccggcggtgaaaagagggtccgttgcctgggtagggtcagggccagagttcctgatcagcttagcggaccacgaggagtggagggacgcctacaccgtgttcgggaatgtgcttcccatggacatggcgatcgctgaggagatgacactgctgccgacaagcacagacgtgtggagcaacgtgaaagtgaaggtgctgaaagatcctgtctacttcaaggtcaagagaagcagcaatgctagcgctgtctaggtgatgggcatatttcttcttgcttgtttggatggaaggctgtggcaacaccggcaaatggttgtttgaccatgaaaacctgtgttataactcacaggagacgatggtctcgcttcattgtgcaaagaaaggggagagttctaatacaacagtaatatactagcacagtagtaatatactagtacaatactcctagtacaaaggccggagattctctctt

SEQ ID NO: 154295 - DNA, 924 bp, Zea Mays
gggaatcgagcagatgatctcagacaacgaccaggggaaccatgcatgcataaactacagttccatcagtccctcgctctccctgatgcggagcccaaaagcaggaaattaatggctggggatggggagctgaagctgctgggcatgtgggcgagcccgttcgtccttcgtgcgagactcgcgctcagcttcaagggcctcaagtatgagtacgtcgaggaggagatctttggaaacaagagcgagctcctcctcgagtccaacccggtgcacaagaaggtacccgtgctcatccacaacggcaaggctatctgcgagtcacagatcatcgtgcagtacatcagtgaggtctacgacggcacaggcccttctctcctccccgtcggcgcctacgaccgtgctgtggctcgcttttgggctgcctacgttgacgacaaggtcttcagctcgttcatgatgatgataatgggcaagacggacgacgagaaggcagaggggcggaagcagttgtttgccgcggcggagaccctggagggagcactgaaggagtgctcgtgctccaaggggagacccagacccttcttcggcggcgacagcgtcggctacgtggacatagcgctcggaggcttcgtcgcgtgggtgcagacgagggacctgctgtctggcttggagcatttcgacgccgacaagaccccgctcctcgcgacgtggctggagcgcttctgcgcattgaacgaaaccaaggctgtcatgccggacgtgatgaagctgctcgagttctccaagaagaggcaagcacaagctgatgcggctgccgctgcagtggtcttgaggtagctctcacttatgttttattgcatcctccctgagaatgaaaagaaacaactagcttactagctatatatgttgttgcctttctcagct

SEQ ID NO: 154296 - DNA, 917 bp, Zea Mays
gcagctagcagtcgttgtagaaacaaagaaataaagagagacgatgggcggagaagaaggcggcgacgggctgaagctgatcgggcagtacgggagcgcgttcgtgacgagggtgaagcttgctctcagcctcaaggggctgagctacgagtacgtcgaggaggatctcagaaacaagagcgcgctcctcctcagctccaacccggtgcacaaggcggttccagtgctgatccacagaggcaagcctatctgcgagtcgcaggtcatcgtgcagtacatcgacgaggcctttgccggcatcggcccgcccctcctcccggccgacccctacgaacgctcggtggcccgtttctgggctgccttcattgaagacaagcttgtgtccccgtgggaccgagtgttccgggcgaagacggaggacgagagggaagaggcgatgaagcagatgcttgcggcagtggacgctctggagggagcactgaaggaggggagacccagacccttcttcggcggcgacagcgtcgggtacgtggacgtcgttctgggcggtgccgtctcgtacgccaaggggcacgacgcgctcttcggttccgagctcatcgacgccgccaagacgccgctcctggccgcgtggatggagcgcttctgcgagctcgacgcggccaaggcggtcctgcaggacgtcgatagagtggtccagtacggcaagatgctgatcgccaagaatgctgctgccactcgtcaggcgtagtgtttttctgatcgatcagcttgtatgtatatgaattgaacttgtaaaaccaaatcgttcaagtttgatggtaagttccatgttagaaatactagcttgacacaaaatctaattatattaagggcttgctcggttattcctatcccatatggattggatgggattg

SEQ ID NO: 154297 - DNA, 78 bp, Zea Mays
ggtgtttggttgctcctttatattcagggggtgtttggttgctcctgctaaagtttatcttgggtcacatcaagcgtt

SEQ ID NO: 154298 - DNA, 936 bp, Zea Mays
gctggcaatggcgggagccgacgacctgaaggtgctgggcctgtggacgagcccgtttgtgatccgagtccgcatcgtgctcaacctcaagggcctggcgtacgagtacgtggaggacgacctcagcaacaagagcgcgctcctgctcagctccaacccggtgcacaagaccgtgcccgtgctgctccacgcgggtcgccccgtaaacgagtcccagatcatcctgcagtacatcgacgaggtctgggcggggaccgggccggccgtgctgccgcgcgacccctacgagcgcgcggccgcgcggttctgggcggcctacatcgacgacaaggtgaagtccgcgtggctgggcatgctgttcgagtgcagggacgagggggagcgggcggaggcggtggcgcgggccggcgaggcgctcgggacgctggagggcgcgctcagggggaagcccttcttcggccgggcgacggcgtcggcttcgtggacgccgtgctcggcgggtaccctcggctggttcggggccgtcggcaggatcatcggccgcaggctcatcgacccggccaagacgccgctgctggccgcgtgggaggaccggttccgcgccgccgacgtggccaagggcgtcgtgccggacgacgtcgacaagatgctcgcgttcctggagaccctgctcgcgaactactactcccaagtgactgtactgagagcgaactactgctccaagtgactaaataagaagggctgcttaattaataattacagtatataattgtgcttttcttccttgtacgtacgagtatagatggcaaatgggtcatgctaaatggaccggcagtaagcacaacatggccccgtagtgctttagcatgggcacgattcatataccacgtgattcttatgttcgtctccttgccaaaagaagcgggatctgaagta

SEQ ID NO: 154299 - DNA, 2093 bp, Zea Mays
cggaataataaaatcccccaacgactcgctcgagtgggagaggcggaggaggaggcagctttgtcgcggggcagcagcctacaagaacaagaggtcgcgccgctctagctctggttgggctctgcgccgcggggatcggcgtcggcaggaggaggacgaggaggggtggcggcgcgaccggcgggggcgaaggcggcgtcggtctgtgttgtagctgccaagaaatgagcttggggacctgcccggccgcggccggcgacgcgacggcagaggagctgcttcaacgggcgcgggggctggtgccacccgcccttgccgctgcgcgcgcggccactggcttcggtgggcggtggaaggctatcgcagcgaggctggagaaggtgccaccgtgcctgtcggacctgtccagccacccctgcttttccaagaactcgctgtgtcgggagctgctgcagtcggtggctgcgactctagcagaggccgccgagctcggtgcgcgctgccacgagcctccgaaggcagggaagctgcagatgcagagcgacctcgacgctctggccgggaagctggacctcaacctcagggactgctcccttcttgtcaagactggcgtgctgtctgacgcgacggttccggcggccccggctgcgtgcgcacaggctgacgtgcgggagctgcttgccaggctgcagattgggcacgcagaggcgaagcaccgggctgtggatggcctgctcgatgctctgcgcgaggacgagaagagcgtactgtcggcgctcggccgtggcaacgtggccgccctggtgcagctgctcacggcgacggcgcccaaggtcagggagaaggccgccactgttctgtgcttgcttgccgagtctggcagctgcgagggcctactcatgtcagaaggcgcgctgccgccgctcgtccggctggccgagtccggcagcctcgttgggcgggagaaggctgtcatcacgctgcagcggctgtccatgtcggccgacatcgcccgcgcaatcgtcggccacagcggcgtccgcgctctgatcgacatgtgccagaccggggactccatcacacagtccgccgcggccggagcgctcaagaacatctccgcagtgccggaagtccggcaggcgctggccgaagaaggcgtcgtgcgagtcatggtgagcctgctggactccggcgtcgttctcggctccaaggagtacgccgcggagtgcctgcagaacctgacgtcaagcaacgacagcctgcggcgtgccgttgtgtccgagggcgggctacggagcctgcttgcctacctggacgggccgctgccgcaggaatcacccgtggcggcggtccggaacctggtgagcgcggtctcagcggacagcctggtgtcgctttgcgtgctcccgcgcctcgtccacgtgctccgtgacggttccgtgggtgctcagcaggctgccgcggcgaccatctgcaagatgtcgagctccatggacatgaagcggctggtgggcgagcacgggtgcatcccgctgctggtgcggctgctggaggccaagtcgaacggcgcacgtgaggcggcggcgcaggcggtggcgagcctgatggggtgccccccgaacgcgagggacatgaagaaggacgagaagagcgtggccaacctggtgcagctgctggacccgagcccccagaacacggccaagaagtacgccatctcctgcctgctggcgctttcgacgagcaagcggtgcaagaagctgatgatctcccacggcgctatcgggtacctgaagaagctctcggagtcggagaaggacgtggccggcgcgaagaagctgctcgagaagctggaccgaggaaggctacgcagcctgttcggcaggaagtagccaccaggcgatcgatcgttcttcatgtacaaagatcccgtccgtcctgtttgtgtcatagcctctatgactatgatgaagtgaagtgcggcaggcagctgttcgttcatgtgaagtccctaacaatggccaaacgaatttctttctagcggtcccctcgcaatgctaatataaaatttcttcatggtgtcgtgggcctcagag

SEQ ID NO: 154300 - DNA, 2105 bp, Zea Mays
cggaataataaaatcccccaacgactcgctcgagtgggagaggcggaggaggaggcagctttgtcgcggggcagcagcctacaagaacaagaggtcgcgccgctctagctctggttgggctctgcgccgcggggatcggcgtcggcaggaggaggacgaggaggggtggcggcgcgaccggcgggggcgaaggcggcgtcggtgagaagagaggtctgtgttgtagctgccaagaaatgagcttggggacctgcccggccgcggccggcgacgcgacggcagaggagctgcttcaacgggcgcgggggctggtgccacccgcccttgccgctgcgcgcgcggccactggcttcggtgggcggtggaaggctatcgcagcgaggctggagaaggtgccaccgtgcctgtcggacctgtccagccacccctgcttttccaagaactcgctgtgtcgggagctgctgcagtcggtggctgcgactctagcagaggccgccgagctcggtgcgcgctgccacgagcctccgaaggcagggaagctgcagatgcagagcgacctcgacgctctggccgggaagctggacctcaacctcagggactgctcccttcttgtcaagactggcgtgctgtctgacgcgacggttccggcggccccggctgcgtgcgcacaggctgacgtgcgggagctgcttgccaggctgcagattgggcacgcagaggcgaagcaccgggctgtggatggcctgctcgatgctctgcgcgaggacgagaagagcgtactgtcggcgctcggccgtggcaacgtggccgccctggtgcagctgctcacggcgacggcgcccaaggtcagggagaaggccgccactgttctgtgcttgcttgccgagtctggcagctgcgagggcctactcatgtcagaaggcgcgctgccgccgctcgtccggctggccgagtccggcagcctcgttgggcgggagaaggctgtcatcacgctgcagcggctgtccatgtcggccgacatcgcccgcgcaatcgtcggccacagcggcgtccgcgctctgatcgacatgtgccagaccggggactccatcacacagtccgccgcggccggagcgctcaagaacatctccgcagtgccggaagtccggcaggcgctggccgaagaaggcgtcgtgcgagtcatggtgagcctgctggactccggcgtcgttctcggctccaaggagtacgccgcggagtgcctgcagaacctgacgtcaagcaacgacagcctgcggcgtgccgttgtgtccgagggcgggctacggagcctgcttgcctacctggacgggccgctgccgcaggaatcacccgtggcggcggtccggaacctggtgagcgcggtctcagcggacagcctggtgtcgctttgcgtgctcccgcgcctcgtccacgtgctccgtgacggttccgtgggtgctcagcaggctgccgcggcgaccatctgcaagatgtcgagctccatggacatgaagcggctggtgggcgagcacgggtgcatcccgctgctggtgcggctgctggaggccaagtcgaacggcgcacgtgaggcggcggcgcaggcggtggcgagcctgatggggtgccccccgaacgcgagggacatgaagaaggacgagaagagcgtggccaacctggtgcagctgctggacccgagcccccagaacacggccaagaagtacgccatctcctgcctgctggcgctttcgacgagcaagcggtgcaagaagctgatgatctcccacggcgctatcgggtacctgaagaagctctcggagtcggagaaggacgtggccggcgcgaagaagctgctcgagaagctggaccgaggaaggctacgcagcctgttcggcaggaagtagccaccaggcgatcgatcgttcttcatgtacaaagatcccgtccgtcctgtttgtgtcatagcctctatgactatgatgaagtgaagtgcggcaggcagctgttcgttcatgtgaagtccctaacaatggccaaacgaatttctttctagcggtcccctcgcaatgctaatataaaatttcttcatggtgtcgtgggcctcagag

SEQ ID NO: 154301 - DNA, 2183 bp, Zea Mays
cggaataataaaatcccccaacgactcgctcgagtgggagaggcggaggaggaggcagctttgtcgcggggcagcagcctacaagaacaagaggtcgcggtgagtgcgctcacgaaatgattccccaatatggcatgcctctcgtttgatggttgatgattggcgtcctgattgcagccgctctagctctggttgggctctgcgccgcggggatcggcgtcggcaggaggaggacgaggaggggtggcggcgcgaccggcgggggcgaaggcggcgtcggtgagaagagaggtctgtgttgtagctgccaagaaatgagcttggggacctgcccggccgcggccggcgacgcgacggcagaggagctgcttcaacgggcgcgggggctggtgccacccgcccttgccgctgcgcgcgcggccactggcttcggtgggcggtggaaggctatcgcagcgaggctggagaaggtgccaccgtgcctgtcggacctgtccagccacccctgcttttccaagaactcgctgtgtcgggagctgctgcagtcggtggctgcgactctagcagaggccgccgagctcggtgcgcgctgccacgagcctccgaaggcagggaagctgcagatgcagagcgacctcgacgctctggccgggaagctggacctcaacctcagggactgctcccttcttgtcaagactggcgtgctgtctgacgcgacggttccggcggccccggctgcgtgcgcacaggctgacgtgcgggagctgcttgccaggctgcagattgggcacgcagaggcgaagcaccgggctgtggatggcctgctcgatgctctgcgcgaggacgagaagagcgtactgtcggcgctcggccgtggcaacgtggccgccctggtgcagctgctcacggcgacggcgcccaaggtcagggagaaggccgccactgttctgtgcttgcttgccgagtctggcagctgcgagggcctactcatgtcagaaggcgcgctgccgccgctcgtccggctggccgagtccggcagcctcgttgggcgggagaaggctgtcatcacgctgcagcggctgtccatgtcggccgacatcgcccgcgcaatcgtcggccacagcggcgtccgcgctctgatcgacatgtgccagaccggggactccatcacacagtccgccgcggccggagcgctcaagaacatctccgcagtgccggaagtccggcaggcgctggccgaagaaggcgtcgtgcgagtcatggtgagcctgctggactccggcgtcgttctcggctccaaggagtacgccgcggagtgcctgcagaacctgacgtcaagcaacgacagcctgcggcgtgccgttgtgtccgagggcgggctacggagcctgcttgcctacctggacgggccgctgccgcaggaatcacccgtggcggcggtccggaacctggtgagcgcggtctcagcggacagcctggtgtcgctttgcgtgctcccgcgcctcgtccacgtgctccgtgacggttccgtgggtgctcagcaggctgccgcggcgaccatctgcaagatgtcgagctccatggacatgaagcggctggtgggcgagcacgggtgcatcccgctgctggtgcggctgctggaggccaagtcgaacggcgcacgtgaggcggcggcgcaggcggtggcgagcctgatggggtgccccccgaacgcgagggacatgaagaaggacgagaagagcgtggccaacctggtgcagctgctggacccgagcccccagaacacggccaagaagtacgccatctcctgcctgctggcgctttcgacgagcaagcggtgcaagaagctgatgatctcccacggcgctatcgggtacctgaagaagctctcggagtcggagaaggacgtggccggcgcgaagaagctgctcgagaagctggaccgaggaaggctacgcagcctgttcggcaggaagtagccaccaggcgatcgatcgttcttcatgtacaaagatcccgtccgtcctgtttgtgtcatagcctctatgactatgatgaagtgaagtgcggcaggcagctgttcgttcatgtgaagtccctaacaatggccaaacgaatttctttctagcggtcccctcgcaatgctaatataaaatttcttcatggtgtcgtgggcctcagag

SEQ ID NO: 154302 - DNA, 1948 bp, Zea Mays
ctctcaattcgacgtccagccgaagcaagaaaagatcataggggagagtatactcggtctgtgttgtagctgccaagaaatgagcttggggacctgcccggccgcggccggcgacgcgacggcagaggagctgcttcaacgggcgcgggggctggtgccacccgcccttgccgctgcgcgcgcggccactggcttcggtgggcggtggaaggctatcgcagcgaggctggagaaggtgccaccgtgcctgtcggacctgtccagccacccctgcttttccaagaactcgctgtgtcgggagctgctgcagtcggtggctgcgactctagcagaggccgccgagctcggtgcgcgctgccacgagcctccgaaggcagggaagctgcagatgcagagcgacctcgacgctctggccgggaagctggacctcaacctcagggactgctcccttcttgtcaagactggcgtgctgtctgacgcgacggttccggcggccccggctgcgtgcgcacaggctgacgtgcgggagctgcttgccaggctgcagattgggcacgcagaggcgaagcaccgggctgtggatggcctgctcgatgctctgcgcgaggacgagaagagcgtactgtcggcgctcggccgtggcaacgtggccgccctggtgcagctgctcacggcgacggcgcccaaggtcagggagaaggccgccactgttctgtgcttgcttgccgagtctggcagctgcgagggcctactcatgtcagaaggcgcgctgccgccgctcgtccggctggccgagtccggcagcctcgttgggcgggagaaggctgtcatcacgctgcagcggctgtccatgtcggccgacatcgcccgcgcaatcgtcggccacagcggcgtccgcgctctgatcgacatgtgccagaccggggactccatcacacagtccgccgcggccggagcgctcaagaacatctccgcagtgccggaagtccggcaggcgctggccgaagaaggcgtcgtgcgagtcatggtgagcctgctggactccggcgtcgttctcggctccaaggagtacgccgcggagtgcctgcagaacctgacgtcaagcaacgacagcctgcggcgtgccgttgtgtccgagggcgggctacggagcctgcttgcctacctggacgggccgctgccgcaggaatcacccgtggcggcggtccggaacctggtgagcgcggtctcagcggacagcctggtgtcgctttgcgtgctcccgcgcctcgtccacgtgctccgtgacggttccgtgggtgctcagcaggctgccgcggcgaccatctgcaagatgtcgagctccatggacatgaagcggctggtgggcgagcacgggtgcatcccgctgctggtgcggctgctggaggccaagtcgaacggcgcacgtgaggcggcggcgcaggcggtggcgagcctgatggggtgccccccgaacgcgagggacatgaagaaggacgagaagagcgtggccaacctggtgcagctgctggacccgagcccccagaacacggccaagaagtacgccatctcctgcctgctggcgctttcgacgagcaagcggtgcaagaagctgatgatctcccacggcgctatcgggtacctgaagaagctctcggagtcggagaaggacgtggccggcgcgaagaagctgctcgagaagctggaccgaggaaggctacgcagcctgttcggcaggaagtagccaccaggcgatcgatcgttcttcatgtacaaagatcccgtccgtcctgtttgtgtcatagcctctatgactatgatgaagtgaagtgcggcaggcagctgttcgttcatgtgaagtccctaacaatggccaaacgaatttctttctagcggtcccctcgcaatgctaatataaaatttcttcatggtgtcgtgggcctcagag

SEQ ID NO: 154303 - DNA, 2014 bp, Zea Mays
aaatgaattttgactcttttaaaaatagccgaggcttccttaccctgtctccttccagcttcttctatgcttgcaattcttttctgcttcggtgccaagaagctgagtagtgagcactgcaggtctgtgttgtagctgccaagaaatgagcttggggacctgcccggccgcggccggcgacgcgacggcagaggagctgcttcaacgggcgcgggggctggtgccacccgcccttgccgctgcgcgcgcggccactggcttcggtgggcggtggaaggctatcgcagcgaggctggagaaggtgccaccgtgcctgtcggacctgtccagccacccctgcttttccaagaactcgctgtgtcgggagctgctgcagtcggtggctgcgactctagcagaggccgccgagctcggtgcgcgctgccacgagcctccgaaggcagggaagctgcagatgcagagcgacctcgacgctctggccgggaagctggacctcaacctcagggactgctcccttcttgtcaagactggcgtgctgtctgacgcgacggttccggcggccccggctgcgtgcgcacaggctgacgtgcgggagctgcttgccaggctgcagattgggcacgcagaggcgaagcaccgggctgtggatggcctgctcgatgctctgcgcgaggacgagaagagcgtactgtcggcgctcggccgtggcaacgtggccgccctggtgcagctgctcacggcgacggcgcccaaggtcagggagaaggccgccactgttctgtgcttgcttgccgagtctggcagctgcgagggcctactcatgtcagaaggcgcgctgccgccgctcgtccggctggccgagtccggcagcctcgttgggcgggagaaggctgtcatcacgctgcagcggctgtccatgtcggccgacatcgcccgcgcaatcgtcggccacagcggcgtccgcgctctgatcgacatgtgccagaccggggactccatcacacagtccgccgcggccggagcgctcaagaacatctccgcagtgccggaagtccggcaggcgctggccgaagaaggcgtcgtgcgagtcatggtgagcctgctggactccggcgtcgttctcggctccaaggagtacgccgcggagtgcctgcagaacctgacgtcaagcaacgacagcctgcggcgtgccgttgtgtccgagggcgggctacggagcctgcttgcctacctggacgggccgctgccgcaggaatcacccgtggcggcggtccggaacctggtgagcgcggtctcagcggacagcctggtgtcgctttgcgtgctcccgcgcctcgtccacgtgctccgtgacggttccgtgggtgctcagcaggctgccgcggcgaccatctgcaagatgtcgagctccatggacatgaagcggctggtgggcgagcacgggtgcatcccgctgctggtgcggctgctggaggccaagtcgaacggcgcacgtgaggcggcggcgcaggcggtggcgagcctgatggggtgccccccgaacgcgagggacatgaagaaggacgagaagagcgtggccaacctggtgcagctgctggacccgagcccccagaacacggccaagaagtacgccatctcctgcctgctggcgctttcgacgagcaagcggtgcaagaagctgatgatctcccacggcgctatcgggtacctgaagaagctctcggagtcggagaaggacgtggccggcgcgaagaagctgctcgagaagctggaccgaggaaggctacgcagcctgttcggcaggaagtagccaccaggcgatcgatcgttcttcatgtacaaagatcccgtccgtcctgtttgtgtcatagcctctatgactatgatgaagtgaagtgcggcaggcagctgttcgttcatgtgaagtccctaacaatggccaaacgaatttctttctagcggtcccctcgcaatgctaatataaaatttcttcatggtgtcgtgggcctcagag

SEQ ID NO: 154304 - DNA, 1550 bp, Zea Mays
agatagaccttctagtattaatcaatattatgggggattatgaacctaaacagagttcacattagaaaaatctttttaatcaacatgaaagccggcagccacgcccacacgacaatcatttcacgggcggctcccgctccaagcttcagccaagccggagaagggggggagcctgtctccttcccgtggtggaacctcgtgttgccggaacctccgcgccgccgttgaatccatccgacaggcgtgcgtggagcacgggttcttttacgtgaccaaccacggggtggaccgcggcctgctcgaggcggtgttcgcggagagcaagaggttcttcgacctgcctatggaggataagaagggcgctgctccagggggcgcaaaccaccggggttacacgccgccctacgccgagaagctcgacgcctcttcccagttcgtaggagaccttaaggagagtttttacattgggcctcttgatgatggtgatatgcataacgatgtaaaccagtggccttctgaagagcgcttgccatcttggaaggagacaatgaagctatactttgcagctgttctggatactggcacaaggatactctctctagttgctttgggtttggatttggatgctgatttctttcataaaattggtgcattgaaatgcccgtcaacatttcttcggttattgcattaccctggtgaagtacatgagtctgatagtggaaactatggtgcgtcagctcactcggactatggtatgataactcttttagtgacagatggcactcctggcctgcagatatgcagggagaaggataggaatccccaactatgggaagatgttcatcatattgatggggcccttattattaatattggtgatttgctagagaggtggacgaattgtgctttcagatcaactttgcatcgtgttgttgcaatcggtaaagagcggtattcggtggctttctttcttgatccaaatcctgacacactggtgcagtgtttggaaagttgttgcagtgaagcatgtccaccaaggtttccacctatcaagagttgggactacatagccgggcgactaaattcaacttacaaataatcaccaccacgtttgtaatgctatgctcgtttacaacagcttgacaccacagtaatgtttgaacccaggattaaagatagttttcaagaaaggcggagctatgtatgtgagctggatctccatgtctcccctccccctagtgtctggaggagtgcactttctggatcacgcgtcgtcaggaagcaagcaagcaagcatacgcgcaattcccgctgcgcaattcccgatcgtaccctgctccaaatctttgtgcaagtctctgctcccttgaatgcaactgatgccaatcccatcaatctctttctttgaaaggagacatactgcttcctctagtttcatacctgctgaacacgatcaatggtttgcatgtactctaagatatacatgacccgcatgattgctatagtaaagactattaaaaatgaatttagctgacttcatttccctggtc

SEQ ID NO: 154305 - DNA, 1529 bp, Zea Mays
agatagaccttctagtattaatcaatattatgggggattatgaacctaaacagagttcacattagaaaaatctttttaatcaacatgaaagccggcagccacgcccacacgacaatcatttcacgggcggctcccgctccaagcttcagccaagccggagaagggggggagcctgtctccttcccgtggtggaacctcgtgttgccggaacctccgcgccgccgttgaatccatccgacaggcgtgcgtggagcacgggttcttttacgtgaccaaccacggggtggaccgcggcctgctcgaggcggtgttcgcggagagcaagaggttcttcgacctgcctatggaggataagaagggcgctgctccagggggcgcaaaccaccggggttacacgccgccctacgccgagaagctcgacgcctcttcccagttcgtaggagaccttaaggagagtttttacattgggcctcttgatgatggtgatatgcataacgatgtaaaccagtggccttctgaagagcgcttgccatcttggaaggagacaatgaagctatactttgcagctgttctggatactggcacaaggatactctctctagttgctttgggtttggatttggatgctgatttctttcataaaattggtgcattgaaatgcccgtcaacatttcttcggttattgcattaccctggtgaagtacatgagtctgatagtggaaactatggtgcgtcagctcactcggactatggtatgataactcttttagtgacagatggcactcctggcctgcagatatgcagggagaaggataggaatccccaactatgggaagatgttcatcatattgatggggcccttattattaatattggtgatttgctagagaggtggacgaattgtgctttcaggtggctttctttcttgatccaaatcctgacacactggtgcagtgtttggaaagttgttgcagtgaagcatgtccaccaaggtttccacctatcaagagttgggactacatagccgggcgactaaattcaacttacaaataatcaccaccacgtttgtaatgctatgctcgtttacaacagcttgacaccacagtaatgtttgaacccaggattaaagatagttttcaagaaaggcggagctatgtatgtgagctggatctccatgtctcccctccccctagtgtctggaggagtgcactttctggatcacgcgtcgtcaggaagcaagcaagcaagcatacgcgcaattcccgctgcgcaattcccgatcgtaccctgctccaaatctttgtgcaagtctctgctcccttgaatgcaactgatgccaatcccatcaatctctttctttgaaaggagacatactgcttcctctagtttcatacctgctgaacacgatcaatggtttgcatgtactctaagatatacatgacccgcatgattgctatagtaaagactattaaaaatgaatttagctgacttcatttccctggtcaaagaaattgttgacattttgagtc

SEQ ID NO: 154306 - DNA, 1261 bp, Zea Mays
tctcctggatggcctcgcggacgcgcgggtcgtgcgcggcgccctcgcagtccacgtagaggacgtgcgggaaggcgcgcagcgtgggtgcgccccgggcgctcgtgtccagtatcaccaccggcggccgctcgcctggtccggatccagcgccttcgttgttgatgacctccagcttggtgaggttgatgttgcgggaggagaaggcggagagcaccttgagcacgaccaccatggagccgccccggtgcgcgaccaccatgctggtcttggcgtcggcgtccacgcccagcgccacggccacaggcgacggcggcctggagaggagcaggaatcgcgtcacgttccaggactcgtcctggagcccgtgcgcgaggacctggagcccgtacaggtcggcggcgcgcgggctggcgatggcggctgtgtccagcatccgcttggaccgcagcatctccacggcgcccgccgtgtcctccacgggctcgcggtccaccccgaggcgggccagcgcgcgcccgcagtgcgccagcgccatggggtggctgatcacccgccgcacctcggcggcgcgcaccccgggcatggccagcaggcagtagtgcacgaacaggttgatctcctgcaccaccaccaggccgtgccgcaggagcaggtcgtagttgcgcagcgccgtcccctccatggtggactccacggggaggatggcgcggtcggcgccgccgcgctccacggcagccagcgcgtccgcgaaggcgcggcacgggaccgtgtcgcagccgggcagcgccgtcttggccgcgaactcgctgtaggcgcccggcgcgccctggaacgccacgcgcaggccggagccgtcctggcctccgccgcccgtgctcaccgagaggtggatccggtccgcatgcccgttcactcccttcttgccctggccgttgatgcgtgccttgccgttgggcgccggcctctcgggcgcgtcaccgttgaccttggccgcggcggtggggacgaaggaggaaggcctgtgccttgtccggcgggggctggggaggaggaggtgctttgggaggttgagggaggaggtgtaggccatagaacgcggcgccgggcggtgggatcggcggtgaggtttggggggggttacctttagcttgcttagccgacagggtggtgggcggaggctgttgacttttataacccgggaagcggccggcgtcctggtcccggtgctttgctgcctgcaaggctgcaactaacaata

SEQ ID NO: 154307 - DNA, 1396 bp, Zea Mays
tctcctggatggcctcgcggacgcgcgggtcgtgcgcggcgccctcgcagtccacgtagaggacgtgcgggaaggcgcgcagcgtgggtgcgccccgggcgctcgtgtccagtatcaccaccggcggccgctcgcctggtccggatccagcgccttcgttgttgatgacctccagcttggtgaggttgatgttgcgggaggagaaggcggagagcaccttgagcacgaccaccatggagccgccccggtgcgcgaccaccatgctggtcttggcgtcggcgtccacgcccagcgccacggccacaggcgacggcggcctggagaggagcaggaatcgcgtcacgttccaggactcgtcctggagcccgtgcgcgaggacctggagcccgtacaggtcggcggcgcgcgggctggcgatggcggctgtgtccagcatccgcttggaccgcagcatctccacggcgcccgccgtgtcctccacgggctcgcggtccaccccgaggcgggccagcgcgcgcccgcagtgcgccagcgccatggggtggctgatcacccgccgcacctcggcggcgcgcaccccgggcatggccagcaggcagtagtgcacgaacaggttgatctcctgcaccaccaccaggccgtgccgcaggagcaggtcgtagttgcgcagcgccgtcccctccatggtggactccacggggaggatggcgcggtcggcgccgccgcgctccacggcagccagcgcgtccgcgaaggcgcggcacgggaccgtgtcgcagccgggcagcgccgtcttggccgcgaactcgctgtaggcgcccggcgcgccctggaacgccacgcgcaggccggagccgtcctggcctccgccgcccgtgctcaccgagaggtggatccggtccgcatgcccgttcactcccttcttgccctggccgttgatgcgtgccttgccgttgggcgccggcctctcgggcgcgtcaccgttgaccttggccgcggcggtggggacgaaggaggaaggcctgtgccttgtccggcgggggctggggaggaggaggtgctttgggaggttgagggaggaggtgtaggccatagaacgcggcgccgggcggtgggatcggcggtgaggtttggggggggttacctttagcttgcttagccgacagggtggtgggcggaggctgttgacttttataacccgggaagcggccggcgtcctggtcccggtgctttgctgcctgcaaggctgcaactaacaataattgtcctctactaccgagcactgcccgttactggtcttttgttgccttggctgtgacgaccggccggtgcttctagatgatttggatttcctctagggcatgtttatttccttggaaatgaaactcattccatg

SEQ ID NO: 154308 - DNA, 1947 bp, Zea Mays
actcgcgcacgtcagcactcagccactcagcacagccactgacccgtcgcctccccggctcgcgaccgcatctctctcgccccttccaagttcctaatcgccaccgctgtccccaaccagcaaaccctagccctcatcgccggcggccatggccgagaccgtcgacgacaagatcagttacttccaggctgtcaccggcatctccgacacggacctctgcacggaaatcctcgccgcgcacaactgggacctgcagctcgcggtgtcctccatcaccgccaacccctcctcgccctccgccccggtttccacctcctcacgcgacccggccccttccgcccctttggcagatgcggagttcgtcgcgccaccgccgccgataccgccgccgcctcagcagcagccggggatcgcgtggaagctggtgacgctccccttctacgtggtctcgggtggggccagcctcgtcgccggctccttccgccttggcgcctgggtcgccgggggcgtgctgtcccgctccctctccctcctcggcctcgcggggcaggccggcagcggcgaccgcctgctagagctgccgccgtcagctgccgaggcggctgacttcgtcgccgagttcgagcgcgagtgcggcgctggccgcggcccgcgcttcgtggccgaggggttcgctgatgcgctgcagcgagcgcagcgggaattcaagcttctgttcgtgtacctccactcccctgatcacccggatacccctgccttctgcggcggctgcctctgtgctgaaccggtcgcggcctttatagatgagaacttcgttgcgtggggtggtagtatcagaaggaccgaagggttcaagatgagcaacagcctgaatgcgtcgagattcccgttttgtgctgtggtcatggcttctacaaaccagagaatcgtgctattgcagcaggttgaagggcccaaatcacctgaagagatgataacaattcttcaacgtgttgttgaagaatgtgctacatcactcgttgctgccaggattgaagctgaagagagactaaacaaccagcgtttgcgtgaggaacaagatgctgcttacagagctgcacttgaagctgaccaggccagggaacgtgaaaggatagaggaacaggaaagacgtgaaagggaggctgtagaggctgagaaaaagcgtaaagaagaggaggaagctgtagcaagggcagcccaagaagcagctgaaaaggaagctgctcttgcaaggaggaggcaagagaaggccatggctcttggagctgaacctgagaaaggaccaggtgttactcgggttctcataagattcccaacgggagagcgcaaagagcggagattccatagttctgcaaccgtcacttccctctatgactacgtcgattctttagactgcatgaaagcagagaattacagcctagtttcaaatttcccacgggtcacatatggtccagagaagcactccctgacactggaggaggcaggcttgcatccgcaggcgagcctgtttatcgagatagagcaatgatgctatagaaaaaccggaacttggaagtataggtgctcctttttccgaatttgtccagtaacagttaaggatttccagatgtattacacaccacaggtgcatgcttgttcatgaaataaaattcgccctcaccaagatcagttgactgcagccaggtcttgtgaattgtgattcgtttggaaagcctgccttgattctgtcagccaaagcatgacgacctaatttgcctatccttccgtaagacatcctcaagaaaggaattctccctggcttcttttagcaactaagtgactccagggtaaaatggattcgcaagttcagttggattcaatttgggtaggcatatcaagcttccatacattaagaaaactactactttttctctatatatatataga

SEQ ID NO: 154309 - DNA, 1406 bp, Zea Mays
cgtttccgaccgttttcatccctgccaagttgcacgttgcgctttctcctgtcgtcgccctcgcccaccaccttcggagctcggagactcggagtcttcccccacccccataacgtcctcttccgtgctctgcgttgccgcctgcgggcgccgcaagccgtgcgtgcccgcgggttccccgatttgtttatttacggaagtttacaattgatcaacaagacttagtccaaccctacttttcaaatcactatggttaccctttcctacagctgggcaagcgtagaatgtcagtcataatgttgggctcaaagaaggaaaggaatctcagcatgcactttcaatcagaccagaaatcttctgctaaattttgtttgttttcaaaagtccaatctgccagcccaccaccagggaatacactggtttatctaaatgtgtatgatttgacaccagtaaacggctatgtttactgggctggtctaggggtatttcattctggcattgaagttcatggtgttgagtatgcatttggagcacatgactattcgattagtggagtttttgaggtggaacctcggcagtgtcctggtttcaaatttcggaaatcaatatgcatgggaactaccagcctggatcctctccaaatcagagagttcatggagattcagtcagtaaattacaatggtgatacctaccatttgataagtaaaaactgcaaccatttctgtgaggatatctgcaaaaggttgacaggaaattttattccaaaatgggtgaatcgacttgctagaatgggtgctgtttgcaactgcattctaccagagtccctcaagatcaacgcggccggtcatgacccagcttctcgagctgaagatagcgagagaaaaatgctgacaagttccttcagttgcttctgttcaatctctctatgccaaagacatttctcaacatcttcgccgtctctgcgttcctccgcgaacggcacttcttgggataccaagcagtccaattctacccgactgaagaagagctgacagttgaggtcctgtgtatcatatttaactcatgaggcacaaggatccttttttgtcagcaatctcttctacgaccttcatcagagaaggatgaagaggtattgattgataaggtgtttttgcatactcgagcgtcggatccagctgtgcttgaacatctgtacagagattgtgtagaaattatttcttacatttgaatttgaaatacagtgagctggaggaaactccaccctagacttttggaaaaaaacaaactccaaaaaaatcattgatgggtgctgcctctggagtccgaagtgatatttcgcctgtggtagtttgcaaatttggccatttttatacccttgcctatataaagttttatagttttgtttt

SEQ ID NO: 154310 - DNA, 1409 bp, Zea Mays
cgtttccgaccgttttcatccctgccaagttgcacgttgcgctttctcctgtcgtcgccctcgcccaccaccttcggagctcggagactcggagtcttcccccacccccataacgtcctcttccgtgctctgcgttgccgcctgcgggcgccgcaagccgtgcgtgcccgcgggttccccgatttgtagtttatttacggaagtttacaattgatcaacaagacttagtccaaccctacttttcaaatcactatggttaccctttcctacagctgggcaagcgtagaatgtcagtcataatgttgggctcaaagaaggaaaggaatctcagcatgcactttcaatcagaccagaaatcttctgctaaattttgtttgttttcaaaagtccaatctgccagcccaccaccagggaatacactggtttatctaaatgtgtatgatttgacaccagtaaacggctatgtttactgggctggtctaggggtatttcattctggcattgaagttcatggtgttgagtatgcatttggagcacatgactattcgattagtggagtttttgaggtggaacctcggcagtgtcctggtttcaaatttcggaaatcaatatgcatgggaactaccagcctggatcctctccaaatcagagagttcatggagattcagtcagtaaattacaatggtgatacctaccatttgataagtaaaaactgcaaccatttctgtgaggatatctgcaaaaggttgacaggaaattttattccaaaatgggtgaatcgacttgctagaatgggtgctgtttgcaactgcattctaccagagtccctcaagatcaacgcggccggtcatgacccagcttctcgagctgaagatagcgagagaaaaatgctgacaagttccttcagttgcttctgttcaatctctctatgccaaagacatttctcaacatcttcgccgtctctgcgttcctccgcgaacggcacttcttgggataccaagcagtccaattctacccgactgaagaagagctgacagttgaggtcctgtgtatcatatttaactcatgaggcacaaggatccttttttgtcagcaatctcttctacgaccttcatcagagaaggatgaagaggtattgattgataaggtgtttttgcatactcgagcgtcggatccagctgtgcttgaacatctgtacagagattgtgtagaaattatttcttacatttgaatttgaaatacagtgagctggaggaaactccaccctagacttttggaaaaaaacaaactccaaaaaaatcattgatgggtgctgcctctggagtccgaagtgatatttcgcctgtggtagtttgcaaatttggccatttttatacccttgcctatataaagttttatagttttgtttt

SEQ ID NO: 154311 - DNA, 1501 bp, Zea Mays
cgtttccgaccgttttcatccctgccaagttgcacgttgcgctttctcctgtcgtcgccctcgcccaccaccttcggagctcggagactcggagtcttcccccacccccataacgtcctcttccgtgctctgcgttgccgcctgcgggcgccgcaagccgtgcgtgcccgcgggttccccgatttgtttatttacggaagtttacaattgatcaacaagacttagtccaaccctacttttcaaatcactatggttaccctttcctacagctgggcaagcgtagaatgtcaggtgtgttagctcctcccccccccccccttgtttgaatattatctgacgcataatggattttcttatcctacttccacttttccttgcatttatagtcataatgttgggctcaaagaaggaaaggaatctcagcatgcactttcaatcagaccagaaatcttctgctaaattttgtttgttttcaaaagtccaatctgccagcccaccaccagggaatacactggtttatctaaatgtgtatgatttgacaccagtaaacggctatgtttactgggctggtctaggggtatttcattctggcattgaagttcatggtgttgagtatgcatttggagcacatgactattcgattagtggagtttttgaggtggaacctcggcagtgtcctggtttcaaatttcggaaatcaatatgcatgggaactaccagcctggatcctctccaaatcagagagttcatggagattcagtcagtaaattacaatggtgatacctaccatttgataagtaaaaactgcaaccatttctgtgaggatatctgcaaaaggttgacaggaaattttattccaaaatgggtgaatcgacttgctagaatgggtgctgtttgcaactgcattctaccagagtccctcaagatcaacgcggccggtcatgacccagcttctcgagctgaagatagcgagagaaaaatgctgacaagttccttcagttgcttctgttcaatctctctatgccaaagacatttctcaacatcttcgccgtctctgcgttcctccgcgaacggcacttcttgggataccaagcagtccaattctacccgactgaagaagagctgacagttgaggtcctgtgtatcatatttaactcatgaggcacaaggatccttttttgtcagcaatctcttctacgaccttcatcagagaaggatgaagaggtattgattgataaggtgtttttgcatactcgagcgtcggatccagctgtgcttgaacatctgtacagagattgtgtagaaattatttcttacatttgaatttgaaatacagtgagctggaggaaactccaccctagacttttggaaaaaaacaaactccaaaaaaatcattgatgggtgctgcctctggagtccgaagtgatatttcgcctgtggtagtttgcaaatttggccatttttatacccttgcctatataaagttttatagttttgtttt

SEQ ID NO: 154312 - DNA, 3150 bp, Zea Mays
ctccccttcgcctccatctctcttctcctcacgattcacgaacgccagagctccttccccactccggcgttgccaagaagccagcttcctggccccgtctccctccgctcgccagcagcctttcgctgtcatccaaggtccgcacctccagcttttcacgcccgcccgccgccgcgccgggcgccggctctttctggaaatatttttcgatctgtaccattgctttccaaagccacaatgcctgcttctgcttgcacacatcttgattctggttgtactaggaaatatacaaggttcaagaatattcacgcagtttatgatgaagattatgacagggatcctaagaggatcaaaactgaaatcattgattcggaactaagtgttggttctgtcagtgacaaggatagtgaacaagattgtgatgatgtatttctcaaggatctcaggactcagtgtaaagcaaagaattggaagacttcaaaaatcacatcggaaggatgtggcattaagaatcaggctaaaacagaagatgacattgatcttgataagcctcttattgcattgaaacaaaagagtccaaaaacatctcttgctaaggataatgtaaagatgaatgcactaagatcttctccatgtgctacgaaagaggaagatacaacatcacatagagacaagattcttagttcttccctgatcaaagcaacaatgcaagacccagtattagagaagcttggaaggaaatttgcagaactggagcagtctaaagttgttattgattgtactgaaatcgttggtgatcaaatttgttgtgttgaagtgaacaatacagctggagctctagcgagctgtgcaaaacctgatgtactttgtgaaataaaagctgaagatacaaattattctgaatttggaacttctatctgttccataaagaatcctgagcattcatcctttaagctgcaacagaagctggtagcgggtgatgactgtgtgcctcaatattgtttcatgactcgaccagctcaattagccgatgtttctgatcatccctgcgaacaaacctgcagtatcaacaattttgatgacattacagctgcaaaagcaattgaggtttcttcgttaggtctcactgatgaaacgagcaatcatcagaaaacatctgaaaatctaactgactcagatgtgtgtaagtcctctaccgcaaatgggtttatagcttgttctttcaatcagtcctgccatgatcttgtggatagcgatgaacattggaatttatttgttcatcggaatgagcctgtgaagcttttggaagagttgtcttctgttgatgaatcatgcgcagatactcaatctgatttatgtggaagcacaaaaatgaattgcacttcccttgagggggttgtgcagatgcaggctgagggccaattggattcaatagtctgctgtggtgtaaggccaaagcatatgttactagatatggaaattagacatacagaaactggtgtattcacctttgataagactattgacttggctcatcctgccaattttgttgcacaagatggaaggctagaaagtatagtatacgatgttttgaataatcatgcacaaaggacagcctctaaaaacgaatcttctgttggactcccagaaactgctgtgagtcagagctcacttattgacttcactgacaattgtgttgaagacaaaagggcttcagttgataaaattttacctcccaataatctagactggccattgaaggataagttaaattctacaacagactatgacatttgtaggcctattaatgatgatgaaggatcagaagaagaattagtgcctcaacatcagttataccagtcgtgtagtgataaattcaaccttagcagtgccatgccagagatttctaatgctgaagattcacaaaaaatatctgccggagctcaaaattcttctgctacctttttggaaactgatgggcgaattaaaaagccaaatttttttgtggatgaagaaccaattgaagaaaacactccaaaagtattactgtccaagagaaagattatgtcaccgatgtctcaggagaagctttgcagtgctctgactggcattgatttgtgtgatggagttcaaagatttaagagcaaaatcattattgaagatcatgataaaactacaatatcattgcctcaaccagcacacatgcaagacagatcaatgttgtccacagacaggagacttaagagcaggacttttgtctcccctacaagcaaaggagttctgaagtcaacaggatccccaccccatcaacatacaacttgctcttgcacgagaagttcaccagtggtcttagacaccgagaaagctgttgaattttcacaaagacagatgcatgatatagaaaatatagctgctaagcttatcaggagcttgaagcacatgaaaagtatagtggatgaaagtttgtcaacagaagcatattcattacttcctaattttaacattgctgagatcagagcagcctctgaggatgcattagaagtggagaggactacgaggaaatggctgtcgataatgaacaaagactgcagtcgcttttgtaaaatattgagcctagcaaagaagaacgatgtttctcatcctgaagcaccaaggaaacaaagaaaaataacgtttgcagatgaagctggaggaatgctctgccatgttaaggttttcaaggatggacaagcctctcttctttctgaatgccagagtgatttatagacatactaaactggttatcatcatgagatttgatcagaaaagcaacattcttgagtgttggcaatatcaaaaaagctgctcacttgaaccaaaataatgagaatgcttccattcaccttagaaacagatggagaagctagtgcatcttgaatgcacagtatgtgttttactgtaaattgattgatgacaatcttgtggcaactcagttattatccttgttttttaaacatatttagtgtaaaaacaattagagtgcttacatgctaacaacaatttttgtacattggatgcaatttatttttagactattttctaaagaacccctatgtttttatagaataggatgtgttgtctttaggtgcgatctaataaacaagatttgat

SEQ ID NO: 154313 - DNA, 1911 bp, Zea Mays
aacagccggacaggaccgccataccggccgcagagtcagcgacacagcgtcgtttcaaagctaccttctgagttctgaatcatctgccttctcccgcctccccatccaaaatatccactgctgccggagccatgcctccgtcacaccggaacttccacttcttcatcacctccgtcctcgttctcctcgtcacctccgccgccgcgctatccgtctccacccccgtcaagctcacattcacctcacacccgccggcctccgtccccctcccgtccgcgcgacccctctctggtggtgatgccgccgggccctactgcacgcgtgttctcctccgcggccgcccctcccgcctccgcgacccttcccgctttttccacgcgcttcgcctccgcgccaacgccactcgcccccacggtctcgagctctgttttcacagaaatgctacggtggggccgtgccagtgcgcggcgtcccaatggcagaagatgcccaagagcgggctctggatgcaagccatatcaccgtacgaccaccggattctggatttccgaatgcccactgacccttcgaggtctgttgtggtgtccactgaggaagagttcttgctccacagggtggtgttcttggtcctagggttggtgctcatggtggtagcacaaacattgagcgagtctgttgtgttctactatggtggagcaatgacgatcggcattttccttgtgatactgattatactctttcagggaatgaagcttttaccaactggtagaaagagttctcttgctattttcacttactcttcacttgttggaatgacaacatattttcttcactatttgtcgggtatgctgcgctctgttcttgtggaaattgggattgctgaagacatgcataatcctgtatcttggaatattcgttctcgtatctgtcatcttagctggagcctggtttggttattggggtgtccgtaaatttgtcctggcagaagatggatctgttgacgagggtgtggcttattttgttgagtgggctatcttgattgtttcagccgttatgatcctccagagttctctggactatctctttgcatttacaactctagtattatgtggaatcatcaaagtgattgcaagaattgagggaaagtcaaaagttttacgctatatattcgggggactttctgatggtacctctcgtaattcatcccgttatggagattttgatgaagactattctagcatgaatgaagatcgccaagatggatttggcaatcttcatggtggataccagagacatgcaccgagaagaaactcacctcttgcaggctcagcaaagacattatcgcaaggtgttgctatggatagcttctattctacatttcacactaccccagagaggatggaattcacaaaagaggaatatgaagcattcaccagaaaggagacgaagaaagctatgaagcaactgttgtcatcaccggatttcaacaggtgggcattggctaatgcagacaggatatctgtggctccaccaggaggaagctacagcagtaacaacagccagcagcggcatcgtttcttgggactgttttgagctgtgcctgcgtgtgtgtggtgtgctttcttagcagcaataggagtgctcattgctcagtgatgattccatgtgagttgattagcaaggtttaggataacatctgagtgttccactttgaggtggcagcaaatatgtagaatattgtagtttaggcgcatcttaggtccaaagtccaaatggcatctgtatcttgtaacattaagtggtactgtacagtgcccgaggtgagtgtatctcaacttgttgagctgaatttcacgttcgatcatcattatgacagtttgaatttattcaaatcatcattatgataggatg

SEQ ID NO: 154314 - DNA, 1910 bp, Zea Mays
aacagccggacaggaccgccataccggccgcagagtcagcgacacagcgtcgtttcaaagctaccttctgagttctgaatcatctgccttctcccgcctccccatccaaaatatccactgctgccggagccatgcctccgtcacaccggaacttccacttcttcatcacctccgtcctcgttctcctcgtcacctccgccgccgcgctatccgtctccacccccgtcaagctcacattcacctcacacccgccggcctccgtccccctcccgtccgcgcgacccctctctggtggtgatgccgccgggccctactgcacgcgtgttctcctccgcggccgcccctcccgcctccgcgacccttcccgctttttccacgcgcttcgcctccgcgccaacgccactcgcccccacggtctcgagctctgttttcacagaaatgctacggtggggccgtgccagtgcgcggcgtcccaatggcagaagatgcccaagagcgggctctggatgcaagccatatcaccgtacgaccaccggattctggatttccgaatgcccactgacccttcgaggtctgttgtggtgtccactgaggaagagttcttgctccacagggtggtgttcttggtcctagggttggtgctcatggtggtagcacaaacattgagcgagtctgttgtgttctactatggtggagcaatgacgatcggcattttccttgtgatactgattatactctttcagggaatgaagcttttaccaactggtagaaagagttctcttgctattttcacttactcttcacttgttggaatgacaacatattttcttcactatttgtcgggtatgctgcgctctgttcttgtggaaattgggattgctgaagacatgcataatcctcttggaatattcgttctcgtatctgtcatcttagctggagcctggtttggttattggggtgtccgtaaatttgtcctggcagaagatggatctgttgacgagggtgtggcttattttgttgagtgggctatcttgattgtttcagccgttatgatcctccagagttctctggactatctctttgcatttacaactctagtattatgtggaatcatcaaagtgattgcaagaattgagggaaagtcaaaagttttacgctatatattcgggggactttctgatggtacctctcgtaattcatcccgttatggagattttgatgaagactattctagcatgaatgaagatcgccaagatggatttggcaatcttcatggtggataccagagacatgcaccgagaagaaactcacctcttgcaggctcagcaaagacattatcgcaaggtgttgctatggatagcttctattctacatttcacactaccccagagaggatggaattcacaaaagaggaatatgaagcattcaccagaaaggagacgaagaaagctatgaagcaactgttgtcatcaccggatttcaacaggtgggcattggctaatgcagacaggatatctgtggctccaccaggaggaagctacagcagtaacaacagccagcagcggcatcgtttcttgggactgttttgagctgtgcctgcgtgtgtgtggtgtgctttcttagcagcaataggagtgctcattgctcagtgatgattccatgtgagttgattagcaaggtttaggataacatctgagtgttccactttgaggtggcagcaaatatgtagaatattgtagtttaggcgcatcttaggtccaaagtccaaatggcatctgtatcttgtaacattaagtggtactgtacagtgcccgaggtgagtgtatctcaacttgttgagctgaatttcacgttcgatcatcattatgacagtttgaatttattcaaatcatcattatgataggatgaaa

SEQ ID NO: 154315 - DNA, 1952 bp, Zea Mays
aacagccggacaggaccgccataccggccgcagagtcagcgacacagcgtcgtttcaaagctaccttctgagttctgaatcatctgccttctcccgcctccccatccaaaatatccactgctgccggagccatgcctccgtcacaccggaacttccacttcttcatcacctccgtcctcgttctcctcgtcacctccgccgccgcgctatccgtctccacccccgtcaagctcacattcacctcacacccgccggcctccgtccccctcccgtccgcgcgacccctctctggtggtgatgccgccgggccctactgcacgcgtgttctcctccgcggccgcccctcccgcctccgcgacccttcccgctttttccacgcgcttcgcctccgcgccaacgccactcgcccccacggtctcgagctctgttttcacagaaatgctacggtggggccgtgccagtgcgcggcgtcccaatggcagaagatgcccaagagcgggctctggatgcaagccatatcaccgtacgaccaccggattctggatttccgaatgcccactgacccttcgaggtctgttgtggtgtccactgaggaagagttcttgctccacagggtggtgttcttggtcctagggttggtgctcatggtggtagcacaaacattgagcgagtctgttgtgttctactatggtggagcaatgacgatcggcattttccttgtgatactgattatactctttcagggaatgaagcttttaccaactggtagaaagagttctcttgctattttcacttactcttcacttgttggaatgacaacatattttcttcactatttgtcgggtatgctgcgctctgttcttgtggaaattgggattgctgaagacatgcataatcctcttggaatattcgttctcgtatctgtcatcttagctggagcctggtttggttattggggtgtccgtaaatttgtcctggcagaagatggatctgttgacgagggtgtggcttattttgttgagtgggctatcttgattgtttcagccgttatgatcctccagagttctctggactatctctttgcatttacaactctagtattatgtggaatcatcaaagtgattgcaagaattgagggaaagtcaaaagttttacgctatatattcgggtatgatcaactctcttccctaattgggactttctgatggtacctctcgtaattcatcccgttatggagattttgatgaagactattctagcatgaatgaagatcgccaagatggatttggcaatcttcatggtggataccagagacatgcaccgagaagaaactcacctcttgcaggctcagcaaagacattatcgcaaggtgttgctatggatagcttctattctacatttcacactaccccagagaggatggaattcacaaaagaggaatatgaagcattcaccagaaaggagacgaagaaagctatgaagcaactgttgtcatcaccggatttcaacaggtgggcattggctaatgcagacaggatatctgtggctccaccaggaggaagctacagcagtaacaacagccagcagcggcatcgtttcttgggactgttttgagctgtgcctgcgtgtgtgtggtgtgctttcttagcagcaataggagtgctcattgctcagtgatgattccatgtgagttgattagcaaggtttaggataacatctgagtgttccactttgaggtggcagcaaatatgtagaatattgtagtttaggcgcatcttaggtccaaagtccaaatggcatctgtatcttgtaacattaagtggtactgtacagtgcccgaggtgagtgtatctcaacttgttgagctgaatttcacgttcgatcatcattatgacagtttgaatttattcaaatcatcattatgataggatgaaaagtattcaagtgttcta

SEQ ID NO: 154316 - DNA, 1728 bp, Zea Mays
aacagccggacaggaccgccataccggccgcagagtcagcgacacagcgtcgtttcaaagctaccttctgagttctgaatcatctgccttctcccgcctccccatccaaaatatccactgctgccggagccatgcctccgtcacaccggaacttccacttcttcatcacctccgtcctcgttctcctcgtcacctccgccgccgcgctatccgtctccacccccgtcaagctcacataaatgctacggtggggccgtgccagtgcgcggcgtcccaatggcagaagatgcccaagagcgggctctggatgcaagccatatcaccgtacgaccaccggattctggatttccgaatgcccactgacccttcgaggtctgttgtggtgtccactgaggaagagttcttgctccacagggtggtgttcttggtcctagggttggtgctcatggtggtagcacaaacattgagcgagtctgttgtgttctactatggtggagcaatgacgatcggcattttccttgtgatactgattatactctttcagggaatgaagcttttaccaactggtagaaagagttctcttgctattttcacttactcttcacttgttggaatgacaacatattttcttcactatttgtcgggtatgctgcgctctgttcttgtggaaattgggattgctgaagacatgcataatcctcttggaatattcgttctcgtatctgtcatcttagctggagcctggtttggttattggggtgtccgtaaatttgtcctggcagaagatggatctgttgacgagggtgtggcttattttgttgagtgggctatcttgattgtttcagccgttatgatcctccagagttctctggactatctctttgcatttacaactctagtattatgtggaatcatcaaagtgattgcaagaattgagggaaagtcaaaagttttacgctatatattcgggggactttctgatggtacctctcgtaattcatcccgttatggagattttgatgaagactattctagcatgaatgaagatcgccaagatggatttggcaatcttcatggtggataccagagacatgcaccgagaagaaactcacctcttgcaggctcagcaaagacattatcgcaaggtgttgctatggatagcttctattctacatttcacactaccccagagaggatggaattcacaaaagaggaatatgaagcattcaccagaaaggagacgaagaaagctatgaagcaactgttgtcatcaccggatttcaacaggtgggcattggctaatgcagacaggatatctgtggctccaccaggaggaagctacagcagtaacaacagccagcagcggcatcgtttcttgggactgttttgagctgtgcctgcgtgtgtgtggtgtgctttcttagcagcaataggagtgctcattgctcagtgatgattccatgtgagttgattagcaaggtttaggataacatctgagtgttccactttgaggtggcagcaaatatgtagaatattgtagtttaggcgcatcttaggtccaaagtccaaatggcatctgtatcttgtaacattaagtggtactgtacagtgcccgaggtgagtgtatctcaacttgttgagctgaatttcacgttcgatcatcattatgacagtttgaatttattcaaatcatcattatgataggatgaaaagtattcaagtgttcta

SEQ ID NO: 154317 - DNA, 105 bp, Zea Mays
ttgacttaccacgttgcatgcatgcatattgtgttaaaaaaatggtgtccgatgctggattgtagatatagaggaccaaatttaggggacgttgctggagactga

SEQ ID NO: 154318 - DNA, 1711 bp, Zea Mays
atgtggcggcgggcgaggtggctggcgggggctcgcgcgggaatggtgaggttttcgcgcgcgcgggaaggagcgctccggtatcatatagatgatgcagccgtgttctttttccttactgattcattttgcaaatatgctgaggccaagcaggatggatccctctttgagccgcgagctgttgtgtaagcaagcagctgccttgacagtagtgatggtttcatttgttacaactaggcttaaaagaaaaaggtttgatcctgaagtagagcctgaccctctagtctatgtacttagggaacaaagtgaacttcacagacagaggaccctcaacatgatttacaactccactgatgtagagtgcatttccatgcttaggatgaagagagcccctttttttgctttatgcacgacctttagagagaggggactggtaactgatagggagggggtgtcagtagaggagcaagttgccatgttcttgcatgttgttggtcacaaccaaaggttcagagttgtgcaccaggcctttaggaggtccattcagacagtacacaagcactttcatcaggttttgtatgttgttggagagcttaggaaggaacttatcaaggcacctagccctaccactcacccaaagatcactggaagctatagatggaatccatatttaaaggtatttgcctaccttgggttcattagttgttcatattcacatgttcatttatcttacatatatggtttttaggactgcattggtgccattgatggcacccatgtgctggcaagggtgcctagacacatgcagcaagctttcaggggtaggaaaactaacccgacacaaaatgtgatggttgttgtggactttgacctcaagttcacatacgttctagctggctgggaggggtctgcccatgatgcacttatcctggctgatgccattgagagggatgatgggttcactgtcccacaaggtaaattctacttggtagatgcggggtatgcatgccgcactggctttctacccccttcagggggggttaggtaccatttgagtgagtttgggagcagaaatcgacctaccaatgcaagagaactgttcaacctgagacactcatcacttagagtaactgtggagagggctataggtgcattgaagaacaggtttcgtatcttggacaacaagccctttcacaagtataagacacaagtcaagcttgtgttggcatgctcgatcttgcataactggattttaggctttggcattgatgaagtagtgcctgatgaggagggtttcactggcacacaacaagatccactagatgacaatggtagccagagccaagaatccagtgccatggctgcaaagagggatgccatttgcaatgttattggtaagatgccttcagtcccagctggtgatcagggtgggtttgtcccagctactgatgtgatgactgagatgataagggttggtgctagtgcagcagctaacgctgatgatgctactgcatctagtgccggtgctgctccagcagcagctggtcttgttgctgctgttcccgggggtcctagggcaatgaggtggaacaacaacacctctggatttattcttaggaggatggctcaaggcaggggctttgttcacatgactgaggcacatagaaacatttggcttaggaccttcctagccaagaactactacatgtag

SEQ ID NO: 154319 - DNA, 1711 bp, Zea Mays
gctactagactgctggcgcggagtggaggacgagtggtgttgcccacgcagcgcagacgcagtctccttttcatcatcaagtccggagggagagccggagaaccggttcagccagcagagtcgccaaaacaaaagcaaaatgaggagctccgtctctgagcgcagcctcatcatcgagagcgacgacgacgacgacgaccatccccaatcccggtcatccgccgccgcccgcagcagaagacgccaccaccaacacgaggaggactccgccgcaggatccgactccgattccggttcctcctcgtcctcctgcggcaccccgcgcggtccggccaccgactcctcctacacccagcaatggccacagagctacaggaataaatgttctatgtggtgtgggaatcctatcaacaccttatgccatcaaacaaggcgggtggcttggactggtgatactctgtttatttgcaattctagcttggtatactggtgtgctcctgcgccgctgcctggacagcaaggagggccttgagacatacccagatattggtcatgccgcctttggagccaccggccgtatagccatctcaataatcctgtatgtggaactgtatgcctgttgcatcgagtatctgatattggaaggtgacaatttatcaaaattattccctaatgcgcacctgagcgttgggagcttgacaatgaactcccatgtacttttcacaatcttgactaccatcatagtcatgccgaccacttggcttcgtgaccttagctgcctgagctacctttcagctggaggtgtttttgcatcaatccttggagtcatctgcctattctgggtaggagttgttgataatgttggctttgagaacaaaggaactgctctgaacctccctggaatccctattgcaattggattgtatggttattgctactcagggcatggggtgtttccaaacatctactcttctctgaagaagcgcaatcagttcccttcaatcctttttacttgcattgggctgtctaccattttatttgctggtgcagcggtgatgggatacaaaatgtttggtgaagccacacagtctcagtttacactgaacttaccagagaatttagtggtttcaaagattgcagtttggaccacggtggcaaatccaataaccaaatatgcattaaccataaccccactgactatgagtttggaagagttgcttccaccaaatcaacagaagtactcaaacatagtcatgcttagatcagccctggtggtgtcaaccctcctcattgctctatctgtacccttttttggacttgtgatggccttagttggttctttacttacgatgcttgtgacctatattctaccttgcgcgtgctttttagcaattcttaggagaaaagtgagctggcaccaggtagcagtatgctcgttcatcatcgtggttggggtttgctgcgcttgtgtgggaacatactcgtctctgtcaaagataatccagaactacacatgatacagttgttcctgcaatccaaatttatgtccaaactcaatgagccaaactgcccagcaaattagtcaagtcgatgtatcataaatttgtgagatgtccatgtttgcatgttaatggatcaacacaaataatacgtttgtggcaaggatttgagacaatatttctgaacaaaagatgaggttgattttgtgttg

SEQ ID NO: 154320 - DNA, 2169 bp, Zea Mays
gctactagactgctggcgcggagtggaggacgagtggtgttgcccacgcagcgcagacgcagtctccttttcatcatcaagtccggagggagagccggagaaccggttcagccagcagagtcgccaaaacaaaagcaaaatgaggagctccgtctctgagcgcagcctcatcatcgagagcgacgacgacgacgacgaccatccccaatcccggtcatccgccgccgcccgcagcagaagacgccaccaccaacacgaggaggactccgccgcaggatccgactccgattccggttcctcctcgtcctcctgcggcaccccgcgcggtccggccaccgactcctcctacacccagcaatggccacagagctacaggcagtccatcgacattcttagtagcgtgcagtcaccaaatctgagcttcttgggaaccccaactctaagcagattgtccaactcttttcggggtaaaacccctgaaatcatctccaatcttgttaagccacttcttcgccccactacaagtgatgaccaccaccaccaccaccagcagcagcctgaagaaagaaagagttctcagtaccttctgccttcgagaaaaccatctttgcaacagattcctgaggatcaaaagccagtgccagttgctcatgaggtgtctccgtatcataaatgcacttacacccaagcagttgtgaatggaataaatgttctatgtggtgtgggaatcctatcaacaccttatgccatcaaacaaggcgggtggcttggactggtgatactctgtttatttgcaattctagcttggtatactggtgtgctcctgcgccgctgcctggacagcaaggagggccttgagacatacccagatattggtcatgccgcctttggagccaccggccgtatagccatctcaataatcctgtatgtggaactgtatgcctgttgcatcgagtatctgatattggaaggtgacaatttatcaaaattattccctaatgcgcacctgagcgttgggagcttgacaatgaactcccatgtacttttcacaatcttgactaccatcatagtcatgccgaccacttggcttcgtgaccttagctgcctgagctacctttcaggtctccatttatctgttgctttgcattttggttgacaatgcattgtcagtcagtgtgtattctttgcatttagttcagatgtctaccctcttggtgtaccactcatggtttctcactatgttgtgtttgtagctggaggtgtttttgcatcaatccttggagtcatctgcctattctgggtaggagttgttgataatgttggctttgagaacaaaggaactgctctgaacctccctggaatccctattgcaattggattgtatggttattgctactcagggcatggggtgtttccaaacatctactcttctctgaagaagcgcaatcagttcccttcaatcctttttacttgcattgggctgtctaccattttatttgctggtgcagcggtgatgggatacaaaatgtttggtgaagccacacagtctcagtttacactgaacttaccagagaatttagtggtttcaaagattgcagtttggaccacggtggcaaatccaataaccaaatatgcattaaccataaccccactgactatgagtttggaagagttgcttccaccaaatcaacagaagtactcaaacatagtcatgcttagatcagccctggtggtgtcaaccctcctcattgctctatctgtacccttttttggacttgtgatggccttagttggttctttacttacgatgcttgtgacctatattctaccttgcgcgtgctttttagcaattcttaggagaaaagtgagctggcaccaggtagcagtatgctcgttcatcatcgtggttggggtttgctgcgcttgtgtgggaacatactcgtctctgtcaaagataatccagaactacacatgatacagttgttcctgcaatccaaatttatgtccaaactcaatgagccaaactgcccagcaaattagtcaagtcgatgtatcataaatttgtgagatgtccatgtttgcatgttaatggatcaacacaaataatacgtttgtggcaaggatttgagacaatatttctgaacaaaagatgaggttgattttgtgttg

SEQ ID NO: 154321 - DNA, 2037 bp, Zea Mays
gctactagactgctggcgcggagtggaggacgagtggtgttgcccacgcagcgcagacgcagtctccttttcatcatcaagtccggagggagagccggagaaccggttcagccagcagagtcgccaaaacaaaagcaaaatgaggagctccgtctctgagcgcagcctcatcatcgagagcgacgacgacgacgacgaccatccccaatcccggtcatccgccgccgcccgcagcagaagacgccaccaccaacacgaggaggactccgccgcaggatccgactccgattccggttcctcctcgtcctcctgcggcaccccgcgcggtccggccaccgactcctcctacacccagcaatggccacagagctacaggcagtccatcgacattcttagtagcgtgcagtcaccaaatctgagcttcttgggaaccccaactctaagcagattgtccaactcttttcggggtaaaacccctgaaatcatctccaatcttgttaagccacttcttcgccccactacaagtgatgaccaccaccaccaccaccagcagcagcctgaagaaagaaagagttctcagtaccttctgccttcgagaaaaccatctttgcaacagattcctgaggatcaaaagccagtgccagttgctcatgaggtgtctccgtatcataaatgcacttacacccaagcagttgtgaatggaataaatgttctatgtggtgtgggaatcctatcaacaccttatgccatcaaacaaggcgggtggcttggactggtgatactctgtttatttgcaattctagcttggtatactggtgtgctcctgcgccgctgcctggacagcaaggagggccttgagacatacccagatattggtcatgccgcctttggagccaccggccgtatagccatctcaataatcctgtatgtggaactgtatgcctgttgcatcgagtatctgatattggaaggtgacaatttatcaaaattattccctaatgcgcacctgagcgttgggagcttgacaatgaactcccatgtacttttcacaatcttgactaccatcatagtcatgccgaccacttggcttcgtgaccttagctgcctgagctacctttcagctggaggtgtttttgcatcaatccttggagtcatctgcctattctgggtaggagttgttgataatgttggctttgagaacaaaggaactgctctgaacctccctggaatccctattgcaattggattgtatggttattgctactcagggcatggggtgtttccaaacatctactcttctctgaagaagcgcaatcagttcccttcaatcctttttacttgcattgggctgtctaccattttatttgctggtgcagcggtgatgggatacaaaatgtttggtgaagccacacagtctcagtttacactgaacttaccagagaatttagtggtttcaaagattgcagtttggaccacggtggcaaatccaataaccaaatatgcattaaccataaccccactgactatgagtttggaagagttgcttccaccaaatcaacagaagtactcaaacatagtcatgcttagatcagccctggtggtgtcaaccctcctcattgctctatctgtacccttttttggacttgtgatggccttagttggttctttacttacgatgcttgtgacctatattctaccttgcgcgtgctttttagcaattcttaggagaaaagtgagctggcaccaggtagcagtatgctcgttcatcatcgtggttggggtttgctgcgcttgtgtgggaacatactcgtctctgtcaaagataatccagaactacacatgatacagttgttcctgcaatccaaatttatgtccaaactcaatgagccaaactgcccagcaaattagtcaagtcgatgtatcataaatttgtgagatgtccatgtttgcatgttaatggatcaacacaaataatacgtttgtggcaaggatttgagacaatatttctgaacaaaagatgaggttgattttgtgttg

SEQ ID NO: 154322 - DNA, 530 bp, Zea Mays
atgaggaatgagaatttgagaaatggactcatgatacaccacttcattttggatgaagtgatttctgaaaccaaacatcttctaagtcaccaatcaatcatgacaccaacctgttttttttgagttttgacaggacttgtgatggccttagttggttctttacttacgatgcttgtgacctatattctaccttgcgcgtgctttttagcaattcttaggagaaaagtgagctggcaccaggtagcagtatgctcgttcatcatcgtggttggggtttgctgcgcttgtgtgggaacatactcgtctctgtcaaagataatccagaactacacatgatacagttgttcctgcaatccaaatttatgtccaaactcaatgagccaaactgcccagcaaattagtcaagtcgatgtatcataaatttgtgagatgtccatgtttgcatgttaatggatcaacacaaataatacgtttgtggcaaggatttgagacaatatttctgaacaaaagatgaggttgattttgtgttg

SEQ ID NO: 154323 - DNA, 174 bp, Zea Mays
ttttttttatcattttcctttctttcccttatttcctttcctattttatgttatttatttgcatttcaattctttaatttccaattcacgctttgtagtcaagtgcaacaaatacaaaagaaaaatactcagcatgaatgcaacgtatattttatttgacttctattattattc

SEQ ID NO: 154324 - DNA, 379 bp, Zea Mays
tatgctgggcagagaggagcggccggcgcgccatgggagcaagggaaaagcactgcggcgagctcgagagagagagaagcagaaagtgagcaccgccaagagaagggcacgcgcgccatcagagatccggccgggtgctggacgccggcaggggaggagcttggactgggcgcggcaggggagagctccatggcacagacgagatccaagcagaggccggacttgggcagctgttggacgagcggacagggagcgccgtgagcagagaaacgcgcagggagggagaagcttggaggagcgtcgctgggtagggaacgcgcgcacagagcaggaagagccgtgcggcccggtgctggagcttggaggttggagaagatga

SEQ ID NO: 154325 - DNA, 177 bp, Zea Mays
atggctcagcagagggaacgccgtgagctggagctagaagaaggagcacggacgggcggggcctcggccgactgggagaagcagagaaagaagcttgctaacaggaaccaactcgaactggagaagagaaggagagggagaaggaggaactggaagtgttcccccgaggtagattag

SEQ ID NO: 154326 - DNA, 2640 bp, Zea Mays
atggtgatggggctggggtcgaagcgtagggtggcggagggcggcacggagcccgaggaggagtcctcggaggagtacgaggtggaggaagtgtgcgaccacatcgcctcctcccgtggcagccgcctcgcgctcttcggctccgacctccgcctcggccgcttccgcccgcgccggcgcaggcgccgcccgctcgccggggaaggcgccgcggagggcttcctccacgacctcgtcatccaccccgacaacagatggtatcagttatggaccaagttcatactgggttgggcggtgtacagttccttcttcacgcccctggaattcggcttcttcagagggctcccagaaaacctcttcttcctggacacagttggacaggctgcgttccttatcgacattgttgtgaaatttttcgtggcataccgtgacccagacacgtaccgaatcgtctacagtcccaccgctattgccctcagatattgcaaatcaagcttcatctttgatcttcttggttgcttcccatgggatgctatctacagggcttgtggaagtaaagaagaagtaagatacctgctgtggattcgcttgacacgggttaccaaggtcacagaattcttctggcgtttagagaaggacatacgtatcaactacctcttcactaggatagtgaagctcatagttgtggagctctactgtacgcacacagcagcctgtatcttctattacctggctacaacgcttcctgaatcaatggaaggatacacgtggattgggagtctgcagttgggggactacaagtttacacatttcagggagatcgatcttgccaagcgctatataacatcgttatacttcgccattgtcaccatggcaacagttggttacggtgacattcatgctgtcaacatcagggagatgatattcatcatgatctacgtttcctttgacatgattctaggagcttacctgattggtaacatgactgcgctcatcgtgaaaggctcgagaaccgagcggtttagggacaagatgaaagaagtgatcaggtatatgaacagaaataaacttggaaaggaaataagggaacagatcaaaggacacttgaggttgcagtatgagagcagctacactgaagcgtccgtccttcaggatatcccgatttctatccgtgcaaagatttctcaaacactgtataagccatatgttgaaagtattccgttgttcaagggatgttccgcagagttcatacaacagattgtgatcaggttgcaagaggagttcttcttaccaggagaggttatattggagcaaggaagtgcagtcgatcaattgtactttgtctgccacggtgcactggaaggtgttggcatcggtgaagacgggcaagaagagactctgctgatgctggagccagagagctcctttggcgagatctcaatcctctgcaacatcccgcagccctacacggtccgcgtctgtgagctctgccggctcctgcgtctcgacaagcagtccttcaccaacatcctggagatctacttcgtcgacggcaggaggatcctgagcaatctctccgagagcgagtatggcggacgggtgaagcagctggaatcggacatcacgttccacatcgggaagcaggaggcggagctcaccctgcgggtcaacagcgccgctttctacggcgacctgcaccagctgaaaagcctgatccgggcaggggctgatcccaagaacaccgactatgacggccgctcccctctgcatctggcggcttccagagggtacgaggacgtcgtgcaattcctcgtcaacgaaggcgtcgacatggaccttaccgaccaatttgggaacacgccgttgctggaggcagtgaagcaggggcaagaacgggtggcagcgctgctcttcgccaagggcgccaagctgagcctcaagaacgccggcagccacctgtgcacggcagtcgccaagggagactcggacttcattcggcgcaccctggcctacggcgccgacccaaactgcagggactacgaccaccgcacaccgctccacatcgccgccgccgagggcctgtacctcatcgccaagatgcttgtcgaggccggcgccagcgtgttcaccaccgacagatggggcaccactccgctggatgaagcgcgaaagtgcggcggccgcgtacttggggcgctgctggaggaggcgcgggccaacgagctggctatgttcccagaacgcggcgaggaagtcagggacaagatgcacccgcgacggtgctcggtgttcccgtaccacccgtggcgggcggccacgggcgaggagcggcgtattgagggagtggtcctgtggatcccgcacaccattgagagcctggttgcgttggcgcaggagaagctcggcttgccgggcccggcttcgcggctgcggttgctgcgcgaggacggggccagggtgctcgacgtcgatatggtcaatgacggccagaagctctacctggtcggaggcgaggacggcgatcagaaatatgtagaagaaaacggaatcaagtccatcgtccctgctggacactgtacagaactacaaattcgcaattatgttagatgtgaaatggaaatgcaatgtgaagcaaactaa

SEQ ID NO: 154327 - DNA, 716 bp, Zea Mays
gggcctccagtttcgggcaacaagcatatggcaaagagagtgagggggcatgatattgtttttccaattccaagtactctatgtttggttttggtcgattctgtcaagattcatttctacattttatatgttctatagtctcacaagtattgtttttggtgttgataggatctaaggagcaaagactattaattatcataaacaggatttctaattggtgaaagctttttatatatagcagactgtgatgatgtgtagaggcaaaggatcctttagagttcatcactcatcgagccaaagattttgtgtcaagcatgaaggacattgaaacccggtttatgtgtatagttgaagcaggaaataaggtttctagaatgcttgaaaccaagaagatcttgcttgacatatgtgctaaaataccaggattctaggttctccagttaagctacctactgcccgattgtgtcagcacttcaagtgtgctgcaattgtgatgttattctcaaccatgaaactgtgaccctccatagttaagggattgcactttcttaaatatttgatgaggaagttgttggactttgatgaacctagaactcttgcaccaacttgtctttttgttggaggtacaaaatacatggtgatccaaggtgaacctagagtggtcatccgaggaaagaagtacagtgggaacatatttctaatagaagaaatgcttg

SEQ ID NO: 154328 - DNA, 309 bp, Zea Mays
atgtcgacgaccggatatggagggagctcgaggatgcacggacagtggccatggcaaggcgagtgttggatgagctcgacgaccggcgacgagaggagcacgaacgtgcgtctagcggtcgagcaggagtacgggaacatagggacaatggtcggcttggtgaagctcgagcacggtagacgcgaccaccaagtttggcgcgagcatcggcagggggcgaacgtgccaggaacgaagggagcaggcgagatggcctggttcctgagcgagacggggtggggaagaagaccggctgatggcgccctgtag

SEQ ID NO: 154329 - DNA, 587 bp, Zea Mays
atgcctccgtttcagcgaccgcagggcgcgccggatcgccgccctactagcctcggccttggccatcgtcctgcacacacccggcaacaacagcaaagcgacccctcgtgtcaggcaaacagcaaagaagaaataaacttcgttagctgccgagttgaaggattccaaacattctcccgtggatttcggcagcagccgtgcgtccggtggctccagttctcggccagggcgcctcggttctggtccggtggatttgttctctcgttttccctttttcccctccagaagatttccatttcccccgcgttcgtcgatccgtccgagggccggctccaggcgaggccgttgtcgccgtcgatgttcatggcgcagctcccgcagatgccctcgcggcagctgcagcggaaggaaatcgaccagccaacattgatacctcatatagctgaagcgaagtcacagaaatactcatatgaagttcttttcagaagcttgcagaaacttcttattgatactgccacttcagagtaagctttgggttgccgttttgtccatattttttattcatgaagataaagtaccagtgtgac

SEQ ID NO: 154330 - DNA, 2539 bp, Zea Mays
cagctccacaagacaaccgcaaccgcagcagctagaccgacacgcactctactctcgcacacagccgccgggcgggcacagtgacgcggccacgcgggcgccggagctagggtttccctgatccggcagggccggggagccgccggaaaccgttgctcgatttcggcgccggaggcgcggcatcggtgtctccgaggacggcggacgcgaggcgggttggggagctgaggcgcggcgccgggggctcagatctggtatgaccgacggcggcgaagacgggaatgcggcggcgcccagggccccctcgcgccgaaggggacctgtgcgggccagcctcgatgccgacgagttcatggcgctgatgcacggctcggatcccgtcagggtcgagctcacccgcctggagaacgagctcagggacaaggagagggagcttggggaggcacagacggagatacgcgcactgcgcttgtcggagagggcgcgggagaaagccgtcgaggagcttacagatgaattggagaagatggctgagaaactcaagctgacagaatctctccttgaaagcaaaaaccttgaagttaaaaagataaatgatgagagaaaggctgcattggctgcccagtttgcagcagaagcaactttgcggagagtacatgcagcccagaaagatgatgacatgccaccaattgaagccattcttgcaccacttgaagctgagctaaagctttctcgccaggagattgcaaatctccaggatgacaacagagctttggatcgtctaacaaaacaaaaggaggcagctctgctagaagcagagaggactgtgcaaattgctatggcaaaagctgctatggttgacgatttgcaaaacaagaaccaagagttgatcaagcaaattgagatctgccatgaagaaaataaaatcttagataagctgcatcgccaaaagattgcagaagttgaaaagcttagccaaactgtgagggagttggaagaagctgttcttcaaggtggtgcaacggctaatgttgttcgagattaccagcgcagatttcaagaaataaatgaagaaaagagaacacttgaccgtgaacttgcacgtgcaaaagttacagcaaacagggttgcttctgttgtggccaatgagtggaaagattctaatgacaaggtgatgccagttaaacagtggcttgaagagcgtaggttcttgcagggggagatgcaacaacttcgtgacaagctagctgttgcagaacgtacagcacgatccgaagctcaactgaaggaaaaataccagttacgtttgaaagtactagaagatggactaagggggccaccaagtggctctagtcgtccaactactgaaggaaagagctttagcaatggcccttcccgccggttatcacttggtggggctgataacatatcaaaattgtctccaaatggcttattgtcaaggagatctccgtcttttcattcaagatcatctcttttgtcaaacagcagcttggtcctgaagcatgctaaaggcacttcgaagtcatttgatggcggaactaggtcactagataggggaaaaatccatggaagtggagctcatttactcaacagatctacagatgctgttagagataaggagactagtgatagttggaagggcgatatggatgagagaactaatgagagggcagacaacaacacagatgagaaaagtaacgaaaccacaaataaaaactcagctgagacagtttctggtttcctatatgatatgctgcaaaaagaggtaatttctttgagaaagtcatgccatgaaaaggatcagattctaaaagataaagatgatgctattgagatgttagcaaagaaagtagacaccttaaccaaagcaatggaagtggaggctagaaaggtcagacgagaggttgcagccatggagaaagaagttgcagcaatgcgtgccagtaaagaacaagaaaccagagccaagctgcttggtacgaaaggctctggtagttcacaactgcttcctggaaggaacgcagcacgaactgggtcgatgcgcaacttccagtgatggcagcactaacacgaagcagcattcttggatagatccttctccgttccaccatttgttctattcctatcctattaattttgtgtctaaaattatagtagagtgagatgacccaacggtacctagatcagggtaaagagtaggctcggatctgatgagaccattgtgggagtgaaaccgagcctgtgtctaaccttgtggcgcgccctcttgtttctttgtccaggaagcgcacccgatgcttgtataggctggggccgctggggatcttcggatgcccagtctgcaatgtatcttgagtgctcagttacacaggacacccgttgcccaggttgtgaatattgtatcctctcacatgcttgtttgcgctgctcaatttgccccgtgttctggttggaatttttagcacggcttctggcttatccgaattctgttgattacgtacacatttattggcaactg

SEQ ID NO: 154331 - DNA, 432 bp, Zea Mays
atgggcggcgtcgccgcgttcatcgaggactggcgcgatcagccgcgccgtctgcgcgagtacaaaatgcggaagagaaagcctcgcatgaatagaacaaagtatggggataatgccaaaatccccaaaactcgacttcaacaaagtgtccaaggtcaaggtgctgtccaaggtgaagctaatgtcgaacttgaaactgttcaagatcatggtgctgtccaaactgaagctgatgtccaactcgaagtttctcttccggttacaccaacaagggagtctattttacaggacagcccaatcagagtcactaggagtcggcttgctatgctactgggagatggacagattgatatccagtcacctcccaagactacaactcctaagaagatgctagtgaagaagctcacaccaaggaagctgaagaaaatgtga

SEQ ID NO: 154332 - DNA, 637 bp, Zea Mays
ttcttagaaacttggtggaaacatgcccctagtaaggtaatgaaccaaaaaagaagagaggacccgcatcgcagatctcccccttccctccacgcctctcgcgtcgccgcgatggccgacgaggccctggaccagccgccggacgcgaccccttctccgactccggcgacgccgccggtacccgccaccccgtcccccacggtgctgctccgcccgcggcgggaggcattcgagcacgggctcttgcccatccccaagctcatcttcccggagggtacgctggcgcagaccctcgcccagctcaaggagaagctcgctgcctcggccccggacggacgcgtgcgcgccgcggccctggcggaggcgttgcagatcccgcaggagcaggcggcgctcgccctcgccacgctcgcggctgtgctcccggcagaggaccccgcgctcgggagacggcgccgtggatggttctgccgcggacatccgcgacatgctgctcttcctctacatccagtcttacaaacgtctcgtcccgcggagtgcgcacaaggactcgcccgtcgtggcggacgtctggccgtccacctccgcaaaaaaatgggtacctctccgcactctccccgatccaggtcaggattaa

SEQ ID NO: 154333 - DNA, 1875 bp, Zea Mays
cctgatttttctaaaagtttatagcgctgttaatagctagtgatttaagtgctctattattagtggaaatcgtgtgtgcctggttttaagcggtggatttgttaatttatgcagcagatttggtgcacgctgttctcgatttagatcattgggaatttttttcttgtttttgtagagattcgaatttgatatgttaccctgattcgtttaaaaagtcggtttgagctgtatttgcgcagcaaattttgcgattgtgtcttttgttcctaaaaatcaggatcttgtttcgtctaccacgattgatgtttgctaagatggcaatgatggtttgatgtgcagacatatattcagtgatggaacacaaggaggccggctgccagcagccggagggcccaatcctatgcatcaataactgtggtttctttggaagcgctgccaccatgaacatgtgctccaagtgccacaaggagatgataatgaagcaggagcaggcccagttggctgcctcctccatcgatagcattgtcaatggcggtgataatgggaaaggacctgcaattgctgcaactgtaggtgtggcagttcctcaagtcgaggagaagactatcgccgtgcagcctatgcatgtcgctgaaaccagcgaggctgctgctgttatcgcgaaggccaaggaaggcccaaaccggtgcgcaacctgtaggaagcgtgttgggttgacgggttttaactgccgatgcgggaacacgtactgttcgatgcaccgctactccgacaaacacgactgccagtttcgactatcgaactgcagctagggacgctatcgccaaggccaatccagtggtgaaggcggagaagcttgacaagatctgaggcgggggcattgggtaacgaaaaatggttgcgatctgcaagaattcagcatgtctctttgctgctttatcattgaacttcccattcttgtcttgctgtcacgtcccctggggttcaatactatgatgcgcacagcatcctggcagctgcaagaattcatccccagtcgagtcacgaaaatggtttgcgtgttgactatgtcgtgtaagcttattcagttattcttggtggtttgggtcggtatcgtgtcattccccgtttaggtagctctgtaatctactattctcaatttctcatgtgtgttgccttccaatcagtaatagtaatcagcaattgtctgccatatctcctacaagtatattttccagttctattgttttctcttgatgttccagcaacatatcacattcaggtaatcgctctgcatttcaattcatgtgtacctgttatttcaattcagaggaccagaggttgagagggggccatagtggtttcaggccacttctctactatcgaccaatcagaggttatattcaagtaattgttcatatgtggaactattgaccaatcagcagatcttgctcctcgttctctgaggaagggtgcaatgaagtgggattcttgctgtcgaacacttaatttcataaatcatttttgttccagagctgtgattttgtattaggatgcagcttggtggtggttgggtacgctgaatctgcattacatacagtgtacacaagcacaatttcctggtgaatgttgacactaggcaacttgaattctcaatcaagaggccgcaaagggaacatacatttcatattctgcaacctcttttctatcgtgtacagttgggaacatgcaactcgactttccacatgtgattggaacacgcctagtttgttttgtatcatttgccacctgcaaagaattggagcaagtctaaacaactcgtttttgtatgattgccacttgcaaagaagataactgatttgtacgaaatgatat

SEQ ID NO: 154334 - DNA, 483 bp, Zea Mays
atggcccctgcctcgtcgccggttgcaggctcctccactcgctccgtcgcctccgccacatcctcgggatatgatgctctgtccccttcggatccggctagccgtcgccggggacacaaccaagcttggcctgggcgcgacaaccaggtccaaccgagccagcggccgaggagatctgaaggggtgagggggtggggggacgcgagcgcgcactctcggctcccgccccgcgggggaagcggagcggagacgggcggtgaaggcggaaggccacgaggtgttgggatttgggaggggtcagagcatatagccgcttccagcgaggacgaggacgaacaatgtgtcatgactgtctcagattctcctattcttctgggagatatgcatatggatggggacatactgctgaaatcagagttgatcgatccatcctcaaggagcctgcaccagacctttagttttggacaggaaagaaaaccctaa

SEQ ID NO: 154335 - DNA, 837 bp, Zea Mays
atcctcgccttttcacgcgctcagcgatgacgcgttacaatgcatccttgtgctcctcgcgtccctcgccgctgccgtcgtcgcagcatcctcgcacactcactcgctctgcctcggcctgccaccaccaccaccatctcgcctgctgctcgccaatggcccctgcctcgtcgccggttgcaggctcctccactcgctccgtcgcctccgccacatcctcgggatatgatgctctgtccccttcggatccggctagccgtcgccggggacacaaccaagcttggcctgggcgcgacaaccaggtccaaccgagccagcggccgaggagatctgaaggggtgagggggtggggggacgcgagcgcgcactctcggctcccgccccgcgggggaagcggagcggagacgggcggtgaaggcggaaggccacgaggtgttgggatttgggaggggtcaggtcaggagtggccgtcccgctcgtgaactcctgcgccaaacgcaaaactgccggctgcagcctgcagtcgccggccggaactgggacgggtttggtttggtgatggcggcctgctcttggatcgagacggcccgattggatgaatgatcgcgtcgtcgattaaataatcaccatctgattctattggttttaaatctactattgagtttgtgatttgtctttcttattttggttgtccagttactaaaacaacaaaaagacaacaatgtaatggtgggtgttctgaaggagtttgggaacatgctagcctatggtcgtctagatttgtcaattaccctctattttacaataaataaaggagatgaatttatgttacatcaa

SEQ ID NO: 154336 - DNA, 609 bp, Zea Mays
atggcgacaccgtcgtcgtcgctttgctccagcttcgcctccctgcggaccgcctccatcggccaccctcgcgacatcacgtcatctacgcccaggttggtggagcatttgcttattttggccaaaagactcaagtttaccatcaaaatttccttccctggcgcaattgctattcaggcattgccagaaatagctcaaaagattacatggttggagaatgaagataccttgcttgattcttctggcgagactgatcttgctgaacatcacaaattggggcttgatatatctgaaccggagaagaaaatcatttatgagatgatgagaccagagaggactttgttgtatttggttcctggaaggctggcccggaacccagggtctacacatcttataactgaaaaacacatgagcagcaagaaggtgagcaagaggaagcacgctagaatcattgacaagaagattgccaaaaagaagtctgaggctgtcgagtaccaaaagcttcttcccataggctcaaggaatagagaccgccacaatgagagcttggccaagagaagatccaagctttctacctctgccaagtcttcctctggcacctccgcttaa

SEQ ID NO: 154337 - DNA, 1317 bp, Zea Mays
atgtcccgcgcagcgagggccgcgtccaggctggtgcccgagatacccatgctgaggcggagcagcaagcaggccgccgccgcagcggaggaggtggcggtgccggcgcagttcgtgtgcccgatctctctggacctgatgcgggacccggtgacggcgcccaccgggatcacgtacgaccgggagagcgtggagggctggctggcgcgcgggaacgccaggtgccccgtcacgggacggcccctgcggctcgccgacctggtccccaaccacgccacgcgccggatgatccaggactggtgcgtcgccaaccgcgccagcggcgtcgagctggtgcgcacgcccaaggtgccgctcagtgacgccgccgccgccgaagcggtggccacggtgtcggccgccgcgaggcgcggggacgcggccgcgtgcggtgcggccgcggccagggccagggcgctaggcaaggagagcgaccgcaaccggcgctccctcgtggcggccggtgccgcgcgcgcgctggccgccgcgttcgggcgcctcgccggcgagcgcgccggcgcgctgggcgacgtcctggccgcgctcaccgtgttcttcccgctcgacgacgaggcccgccgctgcattgcctccccggcgtcgctcaagtccctcgtctccgccatgtcccacggcgagctcccagcgcgggccggcgccgccgtcgtgctccgcgaggtcgcgtcgtcggcagacgcgcacaccctcgaggccgtcctgaggaccccgggcatgtgcgacgcgctcgtcgacctcgtccggaaccccgtctccacgcaggccaccaaggccgcgctcgtcacggcctactacctcgccgccgcctccgaccgcgcggcggcgcgcctcgcggagtgcggcgcggtgtcggttctcgtggaggccctcgtcgacgccgacaagggcacgagcgagaaggcgctggccgcgctggacggtgtgctgtgcgccgacgccggcctcgcggccgcgcgcgcgcacgcgctggccgtgcccgtgctcgtcaagaagatgttccgcgtgtccgacatggccacggatttcgccgtgtcggcgctctggcgcctctgccgcgcgggcgacgccgctgccgccgcgtgccgcgccgaggcgctccgcgtgggagcgttccagaaactgctgctgctgctgcaggtcggctgcggcggcgtcaccaaggagcgcgccagcgagctgctcaagatgctcaacggctccaaaggcagcgtcgagtgcgtcgagaccgtcgacttcaagggactcaagaggccattttga

SEQ ID NO: 154338 - DNA, 499 bp, Zea Mays
gagaaatcacgggaggaaacccaacgccgcgcgccgttggaagacctcacagccgccgcgtagccacttgccctcaccttcgtccagtgcccgattgacgccgccatcgtgtgctcgccaagagggttagtagccgccgtgatccatattgctgagcgaatccatgggagagagatggaacagagaggttgccgccaccattgatctgcgtcctcctcgttgctctggcctcgacgacgggtcctggggcatcgccggtgttcaccgcttccgtacgtggttttcccgggtgcgtttggcatgcgttgctggcgtaattcgtcgccggcgttcgaagaattgccgccaccgtgggcggacgacttcgcaacataaaatccgcgtgaggacacgtgtcacctgaagagcaagttggtacctggaatctcaagtgccaggcaagttgtgcccttgatcacttctttttacccagccatgttctgattaatcataatgatct

SEQ ID NO: 154339 - DNA, 528 bp, Zea Mays
atcacccgtcgctcctccatctccgcgaaccgcccaagcgaaacgcccgccgccatccgcgattcgcccgccagccatgcggtgaagatgtcggggcgcggcaagggcgggaagggcctgggcaagggcggcgcgctgcgctaccggaaggtgctccgcgataacatccaggggatcacgaatccggcgatccggcggctggcgcggcaggggcggcgtgaagcgcatctccgggctcatctacgaggagacccgcggcgtcctcaagatcttcctggagcaatgctgctggtttaggggttcttcgcgcgcgcatccggccaggcctccaaggtcggtggccatggctcagtgtcgccatcacctcctcctcatggtttattgctgctccggtaagaccttactttcttcttgattgtttcctctttccctttcgatgtgtcttcacctgcccctgaaagtgatgcccatctctcgtgtcatgtcccgtctcagcggcaggcgagagccatggggaagcctttgctg

SEQ ID NO: 154340 - DNA, 117 bp, Zea Mays
ctttcctaacaaccaacacaagaaatgtagacgaacacagaaatgagataactagaacgatgaaatccacggaagaaagaaagaagccttccctgaaacccgggctattcaactgtc

SEQ ID NO: 154341 - DNA, 110 bp, Zea Mays
aaaaacagcaaacaaaagttggtactgcgatcagcctatacaggctatggtcatcctggttaaccaaacagaagctgtgttcatgcaacttataaaaacagcaaaccaaa

SEQ ID NO: 154342 - DNA, 783 bp, Zea Mays
aaccgtcacttcggacgagaagctctaagcgaccacgcgccgataaaaaccgctcccacccactcgctccgctgccctgcccctcctccgccgtttcgcctctctccactttccccgtccttcgccgtcgcggccgcgtcctagtctagtctgatggccagccgctgggtccgacccgaggtgtacccgctgttcgcggcgatgggagttgccgttggcatctgcgggtttcagctcttccggaacatcaccggcaacccggaagtcagggtaaacaaggcagggagggcagccggcgtgcttgagaaccatgaggaggggaggcgttacgccatgcatggcctcagaagctttgtgcacgacaagacccccgagatcatgccagctatcaacaagttctttactgaccccaagtgaagcaaagcagctttggttggccgctgatgacgatggttctgctactagttgcccttggggattgtgtaccctttttatggcaattcgatatgtgaatgagttcgacggtccctgtttgttcctcgtactcacctgtcatgtggatttgatgcacttaagtgataaaactgtcagccaacgttcattacaagtggatttttgcaaactggttatgtaaaggataagtaattgtaatttacaagtgttttagactttgtcttttatgctgtttaagaatatatatggtacacttgatctgatgtatctgtcctttatgccaatgatgatagcaaaaatggatattaagcctaatcaggtagccagtta

SEQ ID NO: 154343 - DNA, 447 bp, Zea Mays
cgaggagagtttcagatggtcggtgctgagattgcgaaaaagctcaagcgatcacctctagctgccagaacagtgggaagacagttatgtataagaccaaacatcgagttttggaggaatactcgggatcgggaccttctggacgaggtaatgggagctctgtggtggagctaccagcatctagatgagcaggtcaggcgatgcttttcttattgcagtatttttcccaggaggcgttggttggaccctgagtatttagtcaggttgtgggtggcagaaggatttgtcaccagccgcaatacaggggaggaactggaggctgttggtcgaggctactttgatgagttagtgtcagcctcatttctgaaaccagtagatggtgacaaggaaccctataagatccatgatctgttgcatgacttagtaagtaaagtagctggaagtgac

SEQ ID NO: 154344 - DNA, 286 bp, Zea Mays
gatggcccctgaagttatggagcaaaaggattacgatttcaaggcggatatttggtcgtttggcattactgcacttgaacttgctattggccatgcaccattttctagccaacctccagcaaaggtttttctcatgacgttgcaacatgccactccatcacttcataacacaaaggagatgaagttttcagacgtatggtttcaaaaatattttctaagaaattaattgtgtgtgactattgaatcatttcttgtcttgttttgtagtcttttaagagtatgattg

SEQ ID NO: 154345 - DNA, 854 bp, Zea Mays
aatgaaagaatgatcaataattgaacaaaattccaagtctttacaacatccaatcgagagaattgggaacccaagaatcaccagcccgaccaaaaagaatcaaaatctctccccaataacttatctgaattctacccccgagggcaaaggctcccccttctctatcaactcattcctgatttcccctgtcatgtcgccaccgccgctcccaacgccgccctgtacagcccaccacgagcggcagctagatcatagcagcggcggcaacagccacagcaagacaatggaactagaagctatctctctaccaagagaacacggacgccgagatgagcccggccacggcctcggcgcggaacgggtagatctcgaaccgcagcgacgggaacgacgccgccaccgcgcgccgcagcagctccggctccgggtccgccccgtccactgccccggcctccgcggccaagaagtggaagaagatggactccgggcaggacgcgtgcttgagcagcgagtacaccgccgccatggagccccgcaggtagtgcgtgtcgagcgtcatggcgatgtgcaccaagcccgggtcgcacacccccgccgccgcagccggacacccttccccgttccggtactcaggcgcctccgcaaaccgtggcaacgccgacgcggcacccgaaacctcgacggccaagaagaccaccgtcgccgccacaacagcggcccacatcgcctcgcccgcagcgccgcccatggacggtggtgacgaggggggctcttgcgcgttcttggattctctctgctcgcagcggccagcgggcggcagcctgtgctgcgctgtctcgcagtagcagtagtgg

SEQ ID NO: 154346 - DNA, 1263 bp, Zea Mays
tcaaatttctaacaagcactcgctcttgcagttgtgaggcttatgggtcgtgctgcttctcacattacattggaatgcgctttgcaaacacaccccaatgctgcactcattggggaagaggttgctgcgaagaaagaaacccttaagaatgtcacaaactacattactgatatcatctgcaagcgtgcagatcttggttacaactatggtgttatccttataccagaaggcctgattgatttcatcccagaggttcaaaaactcatcgcggaattgaatgaaattttagcacatgatgttgttgatgaggcaggggcctggaaaagcaagcttcaggctgaatcaagggagctgtttgagtttttgcccaaaactattcaggagcaacttatgcttgaaagagatccccatggcaatgttcaggttgcaaaaattgaaactgagaaaatgcttattagcatggtggaaactgaactggagaagagaaaagctgaggggagatactctgcacatttcagaggacaagctcatttctttgggtacgaaggaagatgcggccttcctactaattttgattctaactattgctatgcattaggctatggtgctggtgcccttctccaaagtgggaagacaggacttatttcgtcggttggcaaccttgcggctccagtagaagaatggactgttggtggaacagcattgacatcactgatggatgttgagaggaggcacggcaagttcaagccagtgatcaagaaggctatggtggaactcgatgctgcacctttcaagaaatatgcatcgttgagggatgagtgggccatcaagaacagatacatcagccctggccccatccagttcagcggccctggaagcgatgactcgaaccacaccttgatgctggaactcggtgctgagttatagagacgcgtccttcacttatttttgttcttacagttttgggagtggagacttggacactgggtctcctggagcagcctgcagtgcagtctccatattgtgaattgtctaataagaggttcgatgggagttttttgggtaccgactggatgtggtagaaaataagaactggttctagtttttttgggtatgatttatgcagcaactgacttgtcttgtagccctgattctgttcccatgtttgcaatctcgtgagaacgaacaaattgtacactgtcgattgcttgcttccgttagcagattattgtacacggtcgtttgtccagtgatgtgtcctac

SEQ ID NO: 154347 - DNA, 711 bp, Zea Mays
agggctaccccataaaaacgcccacgacggcgactggcctttcgattcgcccagggcaatattccccccggaccaaactagatcagcgaaacccactccgctctcccgagatcggacacatggcggcggcggcagtgacgtccaacggcggcgcagtggccgcgaacgggccggcgcccggcaggctggcctccgtgtacagcgaggtgcagacgagccggctcctgcacacgctgcccctcccctccgtcctccgctccaacttctcggtcgtcgacggccccgccagctccgccgcgggtaaccccgatgagatcgccaagctcttccccaacctgttcggccagccctcggcgtcgctggtgccttcggccgagcccgcggcgaccaggccgctaaaggtcggtgtcgtgctctctggtggacaggcgcccggcgggcacaatgtcatctgcggcatctttgattaccttcaggagcgtgcaaaaggtagcaccttgcttggattcaagggaggccctgctgggatcatgaagtgcaaatatgtggaactcacttcagactttgtgtatccctacagaaaccagggcggattcgatatgatctgcagtggaagggacaagattgaaacaccggagcagttcaagcaagctgaagacacagccaacaagcttgatttggatggacttgttgtcattggtggtgatgatt

SEQ ID NO: 154348 - DNA, 712 bp, Zea Mays
atatacgctactacaggatatttagacttcgttggtgatgactacatcaactaacttatatattttcatgcgtacattaactgttgtgcatgtctaacaagacgtattaattgtaattttatagctctcgcatccacttgaactacatcgtgattggttcacaatatccaaaaccttccgtgcggtgaattggcaggcttagtaaccgggaaccaggaacttggccacgttcctcgttccgggaacgttcgttccgttccgggaatgtgggaacaatctcgttccagtagtgttaaatcctagattttgtagcgtaccgcgtaccacgttctcgttcctcgatcccatcgatctgggaagcgtaccacgttcccgttcctcgatcccatcgatctgggaacctggttactaagggcaggacgaacttcatcattacagcctcggataagtacggatcaagttatatggtcaaatgtgtatttttcatattcatctttaaatcggctcatctgattatatgtcactcatatattccttttggtttctgaataatatatcaacaattcacgtcgaactgcggcatctgtttcccggctcctaaaagctcccggttgaagcgcttcatttactagataaatgtaaaggccatgttatacataatatttttttttcttccttcatcattagtaatatgggttttgttgttataaat

SEQ ID NO: 154349 - DNA, 303 bp, Zea Mays
atgggcaacggctactcggcatctggggatgcagagcccgcccttgctgcctccaccgacccctcctcccgcctccactatggcaacacgtccctcaaggccgacgcctcagcgcccgcgcccattggctcagtattgggacgacccatggagacatgtgtagcatctacatcgtcggcaaggagcgcgggtggacgcgatggtctccactgcagagacggatacggagaaggaggcagcggcgaatggcgaggagctgcccgtcatgccctgggccacctctgtcgcaaggtgagctgttga

SEQ ID NO: 154350 - DNA, 1057 bp, Zea Mays
cgaagatagagttttgacctctataggttcaaactacatttaaaattgaaatggtgatcattagttagcatctcgaaaataccacatgatatttatttagtcctttacttgtcatataagctcttccaattcattctaaccaacatgtagcttatgtttggttctactcgctcactaaatacatttgatatctttttagcggcaagaaaaatataaagatacccaaccaagtgcaataaatcttttcaaggagatgcattgcagcaagaagaaatgatttagtaaaactgttccgaaagctattgtaagtatctatttacctttttgcgttcactttccaacttatgttacactatgctgagttttaatcttaatgctaggatgagatggaagcaatggtggcagcaccagttgaagttggacaacttgtgatgtcttctaccgaagttgtttctcatgtcttgtcgagctcaagtaaattccttcacaatattggtcttcagcctgcctccaagacaagctctgtttcagcaaaggtgcacgagcttcaatctcaattggagaccaagagacaagaaaaatatggacttaggcaagaaatggaaaccttaaaggctacatcacaagaatctacgatcactattgctaatcaatcaattgagatcgaatatttaaagaagtcgctagcagaaaataatagccttcttcgtcagatactaagcatcaatcggggccagatgtctcctccttaagattgttgctatagtggactatgccaattttacatccaacaacactggactacttttttattagttgtctatttagtctgatcatattgatactatagtagttgtgtgcatcttgtggcggttgaacctgtcctacttttgcatttaagttataggatatataaacatgtttggtgtgtaaatacttgtgttggatgctttatgcttcaaatatatgtggattctagaaaagttgtgtgtgttcatgttgtttgataaaattgtatgcacagtttggattgaattcaattatatacttattttat

SEQ ID NO: 154351 - DNA, 1668 bp, Zea Mays
caaatgcacagatgctccatacctctctcgaatcatagcctgacatatgtgctataataatatggaaaattaattattaatatgtctctctgttcatatatggcatgcagctgatgattcacgtgcaatacatagcgcgttgtgcagacgaacatggcaaattaaatttgtctataaatttagccatcgtccacacagcttaagattgtaaaattgttgtgctagcttagcttgtatgtgctgagctttggctccccccggcgcaccgctgaagcctcgactcgcaggcagccatgccgatgagaatcgagcgtgatctccacatggccacagggaacggagaaactagctacacaaaaaattctaggattcaagagaaagctatgtttcagatgaagtcggtccttgaggaggccactagagcagtatgcacagctctcctcccacaaaccatggttgtggccgacttaggctgctcatccgggcctaacacactgcgcttcgtcactgaggtgactagaatcatagctcaccattgcaagctggagcacaaccgacgacatgaccacccgccgcagcttcagttctttctgaatgacctgcccggtaacgacttcaacaatctcttccagctcatcgagcagttcaataagtcatcgacgacacacaagggagatgcagcaactgaggcactacagcctccttgctatatctccggattgccgggctcctactacactaggatcttccctagcgaaagcgttcatcttttccactctctgttctgccttcagtggcgctctcaggcaccagagcaattgaagggcacccaaaaatcatgcctagatatctacatcacaaagactatgtcaccatcgatggtgaagttgtttcaacatcagtttcagaaggacttctccctcttcctcaggctacgctatgaggaactcgtgtctggtggccaaatggttctaacatttattggaaggaagcatgaggatgtgttcgctggagagtccaaccatctttacggattgcttgcgcagtcactgaaatccctagttgatgagggtgttgtggagaaagaaaaacttgagtcattctatcttccgatctactcaccgtcggttggtgaagtggaggcgatagtgaagcaacttgggttgttcaacatgaatcatgttaaagtatttgagataaattgggatccctacgatgactcagaaggtgatgatgtgcataacagtattgagagcggtgaaaatgttgctaagtgcctacgcgcagttatggagccgctggtcgcaagccaatttggagaacgcatactcgacaagttattcaaagagtacgctcgccgtgttgccaaacaccttgagactgagaaaaccaagcatgctgttcttgtcctatccatcgagaaagcaataattcatgtgtgaagtgtcttgtttctcactatatatctttccattattatcacatggtaatatatgtttgttttgaatgtgcacgtttgtgtcactagctggtgtattgaatgtcatggtgtttttgttgttttctttgtcgcttctcctatattttagatgcctgaattttaaggtgatttcaggcaacactcctgtacaaggaattaatacaaataaattgctccttttatgatcg

SEQ ID NO: 154352 - DNA, 1373 bp, Zea Mays
atgccaatgacaatcgagcgtgatctccacatggccacagggaacggagaaactagctacacgaaaaactctaggattcaggagaaagttatgtttcagatcaagccagtccttgaggaggccactagagcagcatactcagctctcctccctcgaactatggtcgtggccgacttaggctgctcatcggggcctaacacactgcgcttcgtctccgaggtgattggcatcatagctcgccattgcaaagaacacgaccgacgacatgactacccacaacttcagttcttcctgaatgacctgccgggaaacgacttcaacaatctcttcctgctcatccagcagttcaataagtcgatggcaagaaaccacaagggtgaggcagctgaggcactgcctccgtgctatatctctggtttgtcaggctccttctacactaggatctttcctagcgaaagcgttcaccttttccactctttgttctccgttcactggcactctcaggcatcagaacaactgaaggacaccaaaaataaatgcctagatatctacatcacaaagaatatgccaccgtcgatggtgaagttgtttcaacagcagtttgagaaggacttctccctcttcctcaagctacgctacgaggaactcgtgtctggtggccaaatggttctaacatttattggaaggaagcatgaggatgtgttcactagagagcccaaccatcttcacggattgcttgcgcagtcactgaaatccctagttgatgagggtcttgtggagaaagaaaaacttgagtcattctatcttccgttctactcaccatcggttggtgaagtggaggcgattttgaagcaagttgggttgttcaacatgaatcatgttaaagtatttgagataaattgggatccctacgatgactcggaaagtgatgatgtgcataacagtatcgggagcggtgaaaatgttgctaagtgcctacgagcagttatggagtcgctggtcgcaagccaatttggagaacacatactcgacaagttattcaaagagttcgctcactgtattgccgaacaccttgagaatgaaaaaaccaagcatgttgttcttgtcctatcgatcgagaaagcaataattcatgtgtgaagtgtcttgtttctcactatctttccattattatcacatggtaatgtatgtttgttttgaatgtgcatgtttgtgtcactagtgtattgaatggcatggtgtttttgttgttttctttatcgcttctcctatattttagatgcatgaattttaaggtgatttcacgcaacactcttgcacaaggaattaatacaaataatttgctccttttatgatcttccattcatttttgt

SEQ ID NO: 154353 - DNA, 2111 bp, Zea Mays
ttgtgcttgtatatatgtgctgaactttggcttgggtacttctctacaccatgtccatagctgaagcctcagcttgcaggttgcagccgatgagaatagagcgtgatctccacatggccacaggggacggagaaactagctacacgaaaaattctaggattcaagagaaaactatgtttcagatcaagcctgtccttgaggaggccacaagagcagtatacacagctctccaccctcaaaccatggttgttgctgacttaggctgctcatctgggcctaacacattacgcttcgtatccgaggtgattggcatcatagctcgccattgcaaagaacatggccgacaacatgaccacccacagcttcagttcttcctgaatgacctgcccggaaacgacttcaacaatctcttccagctgatccagcagttcaataagctgacggcaataaaccacaagagtgaggcagccgaggcactgcctcctccgtgctatatctctgggttgcctggctcctactatactaggatcttccctagcgatagtgttcaccttttccattctttgttctgccttcagtggcgctctgaggcaccagagggcaacaaaaaaacatgcctagatatctacatcacaaagactatgtcaccgtcgatggtgaagttgtttcaacaacagtttcagaaggatttctccctcttcctcaggctacgctacgaggaactcgtgtccggtggccaaatggttctaacatttattggaaggaagcatgagaatgtgttcactggagagtctaaccatctttacggattgcttgcgcagtcactgaaatccctagttgatgagggtcttgtggagaaggaaaaacttgaatcattctatttaccaatgtattcaccatcggttggtgaagtggaggccatactaaagcaagttgggttgttcaacatgaatcatgtaaaagtattccagacaaattgggatccctacgatgacttggaaagtgatgttgtgcataacagtattaggagcggtgaaaatgttgctaagtgcctacgagcagttatgcagccgctagtcgcaagccaatttggagaacccattctcgataagttattcaaagagtacgctcgccgtgttgccaaacaccttgagaatgagaaaaccaagcatgctattattgtcctatccatcgagaaagcaattcacctgtgaagtgtattgtttctcactatctcgcttggcatgctactatttgtgtagaaaactttgtatgtatgtttttttgtgtgtttgtgtcactagtgtattgaattacatatggtgtttttgttgttttatttatcacttctcctgtattcctatattttatatgtctaagtttttaaggtgatttcatgcaacccttgtacaagcaattgatacaaataaattgcaccttttatgatctatgattcgtctttgtatcataatgtatatcaagccatgtagaacatatgtaatagaacgaagttatgttttaggttaagccagttcttgaggaggccagtcgaaaaagtacacacatctctcctctctcaaaccatggtcatggccaacgtaccactaccagaatccggctctttgccgagtgcaaattattgggcacttggcaaagcatgctttgtcgagtgccactctcggtgaactaagcctctcgacacagacctagtttgctgagagtgcaaacactcggcatagacaaactctcagcaaaggaggctttgccgagtgtcaagctctcggcgaaatgcgacgctcggcaaagggccatcagtagccgtctatagttgacgaccattaactttgccgagtgtcagcccttgacactcggcaaaatatcttcttggccaagtgtcatctaacaaacactcgacaaattatcttctttgcctgaagcactggacaaagcagttatgtccggtagtgtacactgcacattgggatgtaagagcaagtccaacaattctcgatatccaatccctaaaccaaaaaatagggaaaaaagaaaaaaacacagatacaatagcttcctagtctagctcccgatcgagtcatgtgcgtaacccaacc

SEQ ID NO: 154354 - DNA, 1540 bp, Zea Mays
tctgtcttacctttaatgtttcagatagcaatatagcatatttcaatgactgattattatattctccataaatgataaattgagttccatatcttagtcagtttggcgatatatatcaggaggattattttatcaaatatctgaaatctgatattcagattgtaaaggatcttccagtagagctgcagtcattagacttggaggccatcggtagccttgttaatgatacaaatgtcatgaaagaggcaaagcccagtttatacgtaaaaaaaatactgccaattttactgagaaacagagttgttcactttataggatttggcaatcgcttatcttttgacccaataccttctgaccttcagagattgcgatgcagatgtaattttcacgctcttcgttttgtacacaaaattcaagaaactggtgcagttcttgtagagaggttgcatggccacagggcctcttcgtcacctttgaaggataatcttttaggccagtttgctatcaagtctgaccccagtacgaacaagagtgacgcatccaaatatctggctgttcatctccggtttgagattgatatggttgcatactcattgtgttactttggtggtggcaaagatgaggaagacgaactagaagcttatcgccaaattcactttcctgttctgtcagaactcaagaagacgacaaagttgccgtctgctgctttgttacggtctgaaggcaaatgtccccttgcacctgaagaggctgtgcttatgcttgctgctattggtttcaagcgcagcacaaatatatacattgcaggtgctgaaatttatggagggcaatataggatggctgcaataagtcgtctttatcctgctttagtaactaaagaaacccttctgtctccatcagagcttgaaccatttaggaacttctcatctcagttggcagccctagacttcattgcatgtgcagctgccgatgcatttgctatgactgacccaggaagtcaattctcttctcttgttcaaggttaccgcatgtactatggtggtgggaactttcccacaataaggccaaacaagcgccggctagccagcatacttgtgaagaatgccacgattgagtggaatgaatttgaaagtagagtaaggaaactcatacagcaaactaagcaagttcatgagaggcctgttgcaagaagcatatttagacatccacgatgtccagaatgcatgtgcagaacagagcactaatattttgatagtttcttgtatctataccaacagttgttttttcagaagaaagactaccaattagatcgccaaaggtagttcttttgtgctcccgctgaaatctggatagatctcttgcccttgaactactttggaatcaaactgtacaaaagaaaatataatgattgagcccttgtttgtatcagagaagcaatatagctgactagctcatcaattatcttactgctatggtctactgctaggcatcatgttggatttggggtatttggcagaactttgtctcatgtttgatggaa

SEQ ID NO: 154355 - DNA, 721 bp, Zea Mays
acgatttcatttccgaatcgatcccttccctttcggtcgccacctctagattacctcgcctcagctgtcaccgacggcgacgcgtttcttcgcgcagcgcgctgcgcctttaaaaactcccggagccggccagagaccacgagacagagcaggcacagagttcattcaccgccggctccttcatagttcattcccgaggcagagattttttttggggggtgaagcaccgcgcaactccttctcagttctcagcggcagacatgcagcggaacaactcgttcgggacgtcgtgggcggaccagtgggactacggcggcgacccgagcccgagggcgccgcgcgacggcggcgtgggggagaagaccaaggcggccgcggccaccggcatgaggaaggtgaaagagggcacgtcgcaggggttccagtggatcaaggacaagtgccagcggaagaacggcggcggcaacaagaagcagcagggctccgaggtccctgggtactgacccctcctgtcctcgtcacgtcagtgctgttgcttggcagacagcagaattttctaaattttttctcggttcttgctgttggtacgaatagtatactgcgtataggttgtgatctgatctcggtgctggttgcagttgtagagtagtttcatcgtacctgatatgtctccttgatactgaattggtcacttcgatatatataaaaggatatttataaa

SEQ ID NO: 154356 - DNA, 243 bp, Zea Mays
tccttcaattcaggcaaagctcagttctaaggtgtccgcatgatgaccacatggatttagaagaactgcttgcttacagcttactcgatcctcgtcccgcactcctttgttcctttgctatttgttttgaaatgactgtctttgagttggtaatctggctacatgagctggtaatggaactgctgcagggtgagtgtcgtttcttctacaccaaacaacattggaactacttgcctatccttg

SEQ ID NO: 154357 - DNA, 327 bp, Zea Mays
atggggctgccgctgtcgccgtctccgtctccggctccggctctgcggacggcaccctccgcgactgtcttgctggctgcctgtcttgctccttgcgctggagagcggaggcagggagagattgtcttgctccttgcgctggagagtggagacagggagagagccagccgccggccgccgctggacagggacgagagagccgcagcccacagccgccgctggacagggatagctagggttgccaggtttcgtagtttgctaactgggtcgtgggctcgtggcccgtgggctgtgtcgctgttgcctagcgctcgacctggtgactga

SEQ ID NO: 154358 - DNA, 1360 bp, Zea Mays
attcttcctcgcaggcacagccgcttctcccttctccccgaaacccaaaggttgcgatggccagcacaccctctcctctcctcatgcttgccgccatggcggtggtggcggcgacgcttgccgtggcgccagtctcgtcagcggacctgccatccggtgtcgcatccatcacgtccaagatcccaaacccatggtcggccttccagaacctcacgggctgccacttgggcgagcagcagcagggcctcgccaaggtcaaggactacctctcccgcttcggctacctgccccccgagtcgtccgggtcgttcaacgacgtcttcgacgccgacctggaggaggccatcaaggtgtaccagcgcaacttcggcctgggcatcacgggcgtgatggacgcgtccacggtggcccagatgatggctccgcggtgcggcgtcgccgacatcatcaacggcacgtccaccatgggcggcggcagcgcctcggcctcggcggcgcacgcgcgcggccggaacctcttcacctacttcccggggtccccgtcgtggccgcgctccaggaagagcctgacgtacgcggtcacgcagacctcgctgacctccatcgaccgcgcgacgctgagccaggtgttggcgcgggccttcgcgcggtggtcggcggccacgacgctgaccttcacggagacggcgtcggagcgagacgcggacatcaccatcggcttctacgcgggggaccacggcgacggcgaggcgttcgacgggccgctgggcacgctggcgcacgccttctcgccgacggacgggcgcttccacctggacgcggccgaggcgtgggacgccagcggcgacgtggcgcgcgcggcctccgacgtggccgtcgacctcgagtccgtcgccgtgcacgagatcggccacctcctcggcctgggccactcggccgagcccgccgccatcatgttccccaccatcacctcgcgcaccagcaaggtggacctggcccaggacgacgtcgccggcatccagaacctgtacggcggcaaccccaacttcaagggcgtcgcgccgcccgccaccagcagccgggacatggacagcggcgcgaccacgagctcccgggggccgtggaccgccgccgttgccgtggccgctgggctcttggtagcgttgtagtcatcggcagattttttttttaaaaaaaaacttttgctttagctgattttaattcttgtgcgtacatcgatcagtagatacatttgtaatttatgtactccttgttgttatacatagatagacacatggattgtatagaatcaaatcctattgggtaaaaagaaatggtgcgtgtgtcactatttttgatg

SEQ ID NO: 154359 - DNA, 125 bp, Zea Mays
cgggccctaaagctggtaacatgttaaacctttacttgttctcagttgaatcaacgggacctcatggtcgacgcagagctgttgtatacgtcaaagaacatgccactcaaaaaaaaaaaaaaaaa

SEQ ID NO: 154360 - DNA, 402 bp, Zea Mays
atgtcatttcatgtgaaattgatgcatgaagtaggctacgagctgggcaaccttgatgctacgctgatcttgcaaaaaccaaaaattagctcgttcaaggagacaatccgatcgaatttgtgcgacctacttggggcagatccatctgtggtcaatctcaaggccaagacgcacgagaaagttgacagtctaggggagaacaggagcatagctgctcatactgtagttctcctgatgcgaaagtagaaagaacaaatggcagataattgtatcatgctacacgaaaaaggttgttatcttatacttgtgattgttgagtgatctagccagtatggaaaatattcatgtggtagaaacaataaagctgattgcaatgagaatttttctgtatttcacttgtgc

SEQ ID NO: 154361 - DNA, 1116 bp, Zea Mays
cacgcaccagcagcagagaccgcggagacgctctctcgccatcgccagtcgcccatggccacgggcaccggccgtccgtggtgggcgccggcgccgcccgcggcggctcgctccgccccgctgttcccctccccgccgtcgtcgttcacggccgacccgccggcggagttcctctgcccgatctccggcacgctgatggcggaccccgtcgtcgcgccgccgggccagaccttcgagcgcgcctgcatccaggcctgcgccgcgctcgccttctccccgcccactgtcgccgttgacctctctgagtcccactcctgctcctccgccccgctcgtgctcatccccaacgttgcgctccgcaacgccatcctcaactggtgcgaccgcctcgccctgccacacccgtcaccgatgtcgccggacaccgcccacgacatcgtgcgccgcctcatgccgcaggaccggcagcggagctcgctggcgcagcgcccgcagccgcaggtgcagcagcagccgagctccaggcagcggggcgacgctctggaggaggagatcatggccgcgctcggcacggagggcgccacccccgcggagcaggcgtccgcgatggccttgctgcggcaggccacgcgggagaaccgggaggtacggaggcagctctgcacgctgcgggctatgcgcggcgaggatgacgaggcgccggccatggacagcgggctactcggacggcagtgggacgacggcagcgtcgtgtcggaggggctcgtgtccatccggcggccgccgccgcaccgtagcaatcacgccgggccgtccgggtcaaacacaacccagttctgaaaagaatagcaaagtcaaagtcttcgttttctgtacgctgttctgccgtctcggttcaagtcttgaactgtacaataccagaaaaatactgcaaggtacttcttgtcttgtataaactgtaaagttgattcttttgtttcaattgaaatggaactttattggatttgtgcaaggctttttggctgaatttctgaaactgtaattgagatcagggaaagggaagggtgctgggtctgtaatattattgatatcaagttgaccatatgcaaatttaac

SEQ ID NO: 154362 - DNA, 1584 bp, Zea Mays
cacgcaccagcagcagagaccgcggagacgctctctcgccatcgccagtcgcccatggccacgggcaccggccgtccgtggtgggcgccggcgccgcccgcggcggctcgctccgccccgctgttcccctccccgccgtcgtcgttcacggccgacccgccggcggagttcctctgcccgatctccggcacgctgatggcggaccccgtcgtcgcgccgccgggccagaccttcgagcgcgcctgcatccaggcctgcgccgcgctcgccttctccccgcccactgtcgccgttgacctctctgagtcccactcctgctcctccgccccgctcgtgctcatccccaacgttgcgctccgcaacgccatcctcaactggtgcgaccgcctcgccctgccacacccgtcaccgatgtcgccggacaccgcccacgacatcgtgcgccgcctcatgccgcaggaccggcagcggagctcgctggcgcagcgcccgcagccgcaggtgcagcagcagccgagctccaggcagcggggcgacgctctggaggaggagatcatggccgcgctcggcacggagggcgccacccccgcggagcaggcgtccgcgatggccttgctgcggcaggccacgcgggagaaccgggaggtacggaggcagctctgcacgccgcgcctcctcgccgcgctgcgccccatgctgctgtcggccgacgccgacgtccaggtcaacgcggccgcagcggtggtcaacctgtcgctggagcccgagaacaaggtgcggatcgtgcggtccggcgcggtgtcgccgctcgtggacgtgctccgcggcggccacacggaggcgcgcgaccacgccgcgggcgccatgtacagcctcgccgtggaagacgagaaccgcgccgccatcggcgtgctcggcgccatcccgccgctgctggacctgttcgcgggcgccgccgcccaccgcgcgcggcgcgaggccgggatggcgctctaccacatctccctctccgggatgaaccgccccaagatcgcgcgcgcgccgggcgctgtccggacgctgctggcagtggcagccgcggaggcgcggcgggaccgcgcgagcgacgccgacgccgccgcgctccggaggctggccgccatgatcctggccaacctcgcgggctgccccgacgggcgcgccgcgctgatggacggcggcgcggtggccgcggtcgtcaggctgatgcgctgcggctccgcggctcccgggagcacggaggaggaatactgcatatccacgctgtacgggatgagccggggcagcatgaggttccgcgggctcgcgcgcgccgcgggggtcgaggccgcgctgcagccggtggccgagggcggcggcggcgtgcggcgagacctggcgcggcgcacgctgcgggctatgcgcggcgaggatgacgaggcgccggccatggacagcgggctactcggacggcagtgggacgacggcagcgtcgtgtcggaggggctcgtgtccatccggcggccgccgccgcaccgtagcaatcacgccgggccgtccgggtcaaacacaacccagttctgaaaa

SEQ ID NO: 154363 - DNA, 101 bp, Zea Mays
cggggatgtcgagctgcttcttctgtccatcaccagagtctacctccatgaacctagacgatttacactaaatgtactagctatagaaaacactgttataa

SEQ ID NO: 154364 - DNA, 303 bp, Zea Mays
atggcgtataccagtacgagattcggagattaccagatgacagaagtccagaactccagaacagaagatggacatcaggacgtgctggcgcttggcgagtggcgggctacgggcgtcgcgtcgggcgagaggcgccggcgtgcggttgcgcgcagcggccagcggccagcggcggcaggccgcaggcaaaggcgagtcgtgagtccgtcagcccgtcaggggcgttgcggcgtgcggctagaaacgtggtgtcgtggtgggctcagcctcccctcaacgttccagcaggagctagccagctag

SEQ ID NO: 154365 - DNA, 1172 bp, Zea Mays
atcgactggttttttttttctgaattgtgatgataggcgggcagcgctgagaaacggaagaggacacgaagcagaagcaaagaaaaaaagtaaaaccaagaaccgccgcctcgccgttcgagagaagggaagaggggggaaaaagatgctcgccagaaccatcggaggcgccgtccgaacccgcctcgcgccgtccctcgcgagccttctctgccgcggctacgcgtcccccgcctcctccgccgacgaccttgtcatcgacgaggacccgccgcgcgccgcctcgacgtccgttgccgccaccaccgtggcggccaccgtgccgaccctcctgcagccgcgggtgctcatctacgacggcgtctgtcacctctgccaccgcggggtgaagtgggtgattaggacggataagcacgccaagatcaagttctgctgcgtgcagtccaaggccgccgagccatacctgaggctggtgggcatggacagggaggatgtgctgcggcgtgtcctctttgtcgagggccccgaggcctattacgagggctctacggctgcgctgaaagtcgcatcgtacctgcctcctccttactcggtcctgagttccttgctgatcgtccccaccccactgcgggatgcggtctatgattacattgcgaagaaccgctatgactggtttggcaaagatgatgagtgcattgtcaccaaggacaaggaaattctggagcgcttcattgaccgggaggaaatgcttggtggcggtcccagcaatagcttcttttgattgcattttttggctgtgttgatgtccacacttatactgtagggaagcggtgtaaataatcttcgcatccatccaggtactctgcagatagttttcttaactcctagaacttctgcattccacattaacgacaatgccgtcgatcacccgcagggtttctcagatcatgttggttccgatttgattgcaaaacgtgagctaattgatgtctaagattagaattttgtaatatgggttggtcgtcggtgtaaggcataggcatgaaggttacaggtgccttgatatgacatcatttcttttcgtacacctgctgtgtcgtgtatggggtactcctatttcgttcaaataactgcagtactaaatactatgctgagttgccgctcttatgatt

SEQ ID NO: 154366 - DNA, 96 bp, Zea Mays
gctttaggcaggtttacctctttatgttgctttcattgcacatttatttatccatttacccttagagaggacaatcagctcaagcaatccgtgtga

SEQ ID NO: 154367 - DNA, 1881 bp, Zea Mays
caacagcaaaacagcgaaacagtgcagagacaagctacaacaacctaccctaacaggccattccttccactgcacttcattcgatcctgagctatagctggctgcctgagctcgctccaagaagtgtatctatagtatagacactaggcttcgtgtggcgtgctcgagatatgcttgcagtgtcgccgtcgccggtgcggtgtgccgatgcggaggagtgcggcggaggaggcgccagcaaggaaatggaggagaccgccgtcgggcctgtgtccgactcggacctggatttcgacttcacggtcgacgacatagacttcggggacttcttcctcaggctagacgacggggatgacgcgctgccgggcctcgaggtcgaccctgccgagatcgtcttcgctgacttcgaggcaatcgccaccgccggcggcgatggcggcgtcacggaccaggaggtgcccagtgtcctgccctttgcggacgcggcgcacataggcgccgtggatccgtgttgtggtgtccttggcgaggacaacgacgcagcgtgcgcagacgtggaagaagggaaaggggagtgcgaccatgccgacgaggtagcagccgccggtaataataatagcgactccggtgaggccggctgtggaggagcctttgccggcgaaaaatcaccgtcgtcgacggcatcgtcgtcgcaggaggctgagagccggcgcaaggtgtccaagaagcactcccaagggaagaagaaagcaaaggtggattggacgccggagcttcaccggagattcgttcaggcggtggaggagctgggcatcgacaaggcggtgccgtccaggatcctcgagatcatggggatcgactccctcacgcggcataacatagccagccatctgcagaagtaccgttcccacaggaagcacatgcttgcgagggaggtggaggcagcgacgtggacgacgcaccggcggccgatgtacgctgcccccagcggcgccgtgaagaggcccgactctaacgcgtggaccgtgccgaccatcggtttccctccgccggcggggacccctcctcgtccggtgcagcacttcgggaggccactgcacgtctggggccatccgagtccgacgccagcggtggagtcaccccgggtgccaatgtggcctcggcatctcgccccccgcgccccgccgccgccgccgtgggctccgccaccgccagctgacccggcgtcgttctggcaccatgcttacatgaggcaggggcctgctgcccatatgccagaccaggtggcggtgactccatgcgtggcagtgccaatggcagcagcgcgtttccctgctccacacgtgaggggttctttgccatggccacctccgatgtacagacctctcgttcctccagcactcgcaggcaagagccagcaagacgcgctgtttcagctacagatacagccatcaagcgagagcatagatgcagcaataggtgatgtcttaacgaagccgtggctgccgctgcccctcggactgaagcccccttcggtagacagtgtcatgggcgagctgcagaggcaaggcgtagcgaatgtgccgcaagcttgtggatgatccccggggctgcatagctgctagctcgtccctgcacgcagtgcaacaaaaggaatttgtcgacatgccttttatgttttgaattcccgtgaaccgtttatggagcactctcaactcgttcagggtcagatgaacagaacattataggagtacattctttgaggtttcaggtttgagggaaatcaacctgagtgcatccaagtacagtgtactgccacagtgccacgtcggaaaatgaagtcttgacccgaataacaagtattccctcgggttatttgtc

SEQ ID NO: 154368 - DNA, 1843 bp, Zea Mays
aaacagcgaaacagtgcagagacaagctacaacaacctaccctaacaggccattccttccactgcacttcattcgatcctgagctatagctggctgcctgagctcgctccaagaagtgtatctatagtatagacactaggcttcgtgtggcgtgctcgagatatgcttgcagtgtcgccgtcgccggtgcggtgtgccgatgcggaggagtgcggcggaggaggcgccagcaaggaaatggaggagaccgccgtcgggcctgtgtccgactcggacctggatttcgacttcacggtcgacgacatagacttcggggacttcttcctcaggctagacgacggggatgacgcgctgccgggcctcgaggtcgaccctgccgagatcgtcttcgctgacttcgaggcaatcgccaccgccggcggcgatggcggcgtcacggaccaggaggtgcccagtgtcctgccctttgcggacgcggcgcacataggcgccgtggatccgtgttgtggtgtccttggcgaggacaacgacgcagcgtgcgcagacgtggaagaagggaaaggggagtgcgaccatgccgacgaggtagcagccgccggtaataataatagcgactccggtgaggccggctgtggaggagcctttgccggcgaaaaatcaccgtcgtcgacggcatcgtcgtcgcaggaggctgagagccggcgcaaggtgtccaagaagcactcccaagggaagaagaaagcaaaggtggattggacgccggagcttcaccggagattcgttcaggcggtggaggagctgggcatcgacaaggcggtgccgtccaggatcctcgagatcatggggatcgactccctcacgcggcataacatagccagccatctgcagaagtaccgttcccacaggaagcacatgcttgcgagggaggtggaggcagcgacgtggacgacgcaccggcggccgatgtacgctgcccccagcggcgccgtgaagaggcccgactctaacgcgtggaccgtgccgaccatcggtttccctccgccggcggggacccctcctcgtccggtgcagcacttcgggaggccactgcacgtctggggccatccgagtccgacgccagcggtggagtcaccccgggtgccaatgtggcctcggcatctcgccccccgcgccccgccgccgccgccgtgggctccgccaccgccagctgacccggcgtcgttctggcaccatgcttacatgagggggcctgctgcccatatgccagaccaggtggcggtgactccatgcgtggcagtgccaatggcagcagcgcgtttccctgctccacacgtgaggggttctttgccatggccacctccgatgtacagacctctcgttcctccagcactcgcaggcaagagccagcaagacgcgctgtttcagctacagatacagccatcaagcgagagcatagatgcagcaataggtgatgtcttaacgaagccgtggctgccgctgcccctcggactgaagcccccttcggtagacagtgtcatgggcgagctgcagaggcaaggcgtagcgaatgtgccgcaagcttgtggatgatccccggggctgcatagctgctagctcgtccctgcacgcagtgcaacaaaaggaatttgtcgacatgccttttatgttttgaattcccgtgaaccgtttatggagcactctcaactcgttcagggtcagatgaacagaacattataggagtacattctttgaggtttcaggtttgagggaaatcaacctgagtgcatccaagtacagtgtactgccacagtgccacgtcggaaaatgaagtcttgacccgaat

SEQ ID NO: 154369 - DNA, 660 bp, Zea Mays
atggccgtgagcaagctccatagcgtcctggtgacgcgccccaacctctgctcctccttccctgcccgcgcgtcctgttgcctgctcgtgcccagctcgtgcttctatgccgcacgctcccttcctgctcgctctctctccctcagctcggctctccagcgccctgccgagcggctcccttctgtgcccgggggcctcttcctcctggcgctcggctccagcgtgcccacctcccaagctcgtcctggagcctgcgcgtggagcttcttcctccctgcgctcgcctggttcgccgcgcgctcaagcccctccctccaccctctgttcgtcggccgcgcgccacgccgttctctctcccgctccagcttgccgcacgcgctctgctccctgcgcccagccccaacgcccggccaagctccctgcacgcgccctgggttgcgtgcccaggctgctgctcggccgcgctttctgctcgccgcgcgccctggcgtttgccgtggccaccgcgccgagctcttcgctgttgtcagtgacgcgcgcgttggacacggtgaaacgatgcgtgtgcatgtgtccgagcccgcccggccgcaacctcgctttgctctccgcgtcgctgctcgtcgaatccagctccatgttgatgcgtctctattctag

SEQ ID NO: 154370 - DNA, 600 bp, Zea Mays
atggcaaccttattttcaagttatggcttagctgtttggtatggatctaagctgatagtcgagcgaggttacaatggtagcatggtcatttctgttatcatgtctgtcatgatcggagtaatgtcgttaggccaggcaacacgatcagtgacagctttcgcagaaggccaaggagcagcacatagaatgttcaagataattgaacgcaagccagatattgacatagatgataacacaggtatcatattggaggatgtcaaaggtgatgttcaactgaaggacgtgtacttcagctatcccacgaggtctgaattctcgttgcaagtaccaagtggaacaacaatggccctggttggtgacaacggcagtgggaaatcgaccgtgatcagtttggtggaaaggttctatgacccacatgctggagaagtcttgattgacggggtcaacattagaagaatgaagcttggatggatgagaggaaaatttggtcttgtcaaccaagaaccagtgctattctcaactacaatcagggaaaacattgcatatgaaatagaaaagccaacacttgaagatatcagtgtgagcgatatagctcgctaa

SEQ ID NO: 154371 - DNA, 1070 bp, Zea Mays
cttgctccttatcttcacgcgcgtcttcttcttcagccaaccgcgccgcttcctgacgcgcgccccctcagtccatggagctccctgctcctctgccccaagctttttcctcgcacgaacagccctccgctcggcttcatctccctcaggtgccgtcggccggatctcccatggcgagtttccccagatcggcatccctgcagagtccatgaccaagctcccccatggcgtcttccccatccatggcggtccctatgctcacgccctgatggccgccctctctttgctcctggtggtcgagctcgcccctgcccaagttcggttgactctgtttccctctctttctgttggtggctggcgtcccatctcccctgtattggatggccgtcgctggcgttcgtccctgctctagctcttccatggtcggcgcctctttagctcctctctgcccctgctcggacggcgcgcctgctccagtgtcgcgcccctgctcgaccacgcctggccggttcttcctgcaactagcgcccagccgagctcctcccatcttcttcctcatctccatagccgcgcatcgtcagttctcggccttggagctcccatggcgctcggtcgctcctatttcctcccggttgcagcttgctcggtgcccagcccccagctcggatccgctgcgagctcaccggatcgccttcccatggccgcgtctcctccctattgtcgcgtctctggttccctgctcggcgcctgagattcctcccatggccggtgtttggtccctgcgctcgtccggccgaactccctgggcatcgcgcttgctgtttccccacgcgcgcgagttcgccagtgttcggtctgcgcgcagcctccctcccaactcggccgcctgcttctctccgctgctcgtcacgcccagctgtagctcgtcggatctccctcaccggcgcgcgttcctctctccgcttgccgtgcccggccgaacgtccctgtgcagccccagttcctcgcttccgttgtgttcgattaaatgtcggatcaaaaatccaagttgtcgctcatcctcgctgtga

SEQ ID NO: 154372 - DNA, 465 bp, Zea Mays
atggcgaccggtgcaggaggggcgaggcactgctggagccggggagcggtcagccgacgcagggaggcgcggactggacaaccgggcgtccacgacacgggacagcaggggtgcagatccgcgtggaacagcaggggcgcgcgtccgccgggcgggcgctcctggacggcgcgacaggtcctgtgccggggctccggtcggtcggcaccagggcgcgacggacggtgcagcactgcagcgacgaggggccgcacggacgtcggggcagagggcgaccgtcggggcggcgcaggagaacggcgcggcggcgtcctggcgacttggccgcggcgcacggcgtcggcgcggacgggtcgagcggcgacggcccgcggtgaggggaggcccgcctgcacgctgcggcggcggctgtacggcgcgcggtgttcggcggctggagaccggcggccggcgcaggggagatga

SEQ ID NO: 154373 - DNA, 1127 bp, Zea Mays
agaacagcagaggtgagaacgggagagcgaccccagcagacaagagacagacgagagagagcgagcaagccgagcatcgtgacctctctctgtttctctctctcttcccttctcgtcttctgcaagaagccagtgaccgtctctgtttctctcattccctttcatcactctgctggtctccctcttccacctctggtcttggccatggcctccagcgcctcccggttcatcaagtgcgtcacagtgggggacggcgccgtgggaaagacctgcatgctcatctgctacaccagcaacaagttccccactgattacatacccactgtcttcgataacttcagtgcaaacgtggtagtcgacggtaccacggtgaatttgggcctttgggatactgcagggcaggaagattacaacagactgaggccactgagctaccgcggagcagatgtgttcgtgctcgccttctcgcttgtcagccgagctagctacgagaatgttatgaagaagtggctaccggagcttcagcattatgcaccgggtgtccccatagtgttggccggaactaaattggatcttcgtgaagacaggcactacttagttgaccatcctggtgcggtacctgttactacagcacagggggaggaactgcgcaagcacattggcgcaacttgctacatcgaatgcagctcaaaaactcagcagaatgtgaaagctgtgtttgatgctgccatcaaggtagtaatcaggcctccgacgaagcagcgagaaaggaagaaaaagaaagaacggcgaggatgctcaatattctgcagccgtatcatgcacgcaagaagactaggatgcttcaagtgatagaaggccttcttcgacgataacgtaggcttctaagatgaatcgagatcgtgtatagtttgtctccatgttccaaagtgctcgttgcgcttgtgcacttgggctggtaatgtgtatatttagtctttgccaattgatatttaggagaaatattaagcacttcgtttatgtaccattggctcataatgagctgggaagtccaatacatactaagaagtaacaatattttcttccgatgattttattatggtttctcgtaaaataatgttgtcatt

SEQ ID NO: 154374 - DNA, 1050 bp, Zea Mays
aacagcagaggtgagaacgggagagcgaccccagcagacaagagacagacgagagagagcgagcaagccgagcatcgtgacctctctctgtttctctctctcttcccttctcgtcttctgcaagaagccagtgaccgtctctgtttctctcattccctttcatcactctgctggtctccctcttccacctctggtcttggccatggcctccagcgcctcccggttcatcaagtgcgtcacagtgggggacggcgccgtgggaaagacctgcatgctcatctgctacaccagcaacaagttccccactgattacatacccactgtcttcgataacttcagtgcaaacgtggtagtcgacggtaccacggtgaatttgggcctttgggatactgcagggcaggaagattacaacagactgaggccactgagctaccgcggagcagatgtgttcgtgctcgccttctcgcttgtcagccgagctagctacgagaatgttatgaagaagtggctaccggagcttcagcattatgcaccgggtgtccccatagtgttggccggaactaaattggggggaggaactgcgcaagcacattggcgcaacttgctacatcgaatgcagctcaaaaactcagcagaatgtgaaagctgtgtttgatgctgccatcaaggtagtaatcaggcctccgacgaagcagcgagaaaggaagaaaaagaaagaacggcgaggatgctcaatattctgcagccgtatcatgcacgcaagaagactaggatgcttcaagtgatagaaggccttcttcgacgataacgtaggcttctaagatgaatcgagatcgtgtatagtttgtctccatgttccaaagtgctcgttgcgcttgtgcacttgggctggtaatgtgtatatttagtctttgccaattgatatttaggagaaatattaagcacttcgtttatgtaccattggctcataatgagctgggaagtccaatacatactaagaagtaacaatattttcttccgatgattttattatggtttctcgtaaaataa

SEQ ID NO: 154375 - DNA, 1099 bp, Zea Mays
agaacagcagaggtgagaacgggagagcgaccccagcagacaagagacagacgagagagagcgagcaagccgagcatcgtgacctctctctgtttctctctctcttcccttctcgtcttctgcaagaagccagtgaccgtctctgtttctctcattccctttcatcactctgctggtctccctcttccacctctggtcttggccatggcctccagcgcctcccggttcatcaagtgcgtcacagtgggggacggcgccgtgggaaagacctgcatgctcatctgctacaccagcaacaagttccccactgattacatacccactgtcttcgataacttcagtgcaaacgtggtagtcgacggtaccacggtgaatttgggcctttgggatactgcagggcaggaagattacaacagactgaggccactgagctaccgcggagcagatgtgttcgtgctcgccttctcgcttgtcagccgagctagctacgagaatgttatgaagaagtggctaccggagcttcagcattatgcaccgggtgtccccatagtgttggccggaactaaattggatcttcgtgaagacaggcactacttagttgaccatcctggtgcggtacctgttactacagcacagggggaggaactgcgcaagcacattggcgcaacttgctacatcgaatgcagctcaaaaactcagcagaatgtgaaagctgtaatgtgaaagctgtgtttgatgctgccatcaaggtagtaatcaggcctccgacgaagcagcgagaaaggaagaaaaagaaagaacggcgaggatgctcaatattctgcagccgtatcatgcacgcaagaagactaggatgcttcaagtgatagaaggccttcttcgacgataacgtaggcttctaagatgaatcgagatcgtgtatagtttgtctccatgttccaaagtgctcgttgcgcttgtgcacttgggctggtaatgtgtatatttagtctttgccaattgatatttaggagaaatattaagcacttcgtttatgtaccattggctcataatgagctgggaagtccaatacatactaagaagtaacaatattttcttc

SEQ ID NO: 154376 - DNA, 1835 bp, Zea Mays
acaccggcaccagctacacctacaccacagccggggatttcctcgacgcgccctcccaacggtcgaccggatcctgccgtccaccagccccacgcgcccacatcccaccgttcagatcgaccacgccttgccgcaccgagggcagaatcgtccgacgcaaagcctagtctccctcattttaatcacgtcactggccgcaggcgcctcccagtttcaaatctcaaatcctcatcgttctcctttccccaaaggccaaaaccgaccccgctccacgcctccactcccagccccagcggatcttctcgagcggcggccggcgatggcagcgagcaacatcgggatgatggacggagcctacttcgtcgggcgcaacgagatcctcgcgtggatcaacactacgctgcagctcggcctctccaaggtggaggaggcggcgtcaggcgcggttgcgtgccaactgatggacgcggcgcatcccggcgccgtgccgatgcacaaggtcaacttcgacgccaagacggagtacgacatgatccagaactacaaggtcctgcaggatgtgttcaacaagctcaagatcactaagcatatagaggtgaacaagcttatcaaaggaaggccccttgacaatctggagttcatgcagtggatgaaacgatattgtgattctgtcaatggtggcttcatgagcagctacaatgcttctgagagaagggaaagcagcaaagggggaaaggagacgaacagaagggcatcggtgccctctcacacaccggccaagtctgcatccacaggtcacaaggctcaagcatcacatggtgccaagcgggcaagcgggcagacggcgggtgcaccacagcgcagcgctaagccatcacctgcagcccagctctggcggaccagcttatgacgaacaaataactgagctgaagctccttgtggatagcctggagaaggagagagatttctacttctccaagctgcgggacattgagatcttgtgccaaaaccctgaggttgagcacgtgccggtccatgctatccagaacatactctacacatcagaggaggaccctcagcagcaggctccagccctgagccccatcatggaggcgtccgaggagaggccgaagcaagaggcggcgcacaagagaaagagcatctcggacctggacgagtttggtatgtcgtccagctcaaggcagaggctctccgacatctcagacgtgcagctgtgtggatccccgctgacgagtttcagctgaaggaaccgtcatctctacaaaatgggtgtctcgtctttctgttggattggttcgtggtttcgtatttcatgtgttgtttggtggtgaactgtcgtgtgctcttagcaagttgtctgccacagaatttgtggccataaatgctacaagttcctcctgctatgttatctgccacccattccaagctgcataatcgcagcggccgctatgagcatttccgtaacacttgcgacccccaaaaaagcaacgttgcaagcaaagcatcacatgccattttggattaccactacaatgctgtcaacacccgtcatttcgtagttacacaccagataattttgtacttgacagaaaatcacgagataaccagcaagagcaaccggccacattcagcagtaattttgggccaaaactttcccagcttgaagaattgtaatccgtgcagtctttagcagagcatgatcaatgtgcagctcaaggttgagtgagaatgtggtaatccaaggttgagtgacatccgacagaagtcaatttgatatcaatatgacaatcgcatgtatcaatatacatcagcca

SEQ ID NO: 154377 - DNA, 237 bp, Zea Mays
atgatcagtcacaaaagcaccacagcgacatcactccagcttgaagcagttcaaaagcccacaactacatcactaatgttttatatcactccagctattgttcaaaagcccacaactacatcactaattttcatggtgtctcatgttttatcttctcccgcagacatccatcagcagcattgcggcagttatacaagggagtatcagcaaagcattaagggtactcatgagaattga

SEQ ID NO: 154378 - DNA, 326 bp, Zea Mays
gccctgtttgtttgggattataatctaggtagattatataatccaatataaataagctagtgaggaaacaaacaagcaacttatctgataagattatataatctagcacttgagattatgataatctataagctcatcaaaaggtgcttatttcagcttattttttatgaaagacccactacccatgacaagttgattaaaattacttccaattgtcattcatctgtccatagacgttctcacgcaccagacaagtaaacagccaaatgtattgttgtatttgtatgcatatgaataataagccaagtacaaataatctgagctaa

SEQ ID NO: 154379 - DNA, 360 bp, Zea Mays
atggcgacgtggaggagcgtgccgcggaggccgacggcaaaggaggcggcggccatgacggccgggccggtcaggaaccgcacggccatggcgaacgtggccaccttgttcccgcacgcgattatccgtggctgcagcgccatgaacagccctgcacggaggaaggcgacgtcacgcgcggtgtcagtacaagggggttaactgttccataggtggcgtggcgatgcgactccagacagaggaggcagcagagagggttttgagatccacggaccgaggctgaacatggccatgccgagcccggcgtcggagaggatcgagatggacttgaggatgatcgccggcatctcgaagttccac

SEQ ID NO: 154380 - DNA, 240 bp, Zea Mays
aaaattttctacctgtctctaataggtgatgaacctaattgccaagatgctaataaaacaaaaggacaaaacaaaaagagagtgagaggattagggccactgccatccaagccatgggaacactttgatcatgtactgatgaatctacctgcttccgctttgcagttcctcggtaattttttatcctcatgcttttgtgttataatttaattatagcaccacattgtagccattggcttt

SEQ ID NO: 154381 - DNA, 1816 bp, Zea Mays
gaatacgtctctctagtgttttggcgtaggaattaattacacgtgagtggttggcttaaaagcctaaacctgtgtcctgtaaccggtgaatttagatcaggattcaggaatagaaaaagaaaaagaatggacagcttgttgctcaagttgttcacccacctccactccacctgtgtgtgtgtgtttcacgtcccggcggaacttgccggcggacacgcgtcgtcacagccgaccaacggcgcttgcccgttcccccatcccccttgattcctccgccagcccagcggcggccactctccacgcatctgcatccgcatggctctccacgccgcggcgccggcctgcgcggtgttctgccgcctcccgtcgccctccccatctcacgccggcagcagacgctcccttcccgccgtcgcgagtccccgcggcgttgtctctgccgcgccgctacggacacgcgcagttccaacaaaggcgatcgtaaacagtgatggcatccctgaaacgagtgattctccacatgtggtttgctttggtgaattgctaattgacttcgtcccaactgtcaatggcgtgtcactggcagaagcacctgcctttaagaaggctcctgggggagcacctgccaatgttgcagttggaatagctcgccttggtggctcgtcagctttcattggaaaggttggtgatgatgaatttggctacatgctagctgacatattgaagcagaataatgtcaataatcaaggattgctgtttgatcctcatgctagaacagctttggcgtttgtgtcactccgaagtgatggtgaacgcgaatttatgttctatcgtaatccaagtgctgatatgctacttgaagaaaaagaacttgatcttgatcttatacggaaggcaaagatattccaccatggctcaataagtcttataactgagccctgtaaaactgcacatattgcagctgccagagctgctaaagatgctggagtacttgtttcatatgatccaaatttgaggctttcattgtggtcatcacctgaggatgctagagatggtatcctgagcgtatggagaactgctgatattttcaaggtaagtgaagaggaggtttcctttctcacaaatggagaggatccttatgatgatgccgttgtaaagaaacttatgcactcaaacctgaagttgcttcttgtcactgaaggtccagacggctgtaggtattactctaaggattttagtggtagagttggtggacttaaggtaagtgctgttgacacaactggtgctggcgatgcctttgttgctggagtgctatctcaattagccacagacttttctctgctccaggatgaaggtcggttgagagaagccctgaagttcgcaaacgtctgtggagctctcaccgtgacacagagaggcgctattcctgcgctgcccacccgacaacaagtgcttgatgccctgaccaattttgttgcttgaaagtagccgtgcacacctacttgtgtattgtaatgctgaccgcctgagcgccatgtcgatagattacaggcgtgatttcgcttgcataccacttggcatttttgttggtgcgtaccaaagccccccagccaaaccaagtactcggtggaagaggttgtttcccgtcggattttgatgtgtgaagttgtgtgttggggacgttgggttaacactttgtggacgtgtgtgatgtgtgtgctgatgttgtaatgctgctggggagaacatgacacagcggagcagttttggtacctgaaaacatgagctatgaatgagtgattcagttattgggccc

SEQ ID NO: 154382 - DNA, 812 bp, Zea Mays
cgataacatatatcaaccttatgtttgcaaaagtaggtttaacatttttcctaccgcaaagaatgatcattcttagtacaaagggcataattttcttttgtaatctacctgtcaattaaaagcagatttgttgagacgtgatatacacaagggtgagccaaccttttcatagtaaaacattacaatttgatggggccttaaagatggaatagttttccattagttcgaggactagcaaaaataaggcctaactgaacagaagacgatgatcctgttacaacatgacatgtcaacttctgactccagtaaccattgtgtctgcaaaaatagtatgcacgaactttcacaaattttcttttccctttcttttctttggcttcatggatctgtgttatttgggtcggctttcatcagatagatatagacagcattccgctggctccaatggagaaccaaacgctgaaggcaaaaggaccaaaattcacctgttcttcatcaaatacgcatttggcgtactgtacaaaacaatggtaatagttacagatggccaattgcttgaagctgggaaggcaagagcaagacaaaccaatgcagtctctctttggcctgtgtcttcagctgatactgaccaatatattcttaatcatctgtttgttgtgcccgcttcctggtaggttggttggcaggcatgttttttaacaatggtctcaaagtagccatgatctctgaaaatgatggccgcatccttggatcactgcacgaaacagtaaatctaacataattgagacaacatgtaaagggtgcataaaaga

SEQ ID NO: 154383 - DNA, 1614 bp, Zea Mays
gcttccacttcgcccctccgcaccggccgcccgccacccgccgccccgcctccttatataaccgaacgaagtccaaagccatccaaagaccaaaaaccctcacgaaattctgagatccatccagaaacgtcgctccatggcgattatctccgacttcaaggaggacgaggccccgcagcagccggcggcggtcggccccggcgtcgaggagaccctggtggcagcgctagagaggaccggcggtgcactcccctttctccaggcggccatcgatgtcgctcaccgcaggtctggcctgttccgcgacccttcggcggtgagcaaggttaccgcgatggcggcggccgtcagggcgcaggtggagaccgaggagagggcagccagagaggtcaagaggaaggcggaggaggccgagaggaaggctgcggccgaggcgcagaaggctgacatggaggcggcgacggcgacggcggaggagaagctggagaaggaccgtatggatgcggataaggcggaggaaggcaacgttagacaaccaaatgctggcaatggtcttgatttggagaagtactcatggactcaacagttgcctgaggttaacatcactattcctgttcctcaaggaacaaaatcaagatttgtggtcgttgatataaagaagaaccatctgaaggttgttctgaagggccagccacctatcattgatggtgagctctataagccagttaaggttgatgattgcttctggagcatagaggatggaaaaactctttccatattgcttacaaagcacaaccaaatggagtggtggaagtctgttataaagggtggccctgaagttgatacccaaaaggtggaacctgagaacagcaaactctctgatttggatcctgagactagacaaactgtggagaagatgatgtttgaccagcgccagaagcagatgggccttccgacaagtgatgaaatgcaaaagcaagaaattctcaagaagttcatgtctgagcacccggagatggacttctctaaagcgaaaatgccttgaggatttgttcgggcagttatttctaccagtctgcttaggttgtctttgagtctggtatcggtgtcaaacaaatcttcatctgtttttttttttttgtaatgcgtcaggaatatcaggcttgttctttttcatctcaatccatatgcattggaagcgtttgggtgggtttaaatccatagtaggtcaaaagctttactaaattttccaatgcaatccattccattggtcacgtggcttgaggatttgttcgggcagttatttctaccagtctgcttaggttgtctttgtgtgattgtgtctggtgttagtgtggaacagatgtctttgtgtgattgtgtctggtgttagtgtggaacagatcatctttttttagtagcgtcagaaatatcatttagaactgtgacgtctttcgaaactagagttcaagctcttggatatcattagtcacgtcgtcattaaaatctcagtaaagcctatttagaaacaaagtatttttatagctttcaggtaatatcagtaaagtatttttatacttttcaagtaatattatggtttctaagtaatactat

SEQ ID NO: 154384 - DNA, 781 bp, Zea Mays
gcttccacttcgcccctccgcaccggccgcccgccacccgccgccccgcctccttatataaccgaacgaagtccaaagccatccaaagaccaaaaaccctcacgaaattctgagatccatccagaaacgtcgctccatggcgattatctccgacttcaaggaggacgaggccccgcagcagccggcggcggtcggccccggcgtcgaggagaccctggtggcagcgctagagaggaccggcggtgcactcccctttctccaggcggccatcgatgtcgctcaccgcaggtctggcctgttccgcgacccttcggcggtgagcaaggttaccgcgatggcggcggccgtcagggcgcaggtggagaccgaggagagggcagccagagaggtcaagaggaaggcggaggaggccgagaggaaggctgcggccgaggcgcagaaggctgacatggaggcggcgacggcgacggcggaggagaagctggagaaggaccgtatggatgcggataaggcggaggaaggcaacgttagacaaccaaatgctggcaatggtcttgatttggagaagtactcatggactcaacagttgcctgaggttaacatcactattcctgttcctcaaggaacaaaatcaagatttgtggtcgttgatataaagaagaaccatctgaaggttgttctgaagggccagccacctatcattgatgtaagcaactacaacaataaatttcatcttgtcttatgggacgacaatgtttttggttaaccaaatgtgttgtta

SEQ ID NO: 154385 - DNA, 1463 bp, Zea Mays
gcagatatcccgagatctcatgagttgacatgaagatgaatgtcgcattgcttccggagtaggaatgagctaacaattgtttagttgaaggctccagcatattaggacaaatagcaacgacatacgccaatccctagagtagtgctgagcgcaagtccacggctataaagagaccataaattcagcacgaaccaatcgaccagtcccatggagcaagtagagtaggtgtcaaccgaaatgcacctgggagctcacgcagaagagagaagacactacggccacctgccctggcatcgagagctgacctaatccatttgcacttcgcgcgcgcgcagctcagcatcatgcatatataaatgtggcaagagccaggatgggctagctctgtgctctccaaatcagctgagcaaccaggccagttccaccaagctaaggaggtgagaatctctgtaaaacgctaaaggaaaaaaaaatgaaaggatccagcgagcatggcgagacctcgaagcaggcgcccctgggcagcaggggtgtcagcaaaggagtgtccgtgcttgatctaatacttcgcttcattgccatcatcggcaccctcgctagcgccattgcaatgggcaccaccaacgagacgctgcctttcttcacgcagttcatccggttcaaggcgcagtacagcgatctccctactctcacgttcttcgtcgtggcgaattccattgtctgcgcttatctcaccctgtcgctcccactatctatagtgcacatcattaggagcagggctaaatacagcaggctgctcttggtcgttcttgacgcggcaatgctagcattggtgactgcgggagcatctgcggcagcggccattgtgtacttagcgcacaaaggcaacgtcagagcaaactggcttgccatttgccagcagtttgactcgttctgcgagcgtatctctggatccctcgttggttcgttcggagccatggtcatgctcgtactgctgctactactctccgccattgctctagccaggcgctaggcggtgcgtgttgcggttattcgactccgctatccttgtgtaatcatacgtgtgcctattattatacctctcgtgctatgatcctctcatatatccccaattgttggcttgattctaaacttcttttcttctggtggtgtgcactatcatgtatagaagctacaaaaaaaaataggtgaactattatgtatggatcgccgtagtttctgaaagatttgttgggtatattgtgttcacttatcagaataaaaacatggaagaagctcgttgccgagagcctaactttaccgagtgcggctttcggcaaagtctgttttgccgagtgtccgacaaaagacactcggcaaagagaccgacactcggcaaagcttcggattccggtagtgtattgtgttcacttatcagaacaaaaacatgaaagattatctta

SEQ ID NO: 154386 - DNA, 599 bp, Zea Mays
actcggcctggatctggagcagagagaagggacgcgaggactctctttgagatttcacgatcctcacgaaaccgcctttccgctacctacaaaaccccaaggcctgcaatcctgcatctgggttttggaaaggaaaccctcgccctacctattcgtgggaaccggccatctcatgatccgtcacccagcagcttcttacccacttcttcgccgtttactgcagcaaacatctgatttgggagattatgggtgctatttcctatctctcatcttatctatcgcatgacaggtaaatctgcggcgccctcgattgtcgattcggccgggggtgcagaaatccgatgataacctattattccagattccatgaagtgcgcgtgaaagttacaaacatatctcgaggaatcagctttctaaagcacgcgttctgacttctgagttactttgttttggtatgtttcttggtgatattgactattgagggcctggatctatgcgctcgtagaaatgcctaatctcttgtaaataggttgtggtttcaacctcatttccgagctgactagatggtcgatttatttttatgggggctattctaatcc

SEQ ID NO: 154387 - DNA, 103 bp, Zea Mays
gagattctcaaggggagagactctggattttggagcttttgctagttgtgttgagtcatttgcctctttctggaggaactagctttgattttagcttttgtgc

SEQ ID NO: 154388 - DNA, 684 bp, Zea Mays
gccaaatgttatcatctatgtcgccagctctcgaaattttgtgacttgtcgaaatttggatctgatttatgtgccacccagtgactcggttagctctctacaaacatatttagttttatttggacagctttgaccaacaattactccataagaccatgtctagcagtgcgctgtacatgacactattcatagagtgaacacagtgaagcttaaatatgggcatgaggatggataagctgctcgagatagcctaatcttcgcaataaaaagggaatagtggattttgagatgcagggatgacatcttactcaggtgatcagcattgcaaatatgatcagctgaagtgattccttttcatgggggttctgctgttccagcatgacgattatcttctttgcaactgttttattgatgctggtttggctgctgtggtgcatcgaaatatctcctcccatcacaaatataaagttcatttatattgtattgtttcattgagctttcaagacatttcatgattatatgaatcagcttgcacaattccgatgtatataatacctggaacgatggttaggctgcctatagtgcaagttttcactatttactaatgggctaaaaacgtatgattttactgggatgtgtaatttgtttggttcttctgttgatctaaaaagaatttattttcag

SEQ ID NO: 154389 - DNA, 546 bp, Zea Mays
tcattttgttcttgtccactcggttttcgtatggatctttgattgtctgaggctctggatctatgaactaggagaaatgcgataatatattgcaaatgatttagagtttcagtctcaatcgcgagcttggtatatgattaatttattttctcgtcggattctgatctgccagcctgatgattagcattgtttgcacaaagaacggagatctgaatgcgtttcctcgtcgaagcccgcttgactgtttctcatagcaggcttgcttgctccagctcggattgttgacaacttaacactccctcagtccctctgttttgttatgtctggtgtagttttcctccttgagaggaaacctgcaaccacacatacacgaacatgcatgcatatatacatatatacacacatatcctctgctcctgcttttccactgatctgtctgagcgggctccggggaatgctcctgtagatgcaaaagttatgaaggcggcaggttggaagaatgccctttctgaatttgtttttaactttgcaaaagctattttagtt

SEQ ID NO: 154390 - DNA, 909 bp, Zea Mays
atgtcgctcgcctttctccagctgccggcttgcaggatcctcgggcccaggctccagcgaagaggagggagatctgttgccttgcgcgaagaagaggagggagatccggtgattgcgcgacgaagaagaggctgccatgcgcgagaaagctctagtgttttgccgagcgcgcggtgccaggaagcaggaagtgctcgtgttcagcaaaatcaccggacgacgacagatccagtccaagagagtgcgaggcagtgggcggcgacggcttcgagagggagacgaggaggcggtggctttgcgagggagacggggaggaggaggcttcgtgagagcggacagggaagctcttcccgacctgctgaggtggggagcgaaatcaccgagctcccccgcggtgaggagttatttgagattgtaataatctcgtcgcgcggcttcgctactttattactccgcagctggacctcgccattttggtattctggagctcacaccctcgccatattggcacagttaatgcccagcgctctgttaacgccggttatgttgctttttctgcaggttgtattcttcttcggactaatctaccccctgccggacttcccgtcttcctgcgcgagagaactcttgccaactcccagaaaaccgagaaccgagggcgcgccgccgtctgccaccaccaggggtactcgccagcaggttatctccgcgctctcgcattgttctgcctccagggggactcgccaccaggttttagaaattgattggggttcaatacaaattgatgatagatgggaggaagaaggagaacaagagactgcctctgagtcagtgatgtatgatcggttaggattgttagctgaggatgaaaacagcagcttcaaattgtgttgtccatttgcaagctga

SEQ ID NO: 154391 - DNA, 4709 bp, Zea Mays
actgatcatcctccaccaccgagctgagtgcgcgtcggcgaaatggggaccaaagttaacataatcgtggggtcccatgtgtgggctgaagatcccgatacttgctgggtcgacggagaggtggttaagatcaatggcgaagaggctgagatccaggcgaccaatggaaaaaagattgttgcgaatttgtcgaaactatatcccaaagatatggaagcagctgccggtggagttgatgacatgacaaagctctcctatctccatgaaccaggagtgctgcagaatctggcgatcagatatgagcttaacgaaatctatacatatactggcaacattctcattgctgtaaatcctttccaaaggctgccacatttatatgatccgcatatgatgcaccagtacaagggtgctccatttggagagttgagtccgcatgtttttgctgtggcagatgttgcatacagagctatggttaatgagaataagagtaatgccattcttgttagtggtgagagtggtgctggaaaaacagaaacaacaaaaatgcttatgagatatcttgcctatttgggtggccgagctgcaactgaaggaagaacagtagagcaacaagttctcgagtcaaatccagttcttgaagcttttggcaacgcaaaaactgtaaggaataataattctagtcggtttggtaagtttgttgagattcagtttgacaagcatgggaggatctcaggcgctgctatcagaacttaccttctagaaagatcacgtgtatgccaagtatctgacccagagcgcaattaccactgcttttatctcctttgtgccgcaccacaagaggacgtcgataagtacaaattaggaaatcctaagacttttcactatctcaatcaatcaaactgctatgagttggtcggtgtaagtgatgcccatgaatatttagctaccagaagagcaatggatattgttggtataagtactcaagaacaggatgctatttttagggttgttgctgccatccttcatattggcaatattgaattttccaaggggaaagaagccgattcctctgtcttgaaagatgaaaaatctaagttccatcttgaaacaactgctgagcttcttatgtgtaaccctggagccttggaagatgctctttgtaagcgtgtcatggtaacgccagaggaggttataaaaaggagccttgatccttacaatgcaaccattagcagggatggtctagcgaagacgatatactctcgcttgtttgactggcttgtcgataaaattaatagttccattgggcaagatgctagttctaaatgtcttattggtgtgctggacatctatggtttcgagagcttcaaggcgaacagtttcgaacaattctgcattaactatacaaatgagaaactgcaacaacacttcaatcagcacgttttcaaaatggaacaagaggagtacactaaagaacaaattgattggagttatattgagtttgttgacaatcaagatgttcttgaccttatcgagaagaaacctggtggtgttatcgcacttcttgatgaggcatgtatgttccccaaatccacacacgagacgtttgcccagaagctataccagacttttcaaaagcacaagcggtttgtgaagccgaagctatctcgtaccgattttacaatctgtcactacgccggagaggtgctgtaccagtctgatcagttccttgacaaaaacaaagactacgttgtggcggagcaccaggaactgctgagcgcttctaaatgctcgtttatctccggattgtttccgcctccgccagaggagacgtccaaatcgtccaagttctcttccattggagctcgctttaagcaacaacttcaagcccttatggacacattgaactccacagagcctcactacattagatgtgtgaagccaaacaatgtcctgaaaccagcgatctttgagaacgtcaatgtcatgcagcagttgcgctgtggtggtgtgcttgaggccatcaggatcagttgtgccgggtacccgacgcgtcgcacattctacgagtttctgcatcgtttcggaatacttgcgcctgaggccctcgaagggaatagcgatgagaaggctgcgtgcaagaggatcttggaaaagaagggtcttttaggctttcagataggtaaaacaaaagttttcctgagggccggccagatggctgagctagatgccaggaggactgaagtgctcagtgccgcggcaaagacgatccaggggaagatgcggacacacatcatgcggaagaagttcctttccttgaggaaggcgtccgtgtgtgtccaggcgatatggagaggaagactggcttgtaagctgtacgacaacatgcggagggaagcggccgccatcaaagttcagaaaaaccagcgcaggcaccaggcgaggagatcctacaagctccgctacgcttctgtgctcgtagtgcagactgcgctgcgagcgatggcggcgcggaacgagttcagattcaagaagcagtctacgggagcagttacaattcaggctcgctacaggtgctatagggctcataagtaccacaagaagctgaaatgcgcagccattgttgcacagtgcagatggagaggaaggatcgcgaggaaagagctgaagaaactcaagatggaagcaagagaaacgggtgcgctcaaggaagcgaaggacaaactcgaaaagaaagtggaagagctcacatggcgcgtgcagttagagaaacgactaaggacagacctggaagaagcaaaagctcaagaggtgtcgaaactgcagaactctatggaagcattacaggctaaactggacgagacaaacacaaagctcgctaaggagcgagaagctgctaagactatcgaagaagcgcctcctgtggtgcaggaaactcaggtcctcgtccaagacaccgaaaagatcgattccttgacagcagaggttcaagaccttaagacttcattacaatcagagaaagaaagggctggcgatttggaaaagaaacactctgaagagcaacaggcgaatgaagaaaagcaaaagaaactggatgagactgaaataaagatgcgccagtttcaggactacctgagaaggttagaagagaaactcgctaatgtagagtctgaaaataaagtgctccgtcagcaagctgtctcgatggctccaagcaaaatcctttccggccgctccaagtccaatctgcaaagaaactccgaaaatgttcaagtgtcaagcaatgatccaaaaacagctccagaatccaacagcacgtcctcacctaagaaggagtacgatatcgatgacaagccacagaagtcgctcaatgaaaagcagcaggagaaccaagatctattgatcaggtgcatcgcgcagcacttgggctatgctgggaacaggccagtcgctgcttgtatcatatacaaatgccttctccattggaggtcgtttgaagtagaacggacaagtgttttcgatcgcatcattcagaccattgggcatgcgattgagacacaagacaacaacgaagtcctagcatactggctttcaaatgcttcgacgctgctgctgctgcttcaacggacattgaaggcgagtggatccaccggtatggctccacagcgtcgacggtcgtcttctgctacactcttcggacgaatgacgcagagcttccgaggagcgccacagggtgtaaatctttctctcataaatggaagcatggttactggggtcgaaactctgagacaggtcgaggccaagtacccggctttgctgttcaaacagcagctcacagcgtacgtggagaagatatatggaatgatcagggataatctgaagaaagagatatctcccctgcttggcttatgcattcaggccccgagaacatcaagggcaagcttaatgaaagggtcttcgcgttcaaacactaacactgctgcccagcaagctttgattgctcactggcaaggaattgtgaagagcctagggaattttctgaacatactgaaagtgaacaatgttcctcctttcttggtgcgaaaagtattcactcagatattctcatttatcaatgtacaactatttaatagtttactactgagaagggagtgttgttccttcagtaatggcgagtatgtaaaggcaggattagccgagcttgaacattggtgctatagggctactgatgagtatgcaggttcagcctgggatgagcttaaacatattagacaagctattggtttcctggtaattcatcaaaagccaaagaaaacattggatgaaataagtcacgacctttgtccggtacttagtatacaacagctatacaggattagtactatgtactgggatgacaagtatggaacgcatagtgtctccccagaggtaatatcaaacatgagagtgttaatgacagaagactccaacaatcctataagcaattcattcctcctggacgatgactcgagcataccattctctgtcgatgacatatccaaatcgatgcagcagattgacatatctgacatcgagccacctccattgatccgagagaactctggctttgtattcttgttgccgccacctgaatagatgtgtggcatgatggtcaattttgtcaatgattgcaagaacctaagaatggttattgggcgacaatctatgcagag

SEQ ID NO: 154392 - DNA, 1227 bp, Zea Mays
cctcgtcgtgacagagagcctcgctcgctcgccctcgcgtctcgtttcctaggagagaaccggacaacacgatggcttgggataggaaggcgccgctggcagctgccctggccacggcgctggtcctggggctgtgccgcggcgacgtggtgcagttcatcttcggcgactcgctgtccgacgtgggcaacaacaactacctgaccaagagcctcgcccgcgccgcgctcccgtggtacggcatcgacctcggccgcggcatgcccaacggcaggttctgcaacggccgcaccgtcgccgacatcgtgggcgacaagatgggcctgccgcggccgcccgcgttcctggacccggcgctggacgcggacaccatcttcaagaacggcgtcaactacgcctccggcggcggcggcatcctcaacgagacatcgtccctctttatccagaggttctcgctgtacaagcagatcgagctgttccagggcacgcaggccttcatgcgcgacaagatcggcaaggcggcggccgacaagttcttcggcgaggggtactacgtggtggccatgggcgccaacgacttcatcaacaactacctgctccccgtctactccgactcgtggacctacaacggcgacaccttcgtcaagtacatggtcagcaccctggaggcgcagctcaggctgctgcacgcgctgggcgcccggcggctgaccttcttcgggctcggacccatgggctgcatcccgctgcagcggtacctcacgtcctccggcggctgccaggcgtccacgaacaagctggcgcggagcttcaacacgcaggcgggcgcgctgctggagcggctgtccacgtcgctgcccaacgccactttccggttcggcgaggcctacgactacttccaggacatcatcgaccggccctacatgtacggcttcaacaactcgcgcgcgccgtgctgcacgctgggccggatccggccgacgctcacctgcacgccgctgtccacgctgtgtaaggaccggagcaagtacgtgttctgggacgagtaccaccccacggacagggccaacgagctcatcgcgctcgagacgctcaggaaactcaacatcaccgtcgtcaataacggcacttccagctagccgaaagccgcatgcatggcagaatacagttcttgggattttgcgttttgtaatgtaactgaagaaatctaagtcactggtaagaaag

SEQ ID NO: 154393 - DNA, 3571 bp, Zea Mays
gttggtaggacactccaacctgccaggcttccttgtggttataaggctttgttaacacacctgggaatgtttggttacgttgaggaagttgctcaatacaccacatcagggtcacagttcagcaggaatttgttcagcttttctgattggatggtttggttctgaaatattgttctgaatttatgtcatgctttagattgacgatatagtgaatgcaaactccggaccaacttgtcacaaggttgagtgatgaagaaatggcatggaggctttgtcattgtatctttgttcatcatcttgatgttaagatatgtgatattggataggctacttgcagaaaaatcgcttcagtatgttttccagcaaaacaggacggcagaattacattggttggatgttccaaacccacctgcaatccagaatccacagatttcttctgaagtaatatcaaccagactcttggcatccaacctttccattaccagaaatctctctgatacagaacttcaatctttacattcttggaatcatttgaaacaccttttaacgcatgcccatatcctaccagatggagtagaggcaatcaaggaagctggagttgcatggagggaactcaatacagcccttgcatatgatgattcagttgtttctgttaatggcagcattcagcagaaggacaaaggaaagcaatgcccttattctgtccgacggatgaatgccacaagattaggggataggtttgctttaaaacttccatgtggattgattcagggctcttcaataactattattggtactcctggtggtcttctggctaattttaagatagagttaactggagctgcagttcctggtgaaccagaccctccaattgtccttcattataatgtccgccttcttggtgataaactcacagaagatcctgtaatagtccaaaatacatggacgatagctgatgattggggttctgaaaaccgttgcccatctcctgattcagatgctaaggacagtgcaaaagtggatgatctagaaaagtgtagtagcatcgtaggtgaggaccagaaagaaatccttccctctaagttacattcacatgttttgaccatgccacctgcaaggaagaagaaagcagaatctagaaagtattttccattcaggcagggatatcttgctgtagcaattcttcgtatcggagcacatgggatccatatgactgtagatggcaaacatatcacttcgtttgcatttcgagaggatttggaaccagggtttgttggtgaagtaagaattgcaggagacattaaattgctatctgtgatagcaagtggcctgccaacaacagagtacttcgagcatgtcactgatctggaaattttgaaggctccacctgttgccatggataaatctgttgatcttttcattggggtcttctctacagcaaataatttcaagcgccgaatggcagttcgcagaacttggatgcagtatgatgctgtgcgctcaggaaaagttgcagttagattctttgttggcctgcacaaaaacgaggtggtcaatgaggaactctggaatgaagcacgaacatatggagacatccagttgatgccatttgtggattactatagcctgattctttggaagaccatagcgatctgcatttatgggacaaatgtcctgtcagccaagtatgtgatgaaaactgatgatgatgcttttgttcgagtagatgaaatactttcttccctcgaccgaaccaatatcagtcatgcactgttgtatggtcgtgtcaattctgattcccagcctcaccgagatccctatagcaagtggtacataacccctgaggaatggcctgaggagaattatcctccatgggcgcatggtccaggatatattgtttcacaggacatagctaaagaagtttacaggaaacacaagaatggggaattaaagatgttcaagctggaggatgtcgcgatgggaatatggatcaatgagatgaagaaggatggcttggatgtcaagtatgagaatgatgggaggatcttggttgaaggatgcgaggatgggtatgtgattgctcactaccaagaaccaagggatatgatgtgcctctgggataagtttcagaaaacaaaacgaggaacatgttgcaaagaataacagagataatgcaaatgatgctttattttacggtggttgctgttggccgttgcttgaacagacaccgtcacgctaaaacgttcttgacatttgacatatacagcccctcctaagaggaatcttgcagaactggatggcaagcgaagttttgggtatcttaagtttgtttcgtcccagtttgaagagtttctagtcaaactaggggatatgcattgtaggcagaatgcaggtcacatcttttttttttgggtaggtaggagagtgctgctttgcttactgtgtggcttgtaaaatactagtatcttgccagaatgtaggatacatgggcggcagcttacgttaggatagattgagccagtctaccattcttttgaaaggaatgcattttgcatctgatgtaaagctatttttggtgaccattcattctcttgtataatccattctcaagaaatttcaaatcggtactgattaaagataggatcacatcacatccaagtttttacagttgctaagaaaacatgaagcataaaatgatcaagccagattcacaggtacggaagaaagttacactgccgtactctctgttccagtctgctgttttttacggagccaaacaaccgatgccgtagcgggtgttggggaacaagaggaagaggccgctgcacacggcgcccaccatgagcgggaagctctccatcacctcgtccatctccttgcggtggccggcgacgaggcacccggagacccggtagtcggcgagcgtgacggccgcaaagaccagcacggacatgacagcgtgcacgacgtcgacgaaggcgagccggtacctttcctccctgggcacctcgacgccgagcccggtcctgaacagcgacaggccccgcggcgtgacgaagccgtagtacaccttcccgtccggggcgcggaagctgtcggtgaagtggaagaggaagcaggaggcggcgcagagcgcgagcagggccctgagcatcgcggcgctgaccgccgagcaggtgccgtcgcctgcggcggccgggagtagcatctcgaaggttagcagcgtgcccgtggggaggaagttggccagcatggacgtcttggagagcgtcttctgcacgcccctcgccaccgcgcggcgcttccttcccgcgcccggcggcgagccgccgccgccgccgcgcacctcgacggacaccgcaccggcgttgctgcgatccatgggcgcgttcttgtccggagagcgtggaactgttttcgcgacgttcccagagactggaaatgcaaagctgttggtttgcttgctgatcggctgttctgtaatcgtaaatagatgcacggcgcacgcgtagtttggcgaacgttaggcagtgcttgagttcaaatgacgtgcaactgttgctacgcataa

SEQ ID NO: 154394 - DNA, 753 bp, Zea Mays
atggaggccaagaatgaagagagcagcttgtggccttactggacgggtgcgtggcctgacagctacctgctcgaagaggaggagctcctctccggtctctccttaccgagcctgcacttccagccgtcgtgctcggccattgtgccgagcaacaacctgcaaggtgagctcgacgccatcatctttgaggatgatgtgctgaggcattgggatggaatggagcagtacgacaacaagatagaggcggaagaaggcaacgagaggctgccgctgctctgctacgcggaggagaaggaagtagtgtcctctaataacgccagggtcgtcgtcggggcagaccagcaagtgaggtcagattcagaggcggcggtcctcacgttcgaggtcgtgtcgcggtacttctacatgccgatcatgcaggcggcgcgggagctcaacgtcggcctcaccctcctcaagaagaggtgcagggagctcggcatccccaggtggccgcatcgcaagatgaagagcttgcagtccctcatcaagaacgtccaggtcctgcaggaggcgggcaaggcgacaggggaggagcatctgagggcggtggtggagatgctgcagcaggagaagcaactcctggagcagaggccgtacgtgcagctggacgagaagacgaagaggctcaggcaggcctgcttcaaggccaactacaagaagagacggctcttggctctccaaggaggcgaggcaccgagaatccacaaatag

SEQ ID NO: 154395 - DNA, 2315 bp, Zea Mays
ccacaccacaacggtatacgtatacacctgatgcgaagatggccgcctcggctcccggcggccgtcgcccaccaccatgccggcgccccggccacaccagacgtaggcgtggcagcggaccacgccgacggacttgtccgccagcacaaccgctctcttgtggggctcctccgccgcggccgcttctctgccgcccgccgccttttcgacgcgcttcctgcccgctccgtggtcacatggaactcgctcctcgcggcgctctcccgtggcagcgacgtgagagctgcgcgttgcttcttcgacgccatgccagtgcgagacatcatctcttggaacacgctgctttctgcgtacgctcgatcgctgcaacccaatgacctcgccgccgcgcgccgtctgttctacgaaatgcctcagcgcgatgcagtctcgtggagcacacttctcggcgcttacacgcgtcgcgggctcatggaggaagcccagaggctgtttgatgagatgccacataggaatgcatcttcttggaataccatgatcacggggttctttgctgttggtcaaatgaggaaggcactcaatgtgttcgcggctatgcctgacaaagactctgcatcgctgtctgcaatggtctctggttttatcaggaatggcaggttgcatgaggctgatgatctgcttacaaagcgcttgacggtgatggacatggacaaggctgttggtgctttcaacacccttattgctgcatatggacaaaccggtagggtaactgatgcaaggaggttattttctatgatcccaaaaacacaaaaccagcacaaggggcataagaggatggtgtttgagaggaatgttgtgtcatggaactcgatgatgatgtgctatatcagaactggggatgtttgctcagctagggcattgtttgatgagatgccacataaggacttggtgtcatggaacactatgatagcagggtacactcaagcctcagagatggaggaggcagagaagctgttttgggaagtgccagaccctgatgcagtgacctggaatctgatgatacgagggtttacacaaaaaggggatgtggaacatgctcggggattctttgataggatgccagagcggagcaccatcacatggaatacaatgatatcaggttatgagcaaaatgaggattatgacagtacaatcaagctatttcaaaggatgctagaagttggcgagaggcctgatcatcacactctctcttcagttctggcagcatgtgcgtcacttgccatgttgcgccttggggctcagctccaccaacttattgaaaaatcatttctgccagacaccgcgaccaacaatgcacttatgacaatgtactccagatgtggtgaactaatcagtgcaaaggccatcttcggccatatgcatacacaaagagatatagtttcttggaatgcactgataggaggttatgagcagcaaggtaatgctacagaagcgttgcgtctgtttgaggagatgaggagtgccaaggtcatgccaacccacataacttttatttctctgctgagtgcatgtggaaatgctggccttgtctccgaaggacgggtggttttccataccatggttcatgactacggccttgctgctagtgtcgagcactatgctgcgcttgtcaatctcatagggcgacatggccagctagaggacgcattggagctgatcaagagcatgccaattgctccagaccgagctgtgtggggggcattcctgggagcctgcactgctaaaaagaacgaaccactcgctgagatggccgccaatgcattatccaagattgatcctgacagttctgctccatatgttttgatgcataacttacatgcccatgaggggaggtggggaagtgcatctctggttagagaagacatggaacggctaggcattcacaagcatccaggctacagctggattgatctgcacgacaaggtacacgtcttcatctcaggggatacctcgcatccccttacccacgagattttttcagtgctagaatgctttaataggtcatgtagaggttggagctagacggctgtgagttgtgacattgttgtatttggaacggagaggtttcgcggtgtagagaaaaggctctttcttccgttcttggcctgacatttctctcctgcaatgtttgtactttctttggtaatgaaacccacaaatattttattattatatttttataaagttgaagatttatgagggcactgctgattgcgtgaagagcaaaagtaaactcgtcagattatattgctgcc

SEQ ID NO: 154396 - DNA, 915 bp, Zea Mays
atgattttactatatggacaggaaatacttctacagtacaaatgcagtcagaaggggaaaaaatcaggggaagtagtagataaacaggagaaaccacactgctcaatcagccttggtctgctgtgcttggttgagcttaaccgggcgcgcctcgagaccacctcccttgcgggtctccagagtgtaaggcatgtatgttccaaggatcttgtcccacatgacaaagaagggctgagagaagttgtacttgttgccgtagagctgatggtggatgtcatggtaagcgctgttgttgctgaagaatacatggaggatgttcccaggaagccacagaccacagtggtcgtcgacggtcttgatggtcgcgaacgagaagaagaatatgccagtccttggggtcatgccagagatgaggaacgagagcgcgccaccgatggtgtccaggatgagtccctccagggggtggttgtacagagctccaaaagcgtaggggacgacaagagtgtggtgcttagagtggacgtgcttgtacaagaacttgttgatgtgcatgtatctgtgcatgaaatactgccatgtgtccatgacaaacattgcaacgataaattgcaacgccaataccagagccggaggttgcttcctcacagccccattctcatcaccaagaaccgtgaagagaagaagggagacagcgatttgaaacgcctgctgaacaaggacgcccctgacgaccgtcgacctggaaacgatgttcttggcctcctcctcccccttgggatggagcctgtagtcgtccatcccgagcccgtccaggacgacgtagagccccgagtagagccagtacaccgcaatcggcacgaaggtgcccagcagctcgtcggagaccgcaaatgccatcgccacttgagcgcgccc

SEQ ID NO: 154397 - DNA, 109 bp, Zea Mays
cttgatgagatttggtgacattctaggtgaccttaccgatcctagacaacctctacactataacacccactttgtaagaaaggtctaaaaagagaaatcatattactct

SEQ ID NO: 154398 - DNA, 2192 bp, Zea Mays
ctcatcagtcctcaactcctctctctctctctctcaacgcacctttaatgcgccgtgatctctctcctccaatcccgacaaagtacaccatcgtctcctgtcttgatgttctctctctcgctcccccaccgtcctagtcctatcatatgctcctatcttctccttcccccggcaatcgtcctagctgcaacgcactagatctgtcgacaaacccaaccagaactccataaaatagtgtcgatcaccacaggcaaacctccctccccgtttctctctctttcactctttttctctctccaagaaataattgactccaacgccaagcgccacaagcacaagcccttgcttgcttgatgtcactctttcgctctcgctagctctaacgccaccgctgacggcgctgccgagcctccagtccaccgcccaacgtcatacaccaagtcaggtcagcagccccacaagaacacttcgtaggtcagcaaatccattattagtaccgatatttctccaggtccctgaagagaaagcatcgtcttgtgtatttatatataccatggcctgatcggctatggacgtcaccggagatgccggcggaggtcgccgccccaacttccctttgcagctgctggaaaagaaagaggaacagccctgctctacgtccccagcggttgctgtgggtgctggggctaatgggtcgggagagatgcagatgaagaaggtggcggcgccgaagcgcacatcctccaaggacaggcacacgaaggtggacgggcgcgggaggcgcatccggatgcctgcaatttgcgcggctcgggtgttccagctgacaagggagctggggcacaagacggacggcgagacgatcgagtggctgctgcagcaggcggagcccgcggtggtggcggccacgggcacgggcaccatcccggccaacttcacctcgctcaacatctctctccgctcctcgggctcttccttctccatcccagcgcacctccgtgcggccggcccacgcttcggcggcgcgcggggggacccgtgggagcgcgtcgtgggagtgggactcgggttcggcgccgccgccgaggaccctccgtccgctacgtcctcggcgtcgtctcctctgctgctgagtttccactccggcagcgtcggtcttgacgtgtcgccgtcgccgtcgtctgccgccgccggctccgacctgtcgaagaaacggaggtgggagcaggaaatgcagcagcagcatcagcagcaataccaccagcagcagcagatggccgggtacacgacgcagagccaaatgccaggcgccgtgtggatggtgccgagcgcgagcagcaacgctcaagccgccgcagcggctggcggtggcggcagcaacgccaacgagtcgatatggacgttcccgcagccagcaagcggcggcggcggcggcgcggcgaccgtgtaccgcggcgtgccgagtgggctacatttcatgaacttccccgcggcgcccatggcgctggtccccggtggtgggcagcagctcgggctcggcggccccgtgcccgtgggcggcgccggcaacgacagtagtggcagtgccagcggcggcggcggcggcgagggccacatggggatcctcgccgcgctgaacgcgtaccgggcacatagtgccgtcccggacgctgcgccagcgcagaacggagcggaaggcggctctcgtcagcgccagcagcacggcggcggcggtgagcgacaggagagcgtgagtcctcccagcgacggctcgtagcgtcttcggagttcggaggcgtgtgcgtgcactggtctgctatggcgtctctctcctgtgttaattagtctgtgcttctcgacttatcgtttgcagtttttgttaattggttgcactgttgtggcctcctctggctccttcacattcttgcaaggatcatacagagtttacgtttcatggcatctgggactgggatagacggatagtcactcactgtccgcattattcgttttggtgtcaccgatcacgcgtcgagggaagacgatccaggagggaatccatggaggcgagaggcttcgcattgttaattagggtttaacgggcctgcatgacggagatggaagagacattggcagcaatgtatgtatgtttgtacgatacacccatgcattgtccaatgttcaatcttgatgac

SEQ ID NO: 154399 - DNA, 283 bp, Zea Mays
gtcgacccggaggtcccgcgcgtcgacggtctcggaggaggagatcaacgagcttatctcgaggctgcagacgctgctccccagcgcgcgccgccgtggcggcagccaggcgtcgacgacgaagctgctcaaggagacctgcagctacatcaagagcctgcaccgggaggtggacgatctgagcgaccgcctgtcggacctcatggccagcatggaccacaacagccccggcgccgagatcatccgcagcctcctccgctagcccaagtccgtccgtccggcc

SEQ ID NO: 154400 - DNA, 75 bp, Zea Mays
cagctcctgactattagaacctgctgtagaccgctaaacacaaatttttataagaatcactttagtcaaaactgt

SEQ ID NO: 154401 - DNA, 420 bp, Zea Mays
atgggctgcaagggctccaagcacgcgctgcatggggccactggactgccggcgcgggcgccagagccgcagagccgatcgggccgctgggccccgccgcggcactccgtcgcgctgcgctcgtccacgctcgggacgctcagcctcgaccgcgccgccgcggccgtcgcggcggcgggcctttctttcgacgctgcaggacgaggcgccggcggcggggacgagtcgggcacgatgacgaaggccggcggcagcgacggcgtcgacggtggctcagggaccaagctgttggggccgtcgctcggcggatggcgcccgaagagggtggaggcgccgcggagggccgtcgcgcccgcggacgccgagcaagacgccggggccgcgactctcgaggagatcaacgtgtgggagctcatgtag

SEQ ID NO: 154402 - DNA, 715 bp, Zea Mays
aactcatcaaagcatatatttacaacaaaaattgatgagcattacaatgtaatgccattacaaaagttgaaggggatcaacccctatggtcctatgatgctacctacaatcctctatgctttgctggtggctgctcgtcctcatcattgtcgcttctgtcatttttatcgtcgtcgtcattgttgtcatcgtcttcactagggtagagctggtcacctgttaagattcttgaagagaaccaaaacaaggcaacacaattaaagttatagggccttctttcctttaatctgcgcttgaagatggaatagattaaagggagaaggttgaaacaaccacaaatatgtaattaaaacaagagacaactgtgaacttatttatttatttaccctttgctgactataattgattacaagtgtacctttgaagaatttgaagagtacatgaaggtccaaatgctttggagcttcagacacggaacgattcaagattgcttgggcgtattcaccattcgaaaagaggaatgtccttatgcattggaacatttcacctatttgtaggtatagcaaaactatgaccttagatcctacacctatgaactataaggtgcattaagggtgtcaccgtcttttccccttgtaaatgtggtgcacacgcatctcaattcctccttcatttccccgttgcttggttcctgtgccatgagatgcttcggcta

SEQ ID NO: 154403 - DNA, 968 bp, Zea Mays
acgaagcaattctaaatcctcgcgcagaagatcggatcctccgtcggatccggatcggtgcttgccctccctgctcggatttctggcagccctttcctaccccctgaattcctgtgcggattccctcccctgccctggcggttgctcctgttgcctggtgggaacttgagagaagaggaggggttggtggggtggaaggcgctcgtgacccggcccgtggagatggctggcgtgaaggagccgatcgaggtgaagttccggctgtccgacggcaccgacatcgggcccagcaaataaagaaatagctccaaaaactgtcaatgatgtgaagctcatcaatgttggaaggatactggagaatagcagaactcttgctgaatctcgtgtcccagttggagaagttcctggaagtgtgattacaatgcatgttgttgtgcggcctccccaatctaaaaacagtgagaagcaacagtcaaactctccgaagccaaacagatgtggatgcacgatattgtgacgttgatgcaagtagcaatgtgtatatcggtgtccacagagatcaatcacaagttcatttagcaattgattcaatctattcttcacaacctaagcctagagttggtgttacggccagtcacatctggcttgagaaattgatgcttgcggtcgtgttcgagtgtgcaaggagttcacagggtcctggtaaaaccctgaaatcggtgtggactcaaggaattggatgtttgctattctgtaatgtgtggagacagtgataccagaagtgagttgctgcatagttacatcggagacaattcttttttcgtaactcggttgcgtgtatcagtatttctgttttgtaatagaaaaaggttgaccggctattgttggcataaagtggtaaggaatgggggtcccctaaggaatgctgtggtttgacatgggaagatgaaagtgaataatgagtacca

SEQ ID NO: 154404 - DNA, 1098 bp, Zea Mays
attaaatcgcccacaattccctgtcctccgcggctccgcctcgatacggccgtctcctccccgctttgctccccacgaagcaattctaaatcctcgcgcagaagatcggatcctccgtcggatccggatcggtgcttgccctccctgctcggatttctggcagccctttcctaccccctgaattcctgtgcggattccctcccctgccctggcggttgctcctgttgcctggtgggaacttgagagaagaggaggggttggtggggtggaaggcgctcgtgacccggcccgtggagatggctggcgtgaaggagccgatcgaggtgaagttccggctgtccgacggcaccgacatcgggcccagcaagtacgatcccaacaccaccgtcgccgcgctcaaggagttcgtcctcgcccggtggccgcaggataaagaaatagctccaaaaactgtcaatgatgtgaagctcatcaatgttggaaggatactggagaatagcagaactcttgctgaatctcgtgtcccagttggagaagttcctggaagtgtgattacaatgcatgttgttgtgcggcctccccaatctaaaaacagtgagaagcaacagtcaaactctccgaagccaaacagatgtggatgcacgatattgtgacgttgatgcaagtagcaatgtgtatatcggtgtccacagagatcaatcacaagttcatttagcaattgattcaatctattcttcacaacctaagcctagagttggtgttacggccagtcacatctggcttgagaaattgatgcttgcggtcgtgttcgagtgtgcaaggagttcacagggtcctggtaaaaccctgaaatcggtgtggactcaaggaattggatgtttgctattctgtaatgtgtggagacagtgataccagaagtgagttgctgcatagttacatcggagacaattcttttttcgtaactcggttgcgtgtatcagtatttctgttttgtaatagaaaaaggttgaccggctattgttggcataaagtggtaaggaatgggggtcccctaaggaatgctgtggtttgacatgggaagatgaaagtgaataatga

SEQ ID NO: 154405 - DNA, 1743 bp, Zea Mays
ctcgcaccgcacccaagaaaaccgccggctgccttgcaaaacagccaacctcacagctcacagtcacactagcgttgtcctctcgcggaagcaaaggcctgctggggtgcgcgtgtccgtccgtgtgcgcgggcgcgccacagccatgacgaaccaggacgtggtggtcccggacatgggcattgcggcggctgcggccttgccgccccccggcctcttcgcgtgccgcggcgtcgcgggggccgtgtcgtcgctgcggggcacgtacggcagccttggcctccccggcggcgccgccgccgacggtggcgagttccgttcccccgtggcggcggcggcgaatgcgccgccgggtcggaccagctgcaccagccgggtcgtcgaggccatccgcgcgtcgtcgcccgcccgctgccccgccgtcgacgagtacgacgcgtggacgaggaagcacccgtcggcgctgggcagcttcgaccagatcgcggcggcggctaaggggaagagggtcgtcatgttcatggactacgacggcacgctctccccgatcgtcgccgaccccgacatggcgttcatgacccccgagatgagggcggcggtgcgcaacgtcgcgaagcgcttcccgacggcgatcgtgaccggccggtgcatcgagaaggtctgcagtttcgtcggcctgccggagctctactacgccggaagccacgggatggacatcaaaggcccaaactccaaggaggacaagacggtcctgctgctgcaaccagctcgcgagttcctgccggtgatcgacaaggcttacaaggctctggtggagaagacgaaggacacgacgggggccagggtggagaacaacaagttctgcctctccgtgcacttcagatgcgtcgacgaaaagagctggagctcattggctgagaaggtcaaggccgtgctccgggacttccccgagctggagctcaccgagggcaggaaagtcgtggaggtccggccgtcgatcatgtgggacaagggcaaggccgttgagttcttgctcaggtcgctcggattcgacgacgaccgcaccaacgtcctgccggtgtacatcggggacgaccggaccgacgaggatgctttcaaggtgttgagggagagaggtcaagggatagggatccttgtttcgaaatgccccaaggagactgatgccacctactctctccaagatcccactgaggtcatggagttcttggtccgtctggggcagtggaatccactgcgatcaccatcgccggcggcgcgcccaagggggcgaaagcagtaacagacgacgacaacaacagatcgctaagcgtgtttaatttaattatagttagttagttagtttattaattgttgcactactctaggagtaataaccctcctcgacgatctacatacattaccccatcgtctcagctcagctcccggccccagatgtgaactctggccggccaacctgctgattgtgttcgatcagacgttcttccatatgggttttagaggcacaggcaggcatccatgtgcaaagctgcctgccgcctttgattagcttaacccaggaaggttcatctgctgtatgagttgtgtagtgactacctagctatgaccttagcagcttaattattagcccgtctactgtaaaatgtaacatataagcaactggcagaattttaatatgcacttcctttgctctgaggacccaacctcattgcatgtgctgtgttg

SEQ ID NO: 154406 - DNA, 3305 bp, Zea Mays
ttgtccacgcgaccacgcctcatgtcattttgttttatgagacactaataaacaataatatttttatatattattcatcgatcccacttcaattacctaaaatgaggaatattttcttgctaggattctagacatgcagataatatagaatctaaaaaatgcattgatcattacatggaattctattaagatattatatgaaagtcgaatttcttccattctcatttgagaatgcgaacacaaggaggtattttgtgtttgtgaaagtccgaagaaaaaaggatttggaatctaccttttcttttgctctttcccttataaaaataactcaatcaaaaccaagtatctactctacaagaatgaaatgcttgttatgcctaatatacttagtttaacatgtatctgttgtaattatgtttttttgtctaactagctttttcttcgccaaattacccgaagcctatgccatttcaacccaatcgtggatgttatgtctgtcatacctgtactcttttttctattagcgtttgtttggcaacccgctgtaagtttttgatgaaatctttactattctgcctgccaaattgaatgatgtattcattccaaaaaatggataagagccgagaagtcttatattatgaacctttgattctaaaatccaaattcttctacattgaatgtatagctacaatagtaaattttgattagcctttctacccctgtgcctacattgaataggtacccacacaatacctaaactatttttttattgataagagtgcttattataaagctattcttgcattttttttaggaattgatttttgcatttttagctagaaaaatacagaaaacccaacctagtggatccatgtggtaagaaaaaatgggtaatctattccttaacaaaaaaatttagagattatgtaatgcttactctcaaactttttgtttatatagtagtgatattttatgtttccctcattatctttggattcttatctaatgacccaggatgtaatcctgagcgtgagaagtaaaaattcaaaaaatggattttgtccttataaatttaaattggatttatttcgtacatttatttatgagaatatctaggagttagaactacttacaattcaaaagtcctaaatgatccgagggcaaaacaagagggattcggaacctcgatacaaaaaatgcacaacagattaggaatctgtcgctttagtccactcaaccatctctccccgttccaaatcgaaaggttttcatggtgtgacagaggcaagaaataacgattgcaaaaatccatcctttttctttcactccagaagtgcataaaattatatagccagttccattttaattgtattctttttttaatgttaataaaaaggaagaaaattctggttttttctttccaaaattcgatataggatgaaagataatcaaatcttttttctcttcagctagcagttccatatagaatttgttagaataaaacaggtgggttataaaaaactcattttttatttatccacaaagcaaaaaaggttcttatcaaacccataataaaatgggaaagaaagataaaataagtagacctaaccacttgaatgatgcctctatccgctattatgatatataaattcgatgtggatgaaattggtgtataaacactttttttatttccatagacttagatcatgcaacacaagaaattttcgctgtttactatttcatattcttgttactagatgttctataggataagaagaaatcacaactattttccgttacacataataaataggggtttcaaaagtcatttttttgtttgaatatctttcttctttcagaattctattttgttcttcctcccatgcaatagagagcgaatgagaaaagaggggttttcccttaaaaatagactttgaaatagaaataatggaataatgctgaattcaaatgtttatttcttatctatagtataagaaaaataaaataaattaaattaaattagtagatttagcacgaccttggttctgaccccatagataaaaatacgaaatttctacatccgagtcaactgaaaaagggcattgaacgagaaagaaaccgtccacagatattaaactatcgtatgccctagaagtaatacgaggtgctcgaaaagggttgaagtaattgaataggaggatcactatgactatagccgttggtagagttactaaagaagaaaacaatctatttgatattatggacgactggttacaaagggaccatttcgtttttgtaggatggtccggcttattgctctttccttgtgcttacttcgctttagggggttggtttacaaggactacttttgtaacttcttggtatatccatggattggctagttcctatttggaacgttgcaatttcttaactgcgacggtttccacacatgtcaataatttagccactctttgttgctactatggggtctggaaacattgggagattttactcatcggtgtaaattaggtggtctttggacttttgtcgcgctccatggagcttttgcactaatggatttcatgctatgtcaatttgaacttgcttggtttgttcaattgtggacttataatgtaatttcattctcctggtccaatcgctattttgtttccctaccttatttatccactgggacaatctggttggttctttacaccgagttttggcatagtagttatatttcggttcatccttcccttccaaggatttcataattggacgttgaacccatttcagacgatgggagttgccagagtattaggcgcagctctgctatgcgctatccatgaggataccgtagaaaacattctattcaaagatggcgatggtgcatatacctttcgtgctttaacccatctcaagctgaagaaacttattcaatggtcactgctaaccgcttttggtcccaaatatttggtgttgctttttgcaataaacgatggttacatttctttatgctatttgtactcgtcaccggtttatggataagtgctattagcgtagttggtctagctctgaaccacgtgcatatgacttcgtttcccaggaaatccgtgcagtggatgatcttgaatttaagactttctgtaccaaaaaatattcttttaaacgagggtattcgtgcgtggatgtcagctcacgatcaacctcatgaaaatcttatattccctgaggaggttctaccacgtggaaacactctttaatggaacttttgttttagctggtcgtgaccaagaaaccaccga

SEQ ID NO: 154407 - DNA, 1050 bp, Zea Mays
atggcaacaacagatttgtacacaggccagctgagcttctcctcgtcgtcctcctcggaccaggagctcatgaaagcactcgaaccttttatccggagtgcttcttcacctacctcctccaccacctctcctttctcgtactcatcatattcatacccctactcctctgttctgcctcaagattcgtactacctccccgccacatcctcttacaccgcgctcccgccaccacctcttgctcccaccgccacctccttctcacagctcccgcctctgccccagtcctcctcgtcgtacgcctctccggcgtcgtcgtcgtgcccgacgtcgtcggtggacgccgcgtcggggctggcgctgaaccacctgggcccggcgcaaatccaccagatccattcgcagctcttggcacagcggcggcagcagcatcagaggggccagctggcggcggcgttcctcggcccgcaggcgcagcccatgaagcacgccggggcgccgccgctggcggctgcaaagctgtaccgcggcgttcggcagcggcactggggcaagtgggtggcggagatccgcctgcccaggaaccggacgcggctgtggctcggcaccttcgactccgccgaggacgcggcgctcgcctacgacaaggcggccttccgcctccgcggcgacgcggcgcgcctcaacttcccatccctccgccggggcggcgcgcacctcgcgggcccgctcgacgcctccgtcgacgccaagctcaccgccatctgccagggcatcaccgccgagcccacctccaaggccgccgccgccgctccctcggactcgcccaaggcctcggcgtccacgaccacgactgagggcgacgagtcggtgcactccgccggctcgcctccttccctccccacgttcccgcagcagcagcagcaggtgacgccgccgctccccgagatggcgagcctggacttcacggaggcgccgtgggacgagtccgccgccttgcacctcaactcgtacccgtcctgggacatcgactgggactccatcctctcgtga

SEQ ID NO: 154408 - DNA, 590 bp, Zea Mays
agctgctgtaggcgagctaggtggtgaaaaaagtatgaaacctgctagcagatcgacccccatcgacctggaagttcagcaacctctttttgctgctccttcaaaggtggatttggttgagcagcttgcgaggcatttctctaggcctcttaccaaggaacaaatggaggcaattatggagctagcaactcaagggaaggaaaaggaagggatcaagaagaagggcagcaaggtgacacctctcatggctcctatcatcgaggctgctgagatgctctgagttgtattatgagatgtgtgggtagttctagtgcatcatgttatttcgtcggtgtacttgcctatgggtcgcccaggatcttttgttggctgctttgtgtagcaggctgttgtctgggcagtggtgtttgtttctttggctggcaatgactgtgtttctgtctatcttagtttctgttgtaagtcgctggttgttcacttctggaagtgtgttatagacggtggaaggccggttggttcctgttttcctttcctatcctatgtaccacatgtgtgacattatttgtttaagtaggggagctgtttttgat

SEQ ID NO: 154409 - DNA, 101 bp, Zea Mays
attgcggccagtaatttcagattcgagaatactggtagtggtagatagagtatgcaaattatggataactatttgtgatgaaattgttttctttcctttcc

SEQ ID NO: 154410 - DNA, 2532 bp, Zea Mays
caggcttttcacacaagtccctcccgaccacccaattacccttcatttccccgtcgtctacctccaccacatttctcgctcgatagcttggatgggcagagcacccttcgcggcagactcgaggcggcagaaatggcggaaatctccgggttcctcctcaagcaacagaccacgtgaactacgacgaggagccaggcaacggtcaggcccctctcacgtcctgcgatccagcagtgtcgccatggcggaaactggaaacgggattacattctgcaatgcgcgtttctgattgcgcccgtttgtgttcacagggcgccatgtccaacgtcttcgacatgaaagggagggacatgaatggtgcagatgcgcagagctgcaatgcagcacgggcgcggttgaagagcgcgagcctgcaccatgtggatttgcccagcaacaggcaaaaggatgacacacgccagtaccagatgtttgttgccacatggaatgttggaggaaagactccgagcaacaggctcaacttgcaagattttctccaggttgaagaatcgcctgacatttacgtcttggggtttcaggagatagttcccctgaccgccggaaacgtgctggtcgtggaggacaacgagccggcgtccaggtggctggggctcatccaccaggcgctgaacgagacccaggagcagcccgacgacgacgacgacccgccgccgccggagccgcccgcagactcccggcgccaccaccgccgccgcgactcctcgctcttcttccagacgccgtcgctcaaggtgctcagcaacagctaccgcgtcgacagcgcgctcgtcaagacctgcaactgctccaccgagccgtcgtccatgcgccgccgggcagcggagatacgcgcgtccgtgtaccgcgccgatgcagaggccgaagcggccgccggcgacggcgagacatccaccagcgggtgcaacaacgacacggaagcagcaagccacggcggtggcgctggcacgccgacggcgcagtgcgagcctggctgcggcggcggcggcagcataagctactgcctgatcgggagcaagcagatggtggggctgttcctgtcggtgtgggtgaagagggagctggtggagcacgtcggccacctccgcgtcgactgcgtcggcaggggcatcatgggctggctcggcaacaagggctgcattgccatcagcatgacgctgcaccgcaccagcctctgcttcgtctgcagccacctggcctccggcgagaaggagggcgacgagctgcgccgcaacgccgacgtcgccgagatcctccggagcgcgcacttcccccgcgcctgcaagctgccggccagccatagagtccccgaaaagattcttgagcacgaccggatgatatggcttggggacctgaactaccgagtgtcgctaagctacgaagagacgagaacgttgctcgaggagaatgactgggacgagcttctgaagaaagatcagctgataatcgagagagaagcaggaagggtgttcagtggctggaacgagggcaagatctgcttcgcgcccacgtacaagtacacgcacaactccgacgcgtacgccggcgagacggccaagtccaagaagaagcggaggacgccggcatggtgcgaccggatactgtggcgcggcgacggcatcgagcagctgcagtacctgcgcggcgagtccaggttctccgaccaccggccggtctgtggcgtgttcgccgtcgagctggacgccgacgatggcagcaagatcaggagagcgtactactccgtgaacgcgcggatcggctatgacaagacggcggcgtagagcttctgcgagccaccgtagtggaatgttgtgtgtaggcaagatgactagaccagtacagattgtacagaccattgatgcatggcagtggcagctcaagtctgaggagcacgctttcgttgtgtatttgtgtgccgtctgtgcctggcggaaaagatccaacggtgtccggtgtcccctacaacacatgcagatagcaattcttttctcttgtcctcttttttttttaaaaaaaaagcaggacttaccaaaccatagtatcacatgttcttcctcatcatggtgttatgggcagagtctgcaaggaggtggttacattttgtgtgttttgaaaaaaaagtgttgaaattctcattgccaagttagataattctgcagccatacaatatcaatgttcaagtgcgtcgacctccaataatcatgtaaattctattgaacaaattgaaggccttttctcaagaccgctcagcaaggattagatggacgcaattatggagatggcaaatcaagggaaggggaagaaaggaagcaagttcaggggacgcagagtgtcgccacttaaggcctccatcatcaaagctgcttcgggaaaatgaaccgctcgtcctgattgagttatcagtggttctagtttttatattatgtgttcaaagttaattctcccttgctcttgtctgggggtagagcatggtgt

SEQ ID NO: 154411 - DNA, 1521 bp, Zea Mays
atgtccaacgtcttcgacatgaaagggagggacatgaatggtgcagatgcgcagagctgcaatgcagcacgggcgcggttgaagagcgcgagcctgcaccatgtggatttgcccagcaacaggcaaaaggatgacacacgccagtaccagatgtttgttgccacatggaatgttggaggaaagactccgagcaacaggctcaacttgcaagattttctccaggttgaagaatcgcctgacatttacgtcttggggtttcaggagatagttcccctgaccgccggaaacgtgctggtcgtggaggacaacgagccggcgtccaggtggctggggctcatccaccaggcgctgaacgagacccaggagcagcccgacgacgacgacgacccgccgccgccggagccgcccgcagactcccggcgccaccaccgccgccgcgactcctcgctcttcttccagacgccgtcgctcaaggtgctcagcaacagctaccgcgtcgacagcgcgctcgtcaagacctgcaactgctccaccgagccgtcgtccatgcgccgccgggcagcggagatacgcgcgtccgtgtaccgcgccgatgcagaggccgaagcggccgccggcgacggcgagacatccaccagcgggtgcaacaacgacacggaagcagcaagccacggcggtggcgctggcacgccgacggcgcagtgcgagcctggctgcggcggcggcggcagcataagctactgcctgatcgggagcaagcagatggtggggctgttcctgtcggtgtgggtgaagagggagctggtggagcacgtcggccacctccgcgtcgactgcgtcggcaggggcatcatgggctggctcggcaacaagggctgcattgccatcagcatgacgctgcaccgcaccagcctctgcttcgtctgcagccacctggcctccggcgagaaggagggcgacgagctgcgccgcaacgccgacgtcgccgagatcctccggagcgcgcacttcccccgcgcctgcaagctgccggccagccatagagtccccgaaaagattcttgagcacgaccggatgatatggcttggggacctgaactaccgagtgtcgctaagctacgaagagacgagaacgttgctcgaggagaatgactgggacgagcttctgaagaaagatcagctgataatcgagagagaagcaggaagggtgttcagtggctggaacgagggcaagatctgcttcgcgcccacgtacaagtacacgcacaactccgacgcgtacgccggcgagacggccaagtccaagaagaagcggaggacgccggcatggtgcgaccggatactgtggcgcggcgacggcatcgagcagctgcagtacctgcgcggcgagtccaggttctccgaccaccggccggtctgtggcgtgttcgccgtcgagctggacgccgacgatggcagcaagatcaggagagcgtactactccgtgaacgcgcggatcggctatgacaagacggcggcgtag

SEQ ID NO: 154412 - DNA, 756 bp, Zea Mays
aagtagctagcacgcggtgctcacagacgactataggaggcggcagctctcggccggccttgggcagttgggctggtcgcggcgcgtgcacagctagcaggtgggcggatcgatcattgatggctatggaagcggagacgacggtgctacgacggccgctgtcggcgttcttggcagcgggcggcggcggcatcggggaggaggtgtcgtcgggcaggcagcaggtccctccggtgttccttgccacggagaaggacgacgaccggccggcggtggacccagtgatctgggccgacgagaagcggatgaagcgggagctgctggtgtgggccaaggccgtcgcgtccatggtggccagcaacaacacctcctgctcctctccgccgtcgtcgtggtcgtccacgagacacaggggatagctagtatacgtacgtccggttgggtttcttgatggttcagcttgtatgtttttggctagccttgaagatggatcgatcgaccggtgacgtgagccttcccttggtgtgtttttgtctggcttattttttttgtgctcaattggtgcatctatctaagctagtttcgcttgcttgatttggggaaggttgctctatttttttttatgttctatttatctagaatctagggctagctacttaattgttatatatgtgtacaatttccctatatgtctcattttctattttcgctgtacaaagatatatgaatataaggccatcagttatatcttggtta

SEQ ID NO: 154413 - DNA, 976 bp, Zea Mays
aacaggtgcatagaaagccctcgaggccccagtccattccctaataatcggctatcctgtcagtttccctctcccctcccgaaaccggattccgtaccgaatctggtctcgccttggagccgaggttgcacgcggttcgtcctgcggccatggaggacgaggagcacgaggtgtacggacaggagatccctgttgacggcgaggacgtcgacatgtccgccggcgacgacgcgaccaagcttcaggagctcgatgagatgaagcgccggctcaaggagatggaggaggaagccgccgcgctccgcgagatgcaggctaaggtcgccaaggatatgcaagatcccaatgcaaccacatctgaaaacaaagaggagatggattctcggtcggtattcgttggaaatgttgactatgcatgcactccagaagaagtgcagcagcatttcaattcttgtggaactgttaacagagtgacaatcctgactgacaagtttgggcaaccaaaaggttttgcttatgtggaatttgttgaagttgaagctgttcaggaagctattaagttgaatgaatcagaattgcatggtcgccagctcaaggtggcaccgaagaggactaacgttcctgggatgaagcaaccccgcggtcgaggtttcaatccataccggccatatggttatagtccttatggttatggctatggctacgggagattccccagattccgccgcccgcgaagaccttatttttgaagctcgtatgtccatatggtttgcagaacatggacgatgagacggcttgaccttatattcccgcgtcctattacttcatagcttattcgggatgttctcagacatgttattcccatattgacgatgcttaagatttgtactgtattgtttcagtgacagttacgcaaaacgattatgatctagttacgcggaaaggtactgttgtgacgctgcttggggtgatgtgc

SEQ ID NO: 154414 - DNA, 1291 bp, Zea Mays
aacaggtgcatagaaagccctcgaggccccagtccattccctaataatcggctatcctgtcagtttccctctcccctcccgaaaccggattccgtaccgaatctggtctcgccttggagccgaggttgcacgcggttcgtcctgcggccatggaggacgaggagcacgaggtgtacggacaggagatccctgttgacggcgaggacgtcgacatgtccgccggcgacgacgcgaccaagcttcaggagctcgatgagatgaagcgccggctcaaggagatggaggaggaagccgccgcgctccgcgagatgcaggctaaggtcgccaaggatatgcaagatcccaatgcaaccacatctgaaaacaaagaggagatggattctcggtcggtattcgttggaaatgttagtctgctgtcatcaagcctttctatcaaagttttggcatctggttcagtttcagcacaagttctagtgttagcttcgtgggggaaagaaaaaaaagaaggaaaaaaaatccaagaaagttcttgaaaaaagaaagaaaaatagaaaaacaatttgaaaaagcaaaaaaaaaagtatacaaaaatggaaaaaaaatagtgatgatgtcataggctaggaattatcccccagggtagccagcagagaatgggtcaggcacattcatggtactgatgtggagtgatatcattagccatttactggcaatagcatgttgactatgcatgcactccagaagaagtgcagcagcatttcaattcttgtggaactgttaacagagtgacaatcctgactgacaagtttgggcaaccaaaaggttttgcttatgtggaatttgttgaagttgaagctgttcaggaagctattaagttgaatgaatcagaattgcatggtcgccagctcaaggtggcaccgaagaggactaacgttcctgggatgaagcaaccccgcggtcgaggtttcaatccataccggccatatggttatagtccttatggttatggctatggctacgggagattccccagattccgccgcccgcgaagaccttatttttgaagctcgtatgtccatatggtttgcagaacatggacgatgagacggcttgaccttatattcccgcgtcctattacttcatagcttattcgggatgttctcagacatgttattcccatattgacgatgcttaagatttgtactgtattgtttcagtgacagttacgcaaaacgattatgatctagttacgcggaaaggtactgttgtgacgctgcttggggtgatgtgc

SEQ ID NO: 154415 - DNA, 737 bp, Zea Mays
aacaggtgcatagaaagccctcgaggccccagtccattccctaataatcggctatcctgtcagtttccctctcccctcccgaaaccggattccgtaccgaatctggtctcgccttggagccgaggttgcacgcggttcgtcctgcggccatggaggacgaggagcacgaggtgtacggacaggagatccctgttgacggcgaggacgtcgacatgtccgccggcgacgacgcgaccaagcttcaggagctcgatgagatgaagcgccggctcaaggagatggaggaggaagccgccgcgctccgcgagatgcaggctaaggtcgccaaggatatgcaagatcccaatgcaaccacatctgaaaacaaagaggagatggattctcggtcggtattcgttggaaatgtaagttttattggctctttatgcaaattaagggaacttatgtatagttcaatgggtatatgatattattggggggaggggggaggggtaatattatatcgattttcactttccagtgaatattatgtttgtttggctgtgctccactagaaacccaatttctataaaaatgtgatcaaaccagcaataaagcatgggatcacattgtgttagtttgcagttcatttgtaaaagttccatttcattgaacaagtgcacatatgatcgcatttttatcatatatttttctattttttcccctcctttgtgttgattgaacaatggcaatggtcg

SEQ ID NO: 154416 - DNA, 977 bp, Zea Mays
tagcgcgctcaccggccggccaagacggccggacccaagcggcatccaatccaaccgagccaaccacgcgtatggacgcacgcaccccaactgcccccaactcactgcccactggctccgcccgcgtccgcgcaacttctccaggtcccgcctcctgcgccaatcgccatacatatataggacaacgccacccgcacggcacggccagaccacgccgcaccaccgccagctcccgcacgcgcgcaaccccaaccccaccccactcatttcttggccctgtgctgggctcgtgctcgtgcagccgtttccgatcgccgcccaaccatggcagccggcgccggcaggtcgaaccccgcgcggtgcatgacgcacccgaagcaccggcacgcggccggggtgtgccctttctgcctacgagaccgcctatcgcgcctctccgccggcgccgcccacgagtcggcgtcggcgtcctcctccttctccccgtcctcgccctcggaggagaccgcagcgcactcgtcgtcggcccaggcgccgcgcccccgccgcggaagcctcgcgctgctgctgctgcaccaggaggggacggggagcgaggcggcaccggcgctggccgcgggccgccaggcggagcagcaggagaggaaggcgaggaggggcaacttctgggcgcggctgcagcagcagctctaccacggtggctggcacaggaaagacgacgggtgctcggtggccgcagagagacagaacgccgcggccgcggccgccgtagtgtgatgctcgatcagggtgcgaccgagagaccgtggcggtggacgagcgcgtcgaggtgctcggttctgtgctgttcccgtgtttacgctgtttcaatcaatctttcggtgccgtggaatggatggccgggtatcggcgaaacgaaaggcgacctaacggctcgctcattttgtaaacaaacatcgaatgaagcttgcacttgc

SEQ ID NO: 154417 - DNA, 2322 bp, Zea Mays
atgacggtcacgctcccgctcccgccctctggccttccccctcccgacgcctcgtttccaccccccactggcccctcgccggctcctattccaagaccggcgaccacccctctcccctcgccggcgtcgcgggacccttcccttggtgtccagcgcggcggacgtccggaggtgctgcgctacgcgccgtgtcctccttcctctggcctctcgccggctcttactccaagaccggcgaccactcaatttccctccccggcgtcggaggattatccccttggtgttgtgcgcggcggaagatcgaaggaacaacgctggctggaggacggtggagcttgtgcctcctctgctgcgtcactagttcagggtgacgtggggaagaaatcctataaggaggctctgttttctcccaggcctgctgcgtccagggacgttgatggttgggtgacggtggttcgtcggcgtccgaacaccttgaagtccctccccagacctgtcccggtggatttgcgcggaagatgcttcaattgtttctcgtctgagcaccgtgcggctgtgtgccgtaatcgcgtgcggtgttttttctgccggttgccggggcaccgtgtgggcgtgtgcccgcgccggcggacggaccctcccatccctggacgcactttggtgtggcgacctgtggctatgagaccttcggagaagaatgtctgcggtcgagatatggctgtggctggcgggactggacctgttacaacgactggtgaaggcgcgaggaagagaactcgccgtggacagaggaagaggaggtcgggcgctggggagcagttgtctcctccgcctgccttcggcctggataagccggtgtgctttgtcgggcgctgtggaagaattgatcgggctgaggaggaactccgtcgtgcactgatcgtcagtgttgtaggcagggaggattctggctgcgccgtggaggtgcgtgacgcgatcgcctcgaggttttgccttgaagcagggtcgctccgcatacgtcgtgctccgcctaattctttccttgtcttcttcccctcggttgccgtggctgatcgggtgattggggaggggcaatctcttcatgtccctccgctcaggttgcatattcgaaggtggtctcgccaggctttcgcttctggaggtggacagccgcttgtgcccgttggcgttgaacttcgtggaattcctgcgcatctctgggggattgaggctgctgaggctgttcttggtgctttctgtttgattcatggttttttgcctggctcggtcatggaggaagacatgtctgttctcagactgaaggtttggtgccggtcacctgtgctgctgccggcggtggtggatctccttgctgaagagccgatggtctgtggagaggatgagagctgggttcctagcacgttggtgttccctgtttctgtggtggttcttcattctgatggaagttcaacttccggtgtggatcctcctgcgccatccccttcgggctttgtcgacgaagatagtgatcatgagcatcatatggaacggccggggcgccctgcgtcttctgttcgggttccaattcatttgcgtctgggtcagcgcagtcgttctgggctggtggatgatatgtctgttgtggctgttcatcaggatttggtggaggggggatcagttgatgctccggctctcccgattgtttcggttgaggagcgggaggcgcctggtcaccctccagatttgggatcagttgatgccctggctctcccggatgtttcggttgcagagctggaggcgcctggtcaccctccagtgttagcgttggatctggcagaggatttggggctcagttgtcaggagggctggtcttcgcatgttgttatctcgccggctaggccttgcttggacaatcctttggtgggggaccttatgaccggactggcggaggctgtcactgctgggcagcatggttccgggttctcctatttgctgaccgatggtgtttctgctaatgtggaggaggcagtcactgctgggcagcatggttccggggtctcccaattggtggctgttggttctcctgctgttgtctctgccagggtgcggaggaccacctgcaagcaaaaccctaaacagagtaaacaaatagcagtctcgcactccccaaaacccaaacaggaaggggaaatggacagggaatacctcggcgtcgtggatctcgacgtcgaggtcggcgccctggatctcggcgccgaccacaaattcatagtacctacttgtgagaccataaattcaactggactagtcctgcaaggatga

SEQ ID NO: 154418 - DNA, 308 bp, Zea Mays
gtgggagaggtcacttgccaaatgcaaagatatatgtttgtccctcatgtaaaggattgggaagagtcactatgtatccattcacatccgtttgtagttcgtgcagaggcatcgggaaagtaataaaggattactgcttgacatgccaaggttcaggggtagtaggtggtatgaaacatgtaacattggatatgccagcaggacttgattctggtgacacaatcaatgtaccggaggctggagatagtggtggacttggtgtccagtctggaaatttacacataaaaattcaagtgagagtccatatc

SEQ ID NO: 154419 - DNA, 798 bp, Zea Mays
gtagaaattgatccgttgtttacccgagatggtgctgacatccatgtcgataaaaggataagcttcacacaggcaatgcttggtggaaaagttgaagtacctactttaaatgggaaaacagaagtgaagatacccaaaggagtccaaccagggcaagttgtagttttaagggggaaaggattgccaaatccgtcaggatatttgggggaccaatatgtccgattccgaattcatttcccctcggtggttactgaacgtcagcgcatgctgctggaagaatttgcagtagaggaagctgcgaaagaacataacacttttgtagcaggaaattggtgggagctagttgcagaaaatatgacaaagcaaaatgtcatggtcggaatcggcatcctcctactgattcacctaatgctgagcaaagctatgaattaaggcttggacccatgctcatttgtgctggggcagtggtggggcaacgtcaaacagtaaaaattctccgaagattcagcataaaacaataaaacaatgagattgtgaatctttaaagactattttcacccactagagatcacaattttgaaggtgttggttagaaggttgttgatttctatggtaaaatacattacaataatatctgctcacatagttctgaactatatgaagctgtcaattgagttgccttaattttttccccctctttcggtgtaaatgtaatgtggatgctctacagttggaatagttcaacgtgctgggtgaaattgaatgtatcttttaaattcacccatcttgtcttggatc

SEQ ID NO: 154420 - DNA, 242 bp, Zea Mays
ccaaacgctgcgcgcgcgaccaggaagcagaaaaccacgataagggagcgtggcgcgcagacagggcgagctgggaacaccgatgagctgggagagctgcgcgcgacctcggcctgcagggacgggctcggcgagaaagcagagcgcgcacaagggagcagggaactcagtcagcgcgaggagcttgcagggggacgcgtgccatgggagatccggccggatgctggaggtgctgggcgcgg

SEQ ID NO: 154421 - DNA, 201 bp, Zea Mays
ggatgcacaaatcttaggcgtgacggtggccatagccaagcagagggactcgactacgtgcagaggagaactcggcacgatgagagatgacgaaacgcagagctcgcacaagggagcagggaaactcagtcagcgtgaggagcttgcagggggacgcgtgtcatgggagatccggccggatgctggaggggctgggcgcgg

SEQ ID NO: 154422 - DNA, 384 bp, Zea Mays
atggtgctggcggtcgtggtgctgctgggcgccgtagccgtccttgtggtggtgctgttgctgcagccccgtgtgccgtacgtggcggtgctccgcgcctacccgttccgcgtgcccgccaggggcgtcctcccgctggcgtacgtggcgcgcgcgcagggcgccccgctgggcgacgccggcagcgccgccatggaggccgcgctccgcaacggcgtggtgccgttccgggtggatggggaggcccagacgcgatggaaggtcgcggggatcgtcggcgtcgaccagtggacgcgcctggcgtgccagcttcgcttcttctggtccaacgacaccgtgctccccttcagatgcatctccaagtccaagttcttgttcttctga

SEQ ID NO: 154423 - DNA, 1982 bp, Zea Mays
acaccactggccactagttgccaaccccacgcacgttctgcgacgagctaccccatttccccacccccagcaccccactccccgcttccatttccttggaccccaccaccgcgcctacatccctcagagctcagatgcagccgccggcgaccgagatgcacccggccgccgacgccgccacctccgccgccaccgcgcaggccgacactactgctcgcgccgccgtccccgcatccgatccacccccgcccccgccggcgccggcggctgagacggtcgatccgccgcccccgccgccagcgccggcgcccaagacggtcacctggagcgagaagctcacgtccgactcgccgacgcacgtgcacgccgccgccgcggcggagtccagccagtacgtgtcccgtgggcccgcatcctcgtctaagggcgccgtggaggcgatgagggagacgctgtcaaggtgggggaagtcgtggggggagaccaccaagctggtcgagagcctcagccgcgacacgtggcaacactgtgagatctcagcagccctgcaagcgatagcagggtcttctcctttccttctaagagtccaatgtgctcgtttctttgcttcattcattccttgagctgcacggattggtaggatgcaacctttctaaggatcaaaggaaagaatcgacatatataaagttgcaagcgtactgtgctagacaccttttgagaattatgctgaggtctggtctggggattgtagagctggggaagcaggatgccccaataaaagaagccaacatgaacattttggtgtagctttccatatgctttatgctttgttggctaagtatcttcataagtttactttgttttaaaataattctttaagccttgttacccaaaaacttgtcccagtataatattaagagactgaagcattggtcccggccgaataaaatctccgaaccctggcctcccatcactaacgggccgacatcaaccgtctactctgcaacggcccaaccggagggcacaccgaggggatttttttaaccaagcccgaaaattcgcccccgagtataatggaacccgggacttggaggtgctactcgaaagccttaaccactatgctagaggcccttttgccaaacatctttgaacagatctaacaacagtaagattatgacattaccttttacgtatcaactgattaaggcttttggctaaatacctattttcataaaacttgtgatgaccaagtttcttgcagtcgaccggttagaactttgaactctggtagttgattgaagtcccatccaacccaagtttgaagcacaacacctcttaacacagccatgatgcagtcccgtgttgtgatgtacttcaatgaacttataagatcaaacttcaaatcattgaaaaattgcctatagttgtagatcataggctatgttatagatcttccaagaatttggctattgttccaagtgaagtgagacattggctgatagttgatagccaacccgcaagatcctgtattaaccttcaaatctaattgaagtcatgggaagtaaacctaggatctatttgattcaattatagattcctaaaaatccgattctagctatgagctaacggttatgggaatgacgtggcaacctgacaggagggacgctgccctagcctcttgaacgagccaattcgacagcgggccattgtcgacgagggagcggtacgctgtaccgcgggggttgggggccctacgttcgcaacgctaggctgaagcgtcgtggttgtagtcacgcctactccaacgcatgtatggcaccctacatgagcaacatgcacaatggcagcaacaactaaaccgctaggtgttgcgccattgtcttccatgggtatagtctcgctgtcattgaatatcaaaataggggctggggaggtgctgaaggtggtaacatcagatgggcacgaacaactattgttttcag

SEQ ID NO: 154424 - DNA, 806 bp, Zea Mays
acaccactggccactagttgccaaccccacgcacgttctgcgacgagctaccccatttccccacccccagcaccccactccccgcttccatttccttggaccccaccaccgcgcctacatccctcagagctcagatgcagccgccggcgaccgagatgcacccggccgccgacgccgccacctccgccgccaccgcgcaggccgacactactgctcgcgccgccgtccccgcatccgatccacccccgcccccgccggcgccggcggctgagacggtcgatccgccgcccccgccgccagcgccggcgcccaagacggtcacctggagcgagaagctcacgtccgactcgccgacgcacgtgcacgccgccgccgcggcggagtccagccagtacgtgtcccgtgggcccgcatcctcgtctaagggcgccgtggaggcgatgagggagacgctgtcaaggtgggggaagtcgtggggggagaccaccaagctggtcgagagcctcagccgcgacacgtggcaacactgtgagatctcagcagccctgcaagcgatagcagggtcttctcctttccttctaagagtccaatgtgctcgtttctttgcttcattcattccttgagctgcacggattggtaggatgcaacctttctaaggatcaaaggaaagaatcgacatatataaagttgcaagcgtactgtgctagacaccttttgagaattatgctgaggtctggtctggggattgtagagctggggaagcaggatgccccaataaaagaagccaacatgaacattttggtgta

SEQ ID NO: 154425 - DNA, 242 bp, Zea Mays
cccagactttgaagctaaggaaacaccttctagtttcaaaatgtatatattaactggtccctattcaaatagaaagtttgacctcaaccctattataatcatgctactacaccatggctagcatccctatgacaatgaccagttcgtgcccattctagccatgcccgtgccagagacggatcataccctattgacttaggctgagcgaagctttcttcttatgctgtgtcatagcctatggg

SEQ ID NO: 154426 - DNA, 2265 bp, Zea Mays
aatctacaatgggctacgtacgcccttgtttttgaatcacggaaatgcagaggttttaattagtgcttacctgcagtccaccctttctttgaaccttgtaaatgatcgaatttacagatatgaactgagtgccatttgatgagtaagatcgaacaagggagagggatatggaaaggatgaagtaatgaaagaggaagtcattgctagtagtaacgacttgtcacgatccattggttcatatagaatccatgtcctaggtctatcaaaaaacattcttttcgctaagcgtatataataaaatagagtgaaagggtccaccccgaaaccaagggggtactaactaacagctgagtcctctccgaaccgcaggagatagttgcccatcatacggctcaccaacttcacttgcctctaagggggggctcgctccgggcaggttcggatcacttactatacacggccctacgaaggggttaggagcgttttcaatatgattctttctttgtcgagacgaaaaaggaacccatcttttcgattgaaaaatgtgagtctgttttgcccactttatccatccccctctataaaaatgataaaaaggcattttaaatgcttcttattcccgtgtttgatcttatccatctctgccccgcttccatgtgggcagagacccctgtagagaatgaagaggagccaaggatcttactctcaagagtgcttcgataggctccactctctcccctgaataagtcaggctccgttagcctgggctgagatggggataacgagtcgacgattgaagcccccaacgttctgccagacactggacaggggtaagctctgtaaatgtgtagagccaagtgtagtgtggtgtagtagtaggcacttctaggccccttcccggctactggatcactccagtgcttcgggtactacggaccctctgccatccattgcagcagagccgtttcatgagcgggggggctaagcgcagttctttgaatcaaaggtttcatgaaatcaaaatcgattcttttttagatatctggatagatggatggatctatctttctattcagatatcttttgcaatcagccccaaatccttgatttggccaggaaacaaagcactgctttgggcccaggaagcgaagctgcttctcctccacacttctttatttctccgtgccccttccgccttcgcgcgccattggcgctttgctctcctcttatttcttcattggagggttcggatggacttcgccgttctttcccaacgaaaatggaaagggctgtatcacatcgagatgtcgattcgttttccgccccaaatgagatggggaattagtcacctctgtcccttcatctttatgaaaggaatcgaggcccggctcgcgtcgttccaacaaccgacggggagcaccccagtatacgatcgcgcgcagtaactgggagtcctattacacctaaggccaacttccattcaccaaacccaggttcatctcgtgtagtgattgtggactcgtacaaggatatggagtcgacggttgatgtatcagactcgaccctgtctttcgtagcatgcattcccatctgtgttgcaactgattcggtaagctacgtgtccggtgcacggaaaacagccttcggtctcccaaccttactcatggcaaccttccggccgcccaacgacctataacgctagtcactactcccactggggctaggaagtaagccccacaacccaaagcggcgaagaacaaatagaatttgctacaaaagccggctaacgggggtattcctgcgtatgagaacattgtaatggagaaggtcatagccaaaataggattcgttttggctagagcgcccaaatccgctatatatttgacacgggtttgccgtaatgctggaactatggcgaatgcatctatcgtcattgatgcataaataaatataccaattagtagtgattgaattccttctatggttccacatgagaaaccagtacgaatataacctacatgtccaatcgaactatgagctagaggtctttttactttcgtttgggccatggcggccagtgctcctaagatcatagaagcaatgctgcagaaaaagaagatttgttgtaatgtacccccataggaagcaacaatagaaacacgtgacatatttgcagaaatagagattttaggcgcaatagaaaggaatgctgtcaccggggtgggtgaaccctcatagatatcaggtgcccacatatatagagtc

SEQ ID NO: 154427 - DNA, 153 bp, Zea Mays
tttatttttggggagaaatgactcttgtgaattgtagaagcaatagcatgtacaaagctaggttgatctacaaagataaagaagaaatagacctacctttccaactatcttttgaaaacactaagcagggatcaaagcactattaataggtcc

SEQ ID NO: 154428 - DNA, 2437 bp, Zea Mays
caccccttctgctccttcacttcaccacaatggcaaccactacccctgctgtcacggaaccggacaatgctgacgcatctcctccatctccgacgtctccaccgtccaagaaggtcatgtacgagctcgccgcccggaacatctactacgccaagcctactgcagcgccgaggtcgctcgcgcagcttttgaagccgtgcggcgcggccccgacgccgccggactacatcctccgcgatgtgtccctcacggctcgggccggggagatcctggccgtcgtcggcccgagcggcgcagggaagtccacgctgctcgacatcctcgccgcgcgcacagcgccgacgcacgggaggctcctgctcaactccgcgccgctgcggccgtcgtcattccgcaggctctcgtcgcacgtgccccaggcagatgtcgcgctcaccctactcaccgtctccgagaccttcgcgttcgcagcgtcgctgctgcacccggagtcggagtccgctgtctcggccgcggtcaccgcgctcctcgtggacctcaggcttgcccacgtcgcgcacacgcgggtctcccccgcgcggctgtccggcggcgagcggcggcgcgtgtccatcggcctcgccctcctgcgcaacccggcggtgctcctcctcgacgagccgacgtccggcctagactcctcctcggcgcacgtggtcgtcagttgcctccgcgccgtcgcggccgcccggggcacaacggtggtgttttccatccaccagccaagcgcgcgcctcctctccgctgtggactgcctgctcctcctctcccgtggcaccgtcctccaccacggctccctcgcatccctcgacgctgccctcctctcacacggcctggtcgtccccgcgcagctcaacccactcgagttcgcccttgaggtcctcgaccagctccctcatcccaccccctctacccctgaacccaaggcgacgacgcaagaactgaactcgtcgtcgagccaccacaagatggtggccacggcgacgccgtctactggtccgccgtcatcgtggctgcacgagttaatggtactgtacaagagggcgtggaaggtggtgtacaggagcaagcagctgcttctgaccaacttcctagaggccgtggtcgttggcacgctgctgggcacgatctacatccacgctggctacggcgaggccggcgcgcacaagcggctgggtctgttcgccttcacgctgaccttcctgctgacttcgacgaccgagacgctgccgacgttcgtgacggagcggcccatcgttctggcggagacggcggccggactgtaccggctgtcgtctcacgcggcggcgggcacgctggtgttcctgccgtaccttcttgctgtggcgctgctctactccgtgtgcgtctacttccttgtggggctctgctcgtcagccggcgccttcgcgtcgttcgtgctggtggtgtgggcggtggtgctgacggcgaactcgttcgtgctgttcgtgagctcgttcgcgccggactacatcgcgggcatgtccctcgtatccgtgtcgctggccgggttcttcctcttctccggctacttcctgtcgcgggggagcatgccgtcgtactgggtgttcatgcactacgtgtcgccctacaagtacgcgctggacgcgctgctggcgaacgagtacacgtgcgcggggaaccggtgcttcggtgtgggcggcggcagcgagtgctcgcagacggggctcgacgtgctggtggagaaggggctgacggcggaggagcggtggaccggcgtccaggttctgttcggcttcttccttctctaccgggtgctctactgggtggtgctcagccggcgagcgtccagggcgaagagatgatgagatcagaatcagatcagatgaggtgagcagccggcgaacatcggatgctctcgcctccatgtactacgtacgcatgcaaacaagcttagccagcagaggtatgtcaaaaaaaaaatgccaacttggagaggaggaagatgaagaggcaagagcgatattaactggaattagtaattacgctgtcatatactgtactgatgtaaattgtgaagataaaattcctttataagtgtggcgatatggtcgagatgcatggatgggtgaataatgtgtagacttatatcaaatatataagttttgtgcttcttgttaattgactcgggtctggggaatcatatatatatgtgactgcatgaaaattgtatctatatgttggtgggagttgttaaagataagttttgtctttttgttagttttgtctgatcttagttacccctacttcgaatctgtctggcagcatgttcgtctgtgtatttttttttgttacgaagaaaataaatgggccaagttaatgttcagctcatctgatcgcatgtgtataaaaccaa

SEQ ID NO: 154429 - DNA, 1052 bp, Zea Mays
ttttcttgcccctgatggtggatccactggccgccggttttctccagctggagagccattcgtgggcgtaggacgagagagaggatcggcggcggcggcgtgtgggagatggcgcgcgagaggcgggagatacggcggatagagagcgcggcggcgcggcaggtgaccttctccaagcgccggcgcgggctgttcaagaaggcggaggagctcgccgtgctgtgcgacgccgacgtcgcgctcgtcgtgttctccgccaccggcaggctctcgcagttcgcgagctccagtgtgaatgacatcgttgacaagtacagtacacattctaagaatctggggaaatcacatcagcagccttctattgatttgaatgtagagcagagcaaatacagcggcttgaacgagcaacttgctgaagaaactaatggacttagacagatgagaggtgaagaccttgagggattgagtgtagaggaattgcaccgaatggaaaggaaacttgaagcaggactgcatagagtgattagtacaaaggaccagctattcatgcaacaaatcggcgaattactgcaaaagggcacacagctagaagatgagaacaggcgtctaaaagaacaaaaaatatcctcactgaagacgggcagtcgtctgaatctgtaatgactgcattgcattcaggaagctcgctcgactgtgatgatggttccgatatttccttgaagttgtcgttgccttgaaaggaaggaccatcgcatcgcatgttatctgcatgagtggggctgacaccagtgcttctaagaagacaaagactgggatagtcccattcgcggcattatattggtttaaccagatgtgctgtccttgtgcatgtctgtacttcaaagtggctaacgcgaaatttgtatatataatagtgtatgcgctgcgttatcttcgttctaaaaatctgtattgtttcgttgctggcgctatattgttggtgtattatatatatgcacttaactgttatctatactattctattaaaaatataatatagacatctgatgcta

SEQ ID NO: 154430 - DNA, 1026 bp, Zea Mays
tttcatttgccgtcgcttcggctggagagccattcgtgggcgtaggacgagagagaggatcggcggcggcggcgtgtgggagatggcgcgcgagaggcgggagatacggcggatagagagcgcggcggcgcggcaggtgaccttctccaagcgccggcgcgggctgttcaagaaggcggaggagctcgccgtgctgtgcgacgccgacgtcgcgctcgtcgtgttctccgccaccggcaggctctcgcagttcgcgagctccagtgtgaatgacatcgttgacaagtacagtacacattctaagaatctggggaaatcacatcagcagccttctattgatttgaatgtagagcagagcaaatacagcggcttgaacgagcaacttgctgaagaaactaatggacttagacagatgagaggtgaagaccttgagggattgagtgtagaggaattgcaccgaatggaaaggaaacttgaagcaggactgcatagagtgattagtacaaaggaccagctattcatgcaacaaatcggcgaattactgcaaaagggcacacagctagaagatgagaacaggcgtctaaaagaacaaaaaatatcctcactgaagacgggcagtcgtctgaatctgtaatgactgcattgcattcaggaagctcgctcgactgtgatgatggttccgatatttccttgaagttgtcgttgccttgaaaggaaggaccatcgcatcgcatgttatctgcatgagtggggctgacaccagtgcttctaagaagacaaagactgggatagtcccattcgcggcattatattggtttaaccagatgtgctgtccttgtgcatgtctgtacttcaaagtggctaacgcgaaatttgtatatataatagtgtatgcgctgcgttatcttcgttctaaaaatctgtattgtttcgttgctggcgctatattgttggtgtattatatatatgcacttaactgttatctatactattctattaaaaatataatatagacatctgatgcta

SEQ ID NO: 154431 - DNA, 1584 bp, Zea Mays
attttctctctcttctatttctcttctccgtcactcgcatctcgcgggatcggacccccagcgccgccgaccgccgtcctcactccctgcccccccacgccgccacacgaaccacctcagctccctgcgccactaccctcggcctgccgccgcacgcctcccgcgctgtcgttgtcagccctccgctccccgagacgccgcgtccgccccacttttccgttcgatttggtgggccgaggtctctcgctcgtggagtcgtagtacagcgcttcccgcacggcgatgtcggcgacgccgctgcccccgccgggccccgatggcgcggtggcgctcctgcctccgccgggtacggacatgactgggatctgcttccgcgaccagctgtggctcgacacttacccgctcgatcgcaacctcgtcttcgactacttcgcgctctcccccttctacgacatcacctgcaacaacgagtccctccgatcgcgccaaatccaccccctcgacatgtctcatctgacgaagatgaccgggatggagtaccttctgagcgaagtgatggagccgcacctatttgtgatccggaagcagaagcgggagagccccgagaaatctagccccatgctcgcctactacatccttgacggctccatctaccaggcgccacagctctgcaacgtcttcgcctcacgcataagcagggctatgcatcatatatcaaaagcctttaccatagcatgttcaaagttggagaagattggaaacgtggaaaccgagcccgatgcagtagcctctgaatcaaagacccaaaaggaagcaatcgacctgaaggaactcaaacgaattgatcatatcctgtcatccttgaaacggaagataggggctgctcctcccccacccccttaccccgagggctatgtcccaccatcagcagaacaagagaaagcgccggatgatgtggcagcatcagaggcaccgcctcaacttgaccctatcattgatcaaggtccttcgaaaagaccaagattccaatgaaagatttgtagcttaaacctgctgactcgacaacttcctgtatgctttaaagtcgccgacgtggactttataaatccattcttgctggttggttatttacaggccaaagacagaactaacctcgtggcatgatatctcgttctctgagttactagcttgaatcttgtagattggccagtgccatttgctccgggcttgtaatcttgtagataggccagtgtcatttgatctggtctatctacttagctatcataacttatgaggtggttatagttttgccttggtgcaaatctgcaagactggacatctcatacattatttactatgcatacttacgtggatttgtcaagtcatatgacctgatacagacggtgacggtcaccaattggaactgccattttctgttggtgtggatgaagtttgacactatgaaagtcccttggctgtgtaatactagcctgtatagaagtctaggcctaagagggctatgcatgtcttaatagtatgtactcaatgaacaagagaacaccattttattttatttattaattt

SEQ ID NO: 154432 - DNA, 4294 bp, Zea Mays
agcgatagatagaataggggcgggcgccgggcggcttcctccgtccacagccacagccatcgccacctccaccaccacctccttctcctcctcctcccgcatctcctcattgcaaaacctcggttcattttcctgtcgcgatctagggtttccggtcgctgcggcgccaatggcggactcgcgccgcacctggtcctgggacgtgtcggggttcgagccgccgcagccggcgacgacgcaggcagcgtcggcaccgaccgctatgccgcgggctccgccgacggccatgatgccccgcccctccgctggggctccccgcgcctcggccggcgcagtgcccgttgccgaccagctggaccagctcgtggacagcgtccagcttgctagagaggactgcttggagcttagacaggaagctagcgacctccttgagtattctaatgcaaaattgggccgtgtcacccgttatcttggatttcttgccgacagaactcgaaaattagatcaagctgcccttgagactgaagctagaatcacccctttgattcatgagaagaaaaggcttttcaatgacctattgaccttgaaaggcaatgtcaaagtgttttgtcgttgtagaccactatttgaagatgagggtccatcagtactagagtttccggatgattttagtatccgtgtaaacacaggagatgaatctttaaccaatcctaagaaggattatgagtttgatagggtatatggaccccacatcgggcaaggtgaacttttccttgatgttcaaccatttgtgcaatctgccctggatgggtacaatatttctatatttgcgtatggtcaaagccgttctggcaaaacacatacactggaaggatctagtcacgatcgtggtttatatctgcggagctttgaagaactgtttgatctttcaaactcggatactacttctacagcacattttaacttttattttactgcctgtgagctctacaatgatcaggttagggatttgctatcagaatctagtagcactgtcccaaaagttcgaatgggggtccaagaatcctttgtggagcttgttcaagagaaggttgaaaatccactagagttttctgcggcactaaagatagcacttcaaaaccgatcagtaaattcgccaaaggccatggtttctcacctgatcattaccattcatatacactacagaaactatgtaacaggggagcatctatacagtaagctttctctagtggatttgccagcaagtgaatgcttgcttgaagaagatgccaacagggacaatgtaacagatttcttgcatgtctcaaagtcactttctgtgttgggtgatgcatttgcctctttaagcgcaaagaaggagcctgttctatatgggaattcaagaatcacacaaatcttagctgactctctaggaagtagctcaaagatcttgctgatcgtgcatgtaagtccaagtgcttcaaatttgtcaagaactttatccacactcagtttttctgcaagagcaagaaatgctgagctgagccttgggaatcgtgacacaataaagaaatggaaagacgtggcaaatgattcacgcaaacaattgcatgacaaagaaaaggaggttctagacctgcggcaagaagttattgggttaaaacattctctaaaagaggctaacgaccagtgcatacttctgttcaatgaagttcaaaaagcctggagagtttcatcttcactccaagctgatctcaagtctgaaaatttaatgcttgccgagaagcacaagactgagaaagagcagaataaccagctaagggatcagatttctcatcttttgaaagttgaacaagagcaaaacctaaagatgcaggaacgggatttaacaattcagtcactacagactaaactcaagtccattgagtctcagcttaatgaagccctcaatgctagcgatgctagatcaactattgggtctgaatctgcttcagtaatttcttccccaaagataacagaatcaactgctgactcatcttcagtgacgaaaaggcttgaggaggaattggcaaaaagggatgcccttattgagaaattacatgaagagaatgagaagctttttgacagacttacagagaagtcaggattaggaagtgctccacaggcttcaagcccttcagcaaacaagccagctaatggtcaaggaagggagataggcaggagtgacagcagcaaaagtcgatcaccagatgtgtttgcatcaccagtgtctcaggataaaactggaaacagtggagctattgtaaaatcaagcaatgagctagcaaaaactacacctgctggggagtaccttacgtctgcactaatggattttgatcctgaccagtttgagggatttgcagcaatagctgatggtgctaataagcttttgatgctggtcttggctgcagttatcaaagctggtgcagctagggagcatgagatacttgccgagatccgtgatgctgtgttttcattcattcgaaagatggaaccgaaaaaagttatggatactatgttagtttcaagagtcaagatattatacatcagatctttgcttgctaaatcacctgaactacagtccatcaaggtctctccagttgagcgtttcttggagaaatcaaatactggtcgaagtagaagttctagtaggggaagtagtcctggcagatctcctgttcaccaccatggtcatggttcccgaactgcgcttgttgatgaacatgtgcatggtttcaaggtgaacattaaacaggaaaagaaatcaaaattctcctcaattgttctgaagcttcgtggtatcgaggaggagacatggagacagcatgttactggagggaagctccgggaaattactgaggaagctaaggccttttcaattggaaacaaggctttagctgctctctttgttcacacgccagctggtgaattacagcgccaaattcgtgcatggcttgctgaaaactttgagtttctatctgtaactggtgcggatgctgctggaggagccgcaggacagcttgaactgctgtcaaccgctattatggatggctggatggctggtcttggtacagcgcagccccctaccactgatgctttaggccagcttttatcagaatacacaaagcgtgtttacacatctcaactacaacacttgaaggacatagctggcacattggcaacggaggaggctgatgatcctgcacatgtcagtaaactccgctctgctctggagtctgtggatcacaaaaggagaaagatcatgcaacaaatgcgaactgacactgccttgttaacaaaagaagaaggtggctcaccaattcgcaatcctcttactgctgcggaggatgcacgattagcatctctcatatctctagataacatcttgaagcaagtcaaggaagtaattagacaaagctctacaggacctatgagaaaatcaaagaggaaagctttgctagagttattggatgacctcttgacacagatgccctctcttcttgatatagatcatccatgtgctcagaagcagatcatggaggcacggaaagttgtcgagtcactgcaagaagaccctgatgatcctgccccacagtctaatgcattgggagagggcgaggtttcacagtggaatgtactgcagttcaacacgggaacgactgcgcctttcatcataaagtgcggagcaaattccagtggtgaactggtgattaaggctgatctgcgagtccaggagcctaaaggtggcgaggtgatccgtgttgttccaagaccaacagttcttgcggacttgagttttgaggaaataaaaggtgtgtttgagcaattgccagaggcagttagcttgcttgccttggcacgaacagcagatggtacaagggccaggtattcaagattgtacagaaccttagccagcaaagtgacggccttgaaagagactgttgcagagatggagagaggtggtgttttcaaagatgtacgataaatgctgtgttattgtagagttatttatgatattgatgttgtatatggatgccatttgtcggcatcccttgtaactgtatttgtttttactatgtggaaacctatgttgtaacactattctttggcaagagatgagccttgcctgccccaacccgtaatactatggttgtgcaaggcattaatgtaaattgtagctgcagctgataaatgtctgcagtgctgcaagtctgaactttccaggttatggaactattcaatgtttatttgtatt

SEQ ID NO: 154433 - DNA, 2937 bp, Zea Mays
ctgattataggctattaatatttcgttttgtaatgtctgtttcatccaccatcatctttctatttaaatttgagtcagcttttctttttcaggatcattaccattcatatacactacagaaactatgtaacaggggagcatctatacagtaagctttctctagtggatttgccagcaagtgaatgcttgcttgaagaagatgccaacagggacaatgtaacagatttcttgcatgtctcaaagtcactttctgtgttgggtgatgcatttgcctctttaagcgcaaagaaggagcctgttctatatgggaattcaagaatcacacaaatcttagctgactctctaggaagtagctcaaagatcttgctgatcgtgcatgtaagtccaagtgcttcaaatttgtcaagaactttatccacactcagtttttctgcaagagcaagaaatgctgagctgagccttgggaatcgtgacacaataaagaaatggaaagacgtggcaaatgattcacgcaaacaattgcatgacaaagaaaaggaggttctagacctgcggcaagaagttattgggttaaaacattctctaaaagaggctaacgaccagtgcatacttctgttcaatgaagttcaaaaagcctggagagtttcatcttcactccaagctgatctcaagtctgaaaatttaatgcttgccgagaagcacaagactgagaaagagcagaataaccagctaagggatcagatttctcatcttttgaaagttgaacaagagcaaaacctaaagatgcaggaacgggatttaacaattcagtcactacagactaaactcaagtccattgagtctcagcttaatgaagccctcaatgctagcgatgctagatcaactattgggtctgaatctgcttcagtaatttcttccccaaagataacagaatcaactgctgactcatcttcagtgacgaaaaggcttgaggaggaattggcaaaaagggatgcccttattgagaaattacatgaagagaatgagaagctttttgacagacttacagagaagtcaggattaggaagtgctccacaggcttcaagcccttcagcaaacaagccagctaatggtcaaggaagggagataggcaggagtgacagcagcaaaagtcgatcaccagatgtgtttgcatcaccagtgtctcaggataaaactggaaacagtggagctattgtaaaatcaagcaatgagctagcaaaaactacacctgctggggagtaccttacgtctgcactaatggattttgatcctgaccagtttgagggatttgcagcaatagctgatggtgctaataagcttttgatgctggtcttggctgcagttatcaaagctggtgcagctagggagcatgagatacttgccgagatccgtgatgctgtgttttcattcattcgaaagatggaaccgaaaaaagttatggatactatgttagtttcaagagtcaagatattatacatcagatctttgcttgctaaatcacctgaactacagtccatcaaggtctctccagttgagcgtttcttggagaaatcaaatactggtcgaagtagaagttctagtaggggaagtagtcctggcagatctcctgttcaccaccatggtcatggttcccgaactgcgcttgttgatgaacatgtgcatggtttcaaggtgaacattaaacaggaaaagaaatcaaaattctcctcaattgttctgaagcttcgtggtatcgaggaggagacatggagacagcatgttactggagggaagctccgggaaattactgaggaagctaaggccttttcaattggaaacaaggctttagctgctctctttgttcacacgccagctggtgaattacagcgccaaattcgtgcatggcttgctgaaaactttgagtttctatctgtaactggtgcggatgctgctggaggagccgcaggacagcttgaactgctgtcaaccgctattatggatggctggatggctggtcttggtacagcgcagccccctaccactgatgctttaggccagcttttatcagaatacacaaagcgtgtttacacatctcaactacaacacttgaaggacatagctggcacattggcaacggaggaggctgatgatcctgcacatgtcagtaaactccgctctgctctggagtctgtggatcacaaaaggagaaagatcatgcaacaaatgcgaactgacactgccttgttaacaaaagaagaaggtggctcaccaattcgcaatcctcttactgctgcggaggatgcacgattagcatctctcatatctctagataacatcttgaagcaagtcaaggaagtaattagacaaagctctacaggacctatgagaaaatcaaagaggaaagctttgctagagttattggatgacctcttgacacagatgccctctcttcttgatatagatcatccatgtgctcagaagcagatcatggaggcacggaaagttgtcgagtcactgcaagaagaccctgatgatcctgccccacagtctaatgcattgggagagggcgaggtttcacagtggaatgtactgcagttcaacacgggaacgactgcgcctttcatcataaagtgcggagcaaattccagtggtgaactggtgattaaggctgatctgcgagtccaggagcctaaaggtggcgaggtgatccgtgttgttccaagaccaacagttcttgcggacttgagttttgaggaaataaaaggtgtgtttgagcaattgccagaggcagttagcttgcttgccttggcacgaacagcagatggtacaagggccaggtattcaagattgtacagaaccttagccagcaaagtgacggccttgaaagagactgttgcagagatggagagaggtggtgttttcaaagatgtacgataa

SEQ ID NO: 154434 - DNA, 1536 bp, Zea Mays
atggactggtccactcacatatacattgatcttgcttgcttcatttttttgaagttcaaggtttttggcctcctggttccaatgctctctgtttttttctttatccttttacactgtatgattgttcctgtggtgaattgcatgtaagtcagcatatatctttattcttctttctctcattcattctttttcgtctacaatatcatccgttgggaccaccacgtttatcgagccctctcgccatattacatgtatcaattcctcaggaagactcaaactggtggctggatgtcactgggtggaatccttctctgtgtaacaggctctgaagctatgtatgcagatcttggacatttttcgcaatcaacaatacagattgcattcatatatgtggtttatcctgcacttgtattggcttatatgggacaagcgtcttttatttcacaacatcacaacttcgagagcagttatcatattggattttatgtgtcagtaccagaaacactcagatggcctgttctggtgattgctatattggcagctgtagttgggagtcagtcaattattactggaaccttttcaatcatcaagcagtgctcttcattaagttgtttccctggagtgaagattgtgcacacatcctcgacagtgcatggtcagatatacataccagaaatcaattggatgctgatgatactctgcctggctgttactattggcttcagagacacaaagcacttggcaaatgcacaagggttggcagtaatcactgtcatgcttgttaccacttgcttaatgtcactcgttattgtgctttgctggaacaagagtgcccttggtttcctgcttttctttggcgcgatcgaagtaatctacttctcagcttcccttgtcaagtttcatgaaggtgcttgggttcccattactctctccttcatatttatggtggtcatgtgtgtctggcactatggcacgataaagaagtacgagttcgatgtgcaaaacaaggtttcagtaaactggctcttaaaccttggtccttcgctgggcattgttcgtgttcgaggcattaggctaatacatacagaactgatgtctggaatcccagctatcttctaccacttcgtcaccaatcttcctgcgtttcaccaggtactggtattcctctgtgtcaaatcagttcctgtgccgcatgtgcaacctgaggaacgatttctggtgggtcgcattggtccgaaagagtataggctatacagggtcattgtcagatacggttatcgcgatgtccagaaggatgacctacagttatcgtgatgtattttgctgaaggcttgaaattcatttgtttttcttttatagcagatatatttttaaaaataaagctcaacctttttcctgggaatatatgcagttcgatgatcatgaagtcagttgcgtttttgctgagttctgaaatgattcctttgtgtctgtgtgctattaatatgagcaatgagctttcaaaattgtatttaccaacctacccgaccattactg

SEQ ID NO: 154435 - DNA, 1224 bp, Zea Mays
atggtggaaataatgacgaacttatacttgatgaaccctccacattatcagatttcacctctcattcttgccatcttcttcttcaaagaaagggtaatctgtgtagccaacaataggatcttgcgtgtagaaggtggagcggtcgtatttgttgagtgccacatccagctcgaacctcctaggcaggtccgggttagccaagaacagcttcccatacgcgacgaggtcagcatacccttctgccaccaccttgttgccttcctcccgatcgtacccaccggcggcgatgaacgttccatgaaacgcctttcggaacggcaagagcccgtgagggatctgcctgcgcccgtgggcggtaatgcggggctccaccatgtggcagtagagcaagccgctatgcctgttgagctgctgcaccatgtagtggccgagcgccaccgggtccgagtccacgcagtccacgaagtcgacgaagggcgacagcctgatgccgacgcggcgcgcgcccacctcgcggacgacggcgtccacgacctccacggcgagacggcaccggttctccaggctgccgccgtactggtccgtgcggtcgttgcagctgtccttcatgaactgctccaggaggtacccgtgcgcgccgtggatctcgacggcgtcgaaaccagcctggatcgcgttccgtgcggcccgcctgaagtcgtcgacgatcccggggacctcgtcggtccgcagccggcgcggcttcgagtacgccgttccggacttggcgtcgggggagatctgcttgtccgtgctcgagataggcgcgtcgccgttgggctggagctctttggtggagaccctgcccacatgccagatctggcagacgaagatggcgcccttgcggtggacggcgtcgacgatgggcttccacgcctcgacctgctcctgcgtccagatgccaggagactccgggaacccctgcgcggtggccgacacccccgtggcctccgcgatgagcaggccacccctggtggcgcgttgcgagtagtacacggcggcgtgtggctgcggcacgttgccgtaggagcggcacctcgtcagcggcgccagcaccacccggtgagagagctcgaactgccccatcttgtaaggcgtcagcagcgggatcacctccttcgcggcttgctgcaccatcttgcctgcgttgccttgcctatttgctctcggtcggtcacttgctag

SEQ ID NO: 154436 - DNA, 1411 bp, Zea Mays
ttcacactagtacatgatttatttcactttacactagtacataatgaaacaacacgacgcaatgactccgccacaatggccaataatgaatggtggaaataatgatgaactcaaacttgatgaaccctccacattattagttgtgatcagactgactcctcattcttgccatcttcttcttcaaagaaagggtaatctgtgtagccaacaataggatcttgcgtgtagaaggtggagcggtcgtatttgttgagtgccacatccagctcgaacctcctaggtaggtctgggttagccaagaacagcctcccatacgcgacgaggtcagcatacccttctgccaccaccttgttgccatcctcccgatcgtacccaccggcggcgatgaacgttccatgaaacgcctttcggaacggcaagagcccgtgagggatctgcctgcgcccgtcgacggtagccatgcggggctccaccatgtggcagtagagcaagccgctatgcctgttgagctgctgcaccatgtagtggccgagcgccaccgggtccgagtccacgcagtccacgaagtcgacgaagggcgacagcctgatgccgacgcggcgcgcgcccacctcgcggacgacggcgtccacgacctccacggcgagacggcaccggttctccaggctgccgccgtactggtccgtgcggtcgttgcagctgtccttcatgaactgctccaggaggtacccgtgcgcgccgtggatctcgacggcgtcgaagccagcctggatcgcgttccgtgcggcccgcctgaagtcgtcgacgatcccggagacctcgtcggtccgcagccggcgcggcttcgagtacgccgttccggactcggcgtccggggagatctgcttgtccgtgctcgagataggcgcatcgccaaacatgcacgtaccgttggtggagaccctgcccacatgccagatctggcagacgaagatggcgcccttgcggcggacggcgtcgacgatgggcttccacgcctcgacctgctcctgcgtccagatgccaggagtctccgggtacccctgcgcggtggccgacacccccgtggcctccgcgatgagcaggccacccctggtggcgcgctgggagtagtacacggcggcgtgtggctgcggcacgttgccgtaggagcggcacctcgtcagcggcgccagcaccacccggtgagagagctcgaactgccccatcttgtaaggcgtcagcagcgggatcacctccttcgcggcttgctgcaccatcttgccggcgtgctgctgctgcagatgtgatgcaacaccgcaggtcacttgcagctctctgctcttactagctttgctcggtttctcgctctgcttgttctgcgtctactggaagaagggtgtcgctgtgtatt

SEQ ID NO: 154437 - DNA, 307 bp, Zea Mays
ttagtattttccatgttcttttaggttgttgattcagtcgtgagggtcctcaattaaggtcgaatggatgcaatcaaaactagaagggtgtgcgccatcgaggatcactgcagctaaggcaatcgtgaaggatggaatcgttgttatggggcatgttggcctcacaccgcaagctattactgtgctcggtggatttaggcctcaagggaaaacggttgacagtgttgtaaaggttgtggagacaacacttgccatgaaggagactggatgcttctctgttgtgtattagttgttggcaaataattta

SEQ ID NO: 154438 - DNA, 496 bp, Zea Mays
ctgccgtagtatgattgagttgtgatattagagtatttagctctcttaaggttttgttagtttttgtgtgcaccattagagaggtgtaagtcttgcgatgcttcttagtattttcttttcaagttgcataagcataaacatccatgatcatgtaatttcatatagaactcctaccagaaggagtgaagattcaagctgaagtggtgactgaagaggaatctactccagtggctgctgatcaagtggaggagccatctaattggggtttaatagagggatcgagtacctcttcactgcaataaggcaagcccgggtgcatttgcccctttccttgtatttttaaaagacttttatacactttaagtctagtgaaatgtgcattaagtttataggagttgcttggaaactatttgatgcattgactaccttgatatccattcctgttgtagatacttctttggaagtatcaaatattgtttacaaaaatgcttagctt

SEQ ID NO: 154439 - DNA, 733 bp, Zea Mays
gcacacccttggctgagattcatcatccttgtgtttagcttctacgtgttgtccatgcactgctgcttagtgtccctgctcgtagtggtgctggcaccctaggactttcccttcctccacagaattttatacaaagctcagggatactcgcctacatgttcagctgccctaaagactttgtctatgaagttcccctctgcccttgagtccaacctgtgttcatcactagagggacgtaactcttgagttcaagtcggtgttaacccactccacagccacccaacatactgtattccgtgcatcgagtgccagtggcgaccatagcagcagttcacaccctcaccatggccatgattcctcggaggttgtctcggccttgtgttgcccgttccctactcctcgcagaactcctaccagaaggagtgaagattcaagctgaagtggtgactgaagaggaatctactccagtggctgctgatcaagtggaggagccatctaattggggtttaatagagggatcgagtacctcttcactgcaataaggcaagcccgggtgcatttgcccctttccttgtatttttaaaagacttttatacactttaagtctagtgaaatgtgcattaagtttataggagttgcttggaaactatttgatgcattgactaccttgatatccattcctgttgtagatacttctttggaagtatcaaatattgtttacaaaaatgcttag

SEQ ID NO: 154440 - DNA, 682 bp, Zea Mays
gcacacccttggctgagattcatcatccttgtgtttagcttctacgtgttgtccatgcactgctgcttagtgtccctgctcgtagtggtgctggcaccctaggactttcccttcctccacagaattttatacaaagctcagggatactcgcctacatgttcagctgccctaaagactttgtctatgaagttcccctctgcccttgagtccaacctgtgttcatcactagagggacgtaactcttgagttcaagtcggtgttaacccactccacagccacccaacatactgtattccgtgcatcgagtgccagtggcgaccatagcagcagttcacaccctcaccatggccatgattcctcggaggttgtctcggccttgtgttgcccgttccctactcctcgcaggtcagtgaagctcacaccatttactgcttgaactctaccactgtctgttattgggaactaggtgtaaaatttgctcaaagataagctgtcagggtttttggaattcagacttagtttaattcagcatctgaatttctgtgtttgggttatcggattgctattgacttagtttattcagagctgaaatctgaacatcagtgaatggtaccaagtttagagctctattgtgacccatcttagtggttttggactaagaattatttagcaaaagtgtaga

SEQ ID NO: 154441 - DNA, 1390 bp, Zea Mays
atcagcatgacattcatgaagccatcccggtaaacgagagccctggaaataacaggaattaattcaggaaagtacacgagcaagcacccgaggtcaatgagcttacctccattgacaatggagataggaaggaatatcatgaagagaaatgaaaggaccatataattccaagaccctgatgatggccacaactgcttatattgatgattcctactcggagattattgatcctctaaagactgagctgattgcaggagagattaaaatcaaagggattgagctacaggagagttgcagtctgtcgttcttttccatggtagtaggcattttcattgggttcatacatttattctctgtcgatgtttacaagaaaatagtatctaaaaacaagatgtctctgttccatgagggtgtgattgagactgaaacgatgggtaccagagtgaaggagtcgaagacagttttagtagagaaagagctcgaactgatcgacgagcctcagattcaagagagccctccagttcgtgcattgttgcatgatgaggtggattttgctgaatcgtcacttgctattagagaatctgacattcccgtgaagaaggtgctgataatcgtgacaatcacttttgtttggccacaacagccatattacttgaagcccatgttttgaaagctgtattggcacttcttctatggttagtggtggaatagcccgaacagtcctatgaaacagcaaaaaatctgttacagtccacttaggtggaagaggtagtttgtagatgattttgttttaatatatgaactgtaatagtaaggttacaataaattttcacataggtgatcaaacttctgtttgtgtaaagccaacagatggtctgacctgacatgtgtttttccaggagtcactacttatagaaaaagcttgttcctagaggtggtttctcccggcaatgcagaatcttgaagcacgtctaaagtggcttgatgatagttctaaatttcaactccctgtcattaccaggtgccagataggctgctggtcgattccatcctgaacaagttgcgccaaagattacatgaatattgcgtgccgagatctgtcttcagtaatgcgatgccatcctgaacaagttgcagcgacaattaggataggattttcccacgctttttagtcttgtgtattccttttatgctcttcatctttttttctcattatatccaccaattagatagtcatgtagactttcttttaggcgcttttgttttttatactttgtgttaccttgcttttgttttcatactttgtgttaccttacagatgtaaaaacgctcccctcccgtacattgcactatttatgaggaaaggtaaaatagcgtcatttagcttttt

SEQ ID NO: 154442 - DNA, 2229 bp, Zea Mays
gatgacatttggaatctgattacttctttacaccattgtgacattagttgactgtcatttgttgctttttatttgagttgcctggattgaattagtctcaggacagacataggataggacctaagatcgcattagcaaaagctaaaatggtctaggattagaagtgttataccaaatcttccatgaactccagatagcccagagtcttttataatgccacacacaaagctttcatgtgttggaaaaaaatcataggtcaaccgaactaagttatcacaacatttactcaaaccatatcagaaggcacatatgcttacataaatttcattttagttgataccaccggtcctgggtttcatgcttacaactagaaaagggttctattttttcagattatgaacataccatggaaacatgaagcagggttttacttttatatatgctagcaattgttatctgttgtgttgctttacatttctgttacttactcttttgcaggtaaaatatacagactgtggagttagtcctcaggatctacatcatgtattcacaaagtttgctcatcctcaaagtggaggaaaccgagggtttaatggtagtggtcttggccttgccatatgcaagaggtaaacgagagccctggaaataacaggaattaattcaggaaagtacacgagcaagcacccgaggtcaatgagcttacctccattgacaatggagataggaaggaatatcatgaagagaaatgaaaggaccatataattccaagaccctgatgatggccacaactgcttatattgatgattcctactcggagattattgatcctctaaagactgaggtgctgtatgttgttgaactccctggtgaccatacttagcacccaccaaaaccgaatgtggtggtgtctagcagtgtgtgcaaacttctagaatatccagtctgcttgaatgccatgtatcctattcatcagctgcacattcatactgatccatttggcatgtttatatctaaaaccctgttcaaatgtagtcgattggatgaaaattatggctttactggtttcagcgttcctttcaatatcatgtactgttatcaccattttattctgatccgtttcaatttctatggacgtttagtacataatgtttataaaccttaacttttttactcttttttcttttttgattagctacgatacagtgcagaataatatgttctgcttttttattcaactattcaaatcttattttttattcaactattcaaatcatattttttgattagctgattgcaggagagattaaaatcaaagggattgagctacaggagagttgcagtctgtcgttcttttccatggtagtaggcattttcattgggttcatacatttattctctgtcgatgtttacaagaaaatagtatctaaaaacaagatgtctctgttccatgagggtgtgattgagactgaaacgatgggtaccagagtgaaggagtcgaagacagttttagtagagaaagagctcgaactgatcgacgagcctcagattcaagagagccctccagttcgtgcattgttgcatgatgaggtggattttgctgaatcgtcacttgctattagagaatctgacattcccgtgaagaaggtgctgataatcgtgacaatcacttttgtttggccacaacagccatattacttgaagcccatgttttgaaagctgtattggcacttcttctatggagtcactacttatagaaaaagcttgttcctagaggtggtttctcccggcaatgcagaatcttgaagcacgtctaaagtggcttgatgatagttctaaatttcaactccctgtcattaccaggtgccagataggctgctggtcgattccatcctgaacaagttgcgccaaagattacatgaatattgcgtgccgagatctgtcttcagtaatgcgatgccatcctgaacaagttgcagcgacaattaggataggattttcccacgctttttagtcttgtgtattccttttatgctcttcatctttttttctcattatatccaccaattagatagtcatgtagactttcttttaggcgcttttgttttttatactttgtgttaccttgcttttgttttcatactttgtgttaccttacagatgtaaaaacgctcccctcccgtacattgcactatttatgaggaaaggtaaaatagcgtcatttagcttttt

SEQ ID NO: 154443 - DNA, 2507 bp, Zea Mays
cgtgcacagggtggacgttctgcccccgacatcctccccttagctccgctccctgaagccgtgatcgaagccgccatcaacgccctccaccccctccgcgcgcggcagcggcagccggcatttccagcccctaaaatcctatttccctctcccacaccaggcgccgcgcccgtctgattccgcccgccagccacgcccgcagatctcgcttcggcgccctgattccgtcgtatgcaaggtcacagccctgccttccatcgtcgcccccatgccacgctccccttccatcctcgctcacttccagccgcccccattcccagttgaaggagtcgtccaggaaccaggaaccccatcaccggatcaggagcagctgtgtcgcgagcatggtcgttgctgagctcccgatgaccgcccgatggtgtcggaccccgcaccgccgtcggcaccgcgctactcggcgtactcgctgccgtcgacccacctccccggagaggacatcctcttctgcatcgacgtcgacctcgaggtccacgccaagatgaagtccgctgccgtagcgtcctcggatccacgtccaccgcgtcgccgcagtccgtaggagctgatggtgccccgacggtggggagcatcgagccatggctcaagtgcaaggatcagcccccgcagcagggcaaggagatcccgcagaccaaggccgaccgggccaagctcgatggcatgtacaagtgcatcctctgcgcctgctgctccacctcctgcccgtcctactggtggaacccagaggagtacctcggcccagccacgctgttccacgccaacaggtgaacagggcttcagcagggacgctggtttagcaatggaggcgatccattccttgtctgcttcaaaatcaagttatccaatggtaaaatatacagactgtggagttagtcctcaggatctacatcatgtattcacaaagtttgctcatcctcaaagtggaggaaaccgagggtttaatggtagtggtcttggccttgccatatgcaagagccatcccggtttctaggattccatgtcgtcccatgagaatataacgaaggaaacaagaagcacattatagaagtagcaagatcacagtacatatcagcatgacattcatgaagccatcccggtttctaggattcttgttttgctctgtccatggcacgccaccaacattcatccctaaaactgacatttttttgcaacataaatcaggtaaacgagagccctggaaataacaggaattaattcaggaaagtacacgagcaagcacccgaggtcaatgagcttacctccattgacaatggagataggaaggaatatcatgaagagaaatgaaaggaccatataattccaagaccctgatgatggccacaactgcttatattgatgattcctactcggagattattgatcctctaaagactgagctgattgcaggagagattaaaatcaaagggattgagctacaggagagttgcagtctgtcgttcttttccatgggtgtgattgagactgaaacgatgggtaccagagtgaaggagtcgaagacagttttagtagagaaagagctcgaactgatcgacgagcctcagattcaagagagccctccagttcgtgcattgttgcatgatgaggtggattttgctgaatcgtcacttgctattagagaatctgacattcccgtgaagaaggtgctgataatcgtgacaatcacttttgtttggccacaacagccatattacttgaagcccatgttttgaaagctgtattggcacttcttctatggttagtggtggaatagcccgaacagtcctatgaaacagcaaaaaatctgttacagtccacttaggtggaagaggtagtttgtagatgattttgttttaatatatgaactgtaatagtaaggttacaataaattttcacataggtgatcaaacttctgtttgtgtaaagccaacagatggtctgacctgacatgtgtttttccaggagtcactacttatagaaaaagcttgttcctagaggtggtttctcccggcaatgcagaatcttgaagcacgtctaaagtggcttgatgatagttctaaatttcaactccctgtcattaccaggtgccagataggctgctggtcgattccatcctgaacaagttgcgccaaagattacatgaatattgcgtgccgagatctgtcttcagtaatgcgatgccatcctgaacaagttgcagcgacaattaggataggattttcccacgctttttagtcttgtgtattccttttatgctcttcatctttttttctcattatatccaccaattagatagtcatgtagactttcttttaggcgcttttgttttttatactttgtgttaccttgcttttgttttcatactttgtgttaccttacagatgtaaaaacgctcccctcccgtacattgcactatttatgaggaaaggtaaaatagcgtcatttagcttttt

SEQ ID NO: 154444 - DNA, 1175 bp, Zea Mays
gatcgcctcgctgtgttgcactgctaggtagccagctcgtttcctcccccaacccaaatgggcgactccaccgccaccaacccctcctcgccgaccgcagccatggatcccgactccgaggtcgtcttcgacttcccgccctacctctgccagtacaagagcggccgcatccaccgccccggcggcgcccccaccgtcccagctggcacggacccagccaccggcgtcgtgtccaaggacatccgcgccggccccgcctccgcgcgagtctacctccctcccggcgcagccggcaagatcccggtggtcgtctacttccacggcggcgggttcgtggtcggctcgccggcgcggccgggcacgcacaactacctcaacgacctggtcgcccgctcgggcgccatcggcgtgtccgtctactaccgcctcgcgccggagcacaagctgcccgcggcgtacgacgacgcgtgggcggcgctacggtgggcggcgacgctcggcggcggcgaggacccgtggctgctggagcacgccgacctgtcccgcgtgttcctggcgggctgcagcgccggcgccaacatcgcgcacaacacggccgtgcgggcctccgccgccggcgcgctccccgacggcgtgaccatccgcgggctcgccgtggtgcacccctacttcacgggcagcgaggccgtgggcggcgagatagccttcggccccgagatccggccgttcatggaccgcacctggcggttcgtggtctccgacacggtggggctggacgacccgcgcgtgaacccgttcgtggacgacgcggcgcgcagggcctccgcggggatcccgtgccagcgcgtgctggtgtgcgtggccgagaacgacttcctgctcaaggagcgcgcgctgtggtaccaccgggagatcaaggccagcgggtacgctggcgaggtcgagctgttcgagtctaagggcgtcggccacgcgttccatttcgacatgctggactcggagcagggcgtccagctccaggagcggatcgtggctttcatcaacaaatgagcaccaccgagatgatgaataagagttttttatgctattttaaatatatcatttggatacttcaattgtaatagtacaccgaaagttgttcgattcccgatcccgaaataatatattcgttctgt

SEQ ID NO: 154445 - DNA, 2122 bp, Zea Mays
ctctcgcttctgttcccctatcgtcggcctccacaagcgccacgtctcgcgccctcgtccgctccccgccgatgagctgccgcgcggcgccgtggagtcgcccgtcgcacattgctggtccgcgtgtgcccaccccggcgcggccgcgcttcgcacttggaagtaggaatctgtggaagaactcatggacaattggtgctggtgtttcaaatatgtttgcgctgccatcaacactgtttaggtgcatggcttcaagtggctctggtgatggtgattttgctcggtctacattgactgacgaagcagcaccatttccattatactcttggccagataagcagagaccacgagtgtgcattttaggtggtgggtttggtggcctgtacaccgctttaagacttgaatctcttgtgtggcccaatgataagaggcctcaggttcttctggttgatcaatctgataaatttgtatttaaacccatgttgtacgagctattgtcaggagaagtggatatctgggagatagctccatcttttacagagttgctgaaaaacactagtgttcaatttgtgagagacagtgtaaagcttctgcgcccttctgatcacttaagaagaaaacctggagaaccatgcactggtggagttgttcatctggaaagtggcactgtcattgaatatgattggctcgttctagctttaggggctgaagctaaaattgatgttgttcccggttctgctgaatatgcgcttcctttcacgacattagaggatgccttgagggttgaaagcaagttgaaaatgctagagaggaaaaggtttggtaagagttcccctactattgaggtggcaattgtgggattgggctattccggtgttgaattagctgcgactatatctgagagattaaaaaacactgggactgtaaaggcaataaatgttcaaacaaccgtatgtcccactgctccacaaggaaatcgtgacgctgctctgaaggttcttgagtctcggaatattcagcttttcttgggatattttgtgagctgcatcaaagaggctcctacatctgatgagtcaagtagcacagttacatactctgaagttgacggtgatcataggaaactaattttggaccttcaacctgctgaaagaggcctcaaagggcagaccctcgatgccgatttggtgctgtggacagtgggttcaacatctcagattccacggttacagcctcctgatgctccctatgttattcctctgaatggtcgaggacaggtggagacagaggaaacccttcaagtaaaaggccatccccggacatttgcgattggcgattcagcagctctaagggatccatcaggcaaactcctcccggccactgcacaggttgccttccaacaagcagattttgctggatggaatctctgggcggcaataaatgaccggcctctcctgccgttcaggttccagaacctcggcgagatgatgacgctcggtagaaatgatgccgcggtaacagcaagtttcattgaagggctgaccttggaaggacctctcggacatgccgctcggaagctcgtgtactgcctcagaatgcccacggatgagcaccgggtgaaggttgggatcagctggttcacaaaggctgcgatcgattcgcttgcctccgtgcaaaacgcggtaagtaacacgctcacaggctcatcatgactgtacgggttcttaggtgtatattgcctgcctgaacggaatgaaatggaggacaaatcgatgtccatcttatgtacgtaatcgaggttcttctcgactagtgtgtaccatactttttaatcatgctgctatgttcctacggtacaagagcagtgatgatttatgtaaaaacacgtgtggctatgctgatgactggcgtgaagggcttctagttgggttggttacgtgttttaagtccgggttcagtccgggttcggctttccgtgggatcaaattctatgtcgtggtaaaaaaatctctcatttattctatgccaaagcacaagtttaaagtccgatcgtggtcctgggttacggtgtgctatggtgtcgttgtgtatgaatgaaacaatgatttaggggttttcttggttt

SEQ ID NO: 154446 - DNA, 1410 bp, Zea Mays
tccatcccgtacggtcagccgacttgcccctttggcctctgtgttcgtacttcgctcggcagaaacctcttgctccagggggcgaacgcgccgccgcctccgacagccccctccagccgcgtcaaatcagcgccctcctctgctgcgccggcggtctcccgccgcaaagacgaagccccgcactcccttatcgcagatccgtgcccgccgccatgacggagtattgggtgagccaaggaaacaaatggtgcgacttctgtaagatttatatagcaaacaattccttcagcatcaggacacatgaacttggtaagcgccacaaggacaatgtcaccaaacgactgtcaacaatgcaaaaagagagtgagacaaaggaaaaggaacagcagcaagctgcacgagccctacagcagatagaagcaaaagctaaaaagagttatcaaaaagatttagagaataaccagaggaatgttgatggagacacttctgcagcacctggagatggttgtgatgggtgcttgactcggcgtcaggatattaccatgacaaatctactggactttactacgattcaaactctggcttctattattctgacagtttaggcaagtgggttacccaagaagaggcgtacaagtctgtgcaagcttcgaaatcagacgctggccaatcctcagcttcacaaacaaaagctcctgctgccgcagaaacagctgtccccgcgattaaaggaggtgcagctccaggccgggtggtaacgaaaccgttgaacccaatgagaccgattaagggcactcctgctccgtctgctgttgctgttaacaagaggaagagggatgacggcaagcccaaggcggtctccaaggaggaggaagcggccctcaaagcgcgggaagcagcaaggaagagagtggaggatagagagaagccgctgatgggattatacaagacgtactgatatcttgtccttgccagactgctactactcttcctccatgcatacgggtttgccaattacagtgtgatgttgtaaaataaatttttttaaaaaatctaaccgaacgcatcattcgcagaaggaatgccggtaatggtgtggcactggatttcagagcttttctgcatcagcaatgtgtgtccacacggtgtaatacctcatcagtggttcttgagtgaatcaagttccaatttgaatcttgtacaaggatatgttcattgttttttttacgcggatggagtgtcgtactcgtaccatatcatatactgcgaaatgaggatgtggtgaccgttctcgagatgttcaatagtgtgtttctgtcctcgacaacggagacagtattgaccagtatctgactgaacaaaagcgcttccggaaaattaattaagaaaagaataaccgtgtccgggctc

SEQ ID NO: 154447 - DNA, 1438 bp, Zea Mays
gaaaccgctgccagtgtcagtatttcaaaaatgtccatcccgtacggtcagccgacttgcccctttggcctctgtgttcgtacttcgctcggcagaaacctcttgctccagggggcgaacgcgccgccgcctccgacagccccctccagccgcgtcaaatcagcgccctcctctgctgcgccggcggtctcccgccgcaaagacgaagccccgcactcccttatcgcagatccgtgcccgccgccatgacggagtattgggtgagccaaggaaacaaatggtgcgacttctgtaagatttatatagcaaacaattccttcagcatcaggacacatgaacttggtaagcgccacaaggacaatgtcaccaaacgactgtcaacaatgcaaaaagagagtgagacaaaggaaaaggaacagcagcaagctgcacgagccctacagcagatagaagcaaaagctaaaaagagttatcaaaaagatttagagaataaccagaggaatgttgatggagacacttctgcagcacctggagatggatgggtgcttgactcggcgtcaggatattaccatgacaaatctactggactttactacgattcaaactctggcttctattattctgacagtttaggcaagtgggttacccaagaagaggcgtacaagtctgtgcaagcttcgaaatcagacgctggccaatcctcagcttcacaaacaaaagctcctgctgccgcagaaacagctgtccccgcgattaaaggaggtgcagctccaggccgggtggtaacgaaaccgttgaacccaatgagaccgattaagggcactcctgctccgtctgctgttgctgttaacaagaggaagagggatgacggcaagcccaaggcggtctccaaggaggaggaagcggccctcaaagcgcgggaagcagcaaggaagagagtggaggatagagagaagccgctgatgggattatacaagacgtactgatatcttgtccttgccagactgctactactcttcctccatgcatacgggtttgccaattacagtgtgatgttgtaaaataaatttttttaaaaaatctaaccgaacgcatcattcgcagaaggaatgccggtaatggtgtggcactggatttcagagcttttctgcatcagcaatgtgtgtccacacggtgtaatacctcatcagtggttcttgagtgaatcaagttccaatttgaatcttgtacaaggatatgttcattgttttttttacgcggatggagtgtcgtactcgtaccatatcatatactgcgaaatgaggatgtggtgaccgttctcgagatgttcaatagtgtgtttctgtcctcgacaacggagacagtattgaccagtatctgactgaacaaaagcgcttccggaaaattaattaagaaaagaataaccgtgtccgggctc

SEQ ID NO: 154448 - DNA, 2365 bp, Zea Mays
aacagccagaaggcgccgtcgcctgcggcgacacgcgcacgcaggcatccctctcgtgagcgcgcactgctaccgtgccgcagtgtggttacagctcgtcgctcgaggcgaactccggcgtgcggaaccctagcgcaggcgtggagctcaccggcctcggcgccggcgccggtactaggatggctccacccgttacgccatggtgagggccttgcggctcggtggccgcgcggccgccgcagcgaggtggtgcacctgccggcgcgccgccgtcgccctctgcgtggccaacctcgtcgccgcgctgctcgtggcccgcgcgctctacgctcccggctccttcgcatttgcacccaaacgcggggagctgaagtattccagggagcagatgaggtgggtggaggagtcgatccggattcgccgcgcagctgagcccgtcgagctcattgaggcggtgaagaagctgcgcaaggcattcacgagggaagagaagacacgaaaagggctgccgctggagctgaagcagaaagtttcgcttgagattctgcagagactgcacgatttgggcgaaggttctaataccacggaacaacaagaagctgtagaagcatggcgtgttgggaagctcaaggacatgagaagtgcatcttctaagaatttatcaaattttggcctctccagtgaagattcaaggatgttaaagcgagccttggagtttaactggcaaaggatattggaggacattggtctttggatacctcccactatatatcatatcgaacatgatgacaaacctgagaatgaaccagaaggttattttgtttacactgcttatgttgccagcattgttgattaccattaatggtgaccaaattgtgcagtaattttaaattgatccaagagacaattgaaaaatggttcttgattgatgttattgttgcagatgaagagataatacccggtccacctttgccccctgaatgcaatactgaactgcatactgattatggtggcacggctgttagatggggcttaacacatcacaaagaaagtgccgcagattgctgtcaagcctgtatagatcaggctaagagggccagaccaggagccttaaagtgtaatatttgggtttactgtccgtctgagtatggatgctactcgccagacaaatatgaacacaaacatcaagaatgctggttgaagcaggtattttctgtcgtcgtctatgtgtatatttaagtacttaactaatctaagagactatacttaagtccagctctcatgcacagttggtgacgttagttcattattaccaaatttgccttgtttcctgggatagtgacttccaaattgtgttattttgctgcatatatgatacaagtattggtttattaacaatgataggacatatgaggtgtagcagtagctactgggcctctaacttggttatcatggttttgggccgtgggtagagcaggaaatgcaagtgcagtcggcacaatcctggtagtttggcattgagttatgttttcttttttatttgataaacagtctcgttccatcacttagttaatagctcaatatgtccaccatattgtacatgatggtctgaaactataaaaatgctattttagttttcttgaatttattctttcatgacttagcattcatatttttttatttccaagttttgaccatgtggggaaatctaaaatattcaggttctttctttctttaagaaattccttttagatacttaatggtgagatgctgttcttggactcttccttccaaacgaaacttcattttttcccatcaaatttctggtattccattcatgtatacattaccagaatggatcttgttccacctgagaagtaattttggctgtattggtttgcatttcaggctgaccaccctagattaaacttcaaagaccggtaccctgagccatacagagattctcatccgactgcccctgttgttgtgccatggatgtcgggtgtcattactgcatgagctgcttgcccacaggagcgcaatgccaatgtgcagcttccagactgaactctacatttttgttttgcaaactcagaaaaccatttttcattttcattctttagtacttaggctttaggttagtctacttggtagctgaagtttaggctgcgctggggcctttgtcaaactgtgccctagggcgtggcaaacaaactgatagggcatgttttggcagagatgtgctgtaatgtatgtacatcaaccaatcatgctcgcagctatatattgtacttcaaactgaaaactaactaacacagaagcaatcatgcccatggctatattctacctcaagctcgagagatac

SEQ ID NO: 154449 - DNA, 1489 bp, Zea Mays
aacagccagaaggcgccgtcgcctgcggcgacacgcgcacgcaggcatccctctcgtgagcgcgcactgctaccgtgccgcagtgtggttacagctcgtcgctcgaggcgaactccggcgtgcggaaccctagcgcaggcgtggagctcaccggcctcggcgccggcgccggtactaggatggctccacccgttacgccatggtgagggccttgcggctcggtggccgcgcggccgccgcagcgaggtggtgcacctgccggcgcgccgccgtcgccctctgcgtggccaacctcgtcgccgcgctgctcgtggcccgcgcgctctacgctcccggctccttcgcatttgcacccaaacgcggggagctgaagtattccagggagcagatgaggtgggtggaggagtcgatccggattcgccgcgcagctgagcccgtcgagctcattgaggcggtgaagaagctgcgcaaggcattcacgagggaagagaagacacgaaaagggctgccgctggagctgaagcagaaagtttcgcttgagattctgcagagactgcacgatttgggcgaaggttctaataccacggaacaacaagaagctgtagaagcatggcgtgttgggaagctcaaggacatgagaagtgcatcttctaagaatttatcaaattttggcctctccagtgaagattcaaggatgttaaagcgagccttggagtttaactggcaaaggatattggaggacattggtctttggatacctcccactatatatcatatcgaacatgatgacaaacctgagaatgaaccagaagatgaagagataatacccggtccacctttgccccctgaatgcaatactgaactgcatactgattatggtggcacggctgttagatggggcttaacacatcacaaagaaagtgccgcagattgctgtcaagcctgtatagatcaggctaagagggccagaccaggagccttaaagtgtaatatttgggtttactgtccgtctgagtatggatgctactcgccagacaaatatgaacacaaacatcaagaatgctggttgaagcaggctgaccaccctagattaaacttcaaagaccggtaccctgagccatacagagattctcatccgactgcccctgttgttgtgccatggatgtcgggtgtcattactgcatgagctgcttgcccacaggagcgcaatgccaatgtgcagcttccagactgaactctacatttttgttttgcaaactcagaaaaccatttttcattttcattctttagtacttaggctttaggttagtctacttggtagctgaagtttaggctgcgctggggcctttgtcaaactgtgccctagggcgtggcaaacaaactgatagggcatgttttggcagagatgtgctgtaatgtatgtacatcaaccaatcatgctcgcagctatatattgtacttcaaactgaaaactaactaacacagaagc

SEQ ID NO: 154450 - DNA, 762 bp, Zea Mays
cttgacgccttctggtcgaacgggaagaagagtagcgcgtccccaaacccagatccacccccccccccccccccccggactgagtccagtccaacctcgcaggcaaagatggcggacgtcacccgcaacggcttcgggggccggaacccgccggggctgctgcagaacgcggccaagaacaagcatgcgttcgtgcagctgttcctcatgacgggcgtcctcttggtgagcctgcggaccttgggccagaagcacctcctccacgacctcgccgccgacaacgccgacctccgccgccagcgcgacggcctctcccaccgcatgcgggacctccaggacgcgctccgcacggaggcgggcgccgactcgtccggcgctctcgcgtcccacctccgccgcatcttcaccgcccaccctgcgcctgccgccgccgccgaggaccagtagcgtgctctctcgaggaatcttcttctccgcggtttggttctacggtcctgtggtcgcatgtctagcggtgaggtagtgacctcttccgttgtcgctgcctcacggtccatggcagcgcacgctacgtgtttgtggaaatgtcgcactgcagagagttgactgaaagtgtttctgcgtcgtctcgagacgcatttgttgagacttcaaacttcgtgtcgcagactttaaatttcgtgtttcggacttaaaactttaaacatcgtgtttcagactttaaacttaatgtttcagattgatcaatggtccttttacttc

SEQ ID NO: 154451 - DNA, 768 bp, Zea Mays
gacgccaaccgcgaagcactacactacactacaccacacccacccgacgacgatcacacacgcagaagatcgagttcgttcgatcgtgaccgtgacgcaggaagctataagctagccaagacaggaataataatggcggcgtcgacggtggcgagcctctctgtcccggtgacgacgacgaccttcgcggcggcgggcggcggcgacgtgctgatcgtcgtcccgaggagggcgggcgccaagcgcgtcgtctggttccccgcggcggcgcgccgcggcggcgggcggttggtcgccgtgcggtccagcgggccggccacgccgccggagatctccgacaaggtgtcggagagcatcaagcaggcggaggagacgtgcgcggacgaccagaagggcgacgccgagtgcgcggcggcgtgggacgaggtggaggagctcagcgccacggccagccacgcccgcgacagcctcaaggagaccaacgccaacgacccgctcgagaagtactgcaaggacaacccggactccgaggagtgccgcatctacgacaactagctagtcgtatagctatataggccatcgacatgaaggacgaaggttgtagcacactacgaaagaatgatactctcgatcggcgcgtcatacgtggaatgaacttgtttgtatcaagctatctatacctcaatgcttctctacctgccgccgccgcaccccgtatgatatgtgatacacagctgggatggtatactgatattttgggttaatttc

SEQ ID NO: 154452 - DNA, 911 bp, Zea Mays
tcaatgataggaacttatggctgaagatcaacaggagttataacattacaacacattctctatgctttgtaaagtatttgaaaattagtcaaaccttgaaatgcaatgatttaatcctaattaccacaatcaaaacatctttgtcatcctgtaatcagtaacttaactaagacgaccatgactaaaagccaaacagaagggattgctaaaatgacatcaatacagagcaaacagtaaaaactgcacaaatatatcaaccttaagactagggatattaacacccagtgattaatctaaagggagttgccaaactttaacacaactcagctaagtaccatgccgaaccaatctgcttgccgcaaaaataaaataagtggccaaacctaaatcttcctgcctcgcgatttctgcaggcacaaactagtaagcaatctctgaaattaaacccaggcataggtatatccgcagaggcaggtcaggatacaagtagaagctatagagctacatccgcgcgcctccataagtccaaatgagtaacggcaaggcggcactcacagcgcgacgaggtcggggtggcagacgaggcagcgccacccgagcgaggagtacagctcaacgaacggccgcagctgcgcctcgtcgctccacacccacgcgaacaagaccgcgacacccctcgcttgccccggcggcgccgattccggcgcccagtagaaccgcccaccgcagccgggccacatggcctcggcccctgctctactacttccgtcgaggagaccgaggagagggggatcggagcaagggtttgcgcggtttcacttggttgttctggttgagagaaggaggtgaggggtggaggagacggcgacggccagacgggaacgcgtttggtttgttgcggattttgtttt

SEQ ID NO: 154453 - DNA, 847 bp, Zea Mays
atgggccgtggcgtggcgtgcttgcagctgcagtcctgcacgtcttgccgctttgattgccttctccttcccgcaactactcatcctttccatcaaaactgagcaaacccctcatcctattctcgcgcccggcgtctcccttctccaacctccgtttctaatccgcgctgctaatcccactcccagtcccagctcgtccgctgagatggacagtagcagcctcaaatccgcgcagctcctggagctgatgcgccagcacctggccaccgatgccggcaaggaggtcaccaagaaggtcggcctcgtctaccagctcaacatcgcccccaagaagatcggcgttgatgaggagatcttcgtggtcgacctcaagaagggcgaggtcaccaaagggccgtaccagggaaagccggatgccactttctccttcacggacaacgatttccttggaatcgccaccggcaagacgaatccgcagattgcattcattcgaggggcgattaaaatcaaggggagcatcagtgcggcgcagaagttcacccctgacatcttccccaagcctgctaagctgtagaagggttccacatgatgtattgccagccattgaaacaccgctgttgctcttcttcaacctttcatgtgattcatctggagcagcttatatgatctgacgataattgatattttgcgatataagtccagtgcggtgatcgtgtatgtggtagaatatgactgaactgttgtatagtataaaaacacggaacttgttgtatagtataaaaacacgcccttgaatttctgagtatatatgtaacataagcttgtgtcgtttaagattaaaaccaaa

SEQ ID NO: 154454 - DNA, 760 bp, Zea Mays
atgggccgtggcgtggcgtgcttgcagctgcagtcctgcacgtcttgccgctttgattgccttctccttcccgcaactactcatcctttccatcaaaactgagcaaacccctcatcctattctcgcgcccggcgtctcccttctccaacctccgtttctaatccgcgctgctaatcccactcccagtcccagctcgtccgctgagatggacagtagcagcctcaaatccgcgcagctcctggagctgatgcgccagcacctggccaccgatgccggcaaggaggtcaccaagaaggtcggcctcgtctaccagctcaacatcgcccccaagaagatcggcgttgatgaggagatcttcgtggtcgacctcaagaagggcgaggtcaccaaagggccgtaccagggaaagccggatgccactttctccttcacggacaacgatttccttggaatcgccaccggcaagacgaatccgcagattgcattcattcgaggggcgattaaaatcaaggggagcatcagtgcggcgcagaagttcacccctgacatcttccccaagcctgctaagctgtagaaggttagattgtgtattacttggtcgaggtgaataataatgtttgcaagcttcaattactatgtacgagatacaatgagtggaacatgaaaagcacgttctcggtgggaatttggatatggttgaacttccacttaaatcaagctcaatgttcgtttctcatgattacgttatcttcttaaaata

SEQ ID NO: 154455 - DNA, 1453 bp, Zea Mays
gagatgccggcagggagcggggccccagcgctggcgcggcagggctcggtctactcgctcacgttcgacgagttccagaccacgctcggcggcgccagcaaggacttcggctccatgaacatggacgagctgctgcgcaacatctggacagccgaggagtctaacgccatggctgcggccgccccggccacggccacggccacggcggccgcatccgtggacgcgcacgcgcagcagcagcagcagcagcagcacggggcgcccatccagcgccagggctccttcacgctgccccgcacactcagccagaagacggtcgacgaggtctggcgcgagatcgtgagcctcaccagcggcgaggacgcgcagcaggttgcggctcccgctcccgctcccgcgcccgagcccgagcccgcgcccgcgcccgcgccgctgccggcgcaggcgcaggcgcagcagacgctggggtccatgactctggaggagttcctggtacgcgccggcgtggttcgtgaggacatgggggggcaccagaccctcctgctgcagccgcacgcgcaggggcttttctcccaggggaatgcggtcgcgccgcagaccctgcagctgggaaacgggatggtggccggggtcgtcgggcagggcctcggaggaggggtgacggtggcggctccgacgacgccggtcgtgttcaacgggttgggaaaggtggaggcgggtgatctgtcgtcgctgtcgccggtgccgtatccgttcgacactgcgctgaggatgcggaagggacccaccgtcgagaaggtggtggagaggaggcagcgccgcatgatcaagaacagggagtcggccgccaggtcgcgtgcgaggaagcaggcgtacataatggagctggaagctgaggtggcaaaactcaaggaccagaatgaggagttgcagaaaaagcaggttgaaatgctaaagaagcaaaaggatgaggtcctggagcgtatcaacagccaacatggaccaaaggcaaagaagctttgcctgcgccgcaccctgactggcccatggtagcctgctgaagcttgcacaaaattgaccgaagtcaagatcgtcgggctagatgtgcccgtgtgtatatatcagatgaagtcaagagtactgagtaccccgttacccctgtagaccgccgctacttcagagctgccgttcttgttctgtgacgtgggtagtctgcgcctgacagttcgctgtttaggttcggttgcgcgatcctcacatgaacaatgaggcgtgccatctaatttgtttattaactcactcctatctatggtgagataatgcaagtaacctggagtatgtttggttgatttgccgttttgaaaaatatgctgtgagctgtgtggaaaaacagcggtggcccgtgtggaaaatagaagccgtttgattttacagctatgtcttttgaaaaaaa

SEQ ID NO: 154456 - DNA, 1702 bp, Zea Mays
acactaacctcactgcccccaccccctatccggtcggccacgccacgacgatcgccagaaatcaggatgggtagccaaggacaagcggcaaccaacggccggggagacgacaccggcggcggaagaacccagcaggcggcgcacttcgtgttcgtcccgctgatggcccagggccacctgatcccagcggtcgacaccgcgctgctactctccacgcacggcgcggtctgcaccgtggtcgggaccccggcctcggccgcgcgggtgcgcccgaccatcgagtccgcccggcagtcgggcctgccggtccgcctcctcgagttcccgctggactacgccggggccggcctgcccgaaggcgccgacaacatggacaacgtcccgccggagcacgcgcggcgctacttcgacgccgtcgcgctcctgcgcgcgccgatcgaggcccacctccgcgcgcacgcgcgcccctacccgacgtgcctcgtggcggacttctgccacccgtggaccacggtgctggcggccaacctcggggtcccgcgcctcagcttcttcagcatgtgcgccttctgccttctgtgccagcacaacgtggagcggttcggcgcgtaccggggcgtcgcccacgacgacgagccggtcgtcgtgccggggctggagagacgggtcctggtcacgagggcgcaggcctcgggcttcttccgcgaggtgcccgggtgggaggacttcgcggactacgtggagcgcgcgcgggccgaggccgacggcgtcgtcatgaacaccttcgaggagatggagcccgagtacgtggccggctacgcggcggccagggggatgaaggtctggacggtcgggccggtgtcgctgtaccaccagcgcgccgggacgctggcggcgagagggagggctaccgacgtcgacgtcgacgcgtgcctccggtggctcgacggccaggagcccggctccgtcgtgtacgtcagcttcgggagcatcgcgcaggcggacccgaggcaggccgtggagctcggcctcgggctggaagcgtcgcggcacccgttcgtctgggtggtcaagagcgtcgacgagtacgacgggaccgtgcgcgccttcctggacgacctcgaggcgcgcgtcgcggggcgcggcctgctcgtcagggggtgggcgccgcaggtgctgatcctgtcccacgccgcggtgggcgggttcgtgacgcactgcggctggaactccacgatcgaggccgtcaccgcggggctgccggtagtcacgtggcctcacttcacggaccagttcctgaaccagaagatggccgtggaggtgctgggcatcggcgtcagcgtcggtattacggagccgctcatgtacaggaaggtagagaaggagattgtggtcagccggaacgtggtggaggaggccgtgaggagcttgatgggcgccggggaggaggcagatgagaggaggcggcgggcccgcgcgctcgcggtcaaggcgagagcggccatgcaagagggcgggtcgtcgcaccgcaacctgctggatttggtcggtcgcttcgagggtgtcatgaccaaggacaccaaaggcgcgtgaagaaagatagcatggtagtaattgttggcgccggccgccggagtggctgtgccgacgacgatctcgcaacgtccgcggtgctcgcgcttcgatggacacgacgttgcca

SEQ ID NO: 154457 - DNA, 1235 bp, Zea Mays
tcagatccatggaaaaatattacggagaataaatgtcacacgtgcaaaaaaaagaatttaagttgaaaacattattcaaacaaaagaaattgcatgcaaggctcttctttaaatactactccctcaatccaaaaatataatttaataatctcgatgatacttatctactactacacattgtgcaagggtagcaggtgggcttcgggagagatatagtatatgtttttattataatagatgtagacataaacacacatgtcgtgtagtggtagctacgagcacatttacttgaggggtcgcgggttcgaatccccttggggcctgtttttttaatataattttagctaggcgtgagatgtacgtgggaatgggaatgagttttgtggggaggggagaatgagaaaggaaacagggaatgatgaccgaacgtgagagaatggattgtgcggggaggggggaatgagaatggcagaatacggaatgacaacctaccccttattgccgtaataagtagtagagatttgtaatttgtatgctttacgaatgacccttgccatgtatattagccaccattttgagtctatcctgtcacttatgaagcttcatgaacaggcacctactgattgcatttggtggacttgctggtttggaagaaagcattgaagaagatacaaacttgaagggtaaacgtgcagatgatgtattcacatcttatttcaatacatgccccaaccaagggagcagaacaataagaacagaggaggcacttctcatttcccttcaatacttccaagatcccattaggcgagcggaacagaaattgtagaagggaatacagaaaactgcaaatctagccatggccaacaagttccagttgtaatagtggagttttctcactgagtatcttgacccttcatgtatgcgttggtgtcattggagccaagaggttgtgagccatcgaggacattttgacacaaccatttcagtttagaaaatttgatgcggagctgacttcagtggaagagtgttagcttgccatttcagtgtatccaattgttgtccactgtagtctatatcggtgtttcatacctttgaccctgtactagaacgacacggaggatcactgttaacaccagagcgtcatgcatgctttgataaagtttttcttgtgccttcaataatttgatataggaattggtagtcaatgacgcaatgccattgatttggagtcaata

SEQ ID NO: 154458 - DNA, 1587 bp, Zea Mays
cgcagcgggctgtcttcctcgccgtggagtagatcgaggagaggagcagcacaagtgagctagctgttcatctagctaacgccactcctgcctgccttgcctccctccctcagcacgtcgtgctggtaatcgatcagaggggggcgtgacgtacgtacagcagccatgggcgtggggaagctgatgaacgacgtgaagccgtacctggcgatggtgctgctgcaggtggggttctcggggatgtacatcgtctccgtcgcctccctcaagcgcggcatgaaccacttcgtcctcgtcgtctaccgcaacctcgtcgccaccgtcgtcttggcccccttcgccctcctcttcgagaggagagtgaggcccaagatgacgccgctcatctttctcaagatcatggggcttgccgttcttgagccggtgctggaccagaacatgtactacctcggcgcgaagctgacctcggcgaccttcgcctcggcgctcgtcaacatcctccccgccatcacgttcctgatggcgctggtcctgaggatggagaggctgaggctgcggagcctccgcagccaggccaaggtcgccggcacggtctgcaccgtcgtgggcgccgtgctgatgatcctgtaccacggccccgtggtgccgttcccgtggtccgcgggccaccaccaggcctcagccgccgccgccgccgcggcagcggagagccagagcagcgcatcctggctcaacggcatcgtcatgatcatcggcagctgcctgtgctggtccggcttcttcgtcctccagtcgaacacgctgcagagctaccccgcggagctgacgctggcgacgctgatctgcttcctgggctcggtgctgaccggcggggtggcgctggtggcggagcgccacgacatgagcgcctgggtcattggcttcgacacccgcctcttcaccgccgtctactccgggatcgtgtgctccggcgtggccttctacgtgcaggggatcgtgacgcaggcgcgggggccggtgttcgtgacggcgttccagcccctgtgcatgatcatcaccacggtcctcggctccaccatactcaaagaggagaccaccttgggaagcgtgatcggcgcggcgatcatagtggtggggctgtactgcctcatctggggcaagagcaaggaccacctcggcaacggcggcaagccggccgtcgccgagctgcccctcacctcggctcccaacggcggcaccaacggctacggcaagcacgcgctcggcggcggcggcggcggccaccacgtcgccgccggcgtcgaggcaccgccgccgtcgtccaagtgcgttcactgacggacggacacggaggagctccatgcacccctcaccgcacactagtagtaattatagtagcgcattaattaattgccagtggctgtgtaaaccctgcaacgcgtgtacgatctcggaacgttgggctgctctgctgttctcgtagtcgtagagagacggggccggccggcgttgcgttaacggcttctgagttttgatgacctgcaccaccgccatcgctaatactataactaagctctctgtttgtgc

SEQ ID NO: 154459 - DNA, 1521 bp, Zea Mays
acttgtcaggttcgcagcttgtcaaccggcccgccgcaactcgagtactcgccacgcgcgccacgccgcgcgccgccgctcccttcccgagccccgactccgtccggagtgctgcaacctgcgccgctgcccaccggactcctcttccccttccgcctcggcttcccgatccccttcccgtcccgagccctgccgaaattcgaatcgcccgcctcccgagccctcgcccccccgcgccgccgatgccctccaagcggccgtccccgcacgccatggacgaagccgcctccgccaccgccgccgccgccgccgccaccgcgcgcctccgtccctccaccccgcgctccaagaagcgcacctcccgctccaagtcccgcggccgccgccgctccccgaaccctaaccctagctcccgccgcgagggctccgcggaccacgcctccgccgcgccctcccgcaagagcgaccgcaagcccaagccgcgctccttcccggactccgccacgctcgccacggccatggcctcggtctccgccgccgccgccgcggccccgtcgtccggcgcggggcgtggcagcgcgggcgccgtccagaagctctggagcgaggccgacgagatcgcgctgctcacgggcgctgccgccttcaaggaccgcaccggcattgcgccgcgcctcccggacatgggcgagctgttcgactccatcagggactccctcgcaccgcatctcgaccaggccaaggtgtactacaagctcaagcgcctcaagagcaagttccagcactccgtgccgggtgactccagcaccgcgcacgagcaccggctgcgcgacctgggcgcagccctctggggcgccgagctcacgcgccctgaagagaacgctgccgaggaggccgccgatgcagacgacattgacgggaatagggagggggccgtgaagcttcctatggttaaggaggtgcttggagagtactggaggctgaacgggcagaccatgtcaggtgtgtcactggagaaggggttggcgctgcttgggtcgcaggaggctagtgacaccgaggtcaaatggaggcgacagcttgaggcagatatgcgcatgcagatgcgccgccatgatctggaaaaggaggtctatggcctgctcatcgatgccatcaaaggcctagggccttaacttggatgcagttgatggagtacatagctggatacataggtgggatgttattttgtaggctgatcaacgcgacctcttggttgctgactgacaaacctaacacggtgtgaggtgatgtaggggggtttgcacgaatcagtggtctcaatttatgtctagttcttgaactattcaatgattgtctaagtcgcttaggtctggagatgttcatttcactaatgtatcagcttggtctgtgatcagacagccttcatactaacgctacattttctgtaaatcattcgccaagtattattgcgatgatgatgatgctgtgtttcagaatggtcaacgaggccgactgttt

SEQ ID NO: 154460 - DNA, 1373 bp, Zea Mays
atacaagctatgaagcggctcgtggcgttgctggtactgatcgcgctcccggtgcgcgcggtgcctgtctccggtgccggcgtcgtggcgctgctcacgcacgccgacgccggccgcggcctcgcgagcgccgagctcgtgcggcgaatggcgcaccggaccagggcgcgccgccggctcctgtcctcgcacaggcgcccggcgcgcgcgcgggtgcgcgcagggctcggcgccggcggcgggattgcgacgaacgagtacctggtgcgcctggcggtcggcacgccgcggcggcccgtggcgctcacgctcgacaccggtagcgacctcgtctggacgcagtgcgcgccctgccgcgactgcttcgaccaggacctcccggtcctggaccccgctgcgtcctccacgtacgccgcgctcccctgcggcgcggcgcggtgccgcgcgctcccgttcacgtcgtgcggggtccgaaccttgggtaaccaccggagctgcatctacgcctaccactacggcgacaagtcgctcaccgtcggcgagatcgccaccgaccgcttcaccttcggggacagcggcggcagtggcgagagcctccacacgaggcgcctgaccttcggctgcggccacctcaacaagggcgtgttccagtcgaacgagaccggcattgccggcttcggcagggggaggtggtcgctcccctcccagctcaacgtcacaagcttctcctactgcttcacctccatgttcgagtccaagagcagcctcgtcactctcggcggctcgccagccgcgctctacagccacgcgcacagcggcgaggtccggaccaccccgatcctcaagaacccgtcgcagccgtcgctctacttcctctcgctgaagggcatctccgtgggcaagacacggctgccggtcccggagaccaagttccggtcgacgatcatcgactcaggcgcgtcgatcacgacgcttcccgaggaagtgtacgaggccgtgaaggcggagttcgcggcgcaggtcgggctgccgcccagcggtgtcgaggggtctgcgctcgacctctgcttcgcgctccccgtgacggcgctctggcgccgccccgccgtgccgtcgctgacgctgcacctggagggcgccgactgggagctgccccgcagcaactacgtgttcgaggacctcggcgcgcgcgtgatgtgcatcgtgctggatgcggcgcccggggagcagaccgtaatcggcaatttccagcagcagaacacgcacgtcgtgtatgacctcgagaacgaccggttgtccttcgccccggcaaggtgcgacaggctcgtagcttcactgtagtcactaatagtgtttgtacaaagaaaaggtag

SEQ ID NO: 154461 - DNA, 95 bp, Zea Mays
caacacccaaagctttatttgcggagcccagacgcacagagaagtacagaaccaatgtgtatttacattttactaatatctggaaagaaagaaag

SEQ ID NO: 154462 - DNA, 1480 bp, Zea Mays
caacttgcagctcaatctcaactgagtgagaactgctgtgagaacttcgcactcgcgcgcctgcagcatgaaagactgctcgatgtctgagcttctggcctatgcgctcatcttcacgctcttgttcaccgcggcggccaccccgaccgctggcctcaccatgcgtgccgatctaacccacgtcgacaaaggtaggggcttcaccagatgggagcgtctcagccggatggccgttcgttccagagcccgcgcggccagtctttatcagcggggcggccactacggtcagccggtgacggcgactgcggtacccagctccggagagtacctcatccacttcaacatcggcacgccgcggccgcagcgcgtggcgctaacgatggacaccggcagcgaccttgtctggacgcagtgcacgccgtgccccgtctgcttcgaccagccgttcccactgttcgacccttccgtgtccagcaccttcagggccgtcgcctgccccgaccccatctgccggccgagctccggcttgagcgtttccgcgtgtgccctgaaaactttccggtgcttctacctctgctcttacggcgacaagtccataacggcgggttacatcttcaaggacactttcaccttcatgtcgcccaacggcgagggcgcgccgccggtcgccgtgtcggggctcgccttcggctgcggcgactacaacaccggcgtgtttgcttcgaacgagtccggcatcgctggcttcggccgcgggcccctgtcgttgccgtcgcagctcagggtcggcaggttctcgtactgcctcacatcgcacgacgagaccgagagcaacaagaccagcgcggtgttcctgggcacgccgccgaatggtctccgagcgcacagctcggggccgttccgatccactccgatcatacacagcccttcgttccctaccttctactacctctctctcgagggcatcaccgtcggcaagacgcggctgccggtcgactcgtcggtgttcgcgctcaagaaggacgggtcgggtgggacggtgatcgactccggcacgggcgtcaccacctttccggcggccgtgtttgagcaactcaagaacgagttcgtggcgcagcttccgctgccccgctacgacaacacctcagaggtcggcaacttgttgtgcttccagcggccgaaaggtgggaagcaggtgcccgtgccgaagctgatcttccacctggcgagcgcggacatggatttgccccgggagaactacatcccggaggacacggacagcggggtgatgtgcctgatgatcaacggcgcggaggtcgacatggtgctcataggcaacttccagcagcagaacatgcacatcgtctacgacgtggagaacagcaagctgctcttcgcatctgcgcagtgcgacaagatgtgacgaactcatcacttgctagcttgtgcgtacgtacgcgctgcacgtgtgcgtgtgtat

SEQ ID NO: 154463 - DNA, 1327 bp, Zea Mays
aacctgattgcacacgatattttctaggcaaaaacctctcatgctaccttttgtttttcgccttcttccctataaataacggccaaattgcccacaaagaaaccacccacccgcgcgccgtgcctcggttttagggcccttccctcaccgccccgcggccatgaagctggaggtcatgcccaagcccaaacagcgggtgctggaggcgcagcagagggaggaggccatggagatgagcggcctggacctgtggaagcacgagaagccgccaaggatctgccccttgcccccgtcgctcccgccgccgccgccagcgttcgacgaggcggcgctcgtgccgccgctcaacttcgccgtggtcgacgacggcatcttccgctccggattcccagggaccgccaacttccggttcctcaagtccctcaacctccgctccatcgtgtacctgtgcccggagccgtacccggggacgaacacggagttcctagaaaagaatgggatcaggctccaccagttcggaatcgaggggcgcaaggaaccatttgtcaacatacccgacgacaaaataagggaggcgctcaaagttgtcttagacccaagaaaccaacctctgcttatccattgcaagagaggcaagcaccgaactggctgtgtggtcggatgcttgaggaagctgcaggaatggtgcttgtcttcagtcttggacgagtaccatcgctttgccgctgcgaaagcgaggatcactgaccagaggttcatggagctgttcgacgtttcaagcttgaagcacctgacaccctcacactgttaaccaaggcgtgtgatcgattggtcccccaactctagtacatctcaaagcctatcttccgtcagctactgaaccgattcagttgtgaataattttggaatccgctagagtccgtgaggtagtgatgaaaccattgcaaaacgtttgtgcttgaatggtttattttcctcctgcatagcgcactgcagagcctgagaaccagattgctgtagtcgatttgcgaggggttctcttttttttttggggtacctttcgcgaggaactcgccattgtttttgggtactgaagcatgtactcgagcagctttgctaaggagaaatgaactattctcaaagtgcaaaaaggcttgtctcttcttgcatgagtgtagttagggatcctgcatattaagaagaggcctaaacagcatgttaattgcctagataggcttcagttatcccaaaacattggagaatattaattgcatgtctcggattgaagttcataaactgaaaatgacgtaaaatttccgtatattac

SEQ ID NO: 154464 - DNA, 2350 bp, Zea Mays
aacctgattgcacacgatattttctaggcaaaaacctctcatgctaccttttgtttttcgccttcttccctataaataacggccaaattgcccacaaagaaaccacccacccgcgcgccgtgcctcggttttagggcccttccctcaccgccccgcggccatgaagctggaggtcatgcccaagcccaaacagcgggtgctggaggcgcagcagagggaggaggccatggagatgagcggcctggacctgtggaagcacgagaagccgccaaggatctgccccttgcccccgtcgctcccgccgccgccgccagcgttcgacgaggcggcgctcgtgccgccgctcaacttcgccgtggtcgacgacggcatcttccgctccggattcccagggaccgccaacttccggttcctcaagtccctcaacctccgctccatcgtgtacctgtgcccggagccgtacccggggacgaacacggagttcctagaaaagaatgggatcaggctccaccagttcggaatcgaggggcgcaaggtaaatcctaaatcaattaacaatcgggccacgtgttttcaacgaaatcttctgctgctttgcggtcggttagcgatggttcatggaggcgtataattactctggagagattaaattatggtttgctttaggtaacaatcatgatgcacggcttgtttgccccgagccgacgttgttgatcatatgtcgtgttgtgtatcctaatttaagtagtatttgctgcacttctacttcaaagaaaattggagtatttgttattgtaaccgacttgcgtgaaaggggccataaatcctcttcacgtaggcaggcagtgttatctggagaattttcaaaattcacggtgaatcggtggtggtccctttcagcattgctttgattaatcaagccagctgtgctgctgactcttttcccgatattctcaagtgtttttttatttgttgggttcctatgaattcaagcctaccactagtccactaccagcgtgtacgcatcaccgcttttggcttggagctctccatgtgttgcctttatttctatttcttttcgtttccttttgtgatttttttcttcttatttttggtttcatgctatggtgatctttcgctgtttctgcagaataggcaaagcatgcaatgactttgagttattcagatcaatatttctttttagaactcccatcgtgttctactttttgtatcttgtattccctctgttccaaaacagtattcattttagctctgtatttttatgtctatattcaactagataataataaatatactaatatagacacatataaaggacacaaatattatatgaatcaactaaaatggcaaaacaatttttattttggagcagagggagtacttcctaaatgtttgctagatttctttttatgggcagttttattggttccagaggaaacaagcaattcttgccgtcaaaatatttgtttcttttctccagtttgtgatgtttcttttgattgtgtgtttgtgctgacagccacagttacactgaacttggaaactttgtcatatttttgcaatctaaaacccgtcagtcatttcgttgtttcagcactttgagctattccctgtgtttggcagcctaatctgtcatgggatcactatgttgccaccgcccagaggttcaaaactgactgtagatatctgagtgctaatggtcgtgccaaacagcatacacgattttatttagaaatgtaccgatttatttttgtgagttcgtgagaaaagctgcaagatattcttgtaacttcagcaatgacgtttgaggatagtgaatgcacgacaaaaaagtgtcgtagaaggtggattgttgtttacctcttttgacggtgcctagtactctatccgtcccaaattaaaattcgttttacttttttactagattcatacaataattaatgtatgtgttgtatatatatgtctaggttcataattatctatatgaatgtggacacaaaaatctagagctaaaacgactattattttaggatggagtgagtaattgatacactgacgtattgcacaaagggtagcacaatgtgcatccattcatatctctatccagtgtcttgttttgttgctgatcagatgaatggcactactggcatgggtctgatgcagtcttttgagaaaaatattttttcgcttaatgaatctgggcatggacaataaattgatctttttttactagaaataaagtgttgtaaccatgtatggtcttgctgtcatgtagaagtgtaaatttctgtataaatatacatgtacatataaatggaactgtttctta

SEQ ID NO: 154465 - DNA, 105 bp, Zea Mays
aaaattacggaggacgtaccacatccatatctgcaggaggtagacacaaccgcctatggacgaagaggaggacatacgacggcaagcctcacaaagctgctggta

SEQ ID NO: 154466 - DNA, 911 bp, Zea Mays
tttggccatttcccatcccataatatacgcggccgttgcgctctcccccatttcaaactcgaaccccctctccccgcctcgagcatcgaccggagggggaaggcaaggcgccgatacgttctcggaatccgaggcgaagcggggtggggatcggatggtggaggctagcgcgagcttcatggtacccggaatcgaaccctcggcctcgcctctttccggccgtctgtccccgcgtgcgcgatcgatagggtcgccgttgccctccctggtatttgctgaccatgggtgatctttgtttgcgagcgcaggataaggtcgaggcggctgcaggcgacgccgtcgtctacgggggcagcgtcggcgtcgcggacgcaaggatggaagatgagatggcgcccgtggaacccctgccggagcctcccgacgaaggcgggcccgttgcgtggcccatgccggagttctgccctcttacggtcgatggggcgctgaaggagtcgttcctggagactctgtggaaggacgctgcgccggagatggagcggcctgcgcgagaggcggacgaagcgctcagcccggaatcgcggccgtcgagcagcaagcgccaccgctccggcaccgcctcgccgtcgtccaggagcagcccctaccgcaacatcctgcaggtgttccagcagtgcaggcaggacgtcgtcggggagactctcaccaagaattactgaagcccacgagcgatatcacggcttttcgccgcttgcttgctcgagaatataacgcttgccattttgactattcttatttatgtgactgaaaagggatagggagttttttgttcttgtgtaaagatcggatataaaagttacaggaccttagtaaagaacgccatagaaatgcagttcgatatttcctttttc

SEQ ID NO: 154467 - DNA, 787 bp, Zea Mays
ccatttggccatttcccatcccataatatacgcggccgttgcgctctcccccatttcaaactcgaaccccctctccccgcctcgagcatcgaccggagggggaaggcaaggcgccgatacgttctcggaatccgaggcgaagcggggtggggatcggatggtggaggctagcgcgagcttcatggataaggtcgaggcggctgcaggcgacgccgtcgtctacgggggcagcgtcggcgtcgcggacgcaaggatggaagatgagatggcgcccgtggaacccctgccggagcctcccgacgaaggcgggcccgttgcgtggcccatgccggagttctgccctcttacggtcgatggggcgctgaaggagtcgttcctggagactctgtggaaggacgctgcgccggagatggagcggcctgcgcgagaggcggacgaagcgctcagcccggaatcgcggccgtcgagcagcaagcgccaccgctccggcaccgcctcgccgtcgtccaggagcagcccctaccgcaacatcctgcaggtgttccagcagtgcaggcaggacgtcgtcggggagactctcaccaagaattactgaagcccacgagcgatatcacggcttttcgccgcttgcttgctcgagaatataacgcttgccattttgactattcttatttatgtgactgaaaagggatagggagttttttgttcttgtgtaaagatcggatataaaagttacaggaccttagtaaagaacgccatagaaatgcagttcgatatttcctttttc

SEQ ID NO: 154468 - DNA, 2266 bp, Zea Mays
accagaacttttttttcctttccatttataatcgaaatgaatgttcattgaaggctttacattaatggacagaagtcaatacccgaaccattcatcctctgctgcggcaccaacgacaatgacgacatgacaaggatgaccatgccagggaaaaggaagaacgaggggcgaaaaatggcagcagcgagaggaaagggacaaggtagcatggtgcgttcttgactccctcagtctcgtaaagccttcgatggatctttggcgcacgaacgaatgcctaaggaaggaagaaaagaagaagaaaacctcggcgaatcctgcgaattttaagcagcaaaggaaaacgacactgcatctaatgggaaaaaaggctgttatggtggtggtggtggtggtggataggttgatggagagcgagagagttgcgccagcttcgcgggagcagcggcaggtgggctccatgaatgcgagcattcaacgggccgaccaactctcgtcagtcactgtggcggcggagggtggcgggggtgaggcgaggcgatcaagggccggcgcagttgagcgccgccttgatctgctgcacggtggtgccgatgaggctgttgacggtggcgacggactcggcgttgagcctggacgacggcaggttgctgacgaggatctggaacgcgacggtgaccacgcagcccggaggcggcggcgccgccgcgagcgggacggcgctgctggacgcgcccgcgccggacgaccccggccgcccgtccggcaggatggcgaagcccgacggcagcaaagggatgcccgacgggtcctcgccgctcatcaccacgttcgccgccgggatgtcgatcggcgagtacaccaccagcgccccggacgcgtccgcgcagctctcctggaggatcagcatgctgttctggttcgcgttcagccctctcagcagggagatgcagtttccggggttggagccgttggggatgcgcgacacctcctgaacctgattgccgtgcgacaggacgtcccactgggagcgcgcgttctcgtcgcggacgaaggcgaagacgtggtcgccggggacgggcagccatatggaggtggcggcgctgaggacgacgccgttgggctggccggagtctgtgctgcggtgcgtggagacacagacgctcacgtccgtggtgccggagagcagcgtccaccgctgcagcggcgacgagctcaggctcgcgcagaagctgctcaccatccgctgcgacagcctcatcatgctccgcttcccctccggcgtcactccggcgacgtcgtggtgcggcacgccgagggtggccagggacgcaaaccgctcgcacgcacgctgcagcgcggcgagccagcggtgcgccccgaacgcggcgccgctcagcacgaggttgcggtagaggacgttgatcgggagcatgtgctcgatctccaagtgttcgacccagatcaccttggagtagccattcgacatgtcggcgatgaggcaccccgacggcatgcgacgggagcgggacggcaccccgtagtgggcgtcgcgctgcccgtccagggagacgtcggcgacggcccacagcccctgttcgatctgcttgcagtagcgcaggaagctcagctcgcgagtcgggacgaccggcgtcatgatgtgcagctcctcgtacatcatgatcaaggactcgctcctcccacacaagccgttcacgagaacatcgacggtctgcgccttggacacgatgccggggaagaattccatccacttattcgtgtccatgaagacgtcgacgagcgcgacggcgctcatgaacacgaggcccgagtccctggacccctcgacgttgatttccggtgggcggaacgcgccgccgggcttggcgaagaggctgtcgtaggtggcgacgtcgagcacctccctcgcgtccccgggcatgccctggacccagatttgctcgccggcctgcgcgagccggatgagctcgtccatggcgcgcgtcgccatgtccaccatcatggggcgctccatttccgtcacgggcgccggcatatggtacggcagcccggacgagcaaccgctgaggaggtcgaggtccagcgacggcccgccgaggccctgcccgggcatcccgcccacggacaggtccagcgacgacacggacatggtcggcaccggcggcatctgcgtgaacggccggccgaggtacttggacgtgatgctcgacacccggtccagctgcgcgcccgtcacccgcgagaatga

SEQ ID NO: 154469 - DNA, 838 bp, Zea Mays
gacattaggggaaatttctcctctatggctttctccgaattcttccagatctgggatcttgttcgggaggttcaactgttatcagatgttccagatcagcacatatggacaccttccccctcaggctcttactcgtccaaatcggcgtatgatcgttttatgatgggaagggtgggttttgcgcctgctgagcttatttggagaaactgagcccctccaagatgcaagttcttactttggctcgcgactcgagataggtgctggactgcagatcgcttggcaaagaggggtttggaccatcctgttcaatgccccctttgtgatcaagaggatgaaacggcgcatcgtcttttaatctcttgtgtcttctctaggaaagtgtggtttaggattttctccctggttaatctgcggctgttctcccccgcaagggatgatttgattttccaagattggtgggctaagttggaggccaaggtcccttatgcgctgcgcaaagggattaactcccttgtgatgttggtggcatggtggctttggaagcagcggaataaatgtgtgtttgagggggatgctcctagtggcaaccagattattcagaatatcaaagacgacgctcagaggtggtgtctcgcgggtgccaaagatctgggcaccatctggccatagtttaggggcagctttggctgtcttctagatggatgtttatttttattttttattttattttatttttattttttgttgtttctctgtactctggtcttctttagaccattggtgtttcttctatcttaatatatctaatgtgcagttctcctgcgcgttttagaaaaaa

SEQ ID NO: 154470 - DNA, 433 bp, Zea Mays
gcacaagtggtcgtgttcttagcgagcactgcagccgacttactccagagatcttggaggcgcttatgcgctcacaagattggatgtgacgcaagtatctagatgcatctaatgctgaccaacctgaaacattttggagttgccttcaaaagatgcaggaagggatgcagaagcttttactctaagcaacaagactggaattggaagagaaggatgcccttaagctccaacagcttagaagtcttatatattcaaatattaagtattgtgtattgaacaattagatttgaaggcatgattttgtccacatttttgtagaatcaatgttatgttttgtgtgatttgaatgcatgatgttgccatttaatgttgaatattgttgaacctgtgataaaattatgttgggttcgatacaattgttatgctggtactt

SEQ ID NO: 154471 - DNA, 583 bp, Zea Mays
ccgggtcctcgtcaaccaagtgctcggccacgccgtggtgacgacgacggcggcgacggtagcggcggaggcggcagagtcaacgtgtcaacttaattatacatggatcagaaccggagagcacatcagacgcgccggccgggttcctctctggcccctgtgcacaagtcaacttactattgtttcgttttttttcattgcttgattgtatactacgggatgtttaccagatggattgctgcatgcatgtgtatgtagtgtaataagcgggtcggtcatcggtcgctgtcgtcgtcgttgctattcctctaccgttgtatataaaaacggcgtgccatgtatgtgtgtgtttggctcgactgattatattagacgatcattcatccgtgtctgatctaccgtacgtattattctttattcagtctgtatggtgaactggtgcgatggtcgatcgaatgttagctagctagctgctgattttttttcgataaggaagattttcattgcatttaaaagtttcatacaaatcatctcccggcctctacaaccataagatgcacacagcctagaaaagaaagaaaaa

SEQ ID NO: 154472 - DNA, 243 bp, Zea Mays
atggtcgtccccggcgccgcgcgtgaagaacggaccaacaagagggcgttcgtgcggaagcgcgggcaggtgctcaagcgggtgctgcggagcatcctcgcctggctcccgcgctgccgcctgcagctgtccgcccgcaagaatcgcggccgccgcggcaaccgcgtccctgcccaccgaggccacgtcgagccggagcccgacgtcgccgacgacgacgacgctcctccgcacacccactag

SEQ ID NO: 154473 - DNA, 1295 bp, Zea Mays
ctccatctccactccacccttacccggctgcctgcccctcccctctctcctctctctctctctctcccatccaggcctcctctcccctctctgcctgtcgcccatgaggatcaggcggcggccgcagcccgccgcctcagatctggccgcatccaccgcgccgcagatcccgccgccgaatgccgcgaggaaccgcgggtggctgctggcaggcgagggcgagggcgaggacgaggatcgcgaggccaggatgctgcgtgcgagcgcggatctcgcgcacgaatctggagccagcaggcgcatggcattgccgcaggacgacaatgcggcggccgtgctggtggtggatcgcggcggcaggagcttgggcgcaccgcgtggcgctgctgatggccgcatgagaatcagtgcggtgaacggctacgatccggcggcggcggcggtgaaggcggaggcggaggcacgacgggagacgagcaacggctccgtgcatcccgccgcgccggcgccggcgccgcccgtggccgtggcggcggcctccaaggacgaggggaggaagcagcagcaggccgccggcaagaagcggcgcggccccgcggtgctgctggaggggtcgcggtgcagccgcgtgaacgggcgcgggtggcggtgcagccagccgacgctggtcggctactcgctctgcgagcaccacctcggcaagggccgcacgcggaccgcggcgggtgccgccttggcccgtggcgccgccgccggcggcgtgggccggctcgggcgcaccgagcacggggccgccgccgccatcgccacggcgccgccgctgcccaaggccgagggccccagcctgccgggctgctagcaggctagctaggcgggtcgggactgcggaactctttcgtatcgtccgatcggtgtgggtggcggtggtggtcgtcgctcgtcgggcgatgtgaaccctcgcccgccgcgtttcgtgggagtttggatgtcggcggtggcatggcatggacgcacagtgaagcgacccggcgttcgtggcgtggtgggtctctcgctctctgtctctgctgccgaccgacgccgtgccagaattattgcggctatatatatatacaatacacatatgcgagttagttccgcgcaacttgtatcattcatcggtgcaacttggggggtgtaaaaaattgctggaggcggcgagcatgaaaaaatgtagagaaacggagaactgcaagctgggattcatgcaatcaatcaatcaataacgctacgggcgggcacaccttttcgaattc

SEQ ID NO: 154474 - DNA, 3211 bp, Zea Mays
caaaccactcgccatctcacctcaattgccaacagcccaccaccaccacggccagtctcgctttctagtcgcttccgcgtcctccactcgccgcgctccccatcccggagcgcggcacaccgtagccccgcgccgcagcggctggccggcatgaagagcatgtggaagcagagcggcggcctggtgtgcgccgacgccggccccctcagccctctcggaggccgctcgcggcgccgcacgaggctgacgctgtacgcggtcgcctttgccttcgccgcgttcaccgcctacgtcgccttcgcctcgcctccctccgcgggcgccggcgcctcgtggttcggcggagtgtacgcgtccacggcgccgtaccgctcgcagatttccagcctcttctcgtccatcttgcccgccgactcgcccgccccctcgccagagccgctgcgcgtcacgttcggcggatcgggcggaggcggtggccaggtgacccgtgatgcgagcactgtgcaagttgggagcgcggcggaaagcatcagctctgccaaggctgggtctagtaagcagctgggaactggaggcggcgctccgatcggcaatgcgggcgctcggagtgtacctccggcagtccatttgccaggcactggaattggcggaggcgcagctccaacgaacagttccgcctcaggtgtcggtgctccgaacgacgcggtggatctgaataaacgaagcgacggaggcgtttctacagaaggcggcagtggatccccggccagtagttcagccgtgcatggaaccgccgcggaggtccgcgagaatagcgttaatgggtctaataagcagtcgggaaatggaagcggagccctgagcaatgctgctaccggacatggcagcactgtcagagctgaggccaaagttgcaagtgatgtttcaaccaatagttctgctgggagtggtagcttggggaaggtagatttgagcaccggatcttctaataatctggcagggagtggaagtgtcgtttcaggcagtggttcggatgctggaaatagaagcactgtaaagcctcatcctggagatgctgttggggcagggagcagggggtcttctggaaacggcacaggtaccatggttgatctgaataaaggttcagatgcccagccaggaaatcgaaatggagatgcaagccatcaatcagatgtaagttctggtttcgagaagagtaaaggtgcaaaggttgtgacgacagatgctcaaccagacagtggaagtggagatgcaagccataaatcacctggaagttctagtccggcaaagagcattgcaggagatggcgaagttgagggtagtaagagaaacgtgagtgttgttccaactgttaatcaaactgggagtccggcatcggtagggcagaaagatgttggttctcccaggaacaacaacacagttggagcatcccccccagtgaagaacccggaacagacctggagccaagttgctcccggcgggagcagtggtacagtgaataatccgaaaggaaatgctgctgctcagggcagtgctggttcatcagagaaccattcggcccaagtaaactcctcaaaatctggaaataacagcaagggtagcaggtcatcaataacacaggatggtggttctggtggaaataagaaaggtgattggtacaaggaaatggctagttgcgatatgtttagtgggaattgggttagggatgactcataccctctctaccctgagggatcgtgtcctcacattgatgagcccttcgactgctacctcaacggtcggcgagatctagcttaccagaagctccgctggcaacccagtggatgcagtatcccaagattgaacccaaccgatatgttggagaggctgagaggaaaaagactggtgttcgttggtgattcgctcaataggaacatgtgggaatcccttgtgtgtattttgagaaattctgtcaaagacaagaggaaggtttttgaggcatctggcaggcgcgagtttaagacggaaggctcatactctttccttttcacggactataactgcagcgtggagttcttccgctccccattcctagtccaggaatgggagatgcaagtgagcagtggaaagaaaaaggaaactctcaggcttgatctggtagagcaatcgtcattgaagtacaaggatgcagactttatcattttcaatacggggcattggtggacacatgagaaaactgctcttgggaaggactactatcaagaaggtaaccatgtgtataatgagctgaatgtcatggatgcctttcataaagctcttctcacctggtccaagtggatcgatgccaatgttaaccccagaaaaactctggtgttattcagaggctactcagcatctcatttcagtggcggacaatggaattcaggcggtggctgtgacaaggagagtaaaccaataaccaacgatcagtacctttcaacctacccaccaaagatgagcatcctggaggacgtgatccacaagatgaaaactccggtcgtttacttgaacataacgagaatggctgactacagaaaggatgcacacccttccatctaccgcaagcagaacctgactgacgaggagaggagatcgcccgaaagatttcaggactgcagccactggtgcctccctggagtaccagattcctggaatgaactggtttatgctcaacttctgatcaagcagcatcaaatgcgccaacaataaaggcaactgcggttttttgctgtgtgcctgtatatgatctgttgttttctaggataaatggataatagtcaacacggtggtcgaagtaaagtcgacatgagaccgaggattttcttaaatcccggcttgttcgctgcggctttaatccggccgtggcttctacagtattttgtctctctatagattgcaactgcggctgccagccagctgatgaattcctcagttagggctacctcccaatacccacataaattcctcagtagaggtttctgggacatcatattgtaaagttcatgtctatcggtaatctgaaataatatgaagaatagtatagatgtgatgatatagatgcccctgtgtcttctgtgattctctacctgctctcatgtatgtttctgataatcaaggttcctatggtatagactttcattacagttaagcaggaaagaaggctgatggattg

SEQ ID NO: 154475 - DNA, 935 bp, Zea Mays
cgcaacgctttggtagccccattctcatgtattcgtgtgtgtaagggagtgggtgacatcatgggcgcgatccctgtgttgccgatcgccattgagctatgcattcgacaaccggcgtcaacaattggtaccgaggctcagtgtatattctacgacagtttcgtgagcccacatcggacgtagtgacaagaaggatcctgtcgtcaaggtgatgtccaagggaacgccaagacggaaggcggagctagaacatctggtgctcatgttgtccacaattaatgccatgcacatcgagacgaggtcgctcgacgtcatgacatccagggtgtgcatggctgatcaagttatgcatcttaatgagaagaagatgttccctactgatcacgacaaaggcaacaatgtatgggtccttgacacaggggctagcaatcacatgaaagggtgtctcgaggcgctcgcgccactcaacatatctgtgcgcgacacaatgcgttttggcgatggatcactcgttgagattgagggtattggctttatgatgctctagaccaagacaaagagctataaggtgctcgttgaagtctactttattccaaaattgaagagcaacattgttagtctaggtcaattggaggagggggctgcaagattgtggttgaggatggattctgcaatgtgtttggcatcgagcgctcactgctatggcatgtttgctatgaacacctcaattttcaggcactgagctcggcacaaaagagtaaagcacttcaccacgacgccatacataccacaacaaaatggtgtcatagagcaccataatcatacactaggggtgtaatcggatcggatacgaacggatactactcgttccatatttgtatccatattttctctcgaataaggatattatcgaattgtattgaataagatttaaa

SEQ ID NO: 154476 - DNA, 327 bp, Zea Mays
atgggcaacgtggaggcgacgacgacgtcgtccatcgtggcaccggagcttctgcttggcgacgcgctgctcaaggtggccgtgttcgcggtggtgcaggcgctggtctacctgatcctgcgcaagtcgtccggcgtgttcgccccggcggcggggatgacggccaggtcgttcagcttccgcccgatgcggagcatgagcgtccgccgcgtgctggccgccttctccgacgtccccgtcggcgtcccggagtcggaggaccgcgcgccgtcgccttcgccgatggatcccggtgctgaacctgctagcgagtagcgagtgagtacg

SEQ ID NO: 154477 - DNA, 2440 bp, Zea Mays
accaagccaaccccgcttctattccgcgtggacatatcgacaagacagccagcggcgagaagtcgacgccggcagtctggtgcaacacagcgatccagtaggtaggtcaaaccgaggcggcgacgaagtacgaacagagggcaggacgcagtcagcgcggcgcgcccaggccccgaggccgagcgatctggtgacggcacggcagcatggccgaggcgacgggccacggcggccgcgtcgtcgacctctcgggggccgagatccgcggggacctcgaggatcgcaacccgcccatcttcctccctcgccagcccgccgcgtccccgctcctcgccctcgacatcggagggactctgatcaagctggtgtacacggcgagccgcggcggaggggccgacgggacggacctgcgcttcgccaagttcgagaggcgacgcctacaggagtgcttcaacttcatccgggcggaggggctcctcgccagcaatgctggcggagaaggcgtgaccctgaaggctacaggtggtggagcatataaatttgctgacgatttcctggagaaactaggtgtttgtcttgacaagcttgatgaaatggatagtgtcgtttctggagcaaactttttgttgcagagtattcctggcgcagccttcacacacatgaatggactgaggaatccagtagatgtttccccaaataatttgtttccttaccttcttgtcaatattggctcaggagttagtatactgaaggttactggaaacagaaagtttgaaagggtaactgggacgcacattggtggtggtaccatgtttggtttagcaaaacttttaacaggctgtaagagctatgatgaattcttgcaattaagccagaaaggggacaactttgttcttgatttaattgtcaaggatatatgtggagagcttgtctgccagaagcaagggctttcaacatcaactcttgcttctagctttgggaaagttattacttctaagaagaagctgacagactacaagcctgaagaccttgcatccacattgttgagcgcctttacctataacattgcacaaattgctttccttgttgcatcacttttgggcctccgaagggttttcttcggtggatcatatatacgtggtcacaaaagcacgatggaaaatatttcttatgcaattgatttctggtcacagagccaaatgcaagcagtatttttgcgacatgaagggtatttgggagcacttggtgccctgatgagttatggggatccaagtggtgaaaatcttaccctcgaggagaaggagcctcatcacgaatcagcaccagttgatgggacatcagcggatgaagagagtgatagcaacatatttccttaccttcttgtaaatattggatcaggtgtcagcatgatagaggtaattggtaagggaaagtttgaaagaattataggatcccatctaggcggcggtactatccttggtcttgctaggcttttgactggttgttcaagttacgaagaattcctggagttgagccagaggggcaataatctgtctgtcgatttgactgtgggggacatatatggggaagaaggttatccgaagattggccttccagcatccactactgcggctagctttggaaaagtgaactcaagcaaactttctgagtataaagtagaggatcttgctgcagccttactgaattctttcacatacaacattggacagatagcctactttgtggctaatctttcaggcctgaagagaattttcttccgaggtgcttatgtctgtggtcatgagaagactatggacaagatttctcgttccctaaaatattggtccaaaggtgaagttcagacgacatttctatgccatgaagggttcttgggaacactaggtgcattttggagttatgagaacatggggatcgacagtttggcggcacatgaagtcatcagggaagtcttgcttggtgcaccatacacagggcaattcccatctttacctgtcactcaacaacaggagaatggagaacatggtactctcgaaggggaagtagaaagcttacgacatgacaatgccttgctgaaggctgaggttgagcgattacaaaaggagaatgcgttgctaagagctaagttggtaagatcaggcgagacttcaacattgtgatttgtaacacaataaaaagggcgagccgcagcttgttgtaaattttatctgtttagaaaatggctcaaaatgtaactcatataggaaaactgaattctggaaaagaaatgccaattagcattgttcatctagtgagccttgttgtataattatttatatattctttatacaagagcctatgtatttgctccgttcatgtaatcttgttcctgtaaatgttgtataaatagttaccaaaatccagtaagtatccggctttgtaa

SEQ ID NO: 154478 - DNA, 2504 bp, Zea Mays
accaagccaaccccgcttctattccgcgtggacatatcgacaagacagccagcggcgagaagtcgacgccggcagtctggtgcaacacagcgatccagtaggtaggtcaaaccgaggcggcgacgaagtacgaacagagggcaggacgcagtcagcgcggcgcgcccaggccccgaggccgagcgatctggtgacggcacggcagcatggccgaggcgacgggccacggcggccgcgtcgtcgacctctcgggggccgagatccgcggggacctcgaggatcgcaacccgcccatcttcctccctcgccagcccgccgcgtccccgctcctcgccctcgacatcggagggactctgatcaagctggtgtacacggcgagccgcggcggaggggccgacgggacggacctgcgcttcgccaagttcgagaggcgacgcctacaggagtgcttcaacttcatccgggcggaggggctcctcgccagcaatgctggcggagaaggcgtgaccctgaaggctacaggtggtggagcatataaatttgctgacgatttcctggagaaactaggtgtttgtcttgacaagcttgatgaaatggatagtgtcgtttctggagcaaactttttgttgcagagtattcctggcgcagccttcacacacatgaatggactgaggaatccagtagatgtttccccaaataatttgtttccttaccttcttgtcaatattggctcaggagttagtatactgaaggttactggaaacagaaagtttgaaagggtaactgggacgcacattggtggtggtaccatgtttggtttagcaaaacttttaacaggctgtaagagctatgatgaattcttgcaattaagccagaaaggggacaactttgttcttgatttaattgtcaaggatatatgtggagagcttgtctgccagaagcaagggctttcaacatcaactcttgcttctagctttgggaaagttattacttctaagaagaagctgacagactacaagcctgaagaccttgcatccacattgttgagcgcctttacctataacattgcacaaattgctttccttgttgcatcacttttgggcctccgaagggttttcttcggtggatcatatatacgtggtcacaaaagcacgatggaaaatatttcttatgcaattgatttctggtcacagagccaaatgcaagcagtatttttgcgacatgaagggtatttgggagcacttggtgccctgatgagttatggggatccaagtggtgaaaatcttaccctcgaggagaaggagcctcatcacgaatcagcaccagttgatgggacatcagcggatgaagagagtgatagcaacatatttccttaccttcttgtaaatattggatcaggtgtcagcatgatagaggtaattggtaagggaaagtttgaaagaattataggatcccatctaggcggcggtactatccttggtcttgctaggcttttgactggttgttcaaggtattatccaattagtggtataagacttccttatggctagacaattaatattttttcctttcagttacgaagaattcctggagttgagccagaggggcaataatctgtctgtcgatttgactgtgggggacatatatggggaagaaggttatccgaagattggccttccagcatccactactgcggctagctttggaaaagtgaactcaagcaaactttctgagtataaagtagaggatcttgctgcagccttactgaattctttcacatacaacattggacagatagcctactttgtggctaatctttcaggcctgaagagaattttcttccgaggtgcttatgtctgtggtcatgagaagactatggacaagatttctcgttccctaaaatattggtccaaaggtgaagttcagacgacatttctatgccatgaagggttcttgggaacactaggtgcattttggagttatgagaacatggggatcgacagtttggcggcacatgaagtcatcagggaagtcttgcttggtgcaccatacacagggcaattcccatctttacctgtcactcaacaacaggagaatggagaacatggtactctcgaaggggaagtagaaagcttacgacatgacaatgccttgctgaaggctgaggttgagcgattacaaaaggagaatgcgttgctaagagctaagttggtaagatcaggcgagacttcaacattgtgatttgtaacacaataaaaagggcgagccgcagcttgttgtaaattttatctgtttagaaaatggctcaaaatgtaactcatataggaaaactgaattctggaaaagaaatgccaattagcattgttcatctagtgagccttgttgtataattatttatatattctttatacaagagcctatgtatttgctccgttcatgtaatcttgttcctgtaaatgttgtataaatagttaccaaaatccagtaagtatccggctttgtaa

SEQ ID NO: 154479 - DNA, 1974 bp, Zea Mays
gtttttctttattcattatatattaggtaaacaatctgataaaattacattttatcttcagcagtacaccctattaaggagtggaagccaaaatcgacaaagaagtcaccgaccattgatgcagataacagtatagctgatgctacatctccttcagctagcaactgtgaaagtgccaacacactgaatgtaaacgaattgcctgaaaaaatttcacaaactaacttgcatgaggtggagcatgttattattccggaacatcttcgtgtgccagaatatgagcagaccaagttaaggtttggcagtttcacatctggtttggattcggaacaagtatctgcctcgaccccacaagacactgagcaaccagaacatgtacaagagtcagttcaacaggcaagtgaatatgatagtttggatgctggacctgatgacatggatgagcaagctagatcttcacaacacctgtccacatcaacggctgagatttccttgcccccatctgaggatagtgatcgaatgagtggtcaagtagagaatgatgatggcctgggcttagttcagagcgacactccaattggagcagcagacggtgacaatacccaaatcacctcgactttgactgctttttcggcttatagtcatgaagatcctaatatgcatacaaacaatgaggcccagttatacggactggtggagcctaatgtacatccgcaagtattagcttcctcttctcaggggtacccttcagaaaacccggaagcagataatgctgtgcaagtcttcaggatgccagaatctaatgttcactcacaagttctcccttccacatctgaggctttaaatccacagattgtgagcaacagccctgtttcgatctcgtcacagcagcagcagcatatctcccagcaacaagccgcagcacagatgtaccctcaaatgcatgtgcagcattttccaaatttcatgccatatcgacaactctattctccagtttaccccatgcctatgccaaactattcgccaaatgtcccttatccatcaaatggaaataattatcttcagatgcccagtggaggttcacatttaactgcaggaagcgtgaagtatggagtttcacagtttaaaccactcccatctggtaacccttctggctatggaaattacactcatccagctggttttacaatgggttctcctggtgttattggagccacagttggtgttgatgatgtcaataggatgaagtacaaggacaacatttatgcctcaactccacaggtcgagacatctgacatctggattcagcaagctagagagatgccacctatgcaggttccttcatattacaacataccaggtcaagcaacaccaggtgcttttgtgccaaatccagcaaatgcatctttcaatgctacagctcaatcctctcatgtgcagttcccaggcttgtaccatcctcagcaacctccctctattgtaagtccgcaccccatggtgcatcaacaggtgccatcggccattggtcccaatgttggggttggggtggcagctccaggcccgcaagttggagcttatcagcaaccacagcttggccatatgaattggagacccagcttttgaagaaggtttcttaattatctgtaattagggggggtcacaagagcctttatgtaacaacagtaggctccttttaacaggaagcacctttgtttttagtgcagctctttctgatctatttaagctataacgaggtttttgttagcctttccatcccccaagtgaattcagtatcccatctgaactggtatgatgtagattatgagttaaaacattgggcaaaatctcgcacgagcccaaggttgagtgccttccattttgttatattgttttgtttcctaatcaaatttgtaggttgagtgccttccattttgttctgatgttcgtttcattatctgatttatgtacgcataa

SEQ ID NO: 154480 - DNA, 2707 bp, Zea Mays
gtttttctttattcattatatattaggtaaacaatctgataaaattacattttatcttcagcagtacaccctattaaggagtggaagccaaaatcgacaaagaagtcaccgaccattgatgcagataacagtatagctgatgctacatctccttcagctagcaactgtgaaagtgccaacacactgaatgtaaacgaattgcctgaaaaaatttcacaaactaacttgcatgaggtggagcatgttattattccggaacatcttcgtgtgccagaatatgagcagaccaagttaaggtttggcagtttcacatctggtttggattcggaacaagtatctgcctcgaccccacaagacactgagcaaccagaacatgtacaagagtcagttcaacaggcaagtgaatatgatagtttggatgctggacctgatgacatggatgagcaagctagatcttcacaacacctgtccacatcaacggctgagatttccttgcccccatctgaggatagtgatcgaatgagtggtcaagtagagaatgatgatggcctgggcttagttcagagcgacactccaattggagcagcagacggtgacaatacccaaatcacctcgactttgactgctttttcggcttatagtcatgaagatcctaatatgcatacaaacaatgaggcccagttatacggactggtggagcctaatgtacatccgcaagtattagcttcctcttctcaggggtacccttcagaaaacccggaagcagataatgctgtgcaagtcttcaggatgccagaatctaatgttcactcacaagttctcccttccacatctgaggtagcactgtattgttattttaaattgctctcctgcagtcccttttatattattattacttgtaatcatttggatatattcattaggcagcttaacttataacaatacatcgtagtctactagtcttggcccatcatcatgttgaccagggctgctaatgagtccagttttaatccacttagtttccacatttaataatctctacgtggttctcttgttattgcattattgcttctaaaatggttctgcttcaaggagttcaacacggggcactttgctggtttataattgaggaaaattagtctgctctgatataaaatttgagaatccagtcttggttttttgtgttttgtctcaggttgaacgatgactgacaattagactgccacaatttctgtcttctgttttcctagaacactcttctattcactgttgatcacagtataaatacataacctgttggccggctaagtcactcaggtagcaaaagtacatgaggctatctaccaattctaccaactaactgggccaaaccaccaaactacccatagagccaaaacctacaatttctgctactgttctacatacagtcagaggtgaaaacaaaggagcaggccctgtttcctgtacttctatgacaaaagaaaaagagtggatagtagctgattatctaacatattcttgcagtccaagaaaaaatgaagacaaatttgcttcctctttgtgtaacgcttagtgaatatcatgattaaattgtgacatgtgttgcaggctttaaatccacagattgtgagcaacagccctgtttcgatctcgtcacagcagcagcagcatatctcccagcaacaagccgcagcacagatgtaccctcaaatgcatgtgcagcattttccaaatttcatgccatatcgacaactctattctccagtttaccccatgcctatgccaaactattcgccaaatgtcccttatccatcaaatggaaataattatcttcagatgcccagtggaggttcacatttaactgcaggaagcgtgaagtatggagtttcacagtttaaaccactcccatctggtaacccttctggctatggaaattacactcatccagctggttttacaatgggttctcctggtgttattggagccacagttggtgttgatgatgtcaataggatgaagtacaaggacaacatttatgcctcaactccacaggtcgagacatctgacatctggattcagcaagctagagagatgccacctatgcaggttccttcatattacaacataccaggtcaagcaacaccaggtgcttttgtgccaaatccagcaaatgcatctttcaatgctacagctcaatcctctcatgtgcagttcccaggcttgtaccatcctcagcaacctccctctattgtaagtccgcaccccatggtgcatcaacaggtgccatcggccattggtcccaatgttggggttggggtggcagctccaggcccgcaagttggagcttatcagcaaccacagcttggccatatgaattggagacccagcttttgaagaaggtttcttaattatctgtaattagggggggtcacaagagcctttatgtaacaacagtaggctccttttaacaggaagcacctttgtttttagtgcagctctttctgatctatttaagctataacgaggtttttgttagcctttccatcccccaagtgaattcagtatcccatctgaactggtatgatgtagattatgagttaaaacattgggcaaaatctcgcacgagcccaaggttgagtgccttccattttgttatattgttttgtttcctaatcaaatttgtaggttgagtgccttccattttgtt

SEQ ID NO: 154481 - DNA, 3034 bp, Zea Mays
ccccaaccactccgaccaaaccaaaacccagacccactctcccccgaaacccagggcctcgtgtcgtttgatgcgattccggcggcgatcgcgagcgcctccaccaccacccgctcccccgtcctagcgcgcgtttgggcgatctcccctctcgcggcgggcatggctggcggcggcggcggggcacgcggctccgacagggcgggggcggcgcgctctcccacaaccaccacggcgatacagtcgaccatccaatcgatcaaggaggtcgtcgtcggccactccgacgccgacatcttggacaccctccgcgaatccaacatggaccccaacgagacggcgcagaagctgctcaaccaagatccatttcatgaagtaaaaagaaaaagggacaagaagaaggagagtgctggccagaagagctttgctgatagcactgcacaagttgagcaaaactcacaatggatgaagccacatacacaaaagatggaaaatgatcaaagaactcccaagcagggtcagatgtcaggccctactcgtgaatttcgggttgtgagggacaacagatttcaacatggtgtggtggagaacagaccagaattaggacacaaaggttcagcaaatgtacaaatgtctgataggagtactcttgttcagtctggtcgaaaccgctcacctgctacaacctcaggtgaccagatcacacatcaaaatgctatgcagaactccaactctgacacaacccaagggaagagggatgctcaaggtactacagagaagcatgtgaagccatatttgaagaaccctcagaatgagcagcactttccaggttctgacccagctcatgggtcagccaatgttagaattgccggtggaactgttggacctgctcaacgtcatgttggagttgttaattctactaggcaatttgctgcccgttcgggttctcagatgcatgcaccaagtggttcttatgcaaatattcagagggggagttttacctcagtaggggcatctgggcgttactcagctttcatgtctagaaacattcaacaaaaccagagacctgatacaatgtttcgtggaaggcccactgttagatcttttgttgcacaaaacaccaacagatatcaccagggttctactagcaaccaaaaagcagtacaccctattaaggagtggaagccaaaatcgacaaagaagtcaccgaccattgatgcagataacagtatagctgatgctacatctccttcagctagcaactgtgaaagtgccaacacactgaatgtaaacgaattgcctgaaaaaatttcacaaactaacttgcatgaggtggagcatgttattattccggaacatcttcgtgtgccagaatatgagcagaccaagttaaggtttggcagtttcacatctggtttggattcggaacaagtatctgcctcgaccccacaagacactgagcaaccagaacatgtacaagagtcagttcaacaggcaagtgaatatgatagtttggatgctggacctgatgacatggatgagcaagctagatcttcacaacacctgtccacatcaacggctgagatttccttgcccccatctgaggatagtgatcgaatgagtggtcaagtagagaatgatgatggcctgggcttagttcagagcgacactccaattggagcagcagacggtgacaatacccaaatcacctcgactttgactgctttttcggcttatagtcatgaagatcctaatatgcatacaaacaatgaggcccagttatacggactggtggagcctaatgtacatccgcaagtattagcttcctcttctcaggggtacccttcagaaaacccggaagcagataatgctgtgcaagtcttcaggatgccagaatctaatgttcactcacaagttctcccttccacatctgaggctttaaatccacagattgtgagcaacagccctgtttcgatctcgtcacagcagcagcagcatatctcccagcaacaagccgcagcacagatgtaccctcaaatgcatgtgcagcattttccaaatttcatgccatatcgacaactctattctccagtttaccccatgcctatgccaaactattcgccaaatgtcccttatccatcaaatggaaataattatcttcagatgcccagtggaggttcacatttaactgcaggaagcgtgaagtatggagtttcacagtttaaaccactcccatctggtaacccttctggctatggaaattacactcatccagctggttttacaatgggttctcctggtgttattggagccacagttggtgttgatgatgtcaataggatgaagtacaaggacaacatttatgcctcaactccacaggtcgagacatctgacatctggattcagcaagctagagagatgccacctatgcaggttccttcatattacaacataccaggtcaagcaacaccaggtgcttttgtgccaaatccagcaaatgcatctttcaatgctacagctcaatcctctcatgtgcagttcccaggcttgtaccatcctcagcaacctccctctattgtaagtccgcaccccatggtgcatcaacaggtgccatcggccattggtcccaatgttggggttggggtggcagctccaggcccgcaagttggagcttatcagcaaccacagcttggccatatgaattggagacccagcttttgaagaaggtttcttaattatctgtaattagggggggtcacaagagcctttatgtaacaacagtaggctccttttaacaggaagcacctttgtttttagtgcagctctttctgatctatttaagctataacgaggtttttgttagcctttccatcccccaagtgaattcagtatcccatctgaactggtatgatgtagattatgagttaaaacattgggcaaaatctcgcacgagcccaaggttgagtgccttccattttgttatattgttttgtttcctaatcaaatttgtaggttgagtgccttccattttgtt

SEQ ID NO: 154482 - DNA, 3621 bp, Zea Mays
ccccaaccactccgaccaaaccaaaacccagacccactctcccccgaaacccagggcctcgtgtcgtttgatgcgattccggcggcgatcgcgagcgcctccaccaccacccgctcccccgtcctagcgcgcgtttgggcgatctcccctctcgcggcgggcatggctggcggcggcggcggggcacgcggctccgacagggcgggggcggcgcgctctcccacaaccaccacggcgatacagtcgaccatccaatcgatcaaggaggtcgtcgtcggccactccgacgccgacatcttggacaccctccgcgaatccaacatggaccccaacgagacggcgcagaagctgctcaaccaagatccatttcatgaagtaaaaagaaaaagggacaagaagaaggagagtgctggccagaagagctttgctgatagcactgcacaagttgagcaaaactcacaatggatgaagccacatacacaaaagatggaaaatgatcaaagaactcccaagcagggtcagatgtcaggccctactcgtgaatttcgggttgtgagggacaacagatttcaacatggtgtggtggagaacagaccagaattaggacacaaaggttcagcaaatgtacaaatgtctgataggaggtttgatgtttctttgttccgtgcctatggtacacgaacaaatcctatgaaattgcagggtacatttgttgagtctggtcgaaaccgctcacctgctacaacctcaggtgaccagatcacacatcaaaatgctatgcagaactccaactctgacacaacccaagggaagagggatgctcaaggtactacagagaagcatgtgaagccatatttgaagaaccctcagaatgagcagcactttccaggttctgacccagctcatgggtcagccaatgttagaattgccggtggaactgttggacctgctcaacgtcatgttggagttgttaattctactaggcaatttgctgcccgttcgggttctcagatgcatgcaccaagtggttcttatgcaaatattcagagggggagttttacctcagtaggggcatctgggcgttactcagctttcatgtctagaaacattcaacaaaaccagagacctgatacaatgtttcgtggaaggcccactgttagatcttttgttgcacaaaacaccaacagatatcaccagggttctactagcaaccaaaaagcagtacaccctattaaggagtggaagccaaaatcgacaaagaagtcaccgaccattgatgcagataacagtatagctgatgctacatctccttcagctagcaactgtgaaagtgccaacacactgaatgtaaacgaattgcctgaaaaaatttcacaaactaacttgcatgaggtggagcatgttattattccggaacatcttcgtgtgccagaatatgagcagaccaagttaagtgtacaagagtcagttcaacaggcaagtgaatatgatagtttggatgctggacctgatgacatggatgagcaagctagatcttcacaacacctgtccacatcaacggctgagatttccttgcccccatctgaggatagtgatcgaatgagtggtcaagtagagaatgatgatggcctgggcttagttcagagcgacactccaattggagcagcagacggtgacaatacccaaatcacctcgactttgactgctttttcggcttatagtcatgaagatcctaatatgcatacaaacaatgaggcccagttatacggactggtggagcctaatgtacatccgcaagtattagcttcctcttctcagccggctgtttggaatggtgcacctgcaatccatagagacaaaaacactgtagaagcagttaggtctgggcaaaaaattcgtaacccgatacctgaacccgaattacctgcaacccggtttttatttgtgaaattcggagaaagcattggctacatcattggaagaattttcgggtacttcggaaatacccgatacctggacccgaattttcgggtaatataaaacccgctatgatttcgggtaacaattctcggaacctgaaatttaaattactcgaattacccgaatgccgaggcctagaagcagtagaagaacggtacggattaatgccaaatgaacaggctataaatcatgattattagaacggaattcaattcaaaggatccaaacggggccttatagtatttgtgttacaatacttagtacttttgaagccaaacaaccacatcttcatatgtccaacttaaatgaccctaaataaacttgtggagaacgagaatattatggagcttgactgcttgtatcccaaatcttcatatatccttaaatggagtaatatggatgaaatgtactatttagtgcttacagtcccttactcccatcaggggtacccttcagaaaacccggaagcagataatgctgtgcaagtcttcaggatgccagaatctaatgttcactcacaagttctcccttccacatctgaggctttaaatccacagattgtgagcaacagccctgtttcgatctcgtcacagcagcagcagcatatctcccagcaacaagccgcagcacagatgtaccctcaaatgcatgtgcagcattttccaaatttcatgccatatcgacaactctattctccagtttaccccatgcctatgccaaactattcgccaaatgtcccttatccatcaaatggaaataattatcttcagatgcccagtggaggttcacatttaactgcaggaagcgtgaagtatggagtttcacagtttaaaccactcccatctggtaacccttctggctatggaaattacactcatccagctggttttacaatgggttctcctggtgttattggagccacagttggtgttgatgatgtcaataggatgaagtacaaggacaacatttatgcctcaactccacaggtcgagacatctgacatctggattcagcaagctagagagatgccacctatgcaggttccttcatattacaacataccaggtcaagcaacaccaggtgcttttgtgccaaatccagcaaatgcatctttcaatgctacagctcaatcctctcatgtgcagttcccaggcttgtaccatcctcagcaacctccctctattgtaagtccgcaccccatggtgcatcaacaggtgccatcggccattggtcccaatgttggggttggggtggcagctccaggcccgcaagttggagcttatcagcaaccacagcttggccatatgaattggagacccagcttttgaagaaggtttcttaattatctgtaattagggggggtcacaagagcctttatgtaacaacagtaggctccttttaacaggaagcacctttgtttttagtgcagctctttctgatctatttaagctataacgaggtttttgttagcctttccatcccccaagtgaattcagtatcccatctgaactggtatgatgtagattatgagttaaaacattgggcaaaatctcgcacgagcccaaggttgagtgccttccattttgttatattgttttgtttcctaatcaaatttgtaggttgagtgccttccattttgtt

SEQ ID NO: 154483 - DNA, 1795 bp, Zea Mays
gtttttctttattcattatatattaggtaaacaatctgataaaattacattttatcttcagcagtacaccctattaaggagtggaagccaaaatcgacaaagaagtcaccgaccattgatgcagataacagtatagctgatgctacatctccttcagctagcaactgtgaaagtgccaacacactgaatgtaaacgaattgcctgaaaaaatttcacaaactaacttgcatgaggtggagcatgttattattccggaacatcttcgtgtgccagaatatgagcagaccaagttaaggtttggcagtttcacatctggtttggattcggaacaagtatctgcctcgaccccacaagacactgagcaaccagaacatgtacaagagtcagttcaacaggcaagtgaatatgatagtttggatgctggacctgatgacatggatgagcaagctagatcttcacaacacctgtccacatcaacggctgagatttccttgcccccatctgaggatagtgatcgaatgagtggtcaagtagagaatgatgatggcctgggcttagttcagagcgacactccaattggagcagcagacggtgacaatacccaaatcacctcgactttgactgctttttcggcttatagtcatgaagatcctaatatgcatacaaacaatgaggcccagttatacggactggtggagcctaatgtacatccgcaagtattagcttcctcttctcaggggtacccttcagaaaacccggaagcagataatgctgtgcaagtcttcaggatgccagaatctaatgttcactcacaagttctcccttccacatctgaggctttaaatccacagattgtgagcaacagccctgtttcgatctcgtcacagcagcagcagcatatctcccagcaacaagccgcagcacagatgtaccctcaaatgcatgtgcagcattttccaaatttcatgccatatcgacaactctattctccagtttaccccatgcctatgccaaactattcgccaaatgtcccttatccatcaaatggaaataattatcttcagatgcccagtggaggttcacatttaactgcaggaagcgtgaagtatggagtttcacagtttaaaccactcccatctggtaacccttctggctatggaaattacactcatccagctggttttacaatgggttctcctggtgttattggagccacagttggtgttgatgatgtcaataggatgaagtacaaggacaacatttatgcctcaactccacaggtcgagacatctgacatctggattcagcaagctagagagatgccacctatgcaggttccttcatattacaacataccagttcccaggcttgtaccatcctcagcaacctccctctattgtaagtccgcaccccatggtgcatcaacaggtgccatcggccattggtcccaatgttggggttggggtggcagctccaggcccgcaagttggagcttatcagcaaccacagcttggccatatgaattggagacccagcttttgaagaaggtttcttaattatctgtaattagggggggtcacaagagcctttatgtaacaacagtaggctccttttaacaggaagcacctttgtttttagtgcagctctttctgatctatttaagctataacgaggtttttgttagcctttccatcccccaagtgaattcagtatcccatctgaactggtatgatgtagattatgagttaaaacattgggcaaaatctcgcacgagcccaaggttgagtgccttcc

SEQ ID NO: 154484 - DNA, 2893 bp, Zea Mays
ccccaaccactccgaccaaaccaaaacccagacccactctcccccgaaacccagggcctcgtgtcgtttgatgcgattccggcggcgatcgcgagcgcctccaccaccacccgctcccccgtcctagcgcgcgtttgggcgatctcccctctcgcggcgggcatggctggcggcggcggcggggcacgcggctccgacagggcgggggcggcgcgctctcccacaaccaccacggcgatacagtcgaccatccaatcgatcaaggaggtcgtcgtcggccactccgacgccgacatcttggacaccctccgcgaatccaacatggaccccaacgagacggcgcagaagctgctcaaccaagatccatttcatgaagtaaaaagaaaaagggacaagaagaaggagagtgctggccagaagagctttgctgatagcactgcacaagttgagcaaaactcacaatggatgaagccacatacacaaaagatggaaaatgatcaaagaactcccaagcagggtcagatgtcaggccctactcgtgaatttcgggttgtgagggacaacagatttcaacatggtgtggtggagaacagaccagaattaggacacaaaggttcagcaaatgtacaaatgtctgataggagtactcttgttcagtctggtcgaaaccgctcacctgctacaacctcaggtgaccagatcacacatcaaaatgctatgcagaactccaactctgacacaacccaagggaagagggatgctcaaggtactacagagaagcatgtgaagccatatttgaagaaccctcagaatgagcagcactttccaggttctgacccagctcatgggtcagccaatgttagaattgccggtggaactgttggacctgctcaacgtcatgttggagttgttaattctactaggcaatttgctgcccgttcgggttctcagatgcatgcaccaagtggttcttatgcaaatattcagagggggagttttacctcagtaggggcatctgggcgttactcagctttcatgtctagaaacattcaacaaaaccagagacctgatacaatgtttcgtggaaggcccactgttagatcttttgttgcacaaaacaccaacagatatcaccagggttctactagcaaccaaaaagcagtacaccctattaaggagtggaagccaaaatcgacaaagaagtcaccgaccattgatgcagataacagtatagctgatgctacatctccttcagctagcaactgtgaaagtgccaacacactgaatgtaaacgaattgcctgaaaaaatttcacaaactaacttgcatgaggtggagcatgttattattccggaacatcttcgtgtgccagaatatgagcagaccaagttaaggtttggcagtttcacatctggtttggattcggaacaagtatctgcctcgaccccacaagacactgagcaaccagaacatgtacaagagtcagttcaacaggcaagtgaatatgatagtttggatgctggacctgatgacatggatgagcaagctagatcttcacaacacctgtccacatcaacggctgagatttccttgcccccatctgaggatagtgatcgaatgagtggtcaagtagagaatgatgatggcctgggcttagttcagagcgacactccaattggagcagcagacggtgacaatacccaaatcacctcgactttgactgctttttcggcttatagtcatgaagatcctaatatgcatacaaacaatgaggcccagttatacggactggtggagcctaatgtacatccgcaagtattagcttcctcttctcaggggtacccttcagaaaacccggaagcagataatgctgtgcaagtcttcaggatgccagaatctaatgttcactcacaagttctcccttccacatctgaggctttaaatccacagattgtgagcaacagccctgtttcgatctcgtcacagcagcagcagcatatctcccagcaacaagccgcagcacagatgtaccctcaaatgcatgtgcagcattttccaaatttcatgccatatcgacaactctattctccagtttaccccatgcctatgccaaactattcgccaaatgtcccttatccatcaaatggaaataattatcttcagatgcccagtggaggttcacatttaactgcaggaagcgtgaagtatggagtttcacagtttaaaccactcccatctggtaacccttctggctatggaaattacactcatccagctggttttacaatgggttctcctggtgttattggagccacagttggtgttgatgatgtcaataggatgaagtacaaggacaacatttatgcctcaactccacaggtcgagacatctgacatctggattcagcaagctagagagatgccacctatgcaggttccttcatattacaacataccagttcccaggcttgtaccatcctcagcaacctccctctattgtaagtccgcaccccatggtgcatcaacaggtgccatcggccattggtcccaatgttggggttggggtggcagctccaggcccgcaagttggagcttatcagcaaccacagcttggccatatgaattggagacccagcttttgaagaaggtttcttaattatctgtaattagggggggtcacaagagcctttatgtaacaacagtaggctccttttaacaggaagcacctttgtttttagtgcagctctttctgatctatttaagctataacgaggtttttgttagcctttccatcccccaagtgaattcagtatcccatctgaactggtatgatgtagattatgagttaaaacattgggcaaaatctcgcacgagcccaaggttgagtgccttcc

SEQ ID NO: 154485 - DNA, 841 bp, Zea Mays
acgagagagcgagcgcgatggggaggagggcgtgctgcgcgaaggaaggcgttaagagaggggcgtggacgagcaaggaggacgatgccttggccgcctacgtcaaggcccatggcgaaggcaaatggagggaagtgccccagaaagccggtttgcgtcggtgcggcaagagctgccggctgcggtggctgaactacctccggcccaacatcaggcgcggcaacatctcctacgacgaggaggatctcatgatcatccgcctccacaggctcctcggcaacaggtggtcgctgattgcaggcaggctgcctggccgaacagacaatgaaatcaagaactactggaacagcacgctgggccggagggcaggcgccggcgccggcgctggcggcagcagggtcgtcatcgcgccggacaccggctcgcacgccaccccggccgcgacgtcgggcagcggcgagaccggccagaagggcgccgctcctcgcgcggaccctgactcagccgggacgacgacgacctcggcggcggcggtgtgggcgcccaaggccgtgcggtgcacgggcggactcttcttcttccaccgggacacgacgccggcgcacgcgggcgagacggcgacgccaatggccggaggaggattaggaggagaagcagggtcgtcggaagattgcagctcagcggcgtcggtatcgcctctcgtcggaagccaggacgagccgtgcttctccggcgacggtgactgcgactggatggacgacgtgagggccctggcgtcgtttctcgagtccgacgaggactggctccgctgtcagacggccgggcagcttgcgtagacaac

SEQ ID NO: 154486 - DNA, 416 bp, Zea Mays
gacggcggcggagctcaacaagaaaggcttcgcttcttcctcacctctccgcgtccactcctcttgtcatctcttcaccctccagtccgattgtttgcgaaatcgcagtcgctgtccactcccgaccggccggcgtcgtgaccctacggaggcagtccaagttcaagaattacagacagccacaaagtgtgtggggggtggggatcctgcagcatcgtggcctgaagttgtagccatcttgcgggagagaatcctttgaatcgcagagcctcataacctgcaagtggtttccccatttacttgacaggtgatgccgccctgatgctatgtctcaatgtgcatgcctaaccagacaagtaccaacgtgtttatgagcatggaaaggttgcaggctcctgcctgtcggtgttggttaa

SEQ ID NO: 154487 - DNA, 1737 bp, Zea Mays
acgtcttcccgttcccgagctgcctctgacaccagcacaaacctggagactactactagtattggagtcccctccatttccacctcccttgccactgaagcgagagctctcggagccgtcgtcctctgtctctcatccttcttcgttgttgagcaaagcgggctcgaggaggagatgatgctgagcgggcacggcggcgggaggcgcctgttcacggcgtcgcagtggcaggagctggagcaccaggcgctcatcttcaaatacatggcctccggcgcgcccgtgccgcacgacctcgtcctgccgctccgcctcgccaccggcgtcgacaccgcgccctccctcgccttcccgccccagccttcgccgtcgcgtacgcccccgcgcgcttctctcctcccccctccctcatcgagttcccgcgctcgtgttttacactcatcgtcgatagatagtcgtcgtcgctgacgagtctgtacgtgccccgcgcgcgcagtggcgtactggggctgctatggcgcgggggcgccgttcggccgcaaggcggaggacccggagcccgggcggtgccggcggacggacggcaagaagtggcgatgctccaggggaggcccacggagactccaagtactgcgagaagcacatccaccgcgggaagagccgttcaagaaagcctgtggaagtgacctcccccgccgcctaccgcccgtccgcgttctccatctcgccgcctcgcgcggccgacgcgccgccgccgccgccgggcctcggccacccgcagcagcagcatctccgccacggcgctctctctccagcaggccgcgcccacgccgctggcgctctccagctccacctcgactcgagcctgcacgcggcgtcgccgccgccgtcctaccacaggtacgcccactcccacgctcactacacgccgccgccgccgccgtcgctctacgactacgggcagtccaaggagcttcgggaggcggcggagctcaggcggcggcacttccacgcgctcggggccgacctgagcctcgacaagccgctggccgacgccggggccgcggagaagcccctgcggcgtttcttcgacgagtggccgcgggagagaggcgacacgaggccgtcgtgggcgggggcggaggacgcgacgcagctctccatctccatccccgcggcttcgccctcctctgaccacgctgcctctgccgccgcgcgatgccacaacgatgggagtgatcggtgcatctcctagctgcaactgcaatgcaagcctgcaaccgcgtggattgttgttgattggtgtagtttcctagctgcaattcaagcctgcaacagcgagcagtgagcagcaaatgcgtggggagggcacgcagctcaggctgatgcgcaaaatccgaagcgagtcaagcagcaataggactctaggtctatgatttgatcttcctttgtagcagtacgttaccaaaatgttagctcgttgttgttcggtgtgacattttcgttcaggttgctcctattggctgctgcaactgcaacgctagctctgtggcttttgtgtgctttcagtctgcggtgcgagccttgtcagctcttttccggtgacccacgcctttgattcctttctctgattcctctgcgggctctgtcattttgatcgtttgtcacatccgtggattcttcctcgcgggactactcccgtcacgaaatataaacaaacgcacatggctttctttc

SEQ ID NO: 154488 - DNA, 1614 bp, Zea Mays
acgtcttcccgttcccgagctgcctctgacaccagcacaaacctggagactactactagtattggagtcccctccatttccacctcccttgccactgaagcgagagctctcggagccgtcgtcctctgtctctcatccttcttcgttgttgagcaaagcgggctcgaggaggagatgatgctgagcgggcacggcggcgggaggcgcctgttcacggcgtcgcagtggcaggagctggagcaccaggcgctcatcttcaaatacatggcctccggcgcgcccgtgccgcacgacctcgtcctgccgctccgcctcgccaccggcgtcgacaccgcgccctccctcgccttcccgccccagccttcgccgtcgctggcgtactggggctgctatggcgcgggggcgccgttcggccgcaaggcggaggacccggagcccgggcggtgccggcggacggacggcaagaagtggcgatgctccaggggaggcccacggagactccaagtactgcgagaagcacatccaccgcgggaagagccgttcaagaaagcctgtggaagtgacctcccccgccgcctaccgcccgtccgcgttctccatctcgccgcctcgcgcggccgacgcgccgccgccgccgccgggcctcggccacccgcagcagcagcatctccgccacggcgctctctctccagcaggccgcgcccacgccgctggcgctctccagctccacctcgactcgagcctgcacgcggcgtcgccgccgccgtcctaccacaggtacgcccactcccacgctcactacacgccgccgccgccgccgtcgctctacgactacgggcagtccaaggagcttcgggaggcggcggagctcaggcggcggcacttccacgcgctcggggccgacctgagcctcgacaagccgctggccgacgccggggccgcggagaagcccctgcggcgtttcttcgacgagtggccgcgggagagaggcgacacgaggccgtcgtgggcgggggcggaggacgcgacgcagctctccatctccatccccgcggcttcgccctcctctgaccacgctgcctctgccgccgcgcgatgccacaacgatgggagtgatcggtgcatctcctagctgcaactgcaatgcaagcctgcaaccgcgtggattgttgttgattggtgtagtttcctagctgcaattcaagcctgcaacagcgagcagtgagcagcaaatgcgtggggagggcacgcagctcaggctgatgcgcaaaatccgaagcgagtcaagcagcaataggactctaggtctatgatttgatcttcctttgtagcagtacgttaccaaaatgttagctcgttgttgttcggtgtgacattttcgttcaggttgctcctattggctgctgcaactgcaacgctagctctgtggcttttgtgtgctttcagtctgcggtgcgagccttgtcagctcttttccggtgacccacgcctttgattcctttctctgattcctctgcgggctctgtcattttgatcgtttgtcacatccgtggattcttcctcgcgggactactcccgtcacgaaatataaacaaacgcacatggctttctttc

SEQ ID NO: 154489 - DNA, 942 bp, Zea Mays
ctatccacaaacaggggacaaggaacaggggacaggcacagccgcacagccgccgcccctccatccacctctccacaccatctgacgctgctcccaccgaggtctccaaggctcactcctcaccagcttctgctctctccctcctcatctctgctctgctctggaccgttaactctccagctccccctcgctccgttcccttccgcccaaatcactgggaccaccaccgccttcttcaagatcggcgggcgggcaccggccggcgatgacatccaccgtcaccacaaccgttgggtgcggggggctccccgtccgcccgttgtcgacagcgaccagaggacgcccacgcagatgcgccgtccgagcccaggccgcgggagcggatgcctccaatgataagtcagtggaggtcatgcgcaagttctccgagcagtacgcccgccgctccaacactttcttctgcgccgacaagacagtcactgccgtcgtcatcaagggacttgctgatcacagggatactcttggagctcctctatgcccttgtaggcattatgatgacaaagctgcggaggtagcacaaggattttggaattgcccatgcgtccccatgcgtgagaggaaggaatgccactgtatgctttttcttactcccgataatgactttgctgggaaggatcaggttatctccttcgaggagatcaaagaggcgacatcgaagttctaagcccttgtatttgtcacggagtgtttacttgacagctaattttttatatgtatatgtacttaagtagcatctataagatatgccatcaggaaaattttcataaaatgtgcagtaaacagcacttcgcaaggctgccgatcatataagccgccttcggcctttttattgtatctgggctccatttcgtgaattaaacctacgcaattcgccgctcttaa

SEQ ID NO: 154490 - DNA, 925 bp, Zea Mays
aggggacaaggaacaggggacaggcacagccgcacagccgccgcccctccatccacctctccacaccatctgacgctgctcccaccgaggtctccaaggctcactcctcaccagcttctgctctctccctcctcatctctgctctgctctggaccgttaactctccagctccccctcgctccgttcccttccgcccaaatcactgggaccaccaccgccttcttcaagatcggcgggcgggcaccggccggcgatgacatccaccgtcaccacaaccgttgggtgcggggggctccccgtccgcccgttgtcgacagcgaccagaggacgcccacgcagatgcgccgtccgagcccaggccgcgggagcggatgcctccaatgataagtcagtggaggtcatgcgcaagttctccgagcagtacgcccgccgctccaacactttcttctgcgccgacaagacagtcactgccgtcgtcatcaagggacttgctgatcacagggatactcttggagctcctctatgcccttgcattatgatgacaaagctgcggaggtagcacaaggattttggaattgcccatgcgtccccatgcgtgagaggaaggaatgccactgtatgctttttcttactcccgataatgactttgctgggaaggatcaggttatctccttcgaggagatcaaagaggcgacatcgaagttctaagcccttgtatttgtcacggagtgtttacttgacagctaattttttatatgtatatgtacttaagtagcatctataagatatgccatcaggaaaattttcataaaatgtgcagtaaacagcacttcgcaaggctgccgatcatataagccgccttcggcctttttattgtatctgggctccatttcgtgaattaaacctacgcaattcgccgctctta

SEQ ID NO: 154491 - DNA, 976 bp, Zea Mays
ggggacaggcacagccgcacagccgccgcccctccatccacctctccacaccatctgacgctgctcccaccgaggtctccaaggctcactcctcaccagcttctgctctctccctcctcatctctgctctgctctggaccgttaactctccagctccccctcgctccgttcccttccgcccaaatcactgggaccaccaccgccttcttcaagatcggcgggcgggcaccggccggcgatgacatccaccgtcaccacaaccgttgggtgcggggggctccccgtccgcccgttgtcgacagcgaccagaggacgcccacgcagatgcgccgtccgagcccaggccgcgggagcggatgcctccaatgataagtcagtggaggtcatgcgcaagttctccgagcagtacgcccgccgctccaacactttcttctgcgccgacaagacagtcactgccgtcgtcatcaagggacttgctgatcacagggatactcttggagctcctctatgcccttgtaggcattatgatgacaaagctgcggaggtagcacaaggattttggaattgcccatgcgtccccatgcgtgagaggtatgtttatgaactacacttccagctattttttctatgatgtgggtcatgtggcagcaatattatgttcaaagtcatatagttttgtgcttgttcatcttaattgagcgaccacatgccttttagtaggggtgaaaacggtcggaaacgatcggtaaatgaaagtttggtacgaaaaatacactggttgcggtcggaatgtaaaatacgatcggtaaaaaccgtaacatgtaccctcaattgacttcaaaaattcacatgacatacatccacataaaaattagtaataatatataaatattcataaattcatgaaagattaaacgatatctcacaaagtattaaagcaatatctcataaatacaagtgcatatatatagttaga

SEQ ID NO: 154492 - DNA, 1998 bp, Zea Mays
gcaaacgtcggagcacgagcacgcgttcttcgcctctcaccccacgggagggacgggaggcgagggcgcggcgagccggcgggcgcaatcggatttggggaggcaaaaggaaaattccggagagcagttcctttccgcctccccatttcctccggatagatttgggtttggcctgcgtcgattagtccggcgctcgaacccgcaccaatccattcgccgagggatcgagcaagcgaggcgtggatcgcaggcggtattccctgcctgcctcttcttctcctccgcctgttcttgccgcggtctccccctccggccgatctggactcgacagatcattaattttttgttggcatacattcccaaccttgatgtaaagacctccttcattcagaaccctgtgttttggaagggtatttcacaatgaagcccaatcagttgattacatcccatgttgatatacatagggtatacccatacgagttccaaccagagttttcaatgtctcatgatcttggattgaatttgttttcacaagccggtacagtgctgggtacttctttaagacatcataggaagatctcttcttctggaaatgcaatggtccatggagctttcaatcgcctcaacaagctttcccgagctctctatttctggctctctagaccatctgatcctaagattttgcgttgggtggcatctgtagcagcgaccagttctagatcttgtcagttgcgtttcaaccaaatgggctctcacatgcaaaatctgactaaactgcagttcagctttccaatgagggaagagcaagcagtacaactaattttagcgaggcttgcaagtgcaacgattgggcgactgttaaatgagcagcaacgtgcatgcaatcttcttactctagctggcgctgttgctattgtacctccacttgaaaatatatcatcaatgatgcttgccgagtcaatcacatcacgaaatattgacagtgatatcagaagactggtggatcagccttatgtagaaggaaagtgcctaagttgtgcttgcccttctgtgcctagtactatatttcaagaagatccaattgaaccaaaaactggaataaaatttccaacatttctggaagacgactccagtccatctgcagcggtccttgttgggataggtttcaaaggcatgagagtgatgagggtcaaaaatctgaacctctacgcttttggtttatatatgcaaccgacttctatccgtgagaagctgggtcctaagtatgcttcatttccaactgacaagctgatggagaaccctgatttctatagtgatcttctcagggaaaaccttgatataagggtcaggttggtggttaactacaatggccttagcgttggtgcagtgcgagatgtgtttgagaagtcccttggcctgcggctgcagaagatgaatcctaacacagactttcactgcttgaagacctttggttctcacttcacagaagatatcgctataccttcgggtacgaagattgacttctgtcaaacatcagatgggaagcttataacagaaattgatgggaaacaaattggtgctgttcggagcaaagatctttgcaaggctttcttcgacatgtatattggtgattcaccggtttcactggaggccaaaaaagtcgttgcccagaacgtggctgggctcattggaagacgctgaggatagcgagaggatggttatttcattcttctgtacagttagagaggattcatatgagcgggaaaataggccaagtatgtagagtgatctgtcttgtatagaaagcaggcaaaaaggtccaatgtatatgtggaaggtagcatcttcagttgtgctaggcctccattcttttttttttcttgtttggatgggccttttgcctcttcgtagctgctgtatcatgtatgctcccattgagccaggagttgtaaaatattaaattgaaggtgcttcttccataaaatgatgcatacctgt

SEQ ID NO: 154493 - DNA, 1549 bp, Zea Mays
gcaaacgtcggagcacgagcacgcgttcttcgcctctcaccccacgggagggacgggaggcgagggcgcggcgagccggcgggcgcaatcggatttggggaggcaaaaggaaaattccggagagcagttcctttccgcctccccatttcctccggatagatttgggtttggcctgcgtcgattagtccggcgctcgaacccgcaccaatccattcgccgagggatcgagcaagcgaggcgtggatcgcaggcggtattccctgcctgcctcttcttctcctccgcctgttcttgccgcggtctccccctccggccgatctggactcgacagttcagctttccaatgagggaagagcaagcagtacaactaattttagcgaggcttgcaagtgcaacgattgggcgactgttaaatgagcagcaacgtgcatgcaatcttcttactctagctggcgctgttgctattgtacctccacttgaaaatatatcatcaatgatgcttgccgagtcaatcacatcacgaaatattgacagtgatatcagaagactggtggatcagccttatgtagaaggaaagtgcctaagttgtgcttgcccttctgtgcctagtactatatttcaagaagatccaattgaaccaaaaactggaataaaatttccaacatttctggaagacgactccagtccatctgcagcggtccttgttgggataggtttcaaaggcatgagagtgatgagggtcaaaaatctgaacctctacgcttttggtttatatatgcaaccgacttctatccgtgagaagctgggtcctaagtatgcttcatttccaactgacaagctgatggagaaccctgatttctatagtgatcttctcagggaaaaccttgatataagggtcaggttggtggttaactacaatggccttagcgttggtgcagtgcgagatgtgtttgagaagtcccttggcctgcggctgcagaagatgaatcctaacacagactttcactgcttgaagacctttggttctcacttcacagaagatatcgctataccttcgggtacgaagattgacttctgtcaaacatcagatgggaagcttataacagaaattgatgggaaacaaattggtgctgttcggagcaaagatctttgcaaggctttcttcgacatgtatattggtgattcaccggtttcactggaggccaaaaaagtcgttgcccagaacgtggctgggctcattggaagacgctgaggatagcgagaggatggttatttcattcttctgtacagttagagaggattcatatgagcgggaaaataggccaagtatgtagagtgatctgtcttgtatagaaagcaggcaaaaaggtccaatgtatatgtggaaggtagcatcttcagttgtgctaggcctccattcttttttttttcttgtttggatgggccttttgcctcttcgtagctgctgtatcatgtatgctcccattgagccaggagttgtaaaatattaaattgaaggtgcttcttccataaaatgatgcatacctgt

SEQ ID NO: 154494 - DNA, 386 bp, Zea Mays
atgacgcctagggaacttaacaactaccctcgcaaagatactctttacgtgtggacagcaagcgccagtgaaatagttgcttcagcacttcatgacaattgcaaagctgttcttgttggcgaaaggacttttggcaagggcttaatccaatctgtatttgaacttcatgatggttctggtattgtcgtcacagttggcaaatacatgacaccaaaccacaaggatatcaatgggaatggaatagaaccggattacaatcgtcttcctgatttcaatgaagtcagaggttacctttcacgatgcggaattaaagaattaagctgacagacgtttgcggctgatttcaatgaagcattatattctgaaggttctctcacggtaagaag

SEQ ID NO: 154495 - DNA, 475 bp, Zea Mays
aaaagaatccatgagcaatctgtcagcgagctatgtacacttgcaaatttgcaatggcactcatgccctgctcagggtcggcgggctctctggtctcttcacggcgctggcgtaccggctccgcagtgggctctccgcgtggacggccgacatgacgtgcctcttgccctgcctgccggccgcctccgcgtccgcattgtcgtcgccggcgacaccggcctgcgccggcgcggcctcggcctcggcggcggctccaccgaccgtgaacacgaacgggcccatgggcacgtcgtcgtcgagcgccagcagcggctcgagcgcgtcgacgacgtgtcgcatggtggggcgcgccttgggcacgctctgcaggcactggtgcgccaccccggcggccttctccgcggcgcgcgccgagtactgcatctccagccccgggtccatgaagcggtgcaggcggtcggcgcggcggaggtag

SEQ ID NO: 154496 - DNA, 1306 bp, Zea Mays
ggcatcttctgcgctcgcaacacctcggcgcccaaacgtaaccgtcccaacaaactcctctccctccccttcccagcagaagtaccagcgccggccatggacatgcagttcttccccgacagggcgcacttgcgcctgcggagccgctggcacggcatgtaccttcacgccgaggaagacggggtgaggatcaccctgcgccggcgccgtgggacgctgaacgaggcgtgggtggtgcaccacctcgagcgcaacggcgtcaactacgtcctcctccacagcgccgcctacggccgttacctcgccatcgtaagcatggaagcgactccggcgccgtcttcgggccaaggtcaaggcgcccgccgcacctgcctcgccgtccagcgcctttacgacgccccagggcagaacgacgtcctgtggcagttccgcttcgcggacgacgggtccgacgatgtcgtcatgcgcaatcgcgtgtacggcacctggcacaactacggcgacgagagaaggttgatgcaattcattgtcgaggccatccccccaagagcagagccgcctgaacttccgcctgtagtttggcctccagcggtgcccatcggtggcccgatccgccgccagcgccgccgggtcgtccaggcgcaaccggtgcttcggcggaagatccactatgtgcgggcagacgatcaggggaacttcagcccgcttgtctggaggatgctatggttcgatggccggtccgtgttgcacctgaggagagatctagcagccgagctgggtgtaggtgaagccaacgtcctagacatcacgatgtgcgtgcgggctggctctaacggccggctgactccactggtcatcgacctgcctttcgatgagcaggccatggacatcgtcgtcctcgccactgattcaccagctgctgaagctttagtgcacccagatgttgctgcaccgtagaggaatattagaccaaggcttctgacaatcaaaaaagaaaaatctcctcagaaatgagaagttccctgcttcggattcagtgagatggcaactcatattttgttctgatagctccagaaaactcagtccatctggggttgatgtgttctgctaaccggaagcgttttgaattggccttcaagtttcaaaacttcaaaattgctggaggcattctgtggaaacactgtttgagcggcaattgtagataccgtcttcagtctttcttcaccaaacgtttacatccaaagttttcgtttgtcatgatgaagctctgcgcactactcgttgaaattgaactcactttttcttg

SEQ ID NO: 154497 - DNA, 168 bp, Zea Mays
cttgatttttttgacaattttatcgaaaccaaacaggccgtagaaatttcagatttttggacacccgagaaaaaagttatgcccggtttaaggaaggtacctcaagttatgtttttgagaggcacggctagaaagcggcgattagggcaaatgggggatcgacttgtg

SEQ ID NO: 154498 - DNA, 155 bp, Zea Mays
atgtgggtgagcccacagctggcgattcctccggtgaaaatctttaggtcggaagaggaaaaaggaagagctctgaaattgaacaaggaacgtcgtctagcccaggtaaggaagaatgctgtcatgttggacgactaacaaggtcacaagggtgg

SEQ ID NO: 154499 - DNA, 1132 bp, Zea Mays
atggaattcttcccggacagggcgcacttgcgcctgcggaaccctgtgaacagcgcgtacctttacgccatggaggacggggtggggatcaccctgcgccggcgcagtgggacacggaacgaggcgtgggcggtgcaccgcgtcgagctcaacggcgccaactacgtcctcctccacagcgccgcctacggccggtacctcgccattgtatgcgaggaagcggctccggcgccgtcttcgggccaaggtgcaggcgccagccacatctgccgcgtcgtccagcgcgcctacgacgccccagggcaggacgacgtgctgtgggaggtccgctgcgtggacgacgggtccggcgaagtccagatgcgcaatcccacgtacggcgccacgggctactacgatggccagaaaaaatggatgcgagtgatggtcgaggccattcccccaagagcggacccgcctgaacatcctctgcctgtgatttcgtggatgagatggcaacagcagttccccatcgttggccggctccgccgccagtgccagggagtccaggggcaaccggtgcttcggcggaggatctactatgtgcgggcggacgatcaagggaacttcaactcggacgcctggaggatgctatggttccttgaccggtccgtgtggcacctgaggagagatttagcagcccaggtgggtgtgggtgaagccaacgccctagacatcacgctgtgcgtgcgggccggctccaacggccggttgactcctcttgtcatcgacctgccttccgatgagcaggccatgcacgtcgtcgtcctcaacactgattcaccagctgctgaagctttagtgcacccagatgttggtgcaccgtagaggaatattagaccaagacttctgacagcaacatcgcagttcatctcttcagaaatgagcagttccctgcttcggattcagtgagatgacaactgatatttgttctgatagcttcagaagactcagtcagtccatttgggatttatgtgttccgccaatcggaagcgttttgaactggccttcaagtttcaaaacttcaaaactgctggaggcgttctgtggaaacattgtttgaactcacttttttcttgatatactagatgaa

SEQ ID NO: 154500 - DNA, 101 bp, Zea Mays
atattgtttgtttgtatgtcatgcgaattgaattatatgtgcttttctctgtccttctttgtagcatacgtttgaagtatattcaatggaatgtttattag

SEQ ID NO: 154501 - DNA, 869 bp, Zea Mays
agatccacaacaaatagcgaaaccctagcccaaactcgaccgcctctgctataagtagctccactctctctcctccaagcctaccccagccgccgccgccgccaccgccacctgccccagcgcgccgccgccgcagccaccatgggtcgcgtccgcaccaagaccgtgaagaagacctccaggcaggtgatcgagaagtactactcccgcatgaccctcgacttccacaccaacaagaaggtgctcgaggaggtctcgattctgccctcgaagcgcctccgcaacaaggtggctggcttcagtacccacctgatgcgccgcatccagcgcggcccagtccgcggcatctcgctcaagctgcaggaggaggagcgcgagcgccgcatggacttcgtgccggagaagtccgcgctcgaggtcgaagagatccgcgtcgacaaggagaccatggagatgctcgctgccctcggcatggccgacctgcccggcgttgagcgccaggctgaggtctccaacgcccccgcctacggccgcccgcagtacggtggtccccgccgtgaccgcgtttagacttcgcggtggttgcctcttgatcgcactgctattcgtagttgttgtcctactatgctaaacttcttttagatctttggttgcatctgtggcggttaagttttgaacttgcctgttatggtataaattctgaagtgtttggttctgcgtgtgatgaacatgataatttatattcttgcgctttataagttactatgagatgctcatatttttttatttgactgctagttatcttgaatatgtgcatgcgacatagggatttgtatctatgctgcatgcttttaaatgtaattcaaatt

SEQ ID NO: 154502 - DNA, 267 bp, Zea Mays
caatcgttaggtcgcagctggaaggcttctgaattgcgactaaaatcttgggatgatcttcagaagatgtggtatgttcttctaaaggaaaagaacatgctaatgacacagcgtcagatgctgcaatcagatgggttcccaaatccagaacgaatttccaaggtaaagaaatcaatgtgccggataaagcatgtcttgactgagagggctatagctgagcccgatccaaggagatcttcggaaatgaagcggatgataaacgccgtt

SEQ ID NO: 154503 - DNA, 2041 bp, Zea Mays
agtctgtggggggatcctagtgtgtgatgtacttcttctttttggatccagtctgtaaactccgctgcgacggatgttcagactgcgggggggtgttagattatatgtggttaggcccatggttagccctaatgatatacaattatttacctctaacactttttcttttatataaacatgacagctatccctttaaaattttctatatttatttcattaattttttaatctcagtatgcatcaacatttttgggattttctgcagatatcaatatatgatttacgcatgtcttctcctctgagagttaaggatcacatgtatggtagcccaatattaaatatcaaatggcaccagacacttaattctactgaacctaaactgatcactgctgataagcacatagtgagaatctgggatcctaatacaggaaataacatgactagcattgaaccagatggtggtgctatcaatgatgtctgtgtcttccggaatagtggtttagtgctattagccctggacaatagccagatacctgcccacttcattcctgcgctcggcccagctccaaagtggtgttcacatcttgataacttaactgaggagatggaagagaaaccagatacaacactgtttgatgagtacaagttcttgactaaagaagagatggagcgactgaaccttactcaatacattggcagcagtgctgtaagagcatatttacatggatttattgtacgttatgaactatacaagaagcaacgggcagcagttgctcctgttgaatacgagacaattaaagatgagataaagaaaaagaaattagaagctcagagaaaatctcgtataacgcaagtcgtcaaaataccgaaggttaacaggcagattatggacagtataagggaagatgaaatagatcttgatatggagaatgttgataaatcaagtattaagaagaagaaaagaaaactagaactgaataaggccattttggatgatgatcggttcaaagaaatgtttgagaataaggattttgaaattgatgaagaatcaaaagaatacctcgcacttcatcctcaggcagccacaaaggagcctcgcctgattgaagaacattttgatagtgttagcgaggacgaccaacaatctgatggtaacacatctgacactctagcggaatctgacagtgatgatgtcatgcataattcaaagcgtataaggttatacgaggtcaaggatgaacaccatgcggaagcatttttgaacagcgtctctttatcaaacgaggatgctgctccccttgaggataggatagctgccctggaaaggaaacagaactccaaagcacttgatgcggtcaagtacgggcctggtggctcacgagagatttcgtttttctctaaaagccggagaaggcacaaggaagagtcgtctagcgacgacgaacccaagggtgtcaaaaagagagctgtgcagccgctgggcttgaagcagggaaaagctgagttctatatgtttggcggaaatcgtggcagaggtagaggcggtagtggcagaggtagaagcggccgaggaagaggtggaggtggaggtggaggaggaagaggtggaggaagaggtggaggaggaagaggtggaggtaggggcaggggcagaggatgaatggggcctgtaacattgaccccgttcctgcctttgcaggggttttggtaagcttgaaatggatggatcctgcacatgcagtgggtagaaagtgtgttccttcacaacataggcaagagctagagtaactgaggattgctgcttcagaatttttgggaagagaactttgttagaagacaatattacatatcttttggtctaccttgtaacggattgttgcattctggtgggtgtctatgggtacggtatagcgttttttttttgtaataggcaacataactgctggcattttcatttttgagtactgaaggctctccaaagccatgattagtagacattcgttcatagaaaacagaaccaatattaatatctaaaaataga

SEQ ID NO: 154504 - DNA, 128 bp, Zea Mays
ggacatctcctacgctgtgcagcaggtctgtctccatatgcacgacccccgagagccccacctcgcggctctcaagcgcctcctccgctacctccggggcactgtcgactacgggctgcttcttcacc

SEQ ID NO: 154505 - DNA, 91 bp, Zea Mays
agccaaccgtgcgtgggcgtttccccctggccccctccccaccccctcccagccgccgccgctgtctcccctgcaggtgcgcagggcgctg

SEQ ID NO: 154506 - DNA, 1000 bp, Zea Mays
agaacccaaccccaatccaacggctgcgagagctctcgtcgcgccgccgccgccacctgacagtctcctctcccctgcgcgcgcacgacgagcgccgggccgggacagccgccaactccatccaacttccttaaaccctagcgccagcagcaggcaaccagcgccgacgaggaggagcgcggagtagaggggctccggcgaccgcgtcggagatggcggcgagccacggcgcggggtcgctcaagtccacctccatcaacggggtcaagctctactcgctcaccggcggccgctatgtcgccccctgggtcgtcgcgaagaagaagcgcgccctccgcaaggacaaagagtatcagcggaggctggatttgatccacgacctgaggttcgagaccgccaccaccaagatcaagctgacgcccgatgaccagtacctgatcgcctcaggtatttaccccccgcaagttaaagtctacgagttgaaggaattgtcgatgaagttcgagcggcacatgatctcagaaattgtagatttccagatccttggtgatgactattccaaactcgcgtttttgtgtgctgatcgttctgtaaatttgcacgctaagtatggaagccactatagcttgagaattcccaagcagagtgggaagggacatggcctacgattgctggtcctgcgacttgctatgtgctgcttcatcaccagatctgtacaggataaacctagagcagggacgattccttgcttctctttcctccgaatcaccagcaataaatgcggttacacgaagtaagatccatgggcttgttgcttgcggtggtgaggatggtgcagttgagtgttttgatatgaggaaaaaaacttctgttggcagaattaatattccagctgttagttctgaagattattctcaggaggtcacgtctttgcaatttgatgaagatcaaggatactttatggcagtggggaccagtacaggaaagctactttgtttga

SEQ ID NO: 154507 - DNA, 549 bp, Zea Mays
atggtggacgttttcaccgccttcggcttcgtcaacctgtgtctggccttcaccttcctccagatctccaccttcccggacccgcagctcgctgcggacagcaccatggcatccgctgaagccccactgccttcggcggcggtcctcttcctcgccgccgtccccgtggccggcgcgggcaacgggcggcggcgctcgatctcggggcttctcatcttcgttctatgcgtctccgccggcacgctcgagctcatcgtgttcgggaaggccgccgttggtggtactgcggaggctcgcgcgctcggcctgcctgatctcccagcgttgcctgccgcggcgacggccacgttcttttcggggatgacgctggtcatcgtcgccgcgcaccgccgcgccggcggcgaggacgagggcggtggcggtggtgccgtcgccggagacgggcggccgacccaggggctcctgcgcctcacggccggagcggcggcggcggcgcttgttggcctgatggccatgcccctcatcgtcatcctctacggagctaagtaa

SEQ ID NO: 154508 - DNA, 574 bp, Zea Mays
gcaaaaatgtaagtcagcgtgcgttggctcatatgagcagagcttgcttccgcatctcgctactctccgtgccttgctcgccggtctgctagctgcagtacccacgggagccggaggtcatcaaggcggcgtcggtaaaccatgtccatggccacaggccacagctgagcttcctccgctgcccgccactcgtgccatggcaacgacaggtccgtcgtctgtgctccctgtctctgctgttctgatgaaattcgcaaattaagctgctctaggtcgagtcctggtagctggcatccccagctcggccattgtatcacagatgctgagccacttctgcctcagatctgaaactcgctagaaaaaccatgtgacatagaaacatacactcatttgaggattggggtttttcgcatgctactagcatatgagagtatttggttttttagactaattttttagttcctctattttgttttatttgattttctaaattgttaaatacttgtattttagtttttgtatttatcaatttaaaaattaaaatcgaataaaatgagaccaaatacccctaaca

SEQ ID NO: 154509 - DNA, 360 bp, Zea Mays
atggagcagctgaccgccatgatcgacgcctctgagagctgcgagaacgcgtggaagggttgcgtagagcttgtgatgactgtaggatacagaactgctgcggttgttgccttgttagacgggagcacacgctgcttcttcggcgcggcatgcgcgagatatgatgggagcgcgacatgcatggggagagatggccgggcagggcttgatctgaagggacgacgggtttattttggaggaatagaaccacagacagacaaagatcctgagcatggccattcatcgttcgctgctttaccagcgaacggacagccagccggacctagcttttccgaattgagaatggctaagagccactag

SEQ ID NO: 154510 - DNA, 516 bp, Zea Mays
atggggaacgcaatttccgccgccgtcggcatggtaagctttctgaacccatggccaggtgcgagcgccacggtagcagtccacagcggggtccggatccgggacctgcagctcctggctacggcggcgggggttttcatctctgtgggcttcatctaccgccacctccaccgtggcgccagcaaccggcgcctgccggagatcgtgcccttcatgttatgcgtctgcgctggcgttctccatttcctcctgttcgtgggggcttcagcagcttcaggtggcgcggacgtggatcacggcgctgaagcccgcgcgcttggtctggctgctctccgtgtcctgcccgccgcggccacggtgaccttctttctgggcaccatgctgatattcgccgcgcgtatcagcgccggaggagaggagccggtccaggctcccgtgggcctccggctcctcagcaggatggctttggctgctgcggcagcactggtgaatgttgtactgcatacggctgtgtga

SEQ ID NO: 154511 - DNA, 1592 bp, Zea Mays
ctgtcgattatattaattaagaagaagtggtccggactagactaaacaacaaacaacatgcggttggattgagacatcaacacgccaacaccatacaactcaacccgttggttggattgggacatcaacacgacaccacactcaccgccgacacagagtgcccaaacaacacaggcagcggcaaccccacacgagagcacacaaaactgctaaaggtcatcgttatcaagcaaggatgcagagcatccaacaactccgacttcccaaagcagccaataggcgaaccaaacaaaaagcagacagacagcccgaagcgaaaggtctcaacaagtcatcgttgccgggctcaggcacagagcagctccgacttccaatcttaaccctccgccctgcctccggtttttacccgacctccaaaacattctggaccacgaagaagggaggttcgcctcgtgttatcgttgccgagccacatcccctgacgtagcagctccgacttcacgttgcaaaacccccacctccactcgcataccaggcaccgagaagcgaagcaaccgccgaaggcaaagtcctggccgagacgaactttagaagcgacgccttcaggaagggagtgacgtcactgtgacgccactgtcacctgtccatgatggaccgggttttcacccaaggaagatagcgctggggatgcgacaccctcaacaggggaagcgacgcccatgggcgtcaccgtcgccgagactttcgcccaagagcccccagcacaacgtctggccgaaacctcgagacacagcaagctgccttcgccgtcgctggtaccgacgtaccacacaaatgatgaagattttggacctgccgccaccaccaccaccctgcgctagctcgatccactagccgatgctgccccagatgagaggaggtcccgccaccgcaattccggccaactgtgcaggcctgccggcgcaccaacgccaacctccaccccggctcatgcgctagcccgggaccagcctgccggcgcctccgacggatgcccactgcgcgtcgacgccgctccccctgggggcgccagatccaaccctccgcgcatccggtacgcgagcacacagcccaggcacacctccaaccccgagcagcagcgattgccgtcgcggcgcgcaggcgccgccaccgggccagcctcgcggacgcgcacctagccgcaggcccgttgcctgagtgggcggacgccgccaccgtgggctggacgcgcgacaaggcagcaagcacccgcccgacgccttcaccgctagatgtgcgagcaacccgccagctagctccggcggcggcaaggcaaagagatggggagggaggggagttggcagccgcccgagacgcgagggggcgaagccggggccgaccacgccgacgagcaactcacggcgaccttggcggccgcgcccgcccagatccgccggagggagacgaagatgccccgccgccgccctccccgcaagcagccggaccttccggcggccagctcaggcagcggcgcggcagggagaggcccacgaaggggcggcgacggctgctagggattatggggagtgtcc

SEQ ID NO: 154512 - DNA, 926 bp, Zea Mays
attatgattgctgctattttagcattggttacggttggttctgtaaacttcttactggaacaaacgatgtggttcatgttctccaagatttactgagcagcgggcacagctgggtaaccagctcatactgagatgaacaagctttggatattattcggcagtgtgcacctatgcagtgcgccttgggctgcgctgatgctttcatggggagcgcactagtgtggcagtaagatcggtgattgctgcagtgtggccttgccatggaagctgcgagcttctacaaacaaatgttgagggccggtgagaaggaaaatggctctgcttcattaatgtgctcagcatttgatgcccttgtgagtctcgagcatggcaagatggttcattgtcgcagcatgaagtctaggttttgttttgaaatgatgcacttcaagtgtggcaggctggcagctcagttaatactcaaattgtcttctaatgggaaaataggtctagtggagtggtgagagttttctccctaagtcatcaggtcatgagttcgacatagcctcttcgtatttacggctgaatgttgccttggtttatccctttccaagagccaactcatgtgggagccttcagcactaagtctgttctttcacttagcttatctttatgctgctttgaatccgataatttcatttgcggcttatgacaaggaaaaacttattgaacctgcaaaatttcatcctcaatatttgacaactataaatttggtccaactttgttcccaacttaatatgttcatttaatgtagtttgaaaacgcaggagagctacattcattgtattagagagagagaaagcagccatacaacaccagcttctcctatggggacatatatataagaggttgttacagactcaagagactagccttataaaaagaaa

SEQ ID NO: 154513 - DNA, 261 bp, Zea Mays
atgtcgcagtctttcggcaacccccggtcacacagccctgggttccgctggaggaacacggcgggaagctcggtgatcagagatggcggcatgtggctggagagctggttgtacagtgggatcgtgacagagagtgcgttgcgggaggtgttgatgatgctcatcgcgggtgagatgcagaggttgtttggcaagctgccgttgagctcgttgagggaggtggagaaacggtacatggtgtggaccaggctgatgctctga

SEQ ID NO: 154514 - DNA, 1191 bp, Zea Mays
atggcggctttaggtcgcctttcacgtttgcttagttctaccgtccaccgctctggaggccttgtgcgcgccttctccatgttggccgaggtcgtcgatgttgccgatgtctccgatctgtacctcccacgtgacgctcattgctactacatctttggaaagcatgagcttctgaagttatcctctaccagagtaatcagcattacagagtatttcaaagaagtgtctttactggacagggcacctaggaaccgtctcgttgaagatattgacgataacctcccgtttttaatccatgataggcaattcgtgaagctcttcaaggctcttgtgggtaagtatcctgaaagggatgcaatcttcaagctacctaagtcacttgatctgcattttaaattccttgagttgcttattgtaaaggactatcgtgtgatatatggtccagtcctcttccccaagcttttgatctctataatctattctggtgctcatggtgagagggcaaagaagcacattgtgggcagtgaagatggaagtgatgagacgctgatatatgaagttagtgatgacactaaagatctcaaagcgtcgaatgtcccactgaaagttagaaattttatgggcaacaaagagctcagtgatgagaccaaaagtactaccgcagaaggaaacgttgagattgttccaggagatgagctgacaactactcttttggacgctgtgaatactattcagcgcactactggatatggcttcttaagctgctacaagagaaagatatgcacattccaaactctcgccctcgatctcgctcctctccgctctcgcatcatgacgctgcgactccgctcccgtcctcgtgctcactgctacggagtcagatccagttggggtcatcaaggccgccggaccctccgtcgcggttacaggagggtgatgggaagggctcgtgcttccacttcctctgctccatccggcaccgatggcggcaggtcagggcttcctgctggtggcgttggcgatcctgacagtgcaggggcgttcatgagcctgaggtcggggcctaggatcaggtggtgttggaggccagatgcgtgcgcggtgcgcgccagccatcggcgccggtcggtgcgccgcgacgtgtggacgcgtgatctcggaagacctcacgcatgggacacacacatctga

SEQ ID NO: 154515 - DNA, 772 bp, Zea Mays
aaaatataagaactataaatcagtcactagaaccaatcaccgctcaagctcacggcctcacctcacccacccgcccgcctcgcctccatccacagcgccacagcggccacgccatctccgtctctctgctcacctccacttcttccgttcttcttcaccgtctccgtccttgacacgggcgcacccgtccccctccgacttccccgtggcctcgtcccgatccgtagtcaactcgaccttgttcaagagggtgagcccgaaccacggcgcgcgggagggctctttttattttgacccaccggaggacagccgccccatgggctggtcgcctgagcgcgctatgtatcagctcatcgaccggcggaaaggtactggttccatgtctccttgcttctctagatctggtgaattccgcgtagatctggtccggatggtacactgtgtcggttagttggttattcactagtatcccgtcgcctgcctgctttgaaaaaagcccttcttttctcgccgctttaggttcgggtgaacgtcgtgagcgcgcaccgcatacgagagcaattaagcaaagcagctgcactctttgctcagatttttattgctatctttgctatgctcgagtgtaattattagtatgcttaagcctgttgttgcaagcaattgatgggtttgaggccttgtgagggcgctggtttgagaactagggcagcatctcaaacttatcctttgctggctttgctgataacatcaacaattcgttttttgttgcata

SEQ ID NO: 154516 - DNA, 1456 bp, Zea Mays
cctggagtggagaccccatggtgtaggagtaggagcaggagatagcgcgggcggggaggggaaggagacaagtgaactcagagaagaactagcgcggcgggcgagcattgcaagccgagctgcaggggcccggagcggagaccggaggagggagacgtcgcttgcgatgtcaccggcagcatccgccgccgaaaccgccgtcgtcgtcgtcgtcgcaagcgtcccgagccagcagcagagcagccaccgcgccgcggcgccgtccgtcccgtcgtcctacgccgtctgggagaaggagcggtaaggcgtctgcagctttacgacgacgtcgtcgtcgtctgccacctacctactgctgctgctgctgcaaggggaagtaaaaaggaacggaaagggggaaggcatggaggtggaggcggccaagtgcgagtgctgcgggttcacggaggagtgcacgccggcgtacatcgcggcggtgcgcgcccagtacctgggccgctgggtctgcggcctctgcgccgaggcggtgggcgacgagatccggcgcgaggggaccatcaccacggccgaggcgctcgaccgccacgtcgcgttcgcgcgcgcgccgcgctcccggagggcgcccgcggaggacgacctcgtggcggccgtggcgcggctgctccgccgctgcctcgactcgccgcccgcgtcgcctgcgccgccgccacagagccggaaggtggccgcagggcccggctgccccgatggagccgacgcttgaagctgcttgcttaattggcggcaatgattggggggttggttcagctgctggtggattaattagttgtactagtacaagaataaacctccagtggcataatatgatggtacaagtgcatgtgtaggtcgccttcccggagaataattcgtgccggtatcatttgacgagagagggggcaaatcacgctccgtgtgtgatcgagcatgaagctattgttaagcatatcactcattggagtacatcaggacaaacactgttccattagttctgcatattcaggttgtaagaatattgtattggagtagtcaagtgctatcttcttgaattcaattcaatcgaagtaatttgatacgattgtgtccatgtatgcaaactaccatgtaacttgctcattgtgtttaggatatttcgtacctttttatcggtgttgggacccgaggggctaaccaaccagtgaaatattgatgtgcgcccctaacccagatgttaatgcaaattaacacaagttttttttatcctggttcgggcaagaagagaccctacttccagcagtgagatgtgatttatattactttcacctaagtgctcgcagtagtgaatacaagctaagccagagagggaaagatccaagtcactggggttgattgaggcaagtgccaataccgtggtggaggagaaaaatgtgaagtgttc

SEQ ID NO: 154517 - DNA, 1573 bp, Zea Mays
gttcaaaatccccatcagaagttgaggacgtattggatgtattatgtcaatattcatagcatagacttttgtggaaatattacacttgtggtgctagaaccctggtccttatatttatgtatagcctctggtcgttagataagaggagacaggagacaatatgtgcatgtatttttaatttgcaggagcattcagatttttaagtcccagtggttattaagcgtcgtttaaacgacgtttaaacgctaaaacgtgattaggagttaaagcgtccgtacgttttaaacgtcgaaacgcgcgttctggacgttttactcgttgtacgaacgttttgtgcgtctataagtggttgggccttaatgggcctttcaccagcaagcttgctccagccgccaaactaaactgccagacgcacagccgcggagccgccagagacagacgctgccgccgtcggccgtcctccgccctccagttgagcggttcaagcagagctgatggctacatcagagccagtacaagagagtttggtggtgcactactcacaacctagtaggccccgggtcctccttgctgcttcaggaagtgtagccgctataaaatttgagagcctttgccgtagcttctctgagtgggcggatgtccgagctgtggccaccacgccatccttgcacttcgttgatagatcatctctaccaagtggcatcgttctttacactgatgacgatgaatggtctacctggaagaagataggagatgaagtcttacacatcgagctgcggaaatgggcagacgttatggtgatcgctccattgtcagcaaataccctggctaagatcgccggtgggttatgcgacaacctcttgacctgcatcgtgagagcgtgggactacagcaaaccgctctttgttgccccagccatgaacacgttaatgtggaacaacccattcacggagcggcatcttcacacaatcaaccaactgggcatagccttgatccccccagttaccaaaaggctggcctgtggcgattacgggaacggcgcaatggccgaaacctcgcagatccatacttccgtgaggctcgcgtgcaagacgcaaccgcacgatgcgagcagttcactcgcgggtcctgtcagtaataaccggccatctagctgatgcagcagttggccacttgattgtcaagcttaggaatttgttttatatgcagtgtgcatctggagtgttgtaacagattttttttccaactagtgtttgtgtgtattgaaattgggggggaaaggctgttgtcacaggataacaataacttcctccctgctcagtaattatgagtctattcagtttgtaattgtcggtgggagtacaattatgctacaatattgtttgtttgtgtgtgtgtgggagttggggagtgctgctgccacagagatagcttcctccctgcccagccagtaatgatagtgattattcagtttgtagttgtcagtggaagtgtccagcaaacttttctactaccctttgatattcctggtacaaatgttggaacgactgtcctaaccatttgagtgatttgc

SEQ ID NO: 154518 - DNA, 1460 bp, Zea Mays
acggatgatctggtcctgcacgtcaatacagacgatatgtttcccccaaatctaaggcgtcgccagccctggcaaagcgcttgccgctgctcccctcttccgtttccagcgccgccgccctccttccggttcctgttctccagcaccgccgttgaacctcctcccctctccctcgtgcttccctctctcatcctctctgccgcttccccgctctccccaaactactctgtgccccgtcagatcgacctggactttggcggcagctacttctagaacgcggcggcacggcagcaagccagcaaggagaacgcggcggcacgggcgtgctgctacttctgcttcctctccgacgcttgctgttgagcggttcaagcagagctgatggctacatcagagccagtacaagagagtttggtggtgcactactcacaacctagtaggccccgggtcctccttgctgcttcaggaagtgtagccgctataaaatttgagagcctttgccgtagcttctctgagtgggcggatgtccgagctgtggccaccacgccatccttgcacttcgttgatagatcatctctaccaagtggcatcgttctttacactgatgacgatgaatggtctacctggaagaagataggagatgaagtcttacacatcgagctgcggaaatgggcagacgttatggtgatcgctccattgtcagcaaataccctggctaagatcgccggtgggttatgcgacaacctcttgacctgcatcgtgagagcgtgggactacagcaaaccgctctttgttgccccagccatgaacacgttaatgtggaacaacccattcacggagcggcatcttcacacaatcaaccaactgggcatagccttgatccccccagttaccaaaaggctggcctgtggcgattacgggaacggcgcaatggccgaaacctcgcagatccatacttccgtgaggctcgcgtgcaagacgcaaccgcacgatgcgagcagttcactcgcgggtcctgtcagtaataaccggccatctagctgatgcagcagttggccacttgattgtcaagcttaggaatttgttttatatgcagtgtgcatctggagtgttgtaacagattttttttccaactagtgtttgtgtgtattgaaattgggggggaaaggctgttgtcacaggataacaataacttcctccctgctcagtaattatgagtctattcagtttgtaattgtcggtgggagtacaattatgctacaatattgtttgtttgtgtgtgtgtgggagttggggagtgctgctgccacagagatagcttcctccctgcccagccagtaatgatagtgattattcagtttgtagttgtcagtggaagtgtccagcaaacttttctactaccctttgatattcctggtacaaatgttggaacgactgtcctaaccatttgagtgatttgc

SEQ ID NO: 154519 - DNA, 1421 bp, Zea Mays
caagcacccggtccgttccgtgtttcggaagccgccggcgagtcagccccaaagcaagtctgtgctgtccgtagtctccacagataaacaataatctgcggacagcaaatgtatccatgatccttataaaaattatatacttagcgcgagcaatagatagcactggctggtggagtagccatgctgaattcgacactggagcgtgacaagctgttcggctgcaaagatccatgtgctgctcgagcaggctcagcctgtggctcatgcgttgcagcctcgtcgtgccagactcatctgcagcgagcgagatcagtcagtcattgagcggttcaagcagagctgatggctacatcagagccagtacaagagagtttggtggtgcactactcacaacctagtaggccccgggtcctccttgctgcttcaggaagtgtagccgctataaaatttgagagcctttgccgtagcttctctgagtgggcggatgtccgagctgtggccaccacgccatccttgcacttcgttgatagatcatctctaccaagtggcatcgttctttacactgatgacgatgaatggtctacctggaagaagataggagatgaagtcttacacatcgagctgcggaaatgggcagacgttatggtgatcgctccattgtcagcaaataccctggctaagatcgccggtgggttatgcgacaacctcttgacctgcatcgtgagagcgtgggactacagcaaaccgctctttgttgccccagccatgaacacgttaatgtggaacaacccattcacggagcggcatcttcacacaatcaaccaactgggcatagccttgatccccccagttaccaaaaggctggcctgtggcgattacgggaacggcgcaatggccgaaacctcgcagatccatacttccgtgaggctcgcgtgcaagacgcaaccgcacgatgcgagcagttcactcgcgggtcctgtcagtaataaccggccatctagctgatgcagcagttggccacttgattgtcaagcttaggaatttgttttatatgcagtgtgcatctggagtgttgtaacagattttttttccaactagtgtttgtgtgtattgaaattgggggggaaaggctgttgtcacaggataacaataacttcctccctgctcagtaattatgagtctattcagtttgtaattgtcggtgggagtacaattatgctacaatattgtttgtttgtgtgtgtgtgggagttggggagtgctgctgccacagagatagcttcctccctgcccagccagtaatgatagtgattattcagtttgtagttgtcagtggaagtgtccagcaaacttttctactaccctttgatattcctggtacaaatgttggaacgactgtcctaaccatttgagtgatttgc

SEQ ID NO: 154520 - DNA, 1363 bp, Zea Mays
gtcacatcctctgatcctatcgccctggtcctccctcctgtgcgacgcggccgttgcctcctactcacctcctcacccagctccctccacccctccgagatccgtcctaaatccgggaggcacgcgtgggctattggggccacgttgtggcggtcggccgacggtgttgtagagcagcagggagcgcgttgcggcggccagtgcctagctcagctgtgcaggaaggcgcgtgtaatcgacatcagagaggacagaggagaagttgagcggttcaagcagagctgatggctacatcagagccagtacaagagagtttggtggtgcactactcacaacctagtaggccccgggtcctccttgctgcttcaggaagtgtagccgctataaaatttgagagcctttgccgtagcttctctgagtgggcggatgtccgagctgtggccaccacgccatccttgcacttcgttgatagatcatctctaccaagtggcatcgttctttacactgatgacgatgaatggtctacctggaagaagataggagatgaagtcttacacatcgagctgcggaaatgggcagacgttatggtgatcgctccattgtcagcaaataccctggctaagatcgccggtgggttatgcgacaacctcttgacctgcatcgtgagagcgtgggactacagcaaaccgctctttgttgccccagccatgaacacgttaatgtggaacaacccattcacggagcggcatcttcacacaatcaaccaactgggcatagccttgatccccccagttaccaaaaggctggcctgtggcgattacgggaacggcgcaatggccgaaacctcgcagatccatacttccgtgaggctcgcgtgcaagacgcaaccgcacgatgcgagcagttcactcgcgggtcctgtcagtaataaccggccatctagctgatgcagcagttggccacttgattgtcaagcttaggaatttgttttatatgcagtgtgcatctggagtgttgtaacagattttttttccaactagtgtttgtgtgtattgaaattgggggggaaaggctgttgtcacaggataacaataacttcctccctgctcagtaattatgagtctattcagtttgtaattgtcggtgggagtacaattatgctacaatattgtttgtttgtgtgtgtgtgggagttggggagtgctgctgccacagagatagcttcctccctgcccagccagtaatgatagtgattattcagtttgtagttgtcagtggaagtgtccagcaaacttttctactaccctttgatattcctggtacaaatgttggaacgactgtcctaaccatttgagtgatttgc

SEQ ID NO: 154521 - DNA, 1311 bp, Zea Mays
cattgctcttgctcccattcgttgcccagccgctaggcgccgccgtgcccgccccgtcggcgccccacgcccgcccgcctcggcggcggcgacgaggacgacctactccagaagcagcaggagggaagcaaggcccagccgcgcaacaagccctccgccgccgtcacggacgacggccaccgtcgagcgctgcacgacggctcccctacgttgagcggttcaagcagagctgatggctacatcagagccagtacaagagagtttggtggtgcactactcacaacctagtaggccccgggtcctccttgctgcttcaggaagtgtagccgctataaaatttgagagcctttgccgtagcttctctgagtgggcggatgtccgagctgtggccaccacgccatccttgcacttcgttgatagatcatctctaccaagtggcatcgttctttacactgatgacgatgaatggtctacctggaagaagataggagatgaagtcttacacatcgagctgcggaaatgggcagacgttatggtgatcgctccattgtcagcaaataccctggctaagatcgccggtgggttatgcgacaacctcttgacctgcatcgtgagagcgtgggactacagcaaaccgctctttgttgccccagccatgaacacgttaatgtggaacaacccattcacggagcggcatcttcacacaatcaaccaactgggcatagccttgatccccccagttaccaaaaggctggcctgtggcgattacgggaacggcgcaatggccgaaacctcgcagatccatacttccgtgaggctcgcgtgcaagacgcaaccgcacgatgcgagcagttcactcgcgggtcctgtcagtaataaccggccatctagctgatgcagcagttggccacttgattgtcaagcttaggaatttgttttatatgcagtgtgcatctggagtgttgtaacagattttttttccaactagtgtttgtgtgtattgaaattgggggggaaaggctgttgtcacaggataacaataacttcctccctgctcagtaattatgagtctattcagtttgtaattgtcggtgggagtacaattatgctacaatattgtttgtttgtgtgtgtgtgggagttggggagtgctgctgccacagagatagcttcctccctgcccagccagtaatgatagtgattattcagtttgtagttgtcagtggaagtgtccagcaaacttttctactaccctttgatattcctggtacaaatgttggaacgactgtcctaaccatttgagtgatttgc

SEQ ID NO: 154522 - DNA, 351 bp, Zea Mays
atgcagttccacatggcgcagaagcggagggcgtactcccccggagcgtcacagtcgcagccgagcagcggacgaaggaagaagaggaatgcggtggtgaggctcggtggccaagggaggaggaaggagaggttcttcggggcgctgcggctgcggctgcggctgcggatgcgatggccgtggctcgcgtccgtgtaccggcgcgcgctgcggcggctgaggacgagctacgagcaggccctgcgtgaactcatcgacggcagcatgctcgtgggcgcgctgcacgcgcccatcggcgtcgactgcgcccacgccgcctccttcgggcccatggccaccgtcgggttctga

SEQ ID NO: 154523 - DNA, 273 bp, Zea Mays
atggctggagatgtccctgcgttctgcaccgaggagatggatcgcgagctcttccagcgaggagtacccattggggtgggcgtcaccaccgctgggcatggccggggcgccgcagctacgggccatgcagccgccccgcggatcctggctgagccgcccccgcggatcctggccgagccaccgctgggcttggtcgcgtcgcctccgcagccgcccccgcggatcctggccgaggcatcgccgccgcagagcttggtcgcggcgcctccgtag

SEQ ID NO: 154524 - DNA, 820 bp, Zea Mays
aagcgcagggaggccagaaagttaccccccggcccccgaccggaccaatctatcaccaccacgccgccctaggtcgtcgccggcaacaatgtccccttctgccatcttcgtcttcctcctcgtctctgcggtgcatatgctggagtgcatcctcgacctcaagaggaggaggggatccatttctgatgatcagctcagactgcgtgtagagatcacgcaacttctcaaggaggccagtgctttgtcaacgccctcgacgtttgcgcaagccgcaaaactgaagcggttggctggtgctaaagagaaggagctggcaaaaatgcaagatgtggacattagagggaaacagtctttatatgaaaaataccgaaaagttctgctggccgcaaaggttgtagtctatggtgtgctcgttctgtggttttggagtactccagtaactactgtccctaagcaccttctccagcccttcgggaggatgttttcctggagaggtgtagatgcttctacaggccgtgttgtggttggaattctcccatggctatttctgacctctcgtgtcagcaagctactgagcgagaaactcgcgcccatatttctgcatccttagctcctcctaacaactttagttttgcatctgtttttgttctgcagttttgtgtgatctctcaatccatctacatttatgtggtttccaaagggattggtatttttgtaattgtataaagtaataacgagtggaatttacactaagagaccgtttggatcactcattttagagttattggaatatacttaatagagtggactatttagggcc

SEQ ID NO: 154525 - DNA, 749 bp, Zea Mays
aagcgcagggaggccagaaagttaccccccggcccccgaccggaccaatctatcaccaccacgccgccctaggtcgtcgccggcaacaatgtccccttctgccatcttcgtcttcctcctcgtctctgcggtgcatatgctggagtgcatcctcgacctcaagaggaggaggggatccatttctgatgatcagctcagactgcgtgtagagatcacgcaacttctcaaggaggccagtgctttgtcaacgccctcgacgtttgcgcaagccgcaaaactgaagcggttggctggtgctaaagagaaggagctggcaaaaagttgtagtctatggtgtgctcgttctgtggttttggagtactccagtaactactgtccctaagcaccttctccagcccttcgggaggatgttttcctggagaggtgtagatgcttctacaggccgtgttgtggttggaattctcccatggctatttctgacctctcgtgtcagcaagctactgagcgagaaactcgcgcccatatttctgcatccttagctcctcctaacaactttagttttgcatctgtttttgttctgcagttttgtgtgatctctcaatccatctacatttatgtggtttccaaagggattggtatttttgtaattgtataaagtaataacgagtggaatttacactaagagaccgtttggatcactcattttagagttattggaatatacttaatagagtggactatttagggcc

SEQ ID NO: 154526 - DNA, 1374 bp, Zea Mays
aggccagaaagttaccccccggcccccgaccggaccaatctatcaccaccacgccgccctaggtcgtcgccggcaacaatgtccccttctgccatcttcgtcttcctcctcgtctctgcggtgcatatgctggagtgcatcctcgacctcaagaggaggaggggatccatttctgatgatcagctcagactgcgtgtagagatcacgcaacttctcaaggaggccagtgctttgtcaacgccctcgacgtttgcgcaagccgcaaaactgaagcggttggctggtgctaaagagaaggagctggcaaaaatgcaagatgtggacattagagggaaacagtctttatatgaaaaataccgaaaagttctgctggccgcaaaggtgcttcgtgattcgtgtagtttatgctctcaaccgttcgctctacgtacagtttgaggagtctcatcaaactaaatccgcatgccaggttgtagtctatggtgtgctcgttctgtggttttggagtactccagtaactactgtccctaagcaccttctccagcccttcgggaggatgttttcctggagaggtgtagatgcttctacaggccgtgttgtggtaagtactactgaacttttagcttaagggcctccatgtgtttaaatgatcttgcctttatcctctgttgagagtaacgcctattctgattgaaactgagagtcactacacattggtgatgtcttataataactaaaaagttccaaatgatgggtttttttctcaaacatgctggagaattggatgtcgatgggcattaagaaagaaaacaattatgatacagtactcctttatttttagggtctgtttaaaactgcttcaccaactccatcatggtatagcttaaaacaaaaactagtttttttggagttggcctttaacttcagttttcttcaagagcggagtttatgaagttgtttctgtttgactaaagttggaagcggagtcgcaaaagatagaacagtcccaaataggcctttaagcattacattccacctgtgaacaaatttgattaccaacaaagctccacctagtagcgacacattcattgtgagagtcactggtgaagttattttgcagcgtaatgtttcattgtgatggtgcaggttggaattctcccatggctatttctgacctctcgtgtcagcaagctactgagcgagaaactcgcgcccatatttctgcatccttagctcctcctaacaactttagttttgcatctgtttttgttctgcagttttgtgtgatctctcaatccatctacatttatgtggtttccaaagggattggtatttttgtaattgtataaagtaataacgagtggaatttacact

SEQ ID NO: 154527 - DNA, 1479 bp, Zea Mays
aagcgcagggaggccagaaagttaccccccggcccccgaccggaccaatctatcaccaccacgccgccctaggtcgtcgccggcaacaatgtccccttctgccatcttcgtcttcctcctcgtctctgcggtgcatatgctggagtgcatcctcgacctcaagaggaggaggggatccatttctgatgatcagctcagactgcgtgtagagatcacgcaacttctcaaggaggccagtgctttgtcaacgccctcgacgtttgcgcaagccgcaaaactgaagcggttggctggtgctaaagagaaggagctggcaaaaagtaagcgttgaattcctcagacattgcgtgggttcttgctgttcttgtttgggccgattcgggttgctggactctttcttttgtccattttatagtgcaagatgtggacattagagggaaacagtctttatatgaaaaataccgaaaagttctgctggccgcaaaggtgcttcgtgattcgtgtagtttatgctctcaaccgttcgctctacgtacagtttgaggagtctcatcaaactaaatccgcatgccaggttgtagtctatggtgtgctcgttctgtggttttggagtactccagtaactactgtccctaagcaccttctccagcccttcgggaggatgttttcctggagaggtgtagatgcttctacaggccgtgttgtggtaagtactactgaacttttagcttaagggcctccatgtgtttaaatgatcttgcctttatcctctgttgagagtaacgcctattctgattgaaactgagagtcactacacattggtgatgtcttataataactaaaaagttccaaatgatgggtttttttctcaaacatgctggagaattggatgtcgatgggcattaagaaagaaaacaattatgatacagtactcctttatttttagggtctgtttaaaactgcttcaccaactccatcatggtatagcttaaaacaaaaactagtttttttggagttggcctttaacttcagttttcttcaagagcggagtttatgaagttgtttctgtttgactaaagttggaagcggagtcgcaaaagatagaacagtcccaaataggcctttaagcattacattccacctgtgaacaaatttgattaccaacaaagctccacctagtagcgacacattcattgtgagagtcactggtgaagttattttgcagcgtaatgtttcattgtgatggtgcaggttggaattctcccatggctatttctgacctctcgtgtcagcaagctactgagcgagaaactcgcgcccatatttctgcatccttagctcctcctaacaactttagttttgcatctgtttttgttctgcagttttgtgtgatctctcaatccatctacatttatgtggtttccaaagggattggtatttttgtaattgtataaagtaataacgagtggaatttacact

SEQ ID NO: 154528 - DNA, 839 bp, Zea Mays
aagcgcagggaggccagaaagttaccccccggcccccgaccggaccaatctatcaccaccacgccgccctaggtcgtcgccggcaacaatgtccccttctgccatcttcgtcttcctcctcgtctctgcggtgcatatgctggagtgcatcctcgacctcaagaggaggaggggatccatttctgatgatcagctcagactgcgtgtagagatcacgcaacttctcaaggaggccagtgctttgtcaacgccctcgacgtttgcgcaagccgcaaaactgaagcggttggctggtgctaaagagaaggagctggcaaaaatgcaagatgtggacattagagggaaacagtctttatatgaaaaataccgaaaagttctgctggccgcaaaggtgcttcgtgattcgtgtagtttatgctctcaaccgttcgctctacgtacagtttgaggagtctcatcaaactaaatccgcatgccaggttgtagtctatggtgtgctcgttctgtggttttggagtactccagtaactactgtccctaagcaccttctccagcccttcgggaggatgttttcctggagaggtgtagatgcttctacaggccgtgttgtggttggaattctcccatggctatttctgacctctcgtgtcagcaagctactgagcgagaaactcgcgcccatatttctgcatccttagctcctcctaacaactttagttttgcatctgtttttgttctgcagttttgtgtgatctctcaatccatctacatttatgtggtttccaaagggattggtatttttgtaattgtataaagtaataacgagtggaatttacact

SEQ ID NO: 154529 - DNA, 1727 bp, Zea Mays
aagcgggggctgggcctcgacgcctctgctctgctctgctctcctcgcatatagggtttatcttctcccctcctctgcccccatctcgcttctcgcacacggcagccggattccgaagcgcaccccctcggccccagccaaaaggtagcacccgctgcggttcccgcttattggctgttggatctggcgtgtctaggagtgggattggggagtctatttggtgtgctccgatccgtttggggttcccatcgtttctcgttctgtggatgggcgtgtagattcagtgaggcgtttggtactgcaggaggcgcgcttgatttggtcgagttcttccatatgtgtggatcgagtggactctaatctgcccagctccagtgtcatgtgggtggggattggttgaccaatattttctgcggttgaatcttaacaagctgcatcgcagtttctaatcgtttggagagcacacaagaatgtcgttcgtgcagctctctggtgctggagtcgctgcagtggccttcacgaacaagagcctagtctctcggcacgcagcgctacgggtctgctcgtcgaggcgctcgatccgtagcctggtcgttaaggctgcaactgtcgtcaccccaaagtacacttcactgaagcctctgggagatagggtgcttgtgaagcttggtgccgcagaggagaagacagttggtggcattttgcttccatctactgcccagactaaaccacaaggaggtgaggttgttgctgttggagcaggaaggaccatcggggacaagaaaatagctgtggatatagagactggagcacaagtagtatactcaaagtatgctgggactgaggttgaattcaatgactcaaagcatcttattctcaaagaagacgatatcattggtattcttgagacagatgatgtgaaggacatgaagcctctcaatgaccgtgttctcatcaaggttgcagaagccgaagacaaaactcctgggggccttatcctcactgaaacaactaaagagaagccgtccataggaacggttgtagctgttggcccgggtcctctggacgaggaaggcaagagacagccactgtcagtgtcggcgggcagcacagtgctgtactccaagtatgcagggagtgagttcaagggcgcggatggcacggcctacattgtgttgagagcgtcggatgtgatggctgtcctgtcttgagcatttcgtttccggctcgttaatgtagtttgcagccaatagttgtcatgtggtatgaaacgatcgctttgtggtggtcatcacaccatgctggtgatcatcacaacatatgctgatactgttccggacaatcggctagaatttgttgtgtggcaggtataaacgtcagcatctgatagtgagagcactcggttacttctacagatggtatttaaggggtgatagtcacgcctctttgctggataatttcattggattctggactcctgttctgttacatccgttgggatttgtttgctgccaaactttaaacattcgtataaccagaaaaggttacatgaagaatataagtctctagttgatttttttaacaggggcggacgtattaagggttttttttggggtaccggcttctgctctggtggttttttccactcggaacaaatcataatgttagggctagtttggaaactttatattttaaaaaatttctatttttctaaagaaaaaaacaaa

SEQ ID NO: 154530 - DNA, 1501 bp, Zea Mays
ccccgctcggttcaagccggtaccgtacacctccagagtagcttaccccaaccaaatccatccaaattcaatcggaattcgcgtgcgcaagcccaaatcggaccacggtaatccaaaggccgcggcgtagcggacgcgcgggcgctggtgataaagcgggggctgggcctcgacgcctctgctctgctctgctctcctcgcatataggcatcgcagtttctaatcgtttggagagcacacaagaatgtcgttcgtgcagctctctggtgctggagtcgctgcagtggccttcacgaacaagagcctagtctctcggcacgcagcgctacgggtctgctcgtcgaggcgctcgatccgtagcctggtcgttaaggctgcaactgtcgtcaccccaaagtacacttcactgaagcctctgggagatagggtgcttgtgaagcttggtgccgcagaggagaagacagttggtggcattttgcttccatctactgcccagactaaaccacaaggaggtgaggttgttgctgttggagcaggaaggaccatcggggacaagaaaatagctgtggatatagagactggagcacaagtagtatactcaaagtatgctgggactgaggttgaattcaatgactcaaagcatcttattctcaaagaagacgatatcattggtattcttgagacagatgatgtgaaggacatgaagcctctcaatgaccgtgttctcatcaaggttgcagaagccgaagacaaaactcctgggggccttatcctcactgaaacaactaaagagaagccgtccataggaacggttgtagctgttggcccgggtcctctggacgaggaaggcaagagacagccactgtcagtgtcggcgggcagcacagtgctgtactccaagtatgcagggagtgagttcaagggcgcggatggcacggcctacattgtgttgagagcgtcggatgtgatggctgtcctgtcttgagcatttcgtttccggctcgttaatgtagtttgcagccaatagttgtcatgtggtatgaaacgatcgctttgtggtggtcatcacaccatgctggtgatcatcacaacatatgctgatactgttccggacaatcggctagaatttgttgtgtggcaggtataaacgtcagcatctgatagtgagagcactcggttacttctacagatggtatttaaggggtgatagtcacgcctctttgctggataatttcattggattctggactcctgttctgttacatccgttgggatttgtttgctgccaaactttaaacattcgtataaccagaaaaggttacatgaagaatataagtctctagttgatttttttaacaggggcggacgtattaagggttttttttggggtaccggcttctgctctggtggttttttccactcggaacaaatcataatgttagggctagtttggaaactttatattttaaaaaatttctatttttctaaagaaaaaaacaaa

SEQ ID NO: 154531 - DNA, 1718 bp, Zea Mays
ccattacggacacagccattccaccaaccaaccaagccaaacggtttatagccccgctcggttcaagccggtaccgtacacctccagagtagcttaccccaaccaaatccatccaaattcaatcggaattcgcgtgcgcaagcccaaatcggaccacggtaatccaaaggccgcggcgtagcggacgcgcgggcgctggtgataaagcgggggctgggcctcgacgcctctgctctgctctgctctcctcgcatatagggtttatcttctcccctcctctgcccccatctcgcttctcgcacacggcagccggattccgaagcgcaccccctcggccccagccaaaaggaggcgcgcttgatttggtcgagttcttccatatgtgtggatcgagtggactctaatctgcccagctccagtgtcatcatcgcagtttctaatcgtttggagagcacacaagaatgtcgttcgtgcagctctctggtgctggagtcgctgcagtggccttcacgaacaagagcctagtctctcggcacgcagcgctacgggtctgctcgtcgaggcgctcgatccgtagcctggtcgttaaggctgcaactgtcgtcaccccaaagtacacttcactgaagcctctgggagatagggtgcttgtgaagcttggtgccgcagaggagaagacagttggtggcattttgcttccatctactgcccagactaaaccacaaggaggtgaggttgttgctgttggagcaggaaggaccatcggggacaagaaaatagctgtggatatagagactggagcacaagtagtatactcaaagtatgctgggactgaggttgaattcaatgactcaaagcatcttattctcaaagaagacgatatcattggtattcttgagacagatgatgtgaaggacatgaagcctctcaatgaccgtgttctcatcaaggttgcagaagccgaagacaaaactcctgggggccttatcctcactgaaacaactaaagagaagccgtccataggaacggttgtagctgttggcccgggtcctctggacgaggaaggcaagagacagccactgtcagtgtcggcgggcagcacagtgctgtactccaagtatgcagggagtgagttcaagggcgcggatggcacggcctacattgtgttgagagcgtcggatgtgatggctgtcctgtcttgagcatttcgtttccggctcgttaatgtagtttgcagccaatagttgtcatgtggtatgaaacgatcgctttgtggtggtcatcacaccatgctggtgatcatcacaacatatgctgatactgttccggacaatcggctagaatttgttgtgtggcaggtataaacgtcagcatctgatagtgagagcactcggttacttctacagatggtatttaaggggtgatagtcacgcctctttgctggataatttcattggattctggactcctgttctgttacatccgttgggatttgtttgctgccaaactttaaacattcgtataaccagaaaaggttacatgaagaatataagtctctagttgatttttttaacaggggcggacgtattaagggttttttttggggtaccggcttctgctctggtggttttttccactcggaacaaatcataatgttagggctagtttggaaactttatattttaaaaaatttctatttttctaaagaaaaaaacaaa

SEQ ID NO: 154532 - DNA, 1641 bp, Zea Mays
ccattacggacacagccattccaccaaccaaccaagccaaacggtttatagccccgctcggttcaagccggtaccgtacacctccagagtagcttaccccaaccaaatccatccaaattcaatcggaattcgcgtgcgcaagcccaaatcggaccacggtaatccaaaggccgcggcgtagcggacgcgcgggcgctggtgataaagcgggggctgggcctcgacgcctctgctctgctctgctctcctcgcatatagggtttatcttctcccctcctctgcccccatctcgcttctcgcacacggcagccggattccgaagcgcaccccctcggccccagccaaaagcatcgcagtttctaatcgtttggagagcacacaagaatgtcgttcgtgcagctctctggtgctggagtcgctgcagtggccttcacgaacaagagcctagtctctcggcacgcagcgctacgggtctgctcgtcgaggcgctcgatccgtagcctggtcgttaaggctgcaactgtcgtcaccccaaagtacacttcactgaagcctctgggagatagggtgcttgtgaagcttggtgccgcagaggagaagacagttggtggcattttgcttccatctactgcccagactaaaccacaaggaggtgaggttgttgctgttggagcaggaaggaccatcggggacaagaaaatagctgtggatatagagactggagcacaagtagtatactcaaagtatgctgggactgaggttgaattcaatgactcaaagcatcttattctcaaagaagacgatatcattggtattcttgagacagatgatgtgaaggacatgaagcctctcaatgaccgtgttctcatcaaggttgcagaagccgaagacaaaactcctgggggccttatcctcactgaaacaactaaagagaagccgtccataggaacggttgtagctgttggcccgggtcctctggacgaggaaggcaagagacagccactgtcagtgtcggcgggcagcacagtgctgtactccaagtatgcagggagtgagttcaagggcgcggatggcacggcctacattgtgttgagagcgtcggatgtgatggctgtcctgtcttgagcatttcgtttccggctcgttaatgtagtttgcagccaatagttgtcatgtggtatgaaacgatcgctttgtggtggtcatcacaccatgctggtgatcatcacaacatatgctgatactgttccggacaatcggctagaatttgttgtgtggcaggtataaacgtcagcatctgatagtgagagcactcggttacttctacagatggtatttaaggggtgatagtcacgcctctttgctggataatttcattggattctggactcctgttctgttacatccgttgggatttgtttgctgccaaactttaaacattcgtataaccagaaaaggttacatgaagaatataagtctctagttgatttttttaacaggggcggacgtattaagggttttttttggggtaccggcttctgctctggtggttttttccactcggaacaaatcataatgttagggctagtttggaaactttatattttaaaaaatttctatttttctaaagaaaaaaacaaa

SEQ ID NO: 154533 - DNA, 1633 bp, Zea Mays
ccattacggacacagccattccaccaaccaaccaagccaaacggtttatagccccgctcggttcaagccggtaccgtacacctccagagtagcttaccccaaccaaatccatccaaattcaatcggaattcgcgtgcgcaagcccaaatcggaccacggtaatccaaaggccgcggcgtagcggacgcgcgggcgctggtgataaagcgggggctgggcctcgacgcctctgctctgctctgctctcctcgcatatagggtttatcttctcccctcctctgcccccatctcgcttctcgcacacggcagccggattccgaagcgcaccccctcggccccagccaaaagtttctaatcgtttggagagcacacaagaatgtcgttcgtgcagctctctggtgctggagtcgctgcagtggccttcacgaacaagagcctagtctctcggcacgcagcgctacgggtctgctcgtcgaggcgctcgatccgtagcctggtcgttaaggctgcaactgtcgtcaccccaaagtacacttcactgaagcctctgggagatagggtgcttgtgaagcttggtgccgcagaggagaagacagttggtggcattttgcttccatctactgcccagactaaaccacaaggaggtgaggttgttgctgttggagcaggaaggaccatcggggacaagaaaatagctgtggatatagagactggagcacaagtagtatactcaaagtatgctgggactgaggttgaattcaatgactcaaagcatcttattctcaaagaagacgatatcattggtattcttgagacagatgatgtgaaggacatgaagcctctcaatgaccgtgttctcatcaaggttgcagaagccgaagacaaaactcctgggggccttatcctcactgaaacaactaaagagaagccgtccataggaacggttgtagctgttggcccgggtcctctggacgaggaaggcaagagacagccactgtcagtgtcggcgggcagcacagtgctgtactccaagtatgcagggagtgagttcaagggcgcggatggcacggcctacattgtgttgagagcgtcggatgtgatggctgtcctgtcttgagcatttcgtttccggctcgttaatgtagtttgcagccaatagttgtcatgtggtatgaaacgatcgctttgtggtggtcatcacaccatgctggtgatcatcacaacatatgctgatactgttccggacaatcggctagaatttgttgtgtggcaggtataaacgtcagcatctgatagtgagagcactcggttacttctacagatggtatttaaggggtgatagtcacgcctctttgctggataatttcattggattctggactcctgttctgttacatccgttgggatttgtttgctgccaaactttaaacattcgtataaccagaaaaggttacatgaagaatataagtctctagttgatttttttaacaggggcggacgtattaagggttttttttggggtaccggcttctgctctggtggttttttccactcggaacaaatcataatgttagggctagtttggaaactttatattttaaaaaatttctatttttctaaagaaaaaaacaaa

SEQ ID NO: 154534 - DNA, 1477 bp, Zea Mays
ccattacggacacagccattccaccaaccaaccaagccaaacggtttatagccccgctcggttcaagccggtaccgtacacctccagagtagcttaccccaaccaaatccatccaaattcaatcggaattcgcgtgcgcaagcccaaatcggaccacggtaatccaaaggccgcggcgtagcggacgcgcgggcgctggtgataaagcgggggctgggcctcgacgcctctgctctgctctgctctcctcgcatatagggtttatcttctcccctcctctgcccccatctcgcttctcgcacacggcagccggattccgaagcgcaccccctcggccccagccaaaagtttctaatcgtttggagagcacacaagaatgtcgttcgtgcagctctctggtgctggagtcgctgcagtggccttcacgaacaagagcctagtctctcggcacgcagcgctacgggtctgctcgtcgaggcgctcgatccgtagcctggtcgttaaggctgcaactgtcgtcaccccaaagtacacttcactgaagcctctgggagatagggtgcttgtgaagcttggtgccgcagaggagaagacagttggtggcattttgcttccatctactgcccagactaaaccacaaggaggtgaggttgttgctgttggagcaggaaggaccatcggggacaagaaaatagctgtggatatagaggttgcagaagccgaagacaaaactcctgggggccttatcctcactgaaacaactaaagagaagccgtccataggaacggttgtagctgttggcccgggtcctctggacgaggaaggcaagagacagccactgtcagtgtcggcgggcagcacagtgctgtactccaagtatgcagggagtgagttcaagggcgcggatggcacggcctacattgtgttgagagcgtcggatgtgatggctgtcctgtcttgagcatttcgtttccggctcgttaatgtagtttgcagccaatagttgtcatgtggtatgaaacgatcgctttgtggtggtcatcacaccatgctggtgatcatcacaacatatgctgatactgttccggacaatcggctagaatttgttgtgtggcaggtataaacgtcagcatctgatagtgagagcactcggttacttctacagatggtatttaaggggtgatagtcacgcctctttgctggataatttcattggattctggactcctgttctgttacatccgttgggatttgtttgctgccaaactttaaacattcgtataaccagaaaaggttacatgaagaatataagtctctagttgatttttttaacaggggcggacgtattaagggttttttttggggtaccggcttctgctctggtggttttttccactcggaacaaatcataatgttagggctagtttggaaactttatattttaaaaaatttctatttttctaaagaaaaaaacaaa

SEQ ID NO: 154535 - DNA, 1809 bp, Zea Mays
ccattacggacacagccattccaccaaccaaccaagccaaacggtttatagccccgctcggttcaagccggtaccgtacacctccagagtagcttaccccaaccaaatccatccaaattcaatcggaattcgcgtgcgcaagcccaaatcggaccacggtaatccaaaggccgcggcgtagcggacgcgcgggcgctggtgataaagcgggggctgggcctcgacgcctctgctctgctctgctctcctcgcatatagggtttatcttctcccctcctctgcccccatctcgcttctcgcacacggcagccggattccgaagcgcaccccctcggccccagccaaaaggtagcacccgctgcggttcccgcttattggctgttggatctggcgtgtctaggagtgggattggggagtctatttggtgtgctccgatccgtttggggttcccatcgtttctcgttctgtggatgggcgtgtagattcagtgaggcgtttggtactgcaggaggcgcgcttgatttggtcgagttcttccatatgtgtggatcgagtggactctaatctgcccagctccagtgtcatgtgggtggggattggttgaccaatattttctgcggttgaatcttaacaagctggcgcgtatttctcgtagtttccatcatttctctgagatttcgatggttatgacatttccctcgatattaggttggtttttggccaatttaagctcagttagtgtctgtctgaaattgcagcatcgcagtttctaatcgtttggagagcacacaagaatgtcgttcgtgcagctctctggtgctggagtcgctgcagtggccttcacgaacaagagcctagtctctcggcacgcagcgctacgggtctgctcgtcgaggcgctcgatccgtagcctggtcgttaaggctgcaactgtcgtcaccccaaagtacacttcactgaagcctctgggagatagggtgcttgtgaagcttggtgccgcagaggagaagacagttggtggcattttgcttccatctactgcccagactaaaccacaaggaggtgaggttgttgctgttggagcaggaaggaccatcggggacaagaaaatagctgtggatatagagactggagcacaagtagtatactcaaagtatgctgggactgaggttgaattcaatgactcaaagcatcttattctcaaagaagacgatatcattggtattcttgagacagatgatgtgaaggacatgaagcctctcaatgaccgtgttctcatcaaggttgcagaagccgaagacaaaactcctgggggccttatcctcactgaaacaactaaagagaagccgtccataggaacggttgtagctgttggcccgggtcctctggacgaggaaggcaagagacagccactgtcagtgtcggcgggcagcacagtgctgtactccaagtatgcagggagtgagttcaagggcgcggatggcacggcctacattgtgttgagagcgtcggatgtgatggctgtcctgtcttgagcatttcgtttccggctcgttaatgtagtttgcagccaatagttgtcatgtggtatgaaacgatcgctttgtggtggtcatcacaccatgctggtgatcatcacaacatatgctgatactgttccggacaatcggctagaatttgttgtgtggcaggtataaacgtcagcatctgatagtgagagcactcggttacttctacagatggtatttaaggggtgatagtcacgcctctttgctggataatttcattggattctggactcctgttctg

SEQ ID NO: 154536 - DNA, 2511 bp, Zea Mays
tcttcccgtccgccgccagagcggggaacacctgcaccgccttcaccagcacttgccggagaggacgtgacctctcccgccgacaaatcggtcctcttcgtccgggcgtttatcaaggaataggtattcaagttttgtatcaccaagatggtgcagtacaattttaagaagatcacggttgtccctcctgggaaggacttcattgacataatcctgtcccgcacccaaaggcagacaccgacagttgtccacaagggatatgctatctcccgcattcgtcagttttatatgcgcaaggttaggtattcccagcagaacttctatgaaaagctctcgaccatcatagatgagtttcctcgactggatgacatccaccctttctatggtgatctcctccatgtgctctacaacaaggatcactacaagcttgccctgggtcagattaacacagctaggaacatcattgcaaagatatccaaggactacttgaggttgctcaagtatggagactctctttaccggtgcaagtgtctgaaggtggctgcactaggtcgcatgtgcactgtcgttaagaggatcagtcctagtttggcttacttagagcagatccgacagcacatggctaggcttccatccatagacccaaacacccgtactgtgctgatttgtggatatccaaatgtggggaagagttctttcatgaacaaggttacaagggcagatgtggatgtccagccgtatgcctttacaacgaaatccctgtttgttggtcatacagattacaagtacctgcgctaccaagtgattgacacaccgggtatacttgatcggccttttgaagataggaacatcatagaaatgtgcagcatcactgctctggcacacttgagggctgcagtgttgttctttctggacatctctggatcttgtggatacagtattgctcagcaagctgctctcttccacagtataaagtctctgttcatgaataagcctttggtcattgtgtgcaacaagactgacttgcagccacttgaagggctttctgaggatgacatgaagctagtcatggagatgaaggcagaggctttgaagactataatccaagctggtggtcctaatgatgagggtgttttgttgactatgagcactttaactgatgatggtgtaatggctgtcaaaaatgctgcatgcgagaggcttcttgaacagagggtggatgtaaagatgaagtcaaaaaagatgatggattgcttgaatagatttcatgttgctctgccaaagcctcgtgacaacaaggagaggcctgtttgcatccctctggctgttctggaagctagggctaatgctgctgcaaaggaaaagaagcttgagaaggacattgagaatgagaatggaggtgctggggtctattctgcaagtctcaagaaacattatattttggccaatgatgaatggaaggaggatattcttccagagatactggatggtcacaatgttgccgattttctggatccagatatccttgtaaggtgtgaagagttggaaagggaggaagggcttcgtctggaagaacaagctgcagaagatgctttccagattgatggtcatgaactaactcaggaacagaaggagattttggctcagattaggaagaagaaggcattacttatccaagaacatagaatgaagaagagaactgcagaaagccgtcctattgtccctagaaagtttgacaaagataggaaattcacaactgataggatgggacgccagctttcatccatgggtatggatcctagtgctgccatgaatagaattcgcagtcagtctaggggtcgcaagcgtgagaggtcagtgagcagagctgcagcggatggtgacggtatggagatagatggccagcaaagcaacaagaaattgcgtcggacatcaaggtctaggtctaggtctaggtcacgtgctcctgaggaagtccttcctggagaaggattcaaggactctgagcagaagaaaaaggctatcaagaaagcaaaggccgctactaggaacaggaacaaggaagctcgtcgtggagaggctgaccgtgttattcccactttaaaaccaaagcatttgttttctgggaaacgcactcttggaaagacaagcaggcgataagctcagtacctcactggatctggtagtaaaggactggtgcaattttggtgtgagcaatttgatgaaacgggagcttttatgtctagcacttatgtatgctacttatttatgaaatgtcttgctgttgctgtatcatggtcctctttaagacagttttactagtttatacatgtattacttcgaattggttgggttactatatattagctttctggtgtttgattctcttaatggtacgaagttattcaactctcctacttaaaaatgtttgtaatgcatctgttggatctcaccatcggttcttccctccgcagctttgaggcaggaacttctcataatgattagttgctt

SEQ ID NO: 154537 - DNA, 985 bp, Zea Mays
gatccgctcgcgatcccagcatcgaacggctcagattcattcaacgcctcctcccactcctactgtccgccatttaaataccgtccccaccgtcccttcctctcccccactccactccactcaccaaacccaacccagagcagacaagcgtccaaggtccaaccaaagcaactgagctgcgagtccgggaagccggagagacagaggagaagcgcacaggcaccgctcgccggcgagaccgacgatgggcctcctggaacaccccctggaggccgtcgccttccgcctctactccctcccagtcccggaggcctccgcggccacgggcgccgccgccgcctggacctgcctcgcggcggcggtcctggcagccgccgcgggcgtttggcgcctctgcttgtccccgtccccacccccgtccgccgccgttgccgccgccgcgaatgcttcggggccggatcggtctcacgtggcggaggcgtcgccggagacgtcccggcgggcgccggagccggccgcggccgcggcggcgacgcccaaggagcggtacacggcgtactaccgcgacgtcgggtgctgctgctgcggtggtgaaagcgatgacgaggagggcgacgcggaggagcggggagacggcgacgtgttcctttcggacgacgacgggccgacgacggatcctttcgggtgggagtgggaggtggtgaggtcgctgcagcctcctctcagcctggcggcggagacgacggggcggaggtaccggaggagcccgacgacggggctcggcggcagcgtggtgcagctgtgggaccagggcgccgtgcgcggcctgacgcccgcggcgcgcccgcggccgagggcccgggtggtcgtcggcaccgtctcggccttctgaaaacatatccgcgcgcccgggtgtccaaacgagcaataaaactggcccgtctcgtgggagaaagaagagagaagattattagactgtgttcaa

SEQ ID NO: 154538 - DNA, 971 bp, Zea Mays
gatccgctcgcgatcccagcatcgaacggctcagattcattcaacgcctcctcccactcctactgtccgccatttaaataccccaccgccccttcctctcccccactccactccagtctccactcaccaaacccagcccagagcagacaagcgtcttggtccaaccaaagcaaccgagagctgcgagtccgggaagccggagagacagaggagaagcgcacaggcaccgctcgccggcgagaccgacgacggatgggcctcctggaacaccccctggaggccgtcgccttccgcctctactccctcccagtcccggaggcctccgcggccacgggcgccgccgccgcctggacctgcctcgcggcggcggtcctggccgccgccgctggcgtctggcgcctctgcttgtccctgtccccacccccgcccccgtccgccgccgttgccgccgccgccgcgaatgcttcggagccggatcggtctcacgtggcggaggcgtcgccggagccggccgcggccgcggcggcgacgcccaaggagcggtacacggcgtactaccgcgacgtcgggtgctgctgctgcggcggcgaaagcgatgacgaggaggacgacgcggaggagcggggagacggcgacgtgttcctttcggacgacgacgggccgacgacggatcctttcgggtgggagtgggaggtggtgtggtcgctgcagcctcctctcagcccggtggcggagacgacgggggggaggtaccggaggagcccgacgacggggctcggcggcagcgtggtgcagctgtgggactagggcgccgtgcgcggcctgacgcccgcggcgcgcccgcggccgagggcccgggtagtcgtcggcaccgtcgtctcggccttctgaaaacatatccggcgtccaaatgtgcaataaaactgagccttttcgtgggaagaaagaagagataagattattacgcagtt

SEQ ID NO: 154539 - DNA, 180 bp, Zea Mays
atgaccgaatcgaatatcgccgccgccgccgccggtagcgcttgtttgtacgccacacagcgcgagtggtcggacttccgcacccgccccgccgccccggccttacctgcacagccacagaggaagcgcgcggcgcgaccgccgccggggcgactggtccgcgcgaaccagtcccgctga

SEQ ID NO: 154540 - DNA, 842 bp, Zea Mays
ctatggttgaactccgagtagggagtgtcttgaggaacactcagtagatactcctctgcctttctcagggatgattggagaccacgaaggctttggattctgtcattcaacatcatcgtctgtaacagaaaacagcagttagaaataatcagatggcatcatttaatccattttcaggttatgtgaagttcctagataatagtaagaaaatattgacatcatccattgtgaagcatgtgcttaaaagactctggactgtggaagctcaccgtgcccttgtagttatgagccttgaggaagttcagcaaggggtacaaactctccttgtcctggaacaacttggacgacaggtgtcggttaaggaattgcactccatttccgatggacttcgacatggaaggacgaggaaaggaggcattgaagggctcaaaatcaagctcaagcacaaagttgctaacttactgtccatccaccagctgttccttgaatgccaagtactcagaaacactcagctcctccacagccagctcacttacattcacccgaatgtaatcccagacaccaggccttggcctgatagcaagtgcaacccatggggggagcacaattgcttcctatatgcagacaagggaaattagaaagagtaccttagtttcaattggcaagcactcaagcagacatctcagcagtgctagtgttacctgagcagcacgaagaatgtcttcaaagggtgcatacttctccttgtcactatcaaacagggcatcaaactccgcaagcagctgatggcgctgaagcattcccttgccctggtgaacatacctgtagaagtggtatttcac

SEQ ID NO: 154541 - DNA, 2305 bp, Zea Mays
ttttccttcacttgtattcaagcagccatgtctggcacagcaagctttctcaacaagaagcatcagcctaccacgttaaacaggcgattaacagaagaacacaacatcgccatcagtcagaaccacacgacctgggcaacagaacatcgcattgcactctggaagacaggtgaacgagcaggcatttttattcgaagcaaaaggtgcagccaattcccaccatactaggaaccaggccagcgctgcccaaaaacgctcaaacaaggaaaaaaaacgagaaggaaccaaagttcttggaaaccaagtacacataactccaatacacgactaacaatgcgaattgcggtgaaacagatcgaaatgcaggcgatggttctccggcctgggcttcttcttcttcttctttccccgtactaatcgaaggacagcggaacctggcttgcctggattccagaaagagatgcgtcagtagttcattcactcgtttaagactgctggaatgggaacgaacacgtgatcctctctggcaggcagaggcagaggcagaggcaggcatcaaacggcttaccaggctacggtacttcagggcgtagaacatctcgatgtagcggcgggtctcgcgcctctccaggttgctcacgtacttccagaacccgtacacgccggtcagggtcatcagcctctcggagtagagcttccaggtgtacctgagcaatccaaagcttgtagtgccgccctgtgagatcttgtcccagtagctcggatctgccttgcatttgtcaaagaagttgaccaggatatccgcggccttgtcgctgtggtaagggtcaatgtgcaggccagataccccgtccacgatgatctcagcagggccaccatggcaggtcgcgatcgttggcagaccgcacgtcatggactcgatcacagtcaggccgaacgcttcgtagaacgcaggctacccacacaaaaaaaaaacaaagtgatgaaatgattcagtgactgttgttgtctgaaagtagattgcaccgttgtgggaacttgggaggttagatattagatcaagtgtgtgtgtgtgtgtgcatatacctgcacgaatgcgcccttcgtatcgcaaatgtagcggtacagctccccgttgcggacgcggttcatctgcgccgagatccaccggatatggcccttcaacttgtactcgtcgatgaggctgtacatcttcttgaactccgcctgctcctccctgtccttggactccttgccgtggtcaccggcaacgatcacgaggttcgccagctccctcaggcgcgcgttcttgccgtacatctcgaccaggcctgtcatgttcttcacgcggtcgagacgcgccatcgagaagatgatcggcttcttcttgtccttcagcacgaacctggatgcaagtaaacaccaggtgttcagctcaggtgacagatagaaagatggatagatcatgcgatgggtgttggagtatttacaagctgattggctgcagtaagacatgcaaccagttttcagtatactcacttgtgctcggagttctcgacgtcgctgtagatgagctcctcgatttcaggatggaaggcagtgagtctcttgtcggtttccgtatacgggtagtaaacactcatgtctgctccaggggagacaatgttgaacttgggatcgaaaacatcgatgccatggacgacacggtagagcccaggaagagtgaacgcgatgtgggactcgtactgccccacggtgtccttgctgcagaaacaacacagaaaacatcacatactagttttatttactactaaagcacagcgatactaatatacaaattctaccttcccgcgatttcttggaatgtgctggtgatgatgaaatcggtgtggttcatggcaataaggtcagctgtgaactggcaagagaagtggtactggctgtcgaatttgtccaagtatatgtccgagttggggtatttggttttctccaaggcatgagcgatggtacactgcaatgactcccaacttgtgcgcgagcagagtggcgactaggttgccatcgctgtagttgccaatgataaggtcaggcttggcctgcatttctttcattatttcactggaaacatcctgcatgtatgtctccaggtatggccagacatcaaaacgagagatccacttgcggaggatgccattctcatttctgaagggaacgcgaatgatgtctgtgtgctcagtaccaatgaccttctccagccgctgaccgcacgtagtcccagcagcatcaggcaacagcctggtaacct

SEQ ID NO: 154542 - DNA, 1626 bp, Zea Mays
acgaaaaacaatctacggttgccaggtctgcgacgtcagtgccgacgaactcatggctcgcgagaggcccgtaaaaacatgatagccagatctgcgacgtcacggctgtcgccagtgatcgccattcgccaccctctccgttccattccaatccgttcagcggtcagcggaacatgatacggtctgcgcccttccaagcaatcacatcttcttccccgttataaatcgctcactcgctatcgtcggctacctgtatcctggcgacacccaacagcctgcttgccgcgcttgcattgaggggagttcggggagcggccggtgcggaaggaatcgacacagagttcagttcacatggctgctgaatcagagaacggcaactgcaaagcttgggcagcgagagatccttctggagttctctcaccacacagttttaaccgcagagcagtgcaaagcggcgatgtttcgctgaagatcatatactgtggagtctgttatgcagacgttgcttggacgcggaataagctcaatgattcaaaatatcctttggttcctgggcatgagatagctggagttgtaactcaggttggtgcagatgtcaaaggctttaaagtgggtgaccatgtaggtgttggaacatatgtgaactcttgccgtgattgtgagaactgcaatatctctctagacaaccattgcccaaaagcagtttatactttcaatggcattgatacagatggaactgtcacaaaggggggttactccactcacattgtagtccatgaaaggtattgcttcaaaatacccgatggctaccctttggcgaaggcagcacctcttctgtgtgctggaataaccgtgtatactccaatgatgcgacacaacatgaaccaacctggaaagtcacttggggtcattggtcttggtggtctgggtcacatggctgtgaaatttggtaaagcatttggtcttaaggtcacagttttcagtacaagtgaatcaaagagagatgaagccatcaacctccttggagcagataattttgttatatcatcagacacacagcaaatggagtccctgaagaactccctgcacttcataattgacactgcttccggtgaccatccatttgatccgtatttctctctccttaaggttggtggtgtgatgacattggtaggttttccaagtgagatcaaaatgcatcctgcaagccttatacttggtgcgcggaccttgtctggcagtgttgttggaggtataaaagacatccaagaaatggttaacttctgtgcagccaacaatatctatccggagattgagatcattaagatagattatatcaacgaggctctcgcgaggcttgttaatcgagatgtgaaataccgctttgtaatcgacatcgagaactccttcaagtagcgtgctagtgcacatgctctcgtctttctgttagtgttcaacagttcaagagctattacaaatgtgagtcatgccaaataaacttgatgtaaacaaccataattgaacagcaaggggaaacaggtatattgtgataatgaagtcgctctatgaatattcaactgcagtgttctctgacaaataatagcaactagtctgtctgcgatgtct

SEQ ID NO: 154543 - DNA, 1430 bp, Zea Mays
acggttgccaggtctgcgacgtcagtgccgacgaactcatggctcgcgagaggcccgtaaaaacatgatagccagatctgcgacgtcacggctgtcgccagtgatcgccattcgccaccctctccgttccattccaatccgttcagcggtcagcggaacatgatacggtctgcgcccttccaagcaatcacatcttcttccccgttataaatcgctcactcgctatcgtcggctacctgtatcctggcgacacccaacagcctgcttgccgcgcttgcattgaggggagttcggggagcggccggtgcggaaggaatcgacacagagttcacatggctgctgaatcagagaacggcaactgcaaagcttgggcagcgagagatccttctggagttctctcaccacacagttttaaccgcagagcagtgcaaagcggcgatgtttcgctgaagatcatatactgtggagtctgttatgcagacgttgcttggacgcggaataagctcaatgattcaaaatatcctttggttcctgggcatgagatagctggagttgtaactcaggttggtgcagatgtcaaaggctttaaagtgggtgaccatgggggttactccactcacattgtagtccatgaaaggtattgcttcaaaatacccgatggctaccctttggcgaaggcagcacctcttctgtgtgctggaataaccgtgtatactccaatgatgcgacacaacatgaaccaacctggaaagtcacttggggtcattggtcttggtggtctgggtcacatggctgtgaaatttggtaaagcatttggtcttaaggtcacagttttcagtacaagtgaatcaaagagagatgaagccatcaacctccttggagcagataattttgttatatcatcagacacacagcaaatggagtccctgaagaactccctgcacttcataattgacactgcttccggtgaccatccatttgatccgtatttctctctccttaaggttggtggtgtgatgacattggtaggttttccaagtgagatcaaaatgcatcctgcaagccttatacttggtgcgcggaccttgtctggcagtgttgttggaggtataaaagacatccaagaaatggttaacttctgtgcagccaacaatatctatccggagattgagatcattaagatagattatatcaacgaggctctcgcgaggcttgttaatcgagatgtgaaataccgctttgtaatcgacatcgagaactccttcaagtagcgtgctagtgcacatgctctcgtctttctgttagtgttcaacagttcaagagctattacaaatgtgagtcatgccaaataaacttgatgtaaacaaccataattgaacagcaaggggaaacaggtatattgtgataatgaagtcgctctatgaatattc

SEQ ID NO: 154544 - DNA, 1442 bp, Zea Mays
aactcatggctcgcgagaggcccgtaaaaacatgatagccagatctgcgacgtcacggctgtcgccagtgatcgccattcgccaccctctccgttccattccaatccgttcagcggtcagcggaacatgatacggtctgcgcccttccaagcaatcacatcttcttccccgttataaatcgctcactcgctatcgtcggctacctgtatcctggcgacacccaacagcctgcttgccgcgcttgcattgaggggagttcggggagcggccggtgcggaaggaatcgacacagaggcgagtctttttttgtcccctcccctcccctgtagtgtcaacgatgaaatttcagttcacatggctgctgaatcagagaacggcaactgcaaagcttgggcagcgagagatccttctggagttctctcaccacacagttttaaccgcagagcagtgcaaagcggcgatgtttcgctgaagatcatatactgtggagtctgttatgcagacgttgcttggacgcggaataagctcaatgattcaaaatatcctttggttcctgggcatgagatagctggagttgtaactcaggttggtgcagatgtcaaaggctttaaagtgggtgaccatgggggttactccactcacattgtagtccatgaaaggtattgcttcaaaatacccgatggctaccctttggcgaaggcagcacctcttctgtgtgctggaataaccgtgtatactccaatgatgcgacacaacatgaaccaacctggaaagtcacttggggtcattggtcttggtggtctgggtcacatggctgtgaaatttggtaaagcatttggtcttaaggtcacagttttcagtacaagtgaatcaaagagagatgaagccatcaacctccttggagcagataattttgttatatcatcagacacacagcaaatggagtccctgaagaactccctgcacttcataattgacactgcttccggtgaccatccatttgatccgtatttctctctccttaaggttggtggtgtgatgacattggtaggttttccaagtgagatcaaaatgcatcctgcaagccttatacttggtgcgcggaccttgtctggcagtgttgttggaggtataaaagacatccaagaaatggttaacttctgtgcagccaacaatatctatccggagattgagatcattaagatagattatatcaacgaggctctcgcgaggcttgttaatcgagatgtgaaataccgctttgtaatcgacatcgagaactccttcaagtagcgtgctagtgcacatgctctcgtctttctgttagtgttcaacagttcaagagctattacaaatgtgagtcatgccaaataaacttgatgtaaacaaccataattgaacagcaaggggaaacaggtatattgtgataatgaagtcgctct

SEQ ID NO: 154545 - DNA, 1555 bp, Zea Mays
aaacaatctacggttgccaggtctgcgacgtcagtgccgacgaactcatggctcgcgagaggcccgtaaaaacatgatagccagatctgcgacgtcacggctgtcgccagtgatcgccattcgccaccctctccgttccattccaatccgttcagcggtcagcggaacatgatacggtctgcgcccttccaagcaatcacatcttcttccccgttataaatcgctcactcgctatcgtcggctacctgtatcctggcgacacccaacagcctgcttgccgcgcttgcattgaggggagttcggggagcggccggtgcggaaggaatcgacacagagttcacatggctgctgaatcagagaacggcaactgcaaagcttgggcagcgagagatccttctggagttctctcaccacacagttttaaccgcagagcagtgcaaagcggcgatgtttcgctgaagatcatatactgtggagtctgttatgcagacgttgcttggacgcggaataagctcaatgattcaaaatatcctttggttcctgggcatgagatagctggagttgtaactcaggttggtgcagatgtcaaaggctttaaagtgggtgaccatgtaggtgttggaacatatgtgaactcttgccgtgattgtgagaactgcaatatctctctagacaaccattgcccaaaagcagtttatactttcaatggcattgatacagatggaactgtcacaaaggggggttactccactcacattgtagtccatgaaaggtattgcttcaaaatacccgatggctaccctttggcgaaggcagcacctcttctgtgtgctggaataaccgtgtatactccaatgatgcgacacaacatgaaccaacctggaaagtcacttggggtcattggtcttggtggtctgggtcacatggctgtgaaatttggtaaagcatttggtcttaaggtcacagttttcagtacaagtgaatcaaagagagatgaagccatcaacctccttggagcagataattttgttatatcatcagacacacagcaaatggagtccctgaagaactccctgcacttcataattgacactgcttccggtgaccatccatttgatccgtatttctctctccttaaggttggtggtgtgatgacattggtaggttttccaagtgagatcaaaatgcatcctgcaagccttatacttggtgcgcggaccttgtctggcagtgttgttggaggtataaaagacatccaagaaatggttaacttctgtgcagccaacaatatctatccggagattgagatcattaagatagattatatcaacgaggctctcgcgaggcttgttaatcgagatgtgaaataccgctttgtaatcgacatcgagaactccttcaagtagcgtgctagtgcacatgctctcgtctttctgttagtgttcaacagttcaagagctattacaaatgtgagtcatgccaaataaacttgatgtaaacaaccataattgaacagcaaggggaaacaggtatattgtgataatgaagtcgctct

SEQ ID NO: 154546 - DNA, 1463 bp, Zea Mays
aaaacaatctacggttgccaggtctgcgacgtcagtgccgacgaactcatggctcgcgagaggcccgtaaaaacatgatagccagatctgcgacgtcacggctgtcgccagtgatcgccattcgccaccctctccgttccattccaatccgttcagcggtcagcggaacatgatacgcctgcttgccgcgcttgcattgaggggagttcggggagcggccggtgcggaaggaatcgacacagagttcacatggctgctgaatcagagaacggcaactgcaaagcttgggcagcgagagatccttctggagttctctcaccacacagttttaaccgcagagcagtgcaaagcggcgatgtttcgctgaagatcatatactgtggagtctgttatgcagacgttgcttggacgcggaataagctcaatgattcaaaatatcctttggttcctgggcatgagatagctggagttgtaactcaggttggtgcagatgtcaaaggctttaaagtgggtgaccatgtaggtgttggaacatatgtgaactcttgccgtgattgtgagaactgcaatatctctctagacaaccattgcccaaaagcagtttatactttcaatggcattgatacagatggaactgtcacaaaggggggttactccactcacattgtagtccatgaaaggtattgcttcaaaatacccgatggctaccctttggcgaaggcagcacctcttctgtgtgctggaataaccgtgtatactccaatgatgcgacacaacatgaaccaacctggaaagtcacttggggtcattggtcttggtggtctgggtcacatggctgtgaaatttggtaaagcatttggtcttaaggtcacagttttcagtacaagtgaatcaaagagagatgaagccatcaacctccttggagcagataattttgttatatcatcagacacacagcaaatggagtccctgaagaactccctgcacttcataattgacactgcttccggtgaccatccatttgatccgtatttctctctccttaaggttggtggtgtgatgacattggtaggttttccaagtgagatcaaaatgcatcctgcaagccttatacttggtgcgcggaccttgtctggcagtgttgttggaggtataaaagacatccaagaaatggttaacttctgtgcagccaacaatatctatccggagattgagatcattaagatagattatatcaacgaggctctcgcgaggcttgttaatcgagatgtgaaataccgctttgtaatcgacatcgagaactccttcaagtagcgtgctagtgcacatgctctcgtctttctgttagtgttcaacagttcaagagctattacaaatgtgagtcatgccaaataaacttgatgtaaacaaccataattgaacagcaaggggaaacaggtatattgtgataatgaagtcgctct

SEQ ID NO: 154547 - DNA, 2033 bp, Zea Mays
ctctcccacgcactccgcaattccgcatcacgcagaggcagagcgaccaacccagaaccccaccccaccgcccgcaaccgcaagctcagattccctccccaccccaccccaccccaccgtcccgctcactccagcccagcccgcgtccccacagcccagcgacagcgggcaccggcggcatccagccatgtgcggcggcgccatcctgtcggacatcatcccgccgccgccaccgcggcgggtcacggctggccacctctggcccgagagcaagaagccgaggagggctgcatccggcaggaggggagcccccgtggagcagcatgagcaggaggaggatttcgaggccgacttcgaggagttcgaggtggagtccggcgagtcggagctcgagtccgaggacgagcccaagcccttcgccgcccccaggagcgcgctcgccagaggtggactaaacactggtgcagctggtgtcgatggccctgctgcaaattcagttaaaaggaagaggaagaaccagttcaggggtatccgccggcgcccgtggggcaaatgggctgctgagatcagagatcctcgcaagggcgtgcgcgtctggctcggtactttcaactcccccgaagaagctgccagagcttacgacgccgaggcacgcaggatccgcggcaagaaggctaaagtcaacttcccggatgaggttcctacggcggtttctcagaagcgccgtgctgctgggcctgcctctctgaaagcgcctaagatggacgttgaggaggagaagccgatcatcaagctcgcagtgaacaatatgaccaactcaaacgcatatcactaccctgccgtcgtcggccacaacatcatacccgagccattcatgcagactcagaacatgccattcgctcctctggtgaattatgctgccctagtgaacctgtcttcagaccaaggcagcaactcgttcggttgctcggacttcagcctcgagaacgactccaggacccctgacataacttcggtgcctgcgcccgttgccaccttggccgccgttggcgagtctgtgttcgtccagaacaccgccggccatgctgtggcgtctcctgcgacggggaacactggtgttgatctcgccgagttggagccgtatatgaatttcctgatggacggtggttcagacgactcgatcagcactctcttgagctgtgatggatcccaggacgtggtcagcaacatggacctttggagcttcgaggacatgcccatgtctgctggtttctactgaggctgaggcccagcgactggtgcttgtgtacatagggggggacaaagggaataatgttctggagatgaagaaacgcttgcgtgggcgtgcctgcaggcacgcgtgtagtagctgcggtattagtatatatgcttagatgttcagtcacttcctttaagtacaatttggcgctggacatgtaccttattttactatgtatccgtgacaacagctatgtgtctgctccttttattttcttgtctttgcttcaaaaaaatggctctgaacattgcgagtttgtactttgtagacaatatatatatatatatatgtgtgtatgtgcttggtttgcttcatccttcgatgcaatgtgagtagtgttctgtatgcaggcttgcatgtgctgatatgcgtgcagcacacgtctatgaaaaagcattcatgcgaaatagatggataatagcaatcaaattttcttcataatggatggataatgaacttctttttgagaagccggtttcgtggcacatgcatatggtctaggatggcacaacatgtacatcacctacaattcaatccatatattattacgatttttacccgtctattagcaattagcaacgactattttacgaaggagcttggagcatgggctaaaagtggataggtatgaaacttcacgcatagcgtgggctagcaaaaatcttgtttattttcattgtcagtgtttaattggtgaaggtgactgaacatctaagcatatcgtggataagtt

SEQ ID NO: 154548 - DNA, 1828 bp, Zea Mays
ctctcccacgcactccgcaattccgcatcacgcagaggcagagcgaccaacccagaaccccaccccaccgcccgcaaccgcaagctcagattccctccccaccccaccccaccccaccgtcccgctcactccagcccagcccgcgtccccacagcccagcgacagcgggcaccggcggcatccagccatgtgcggcggcgccatcctgtcggacatcatcccgccgccgccaccgcggcgggtcacggctggccacctctggcccgagagcaagaagccgaggagggctgcatccggcaggaggggagcccccgtggagcagcatgagcaggaggaggatttcgaggccgacttcgaggagttcgaggtggagtccggcgagtcggagctcgagtccgaggacgagcccaagcccttcgccgcccccaggagcgcgctcgccagaggtggactaaacactggtgcagctggtgtcgatggccctgctgcaaattcagttaaaaggaagaggaagaaccagttcaggggtatccgccggcgcccgtggggcaaatgggctgctgagatcagagatcctcgcaagggcgtgcgcgtctggctcggtactttcaactcccccgaagaagctgccagagcttacgacgccgaggcacgcaggatccgcggcaagaaggctaaagtcaacttcccggatgaggttcctacggcggtttctcagaagcgccgtgctgctgggcctgcctctctgaaagcgcctaagatggacgttgaggaggagaagccgatcatcaagctcgcagtgaacaatatgaccaactcaaacgcatatcactaccctgccgtcgtcggccacaacatcatacccgagccattcatgcagactcagaacatgccattcgctcctctggtgaattatgctgccctagtgaacctgtcttcagaccaaggcagcaactcgttcggttgctcggacttcagcctcgagaacgactccaggacccctgacataacttcggtgcctgcgcccgttgccaccttggccgccgttggcgagtctgtgttcgtccagaacaccgccggccatgctgtggcgtctcctgcgacggggaacactggtgttgatctcgccgagttggagccgtatatgaatttcctgatggacggtggttcagacgactcgatcagcactctcttgagctgtgatggatcccaggacgtggtcagcaacatggacctttggagcttcgaggacatgcccatgtctgctggtttctactgaggctgaggcccagcgactggtgcttgtgtacatagggggggacaaagggtaagagcctgcagtaacagagattggctctttctggtacttgcaatttctatcccttcaactctttcttccgcccccgtgtttcaggaataatgttctggagatgaagaaacgcttgcgtgggcgtgcctgcaggcacgcgtgtagtagctgcggtattagtatatatgcttagatgttcagtcacttcctttaagtacaatttggcgctggacatgtaccttattttactatgtatccgtgacaacagctatgtgtctgctccttttattttcttgtctttgcttcaaaaaaatggctctgaacattgcgagtttgtactttgtagacaatatatatatatatatatgtgtgtatgtgcttggtttgcttcatccttcgatgcaatgtgagtagtgttctgtatgcaggcttgcatgtgctgatatgcgtgcagcacacgtctatgaaaaagcattcatgcgaaatagatggataatagcaatcaaattttcttcataa

SEQ ID NO: 154549 - DNA, 1056 bp, Zea Mays
aggtctatccatacctcctctctctctggtgcccagaaggttaaggagattcttgaagggcacgagagttggtgcaagtctgagtttcgaatggagccagaaatatttaaagccacatcaaattttcttagaagagagggtttgttacgtgacacacgaggagttaacgtcgaagagcagcttgggatgttcatgtatatgatctcccacaatgccagtaaccaaatgcttcaaaaggcttttcaacatagtggagagaccatccatcgaaaaatatcagaagtttttgatatagttcccactctaactcagcggttcttttttccctttaacatgtcctaaacttcctttccttttatacaaaattgcattggagcaattgacggaacccatgtacctatcaccattgcagaagataaggctcctccttatcgaaataggaaagggtcactttcacaaaatgtgatgttagcatgtgactttgatctgaattttatatttatttcatgtgggtgggaaggctcagcctcagatgcaggggtccttcgatccgctatcagtaaagggttcagtgtaccagaaggaaaattttatcttgtggatggtgggtatgcaaatacatcatcctttattgccccatatcgaggagttaggtatcacctcagcgagtttagaaggcgtcgttcatcacaagctagttatgtgaactacaaagagctattcaaccatcgtcatgccattcttcacaaccacatcgaaagagccattggtgttctgaagaaaaggtttccaattctcaaagtaggcacatttcatcctatccaaaatcaaatcaagatagcagcaacagctgttgattttcacaacataattagagggcaaaacggtgatgaaggttggcttgaccaccaaccagatcatatatctccaagccagtatgttgaagtcccagagggagacaacaactaccccaatgatatggactcaagtgatggaagcaacctgagagatcagattgctctccaaatgtgggctgcctacaatagctagtttagg

SEQ ID NO: 154550 - DNA, 1978 bp, Zea Mays
acaaccatggcggccgtcacgttctcaccgccgctcctcctggccatccttctcatcctcaccaccgccagcacaactcaatgccacggtcacaagagccagcgccaccacaccggcggaactagagtggcccaaaagaccgccgcggcgggagccagcccgccggccgacactgtccaccacgccatctgccacacgacgccgcatccggtctcctgcctgttggccgtggcctcgcacctcggcgccgtcgccggcgcgaaggcggccgaggcgtccgctgtctctgtgcagctcctcccgccgaacgtgctgtccgtcgcgctggcgtccctcaacggggcggagtcggcgctgtcctcgctctcgccggcgctctccgccctctccgcgccggccgcctccccggcgggcgcctcgctccgccgcggcgcggcgcaggactgccaggacctccacgccgccacgctgtggtcgctgtcgcgctccgcctcgctgctcgcggcgcccggcgagagcctcccggccgtgcgcgcgcacctcgcggccgcgctcgccaacaaggccacctgcctcgacgggctcgccggcgcgtccggcccgcgggtcggcggcctcctcgcgtccctcgacgacgcctacgagcacgtgtccaactcgctcgccctcgtcgccaggcgcggcggcggcgtgtctgctgctggcttcgtggacgtcgtggcgaagacaattcacaaccggcggctgctccaggacgacgacgacgacgacggcaacggaggagacgacgacaacgacaacggaggagacgacaacgatggcggggctgacaacggtggcaacactgggcagccggcggcggctacggtgatcactgtggcgaaggatgggacggggaacttccggaccgtgggggaggcggtggctgcggcgccgaacaacagcgaggcgaggacggtgatccgcgtgaaggccgggacgtacgaggagaacgtggaggttctgccgtacaagaaaaacatcgccctggtcggcgaagggcgcgacacgacggtcatcaccggcagccgcagcgccgccgacggctggaccacctttcgctcggccactttcggcgtctccggcgaggggttcctggcgcgcgacatcacgttccgcaacacggcgggcgcgggcaaggggcaggcggtggcgctgcgcgtgaacgcggacctggccgcgctgtaccgctgcggcgtggaggggcaccaggacgcgctgtacgcgcactcgttccggcagttctaccgcgagtgcgccgtgtcgggcaccgtcgacgtggtcttcggcgacgcggcggccgtgctgcagggctgcgcgctcctggccagggcgcccgtgcccggccagtccgtcgtgctcacggcgcacggccgcgccgaccccaacgaggacacgggcatcgcgctgcaccactgcaccgtctccgcctccgccgccgaccccgcgcccgccggcacgcgcacgttcctgggccggccgtggggcgcgtacgcgcgcgccgtcgtgatggactcctacctgggccagatcgtggaccgggagggatgggccgagtggcccggcgccgagcccggccgcgcggacaccgtgtacttcggcgagtacgggaacgacgggccgggggccgacacgggaggccgcgtgggctgggctggggtgcggcagatggagtacgacgaggcggcacagttcgccgtcgagaacttcatctacggcgacgagtggctcggcgccacctccttcccctacgatgacgacgtctgattcggcgcaaaccttgctctgcaaatctcaagaatacaaaggccgcacaagtgaccgtgtaaagctatgcatacccatcatcagccgtcagtgagtttggcttgtgttttagtatattcaagttggaattgttaagaggggtctcacatctctatataaggaatctgtacac

SEQ ID NO: 154551 - DNA, 1512 bp, Zea Mays
atgctaagccgcggagccgtgcggttgctgttgtatcgtctccggcctccgcctctgcgtttgagttggaatccgagcggtgctatgccatccgccgccgccaaccgctcgagccgggaggaggttcacgccgagcggcgcgcttagcttgaggggttgcttgggttggcgggatggtggcggcgacggcgagttcaggaggagggtggacggagaggcggcggggatgaaggcgcaggtgctcaccacgcagcggcagctgatgcgcgatccggaggtgctgccgctcgaggaggccgccacaggcaagagcatgaacgtgaatggtgcctgtcggcgagggaagcggctagggtttccggagcaggcagcggctaagatggtggttgctgttgatgtagatgaagttcttggtagcttccttgcggctctgaacaaatttattgctgatcgttattcttggaatcactcagtatcagaatatcatgtatacgagttctttaagatatggaactgttctcgagaaagagctaattttcttgtccacgagttcttcacaacccattacttccaagatggcattcatcctattccgggggctcgagatgctctccaaactctttcttctttctgtagcttgtctgtagtaacatctcggcaggatgtaattaagaatcacacattggaatggattgagaagtattatccaggcttatttgagcagatccatttcgggaatcatttcgctttggaaggtcaatcaaggccaaaatcagagatttgcaggtctttcggcgctcaggttctaattgatgacaaccccagatatgctctagagtgtgctaatgatggcatgagggtccttctgttcgattacgaaagctcgtatccttggtgcaaaactggagccgatgaactgcatccgctggtgacaaaggttcacaactgggaagaagtcgaggagaaacttctctcttgggtagtacctgatagctgacactcttctgtcttgtgagaagcactgcttgagaccagcaaatgattccttttgcctggtttctaaaggaacctgatagggtgaaagactgcaatgttcctagagcttgattttcaatacagatgtcgatagcctctccaagagtcattctaaaacccactctaaatcatcatccgaagagtcatttgcataaatttgactccaactccaacagtttttctatatcctgggatatttttcattaaactctctattcacaataattagttaggatatggagagtcttggggatgttgtcaacgtaagctaggatattcagcttcattaccgcagcctggttgaggcatattcgactgtacttggtcagtctgagctgtaggcgcttctgctctcacacatcagaatcttgttttatccttttgccgcagccgggtgtactatgtatatatcgacgctgccatatggctaagatggtatttgaattgttctaatacagaaaactcgtgtgtgtgtgg

SEQ ID NO: 154552 - DNA, 303 bp, Zea Mays
ttttttttcaagagaataagagaagcaagcaagccccttgtaggttcagttgtgaagaagctcacagtcacagttgatataaaatacttgacagcgaatttatctgtaagcacagaagagtgtcgtcatgtcactaataaaactaatgctatgatattctgtagtcacacttgcttgtcatcatttagtaaatgtcaggttactaacattttaattaatcatgggattctgcatttatgtatgtatgtaaaggttgctttcgcatgcggtatatatgctgtagcttggaatgctgggcagtga

SEQ ID NO: 154553 - DNA, 751 bp, Zea Mays
gacgtcacacacaaactatgatgcgtttaagcacctaaaactcctagcccatggtctacagcaacgacgagtgcagtctaatcagaattccttgtcgtatcattcaatcacaagcaacagattcaacatcaaccagccgccaaacaaataaagcatgtccagcgtttgaggaccctaaccttaaatgctgctagggtacatgaacactctgaccttgcgcccctgcactcactcaggcgggaggttcgacttgaacttggcgcggacaacgccggagttgccgtgcgggcgggtgaccttaccccagatgcacctgtagcgggtctcactgctcttggtcttggccttgtagatgtacgccatgcgcttgccagcgtaccacgcgacgtcctccttggtgttcaccccctcgatctgcacaagcgacgtggtctcgtactggttcgacttggacctgcacagccaccaccgcaaccaccgttagcggaaacgaaccgaggaatggccagatccaagtaacacggacgggggaagaagcggaggcaatgagctcgcctcttgtatccgaggatggtgccccggacgtagagcctgacgcgctgccccgtgcgtcccttcaccatggtggccgcctacttccttccgcttccgcttccgcttccgccgccggatacggagagagagagagctcgtgcacattgggggaagacaacgagacggccgcaggcggagagaagaacgaacggcctcg

SEQ ID NO: 154554 - DNA, 1246 bp, Zea Mays
cgcattcgcatcgcatcgcaggtcgcatccgacgctagcggctagcctagccgaacagcctgagcgcgcgaagatggcgcccgccgacggcgagtcctccccgccgccgtgggtgccggtgtggacggccgcgtcgtgcgcgctcctggcgcacgtccgcaccgacgcgctccgggaggacgtcggcgaccaggccgcaaacagggtggacgagccactgatctcccacccgggcctcgccagctaccgcgtccgtgacctcccagacggcgtcgtctccggcgacttcaactacgtcatcaacctcctcgtccaccgcatggggcagtgcctcccgcgctctgccgccgccgtggcactcaacacgttcccaggcctggacccgcccgacgtcaccgcggcgctcgcggagatcctgcccaactgcgtcccgttcggcccctaccacctcctcctcgccgaggacgacgccgacaccgccgcaccagccgacccgcacggctgcctcgcctggctgggccgccaacccgcgcgcggcgtcgcgtacgtcagcttcggcacggtggcgtgcccgcggcctgacgagctccgcgagctggcggccgggctggaggcctcggccgcgccgttcctgtggtcgctgcgcgaggactcgtggacgctcctcccgccgggtttccttgaccgcgccgcgggcaccgggtccgggctcgtggtgccctgggcgccgcaggtggccgtgctgcgccacccttccgtgggcgcgttcgtgacgcacgccgggtgggcgtcggtgctggagggcgtgtccagcggggtgcccatggcgtgccgccccttcttcggcgaccagcggatgaacgcgcggtccgtggcgcacgtgtgggggttcggcgccgcgttcgagggcgccatgacgagcgccggagtggccgcggccgtggaggagctgctgcgcggggaggaaggggcgcggatgagggcaagggccaaggagctgcaggccttggtggccgaggcgttcgggccaggcggtgagtgcaggaagaacttcgacaggttcgtcgagatagtctgtcgcgcgtgaaaggtcgtcttgctgttcagaggttttaccaacagaagaacataatttgtagttgatacatgagttgcagcagcagtaacagcctcctgtatcttggctttggatctgtattcctgtcaccagttgtctgaaagcatcaagaaccttctgtcttctagc

SEQ ID NO: 154555 - DNA, 1654 bp, Zea Mays
acgcatcgcattcgcatcgcatcgcaggtcgcatccgacgctagcggctagcctagccgaacagcctgagcgcgcgaagatggcgcccgccgacggcgagtcctccccgccgccgcacgtggccgtggtcgccttcccgttcagctcccacgcggcggtgctgctctccatcgcgcgcgccctggctgccgccgcggcgccgtccggggccacgctctcgttcctctccaccgcgtcctccctcgcgcagctccgcaaggccagcagcgcctccgccgggcacgggctcccggggaacctgcgcttcgtcgaggtaccggacggcgcgcccgcggccgaggagaccgtgccggtgccgcggcagatgcagctgttcatggaggccgcggaggccggaggggtgaaggcctggctggaggcggcccgcgccgcggcgggcggcgccagggtgacctgcgtggtgggcgacgcgttcgtgtggcctgcggcggacgcggccgcctccgcgggggcgccgtgggtgccggtgtggacggccgcgtcgtgcgcgctcctggcgcacgtccgcaccgacgcgctccgggaggacgtcggcgaccaggccgcaaacagggtggacgagccactgatctcccacccgggcctcgccagctaccgcgtccgtgacctcccagacggcgtcgtctccggcgacttcaactacgtcatcaacctcctcgtccaccgcatggggcagtgcctcccgcgctctgccgccgccgtggcactcaacacgttcccaggcctggacccgcccgacgtcaccgcggcgctcgcggagatcctgcccaactgcgtcccgttcggcccctaccacctcctcctcgccgaggacgacgccgacaccgccgcaccagccgacccgcacggctgcctcgcctggctgggccgccaacccgcgcgcggcgtcgcgtacgtcagcttcggcacggtggcgtgcccgcggcctgacgagctccgcgagctggcggccgggctggaggcctcggccgcgccgttcctgtggtcgctgcgcgaggactcgtggacgctcctcccgccgggtttccttgaccgcgccgcgggcaccgggtccgggctcgtggtgccctgggcgccgcaggtggccgtgctgcgccacccttccgtgggcgcgttcgtgacgcacgccgggtgggcgtcggtgctggagggcgtgtccagcggggtgcccatggcgtgccgccccttcttcggcgaccagcggatgaacgcgcggtccgtggcgcacgtgtgggggttcggcgccgcgttcgagggcgccatgacgagcgccggagtggccgcggccgtggaggagctgctgcgcggggaggaaggggcgcggatgagggcaagggccaaggagctgcaggccttggtggccgaggcgttcgggccaggcggtgagtgcaggaagaacttcgacaggttcgtcgagatagtctgtcgcgcgtgaaaggtcgtcttgctgttcagaggttttaccaacagaagaacataatttgtagttgatacatgagttgcagcagcagtaacagcctcctgtatcttggctttggatctgtattcctgtcaccagttgtctgaaagcatcaagaaccttctgtcttctagc

SEQ ID NO: 154556 - DNA, 2348 bp, Zea Mays
accgtgagatgttgctgtggaacggcgacgagctgtgcatgccgccgccgccgccgccacccctgatgatggcgccgcagtactgcatgttgtcctcgccgagcgcgcgcagccggttgagctccgggagcacgacggcgccgaggtccggccggtccttgcggcgcagctcgcagcaccggagcgccatctcggcgaggcactgcgcctcctccaggggccagtcgggcacggcggggtccagcatgtcctgcagctcgccgcgctccagggcgcgtccgacgtggtgcgacagccccatgggcggcttcgccgtgatgatctgcagcagcatgacgccgaaggagtagacgtcggacttgacgccgagcatgcccgtctgctggtactccgggtcgatgtagcagaaggtccccgcggtggacgtcatccggtactgcgtcacggtgtcggcgacggacggcggcacgagccgcgccagcccgacgtcgctgatcttgctcacgtagttgcggtccagcaggatgttccccggcttgaggtcccggtgcaccagcggctcgggcttggtctggtgcaggaacagcagccccgtcgcgatctcggcgcagatgcggaaccggtgctgccacgggatgacgggcccgccggcgccgccggagcgccggaacaggcagtcgtccaggctgccgctggccatgtactcgtacacgaggcagccgtactccgggcacgcgccgaggaggagcaccatgttggggtgccggatgcagctcagcacctccacctcctgctggaactgcgaccggccctgcgccgcgtcgggccggagcaccttgatggccacctgcgtgtggtcgaggaagcccttgtacacggggccgtacccgccctcgcccaccttgcgcgcgtcgttgaagttgtccgtcgcctgctcgatctcctcgatgctgtagcgccggtaccgggcctcgtgggacatgccgctgccgccgcggttcttgcgctcctcggcctccttgagcagcttcttctccgcgctgatccgcttctggacctccatctccgcgatccgctgcgacgcctccgccgcctccatggccgccttcgcccgagccttctcccgctcgatcatcgccatcgcggagtcctccgttatccgcgagtcttgcgtcttctgctcctcctccatcttccaccgctgcagctccatggccttctgtttcgccgtcagcgcctccttgcaggccgtgctgtacatgtccattgtctgcttgagctccaggcgaagcctcttcatctccgcctccacgtcgtcctgctgttattattagggaaacagagagtttccctcgtcaagaattcaagatgcttgctaggaatggagatctgagtcgacagagggagtactcactactcaccatgccgagggagcagaaggaagagctgctgctctgcgagaaggtggtgtggtccatgccgccgaaggagtcgccgccccacttgctgggcgtgcgtgacatctcgaagctgtggtcgtagctgtccacggagccgttggacatccgcggcgggatcgccgggtggtggtcgacgctccggcggccggtgctgctgacaaacgagatgtcggccgagtccggcatggacatgtggctgaggtcggcgtacgacttgcgcgtgttcgcggggcccccgcgcgcgaacggcgagcggaagttgtccacccgcggcgtctcgccgtgctcgtggcctctcgacgacgaggaccaccggtgcgactgcggcggctcgggcttgagcgttgcggcaatctgcgacgactggatctgcgaccggagcggcgacacccgcggcgcggcgcgggtggagttgcgctgcgacgagaccttccccttgttgacgatgtacaccgagcagaagtctggggcgcccttggagatggtggtcgggatgtccgccttgaaccggacgaagccgcccctcgtcgtggcgccgaggacgagcttctccacggccgcctgcgccgagaactcgatgatggacttggccacgtcgtgctcgtccagcaccacgtccttgcaattgatctgcaatgcaacagacatatgtcacagcctgatcaaatccatcggtgcacgatcgacgacatgtatcctccgatcgtcgtgtacgtctttgcgggtgcagaagcatcggaacgggacgaagaggtccttcatgtgcgggtccgtcggctgcttgaacccggccgcgtcctccacgccgccggaggtgcccttggtgttgacgtggacaaggacgatggtctgccccttctgtaccagcgagtcgatggcccacttgag

SEQ ID NO: 154557 - DNA, 123 bp, Zea Mays
gtccaagtaagatgtagtaacttagagacggaaccaacaagagcctcacgaattcactctaaaaacgaactaaaaataaggaaaatgtttagtcctaaacaactcctgttgctaagttgagat

SEQ ID NO: 154558 - DNA, 164 bp, Zea Mays
aaagaacatgaagagaagcagatgataaagagaattgtgaacggatgcaagtgcaccgaactcaaagtatactaccagctaagcctccccactatcattttatctaaaaattagcatcaactgatatataccggaagaatgcatatataaactttatacccaat

SEQ ID NO: 154559 - DNA, 109 bp, Zea Mays
ggcaaggtcattcgtgtgtcacaggtgataaccaacggagccgtggtgtagtgattgcgaggaaccgttcgctcggagccttggatcatcaacgtcgagatctccactc

SEQ ID NO: 154560 - DNA, 3477 bp, Zea Mays
gtcagacagagacccgcaggcctgcaagcaccgagcagcatcgcccatccggccatcccccatcccgcatccaaggcctgcctcgcctgctcgttcgacctcaaccagtccgccctgtatatccatggcaggatgaagacgaggatagtgtactccagggagtttctgctgtcgcttggcgagttggagcattgcaagaagctgccccctgactttgatgcagcgctgcttagtgagctgcaggagctgtcagcgggtgtgcttgagagaaacaagggctactacaacacatcccagggacggccagatgggtcggtgggatatacttactcttctcgtggtgggaacactggagggaggtgggatactcgctcatctggatcaagtgatcgggatggggaacctgatcgtgagtctcagacacaggcagggcgtggtgcaaaccagtacagacgcaattggcagaacacggagcatgatggcctacttggccgtggtggtttccctaggccatcaggatatactgggcagttgtcatcaaaggatcatggcaatgcgcctcagctaaacaggacatcagaacgctaccagccaccacgtccttacaaggctgctcctttttcacggaaagacattgactcgattaatgatgagacattcgggtcttctgaattatcaaatgaggatagagcagaagaagaaaggaagcggagggcatcttttgagttgatgagaaaagagcaacataaagcagtgctaggaaagaagagtggtcctgatatcctgaaggagaatcccagtgatgatatattttcaaagttacagacatctactgcaaaggcaaatgccaaaactaaaaacgagaagttagatggttctgtagtatcctcatatcaggaagataccactaaaccatcttcagttctactagctcctgcagccaggccgcttgtcccgccgggttttgcaaatgcattcgctgacaagaagcttcagtcacagtcgtctaacatcacacatgagccgaagctagaggatgaccagtcagcaacagggttcacatctgaaagtaaagagaagggagtttctggtaacgatgctactatgggtccaaagcacacgcttccacctggtagtgttacctcttcagctgaattggcttctagcgttctgaaagggagcgaggattgggatgctgatgtaatggataagtattctattggaaaagaaggcaaatctaaaaatattgatccagttaggaaggatgattcagtagcaatcttagaacagttctttggcaatgttttatcgaaaagcggcagcaacctaccaacttatgttgagaaccagccattgaaaactgatgatgacatgatcacttctgtgccagaatcatccaaatttgctcattggtttcttgatgaagacttgaaacctgcagaagacttatcttcaaagagcctgctctccatgattgtcaaaaatgaaaatccaggtctagaaaatttaaaccatactcctttatctgatgctgctgcccagaatttatccccaagagcacctattgataaacttgattctgcatcagagcttatctcatttacatcctctacgcctgccaatggagttcttgaacaatgcatccattctgatgttccagaggcagttcctattatgacatgtgaggatcttgagcagacgatgttagcacaggttagcaatagcagctcaactcagataaatgctacaaaggagcaactgactgttatggatgaaccagttgccatgcagaaagtaactgtagataatcatgcatcacaacatcttctttcattgttgcaaaaaggaacagataataagggagcaccttccctgggtttccagagagaatcaactgatgaacctctgagtgttgacacaaatttaatggcaaatggtggaatatctggaagtgatccggttaacagtgttgaaaatgttcctacttctgggaaggacttgacattggaagcgttattcggggctgcatttatgaatgagctccactcgaaagatgcaccagtttctattcgaggagccacaactggtggtcctactgagtttgcagagatgggtaaaactctgttgtcatctagccatgaaggatactaccctgttgaacagaccgtacacttcaacaatactaaagatgctgctgtccgtagagaaccaggtattgagcattcagcagtacctggtctaagtcaggggagtgctagttttgacaagaaaggaatggaaattcatctgcctgaagaagataatttgtttaccatgagtgattctctgcttggtcaaaattctgatattttggcatcagtaggatccagcagggttgaagggctattgcctgaaaaggcacttgataacctcagctataggtttcaaagtcttgtgcctggtgatgcagaacacattcaagtatatggtcctgatgcacttggatctcatcctcgtgattctcagaatatgtatcatcttctacagggtaggcctcctatgatagcacctcaccctatgatggatcacattgttaataggaaacagccagctccatttgatatggcacagtcgatacaccatgattctcaccgttctttcccatctaatgtgaatcatatgcaacataatcttcatgggccaggggtccctcacttggaccctgctggacatattatgcgacaacacatgtccatgcctggaagatttcctccagaaggcttgccaagaggtgtccctccatctcagcctgtgcatcacatggctggttatagacctgaaatgggtaatgtaaataatttccatatgcaccctcgccagcccaactatggagaatttggattgatgatgccaggtccagaggtgaggggcaatcatccagaggcgttcgaaaggttgatccagatggagatgtcagccagatcgaagcaacagcaggtgcaccaccctgcaatggccgctggccgtgtgcctagtgggatgtacgggcacgagcttgatgcgaaattgagatacagatgatggatgcctggatgcttcactccgtacagaggacctggaggtgtggtttgttgtatgtgcgtggtcactctttgcccagactgctgtgtattatttctgctaacatggtttagcatcagccgtcggtcgcgactgattggaggcctgcctcacttgtagggttgtagcatgtacatctgaacgggtgatggaacggagtgggtctaagatctgtaggagcggaagtctaccgggaaaaggggttatggtgtgctgaatggaagacgtggcgtcgacgtcttagcagccacatgtgtaatgacgttttctgtctactgtttctgacgactatgcagtttccattttgtataagctctgttatgcaaaaggaaaaaaaaagaagaaaaaaaactgagtcagattaacagattggcgaca

SEQ ID NO: 154561 - DNA, 3479 bp, Zea Mays
gtcagacagagacccgcaggcctgcaagcaccgagcagcatcgcccatccggccatcccccatcccgcatccaaggcctgcctcgcctgctcgttcgacctcaaccagtccgccctgtatatccatggcaggatgaagacgaggatagtgtactccagggagtttctgctgtcgcttggcgagttggagcattgcaagaagctgccccctgactttgatgcagcgctgcttagtgagctgcaggagctgtcagcgggtgtgcttgagagaaacaagggctactacaacacatcccagggacggccagatgggtcggtgggatatacttactcttctcgtggtgggaacactggagggaggtgggatactcgctcatctggatcaagtgatcgggatggggaacctgatcgtgagtctcagacacaggcagggcgtggtgcaaaccagtacagacgcaattggcagaacacggagcatgatggcctacttggccgtggtggtttccctaggccatcaggatatactgggcagttgtcatcaaaggatcatggcaatgcgcctcagctaaacaggacatcagaacgctaccagccaccacgtccttacaaggctgctcctttttcacggaaagacattgactcgattaatgatgagacattcgggtcttctgaattatcaaatgaggatagagcagaagaagaaaggaagcggagggcatcttttgagttgatgagaaaagagcaacataaagcagtgctaggaaagaagagtggtcctgatatcctgaaggagaatcccagtgatgatatattttcaaagttacagacatctactgcaaaggcaaatgccaaaactaaaaacgagaagttagatggttctgtagtatcctcatatcaggaagataccactaaaccatcttcagttctactagctcctgcagccaggccgcttgtcccgccgggttttgcaaatgcattcgctgacaagaagcttcagtcacagtcgtctaacatcacacatgagccgaagctagaggatgaccagtcagcaacagggttcacatctgaaagtaaagagaagggagtttctggtaacgatgctactatgggtccaaagcacacgcttccacctggtagtgttacctcttcagctgaattggcttctagcgttctgaaagggagcgaggattgggatgctgatgtaatggataagtattctattggaaaagaaggcaaatctaaaaatattgatccagttaggaaggatgattcagtagcaatcttagaacagttctttggcaatgttttatcgaaaagcggcagcaacctaccaacttatgttgagaaccagccattgaaaactgatgatgacatgatcacttctgtgccagaatcatccaaatttgctcattggtttcttgatgaagacttgaaacctgcagaagacttatcttcaaagagcctgctctccatgattgtcaaaaatgaaaatccaggtctagaaaatttaaaccatactcctttatctgatgctgctgcccagaatttatccccaagagcacctattgataaacttgattctgcatcagagcttatctcatttacatcctctacgcctgccaatggagttcttgaacaatgcatccattctgatgttccagaggcagttcctattatgacatgtgaggatcttgagcagacgatgttagcacaggttagcaatagcagctcaactcagataaatgctacaaaggagcaactgactgttatggatgaaccagttgccatgcagaaagtaactgtagataatcatgcatcacaacatcttctttcattgttgcaaaaaggaacagataataagggagcaccttccctgggtttccagagagaatcaactgatgaacctctgagtgttgacacaaatttaatggcaaatggtggaatatctggaagtgatccggttaacagtgttgaaaatgttcctacttctgggaaggacttgacattggaagcgttattcggggctgcatttatgaatgagctccactcgaaagatgcaccagtttctattcgaggagccacaactggtggtcctactgagtttgcagagatgggtaaaactctgttgtcatctagccatgaaggatactaccctgttgaacagaccgtacacttcaacaatactaaagatgctgctgtccgtagagaaccaggtattgagcattcagcagtacctggtctaagtcaggggagtgctagttttgacaagaaaggaatggaaattcatctgcctgaagaagataatttgtttaccatgagtgattctctgcttggtcaaaattctgatattttggcatcagtaggatccagcagggttgaagggctattgcctgaaaaggcacttgataacctcagctataggtttcaaagtcttgtgcctggtgatgcagaacacattcaagtatatggtcctgatgcacttggatctcatcctcgtgattctcagaatatgtatcatcttctacagggtaggcctcctatgatagcacctcaccctatgatggatcacattgttaataggaaacagccagctccatttgatatggcacagtcgatacaccatgattctcaccgttctttcccatctaatgtgaatcatatgcaacataatcttcatgggccaggggtccctcacttggaccctgctggacatattatgcgacaacacatgtccatgcctggaagatttcctccagaaggcttgccaagaggtgtccctccatctcagcctgtgcatcacatggctggttatagacctgaaatgggtaatgtaaataatttccatatgcaccctcgccagcccaactatggagaatttggattgatgatgccaggcccatcaggtccagaggtgaggggcaatcatccagaggcgttcgaaaggttgatccagatggagatgtcagccagatcgaagcaacagcaggtgcaccaccctgcaatggccgctggccgtgtgcctagtgggatgtacgggcacgagcttgatgcgaaattgagatacagatgatggatgcctggatgcttcactccgtacagaggacctggaggtgtggtttgttgtatgtgcgtggtcactctttgcccagactgctgtgtattatttctgctaacatggtttagcatcagccgtcggtcgcgactgattggaggcctgcctcacttgtagggttgtagcatgtacatctgaacgggtgatggaacggagtgggtctaagatctgtaggagcggaagtctaccgggaaaaggggttatggtgtgctgaatggaagacgtggcgtcgacgtcttagcagccacatgtgtaatgacgttttctgtctactgtttctgacgactatgcagtttccattttgtataagctctgttatgcaaaaggaaaaaaaaagaagaaaaaaaactgagtcagattaacagatt

SEQ ID NO: 154562 - DNA, 1210 bp, Zea Mays
aatcaccgcaagggttgaggagtggaggctaaagcagagagataccgaggagtggatggggcatcggcaactgccccatgaattacgggaaagagtgagaagatttgttcattacaagtggctcgcaactcgaggcgtggacgaagagtctatattgagtgccctacctacagatcttcgccgcgacatcaagcgccacctttgcctgtatcttgttcgtagggtcccacttttctcccagatggacgatcagcttctagacgccatatgcgagcgcctggtatcgtccttgagcacagagggcacatacattgtccgagaaggcgacccagtgaccgagatgctgttcatcatccgcggcaagctggaaagctccacgacagacggtggccggacaggtttcttcaactcgatcaccctgaagcccggcgacttctgtggcgaggagctcctcggatgggcgctcgtccccaagcccaccgtcaacctgccactgtccacccggacggtgaaggcggttctcgaggtcgaggcgttcgctctccaggccgacgacctgaggttcgtcgccagccagttcaggcgcctccacagtaggaagctgcagcacacgttccggtactactcccaccactggaggacctgggccgcgtgcttcatccagcacgcctggcgccgcctgaggaggaggaagatggccaaggacctgagtctgagggagtcgttctcgtccacgggaccgtacgaaggcgatggcgacgacgcctcctcccctgaacagagtatcacacttaggagaggagccggcagcatcatcagggagctgcctaagttcaggaagccatcggagccggatttctcggcggagcatgacgactgactgactggcggaggactgagtggctgatacattgtttgttaaggcaaaagattggtgcttctgatcggttgttcatactgtacatacatatgtagtggtgcttgtcattgtattgtagggatcccaccgtagattagaaagattgcttgtgtccgctggccgagcagattttgcttcccgggtcagggctctaccattcttttttcttcttttcttccaagtgtgaaaaattgcagcaggatgtactgttgtctgtttctcttacaccggtctggttgttgattctgtgaaattttgttgtgtgactaccgagactctgatcattttaca

SEQ ID NO: 154563 - DNA, 572 bp, Zea Mays
atccaagctcaaacttaggggtttttggtcgaggagatctcatcacagatcctaaggaaatcgcaaagcagtacttgagatctgactttgttgttgatttggtggcttctttgcctttaccacagatcattatttggtctgtgataccagctatcaaatattcttcgtctgagcatggcaatgacatgctgcttctggttgctcttttccagtatatcctaagattatacctcatattttccttgaacgataaaatcgtcaaaattactgggggtgtttgcaaagactgcttggcatggggctgcctacaacctgctgttatacatgattgctagccatgttttaggagcgttgtggtaccttctatctgttgatcgtcagattgcgtgctggaaaaacttttgcgatgaaactgattgccacactcgatatctatattgtgatgtaaaaccagattcaatgtggaatgggacctcagtcttttctacttgtaatgctaagaacagtaccaaatttgactttggtatgttccagccactgttagcaaacaaaactcctaacgagagcttcct

SEQ ID NO: 154564 - DNA, 1792 bp, Zea Mays
cttccgggtccaaccaaaagttctgattcctaaactggcccgtactcccgtccaatcccaacccggcaacgcgagaatatatcaatccatcctcgcgtcgcgtgatctcatctcgccctcgctcacctacatctccgtccgcaagcgtcagccaggctgccccgggaggccgggaggaagcagatcggagaaggtgatctgttgtaatggctcgattgtacatcggcaacctggatccccgggtgaccgctcgggagctggaggacgagttccgcacgttcggggttcttcgcagtgtctgggttgctcggaaaccacctggctttgcgtttattgattttgatgataagagggacgcagaggatgcaatccgtgacctagatggcaagaatggatggagagttgagttatctcgtaatgccagcggtggtcgtggaggtcgtgaccggcatggtgggtctgagtccaagtgttacgagtgtggtgagactggccactttgctcgtgagtgccgtttgaggattggttctggaggtctaggcagcggaaggcgccgaagccgtagccgtagccgcagtcgcagtcccagatatcgccggagtccaagttacggtagaaggagttacagtcctgcagcacgctctccaaggcgtcgtagcgtctcaccagctcgtggacgcagctatagcaggtcaccacagcacaagggtgcacgtgaagaatctccctatgataatggataccgccgcagcaggagctagagccagatcgttgtatccgacgacgagcgttatgtgacagatattgggaaagctatggtcaataacctgcttgacagatccttcgtcgactgcttgactttggttaaggcatcgtcctgcactgcttaaacgactcggccgactacggctttcagttctgtcttcatggttttgttctgcgctctacattcttcgcacaccctcgcatgcttcattcagtctgccgtgtgttaatctgcctgcgtatcttctcgaagatgctgcgcatcgcaaaagcagtaatgaccttccttctcataccatttggtaaggtttgatttgctgacaaatgcagcatctggtaagtttctccccgtaggtttggtctccgtgctgcgtgcgctgctcctggttcaggaactgcagtatgttagatggatgaggatgactgaatgactcacctactcacgttatcatgccttcagaggacccaagttagtgagcgccaggaagtgaattgaccaggccaaatgctacgttgagccgactttggctttgctctgcgatctccacttgccaacatgtgttgccttcgacgaagtcttcttcgccttccgcttccttctctgcagcatcctgattgatattcttcattcttcgagtgacatgcagtcaccctaattgatcgtcatagagcctgcgttgaagtcgaatcccccctaatggacaatgtagttaaattgttattagcttgtttcttgttggatagactaatgtcagatgctgtttggtataaaatggtaaccatctggttgatgattggcggcgaactatttgttcagcacgtggttgctatatgacaagtcacaaggtattattaacctgagtggtaggctgcatttggatcaaccaggctggttgagaggcagcatgtgcttgtttggttgctcgtccgtgcatctagtagcttaagttgaagtgtttggttaatggttgtatgtatttttgtgctcattgcaccgcggaatgcagaatctgggcagctcgcttga

SEQ ID NO: 154565 - DNA, 1083 bp, Zea Mays
cttccgggtccaaccaaaagttctgattcctaaactggcccgtactcccgtccaatcccaacccggcaacgcgagaatatatcaatccatcctcgcgtcgcgtgatctcatctcgccctcgctcacctacatctccgtccgcaagcgtcagccaggctgccccgggaggccgggaggaagcagatcggagaaggcaagccacggatttccttctcgccttctggaccccatgtgatctgttgtaatggctcgattgtacatcggcaacctggatccccgggtgaccgctcgggagctggaggacgagttccgcacgttcggggttcttcgcagtgtctgggttgctcggaaaccacctggctttgcgtttattgattttgatgataagagggacgcagaggatgcaatccgtgacctagatggcaagaatggatggagagttgagttatctcgtaatgccagcggtggtcgtggaggtcgtgaccggcatggtgggtctgagtccaagtgttacgagtgtggtgagactggccactttgctcgtgagtgccgtttgaggattggttctggaggtctaggcagcggaaggcgccgaagccgtagccgtagccgcagtcgcagtcccagatatcgccggagtccaagttacggtagaaggagttacagtcctgcagcacgctctccaaggcgtcgtagcgtctcaccagctcgtggacgcagctatagcaggtcaccacagcacaagggtgcacgtgaagaatctccctatgataatggataccgccgcagcaggagctagagccagatcgttgtatccgacgacgagcgttatgtgacagatattgggaaagctatggtcaataacctgcttgacagatccttcgtcgactgcttgactttggttaaggttctcataactttctatatacctattatcttgtgtctactttataagtagcagtaaaaccttttgatgagtgtatttgttgaactaagacctactgtcttttcttgtgtggtaaaaaggcatcgtcctgcactgcttaaacgactcggccgactacggctttcagttctgtcttc

SEQ ID NO: 154566 - DNA, 1332 bp, Zea Mays
cttccgggtccaaccaaaagttctgattcctaaactggcccgtactcccgtccaatcccaacccggcaacgcgagaatatatcaatccatcctcgcgtcgcgtgatctcatctcgccctcgctcacctacatctccgtccgcaagcgtcagccaggctgccccgggaggccgggaggaagcagatcggagaaggcaagccacggatttccttctcgccttctggaccccatgtacttttttcccctgcctcgaaaccctagatctggttgattcgtgggccgtcctccccacccctccctcggccgaattccgcgtctggttttggtctcgagttttaagatctgtttgttttcgactggattttgagcgattcgttgctttgcttggcgtggctcgtcgctgattcgaatgttctcggtggctgtctgcctggctttgccgaaacctaactgctgtcgataaccgtttgtggcgaacgatttgcaggtgatctgttgtaatggctcgattgtacatcggcaacctggatccccgggtgaccgctcgggagctggaggacgagttccgcacgttcggggttcttcgcagtgtctgggttgctcggaaaccacctggctttgcgtttattgattttgatgataagagggacgcagaggatgcaatccgtgacctagatggcaagaatggatggagagttgagttatctcgtaatgccagcggtggtcgtggaggtcgtgaccggcatggtgggtctgagtccaagtgttacgagtgtggtgagactggccactttgctcgtgagtgccgtttgaggattggttctggaggtctaggcagcggaaggcgccgaagccgtagccgtagccgcagtcgcagtcccagatatcgccggagtccaagttacggtagaaggagttacagtcctgcagcacgctctccaaggcgtcgtagcgtctcaccagctcgtggacgcagctatagcaggtcaccacagcacaagggtgcacgtgaagaatctccctatgataatggataccgccgcagcaggagctagagccagatcgttgtatccgacgacgagcgttatgtgacagatattgggaaagctatggtcaataacctgcttgacagatccttcgtcgactgcttgactttggttaaggttctcataactttctatatacctattatcttgtgtctactttataagtagcagtaaaaccttttgatgagtgtatttgttgaactaagacctactgtcttttcttgtgtggtaaaaaggcatcgtcctgcactgcttaaacgactcggccgactacggctttcagttc

SEQ ID NO: 154567 - DNA, 1038 bp, Zea Mays
cttccgggtccaaccaaaagttctgattcctaaactggcccgtactcccgtccaatcccaacccggcaacgcgagaatatatcaatccatcctcgcgtcgcgtgatctcatctcgccctcgctcacctacatctccgtccgcaagcgtcagccaggctgccccgggaggccgggaggaagcagatcggagaaggtgatctgttgtaatggctcgattgtacatcggcaacctggatccccgggtgaccgctcgggagctggaggacgagttccgcacgttcggggttcttcgcagtgtctgggttgctcggaaaccacctggctttgcgtttattgattttgatgataagagggacgcagaggatgcaatccgtgacctagatggcaagaatggatggagagttgagttatctcgtaatgccagcggtggtcgtggaggtcgtgaccggcatggtgggtctgagtccaagtgttacgagtgtggtgagactggccactttgctcgtgagtgccgtttgaggattggttctggaggtctaggcagcggaaggcgccgaagccgtagccgtagccgcagtcgcagtcccagatatcgccggagtccaagttacggtagaaggagttacagtcctgcagcacgctctccaaggcgtcgtagcgtctcaccagctcgtggacgcagctatagcaggtcaccacagcacaagggtgcacgtgaagaatctccctatgataatggataccgccgcagcaggagctagagccagatcgttgtatccgacgacgagcgttatgtgacagatattgggaaagctatggtcaataacctgcttgacagatccttcgtcgactgcttgactttggttaaggttctcataactttctatatacctattatcttgtgtctactttataagtagcagtaaaaccttttgatgagtgtatttgttgaactaagacctactgtcttttcttgtgtggtaaaaaggcatcgtcctgcactgcttaaacgactcggccgactacggctttcagttc

SEQ ID NO: 154568 - DNA, 866 bp, Zea Mays
cttccgggtccaaccaaaagttctgattcctaaactggcccgtactcccgtccaatcccaacccggcaacgcgagaatatatcaatccatcctcgcgtcgcgtgatctcatctcgccctcgctcacctacatctccgtccgcaagcgtcagccaggctgccccgggaggccgggaggaagcagatcggagaaggtgatctgttgtaatggctcgattgtacatcggcaacctggatccccgggtgaccgctcgggagctggaggacgagttccgcacgttcggggttcttcgcagtgtctgggttgctcggaaaccacctggctttgcgtttattgattttgatgataagagggacgcagaggatgcaatccgtgacctagatggcaagaatggatggagagttgagttatctcgtaatgccagcggtggtcgtggaggtcgtgaccggcatggtgggtctgagtccaagtgttacgagtgtggtgagactggccactttgctcgtgagtgccgtttgaggattggttctggaggtctaggcagcggaaggcgccgaagccgtagccgtagccgcagtcgcagtcccagatatcgccggagtccaagttacggtagaaggtgaatgtacacgtgtttctttttctaccctattcactgactatatacttattagtgcatatacccctactgtactacagactttatatcaaggccccaagccacttagtttttttctgttccattctgaactcagatcagacatatacatgaatcacttgctctttgttttttttgggaatgactatggatcatgcacttatggggaagtttctaggatttcctctggccttcacattcgttaaca

SEQ ID NO: 154569 - DNA, 1876 bp, Zea Mays
aatcagagcagcagcggctttacattacagacacaagcaaccagccggcatcactgcaggcacgcacagtgacagtacccatcaggaaaagcagaaagaaaagttcttgtgccggcaccggcagcctgcagcagctgcggcgcaggctttctgcattctgaatactagggatagggagtagtatttggttgcagatttgcaggcctgaactccactggcttcctcatcctcggatcccccaccctaacgaaccctttgaccatcaccgctctgccactctgttgcatcgccgtccgtcggtgtcacggtgtgtccgtcaagtccgtcaccaaccctctcccgagtcccaaacaaaggccaaatccccgccccactcacactccacaccgtggtctcgcgccatgccgcgtctcccgtagacaacaaaccacgtcgcgtccctcttcgtcggcgtcgcggtggcggtccagtgatcacagctggtgcggagggagcaagaaaccaggaatggacgctcctcccgcgccgccgccgccgccggggtctcccgccatcgagcggaagctgagcccgggggtgctcctcctcatcgcgatcctggccatggtcttcttcatcttcggcctgctcaacctgctggcgcagaacctgctgcgcctgcgccgggcgcgccggcgccggcgggtcggggacgccgcggcgcccgacggcagcagccccacggcgttccagggccagctccagcagctcttccacctgcacgacgcgggcgtcgaccaggccttcatcgacgcgctgcccgtcttcccctaccgcgccgtcgccgtcggccgccgcgccgccaaggacgccgacgagccgttcgactgcgccgtctgcctctgcgagttcgccgacgacgacaagctccgcctgctcccgacgtgcggccacgcgttccacgtgccctgcatcgacgcctggctgctgtcgcactccacgtgcccgctctgccgcgccagcatcctcgccccccaggccgactactactactccagcccgtccccgccgccgtccttgctcgtgccccactcgtacggcctcgccgagacgcccgccgacgaggatccgggagccggagacggcgacgagtcacccaagcacgcggaggaggtcgtggaggtgaagctgggcaagctccggtgcttcgacggcaatgccagcgccagggacctggcggcgggcgacggcacgggtagcggcaacagcagtggcaggggaagcctcgggcagaggaggtgcctgtccatgggatcctacgagtacgtcatggacgaccacgccgcgctccgcgtcaccgtcaaggcaacaacccccaagaggaggcccgcgagcccgaggccgtcgcgccgccgccacgcgctgtcggcgtgcgacctcgggtgccccaggaaggcgggcgcgtgggagacggccgtcacggaggccgccgcgagcctcagcaaggacagcttctccacgtccaagatctggatggcgtcggccgccgggagagaggaggacggccgccggcccggccagagacgagccgcgtcgttccggtggccggcgatcgcctcgagcgcctgcaagtggcaccgcagggacgaggaacctttcgacgtcgaggcgggaagccccggcggcgacaatgccgtctcgtctctgacagaagagatgccaccgtcggtggctagggcggcgatggtctgggtcgccggcggggggcacgggagccattcgtgatccgcatttggtttgcacgttggttcaagttcaacacactacacacaagattggattttcttcttctttttgtgctcgtctgatttcttgtatgcttttgttttgttttgtt

SEQ ID NO: 154570 - DNA, 1328 bp, Zea Mays
aaatttggtttctgacgcatggattactcccgcggtcccgccagcatataagcagaccagcagtctaggccaacagggcatggcgaaaataaccgccgccgccgccgccgtgctagagtcccggagcctgcgcggcgcccgcgccgttcgactcctccacaggatacatcatcgcttcctcctcctcctcggcgccactgcacctaaagccggccgccgcaaggtggcgagatcgagggagcccaaaagcctcagggcggcggatgaaaagcaggagcaggacgtcgaggcacaggaccccaatgccgccgccgccgtttccgcttccgattctgcttccgaggcggccgtggcgggcaagtactgggcgcacaggtacagcctcttcaacctctatgaccgcggcgtgtgcatggacgccgagggctggtactccgccaccccggagtccatcgcggcgttgcaggccgcccgcgcggcacccggcgacctcgtcgtagacgcctttgccggatgcggcggcaactccatccaattcgccgccaggggctgctatgtggtcgccgtggagatcgacccccgaaaggtggagctggcggtgcacaacgcgagggtgtacggcgtcgaggacagaatcgagttcattgtcggtgacttcttccgcctggcgcctttcctcaaggctgatttggtgttcctttcaccaccatggggaggtccatcctacattgaagctccagtttacacccttgatatgctgaagccgaaggacgggtacgcgacatttcaagcagctcagaaaatagctcctaacgtcatgatgttcttgccgcggaccgtggacgtggctcaactggaggaactttcctggatgtcttgccctcccttagatttcgagactgaagagaactacgtgcaacacagatgcaaagggatcactgcctattttggaagacggtatcttcggactcgtatcagagagggagaagctcaaaagatacgaaggttgacacagcgccgaagctgtgaagcaggaaagcttcggcatgtttgcagaaaagggaaccgacttgaagatgaaaaggccatttagacctcgataaattactatagaattaccaccaaatgtaaagggcatgtatgtaattttgtatgggttgtaccccgtgcctataaataggtgaacagtacccctgtactgttcacgcggatttggtgttcacttttgcgtcacgcttgtactttcatttccttcaaattggaggtacatctgtaattcaacgttatttttatttatatataataatgatatatgatgatctacgcaa

SEQ ID NO: 154571 - DNA, 1068 bp, Zea Mays
aaatttggtttctgacgcatggattactcccgcggtcccgccagcatataagcagaccagcagtctaggccaacagggcatggcgaaaataaccgccgccgccgccgccgtgctagagtcccggagcctgcgcggcgcccgcgccgttcgactcctccacaggatacatcatcgcttcctcctcctcctcggcgccactgcacctaaagccggccgccgcaaggtggcgagatcgagggagcccaaaagcctcagggcggcggatgaaaagcaggagcaggacgtcgaggcacaggaccccaatgccgccgccgccgtttccgcttccgattctgcttccgaggcggccgtggcgggcaagtactgggcgcacaggtacagcctcttcaacctctatgaccgcggcgtgtgcatggacgccgagggctggtactccgccaccccggagtccatcgcggcgttgcaggccgcccgcgcggcacccggcgacctcgtcgtagacgcctttgccggatgcggcggcaactccatccaattcgccgccaggggctgctatgtggtcgccgtggagatcgacccccgaaaggtggagctggcggtgcacaacgcgagggtgtacggcgtcgaggacagaatcgagttcattgtcggtgacttcttccgcctggcgcctttcctcaaggctgatttggtgttcctttcaccaccatggggaggtccatcctacattgaagctccagtttacacccttgatatgctgaagccgaaggacgggtacgcgacatttcaagcagctcagaaaatagctcctaacgtcatgatgttcttgccgcggaccgtggacgtggctcaactggaggaactttcctggatgtcttgccctcccttagatttcgagactgaagagaactacgtgcaacacagatgcaaagggatcactgcctattttggaagacggtgagatcactaagcctgttgggggccttcggcttccgaaggtcctcaaaaacatgatttaacagtgtttctagagtataatgtgtgaacaggtatcttcggactcgtatc

SEQ ID NO: 154572 - DNA, 3091 bp, Zea Mays
atggcaaaactgcattgccaatgggagtcagagggccgaaaccctaactcgtccacttttcaaatccacattccccccttatgcctctcacccgtcacccctcgccgtctccggcgagacccggaaatggatgtcgctgccaccccctcaaggtcaaaatctaagcccagatcctcgctggtgaatcccgtcgcagcccccgccgagtccaggatggacctctgcaccccatcgaagcccacgcccaggcggaactccaaatcgacggcctcgccggcgccaatgtctccgtcgacgccctacaccgtccggcgctcgcgccgcctcctcgaaacccccaccaaagccgccctggaggtgcaggtgaaggctacgctgacccctacctccaagggcaagcgcgccgcgccgtcacctaaaacccctgctcagcacgagcccaagaggcagaaacgacacccgaggaagagggcatactaccggaaggtggtgtatgacggcggggagttcgaggtcggtgatgacgtgtacgtgaagcggcgggaggcggcggagtctgacgcggaggaccccgaggaggaagagtgccgcgtatgcttccgcaccggtggcggggttatggtggagtgcgacgcgtgcctcggcggatttcacctgcgttgcgtgcgaccgccgcttcggagggtgcctgaaggtgactgggcatgtccatactgcgaggccgagcgcgccggaaaggtggtcgagcggcccaggccgcctgagggcaagcgcatcgtgaggactgccaaggagaaactcctttccagcgatctgtgggctgcacgcatcgagagtttatggagggagcctgatggcaccttctgggcaaaggtcaggtggtacattatccccgaagagactgcagcaggaaggcagctgcataacttgagaagagagctgtatcgtaccaatgatcttgcagacattgagatggaaacaatccttagacattgttctataatgtgccccaaagactttagggatgctaacgatggaggagatgatgtattttactgtgaatatgagtatgatattcattggcataattttaagcgtttggcagatattggtgatgaacccgagacaaaggaagatcccagtgacgagccttacaatgccagtgatgattataacagtgacactgatgaagattcagagtatgacgaggtggaagaacctacatcatctttctctgccagagggaatcaatcacatgaattggcagcgaattcaaggaagggtagaatatatggcctacaaaaaattggaatacgaaaaattcctgagcatgttcggtgccaccaaaagactgagctggagaaggctaaagcaaccctgttattggcaactctccctaagtcattaccttgcagggataaagaaatggaggagatatcgatatttgtaaaggatgcaatctgcaatgaccagtgcctaggacggtgcctttatatacatggtgtacctggtactggcaagactatgagtgtacttgctgttatgaggaggctgagatctgaatttgattctggaacactgaggccatattgttttattgaaattaatggtcttaaattagcatccccagagaatatctacaaggttgtatatgagcagttgagtgggcatagggttgggtggaaaaaggctcttcactatttaacagaacatttttcaggtggcactaaaattggaaagcaagcaaaccagccaattattttgctgatcgatgagctcgatcttcttttgacaagaaaccagtcggtgctgtataacatccttgattggcccaccaaaccatattcaaatctagttgtcataggtatagcaaacacaatggatcttccagaaaaattattgcctcgtatatcaagtcggatgggcattcaacgactgtgttttggtccatacaattatcggcaactacaggaaattataacaagccgtttaaaggggattgatgcctttgaagaacaagctattgaatttgcttctagaaaggtagctgctatgtcaggtgatgctaggcgagctttagagatttgtagacgagcagcagagtttgcagactaccgtgttaaacagtctcgacagtctgcacagaatactgtttctgcaaataaaggtgatggtgttgtttccatgggtgacatagaagctgctattcaggaagtcttccaggcaccgcatattcaagtgatgaagaattgtccaaagtttggaaaagttatcttggttgccatagttcatgagctgtacaaaagtggactaggtgaaataatgtttgataagttagcaacaacagttttctcctggtgccgtgcccacagagaactattgcctggatacgacactctcttgaaaatttgctgcaagcttggtgaaagcaagatcatcctctgtgaagagggtaccaagcacaagttgcagaaggtgcagctcaactatccaagtgatgatgtgacatttgccctcaaggaatctccagatcttccttggctatctaagtacttgtgaggctcttattgcattaaccattgattcctggcactctgttgcctttctgttctctttggaggctagacaattctacttcacccgcaaacctttcaaacacacatatcccatggtcgatctcctggtcactctagcctcgtatctgcaaaggaaccggcgaaggatgacggcatgtcgctgcacccaacggaacgcgtcacactaggaacgtaaaacgttagaaacatgtacgtctggaatttcgtccccttcatgactggatacgtatgtatccacttcaacccatgtagtttggagtggtttggtatgtattttaaactaaactctatattaaaccactctaatccatatcgattgaggtgaatatgcatgcgtccatatgttgtaactgaactgccgcgtagtgagatttagtaactatatatgaatggtttgttacaataacattgcgagttttgaataagaaacattgagatatcaatttgtactctgctggctccaatgcgatggccatttaaggcattgtttggtt

SEQ ID NO: 154573 - DNA, 2328 bp, Zea Mays
ggaatctcccaatttcttaggacttcgatctcgtgcaactttttttacttcacgctgttcttgtttatagtccacttgtacctgatgtctgcagctaaccccattcatgtctcgatgcccagtggtgtgtttttggaagccattgggcaccattcgcctgccaaaaatttttcttgacatttttctccatttcttttgccagtttatcccaagttcagattgtaacaaaaggttcgagcaaacttttgatctgattgataccttcaggagcggttagcttgacactctcttggttttttcaagactttctggatcgatacgatacagacgcacctacctcacccagctccgatcttgctgtcgcttcccacagtgcgtagaatccaagaaaccccaaatctgtgcctggagcatcgagcatccattatccggatcatggagaggttcggtaaagcccagtgaagaaatccgagctctgttgcagtctcctagcgggctgcgggccataggagatctcgcgcgcgacagcacaagcgaccacggaaatgtcgccgcagccggcccccgacctcgccgaggacaaggagagggacaccaatgtcttcatcgaggaggccccgggatcgccagctaaggtggccgagggcgacggccatggccacggcagccccccaacgtcgccggtggcgtggttccggatgctggccagggaactgcactggagcttcgtcttcggcgtggtggccacgtacggcatcagccagggcctcggtggcggcatctcgcgcgtcgcgtccgactactactggaaggacgtgcagcgggtgcagccgtcggtggcgcaggtgtaccagggcgtcacgtccatcccctggatggtcaagccgctctggggcctgctcaccgacgtgctccccgttgccggataccgccgccggccctactttattcttgcagcaagcttcatgcattgttcgctttgttggcattgatgaccggaagcgctagcgtggcgatagctgatgttactatagatgcttgcgtggcagaaaacagtatagtgtaccctcatcttgctgctgatatgataagcttaaaatggattctgttcatctgttggaggtcttatcggattctcaataagtggttttcttgttcatgcaataggggctcaaggtgcccttggcctgttaaccataccctctgccttggtaattttatccggaactctgctaaaggaggttcatatccccaactttccatacgagcaggcccataagaagttcgtagaagcaagtgggaaaatgttaacagctttgaaatgtcctgaagtatggcgaccatgtgtttacatgtacatatcacttgcgttgagtgtcgacatccaagaaggaatgttcttctggtacacggaccaaagcgcagggttatcttttcatgagggatttattggcttcatgttcgctattggatcagttggttctcttgtgggtgttatactttatcagaatattcttaaggaccattcctttcgaagccttcttttttcaagccagctgttgctaagcttggcaggaatgcttgatctgatcttggtgcttcgactaaatcttaagatggggataccagattactactttgcggtgatcgatgagggggtctccaaaatgatcaaccgtatcaaatggatgcctcttctagtgcttagctcaaagctttgccccactggcattgaaggcacattctacgcattgctcatgtccatcgacaacattggctcgttaactggatcatgggttggtggattgctccttcatttgttgagaatcacaagaacagaattcaagaacctctgggccgcaatcttgattcggaatatgatgaggctgctaccactggcgctgctgttcttggtgccaagaagtgatccgaattccactcttcttccatccgatttgctgaatgagggagatgatgatgaagctcagcgagtagagaatgtcgagttaacttctctccctgcaaacagaaattcttgcgatggtaaatctctccatgacggagaacgggatgacgatgaagcttcacttcttgccaacaggagttgatactggattgaatatggagatttttcttttgtacacgagcaaatagataaaatttagaaaaatctttgacatttgtttactatagatactcatttagatgttcacgttgttaaattcattgaatttgcagcagggtagcgaaggcttgagagaagatactggggatgctttgagctggatttcccatataccaaaactataatggatcaaactttactaa

SEQ ID NO: 154574 - DNA, 123 bp, Zea Mays
ttggttcccacaacattttgcttcggacgaggcaccagtgtccaaacttcattgcgcttgaagttgttgagctcctcctgcatggccaacacccagtccggatctaccaaggcctcctctacc

SEQ ID NO: 154575 - DNA, 2179 bp, Zea Mays
ttccttgaggagggcgatctcatggcatacctccgccatggtgggccggcccgacggcgcgtgctgcgtgcacacgaccccgaggtcgatcagctcggccatgacgtcgttccagatgcgctcgtcagccacggcggacgccgcgtccgtcagccacgactccgccacgaccctcccgacgtcgtgcgggtagtgccgcttcacccagtcgtgcagcgtgagcccctcctggaagatcacgtccgtcggcctcttccccgtgatgagctccagaagcatcacgccgaagctgtacacgtcgccctgcgtcgacgggtgccctcccattccgtactctgacgagccatgcaagaacagagcacaacgaaaaatgttaagcaaacgtacgcgacatgcatggtttagatcactgaacttgatcagtgagtaaactatatataatccaaaaactgcacgcacctggtgcgatgtagccgactgaaccttccgagccggagccggcgctgtcggcgaggtcactgtcgccgacgtccttgaccaggcgggcgatgccgaagtccgctaccacggccgtcatgtcgtcgtcgaggaggacgttgctcggcttcaagtcgcagtgcacgacgcggaccggcgcgtagtggtgcaggtaggcgatcccctccgcgacgtcgctggcaatggagaccagctgcgcgaggtcgaggccgcggcccggcgcgccgtcgggcgggtacaggcggctctccaggctgccgttgggcatcagcgggagcacgagcgcgtggaaatccggctggctgcacgcggtcaccacgcgcaccaggttccggtggcgcgtccgtcgcagcacctggcactcccgcttgaagctcctgctcacctcgccgccgctcttcgggtccagcaccttgacggcgacgcgcgtgccgtcacggagcgtcccctcgtacacgcgcccgaaccggcccgcgccgatgaggctcgcctgctcgaacccgcgcgtcgcctcggacagctcccggtgcgacaccctcgggtggtctccctccgccggctcgtcggcgtcggtcagcagcatcgagcggcgcgagtctcgccgcacgcctgctcgagctgccaagcggcacgcgacgacaccgacgatggcagccgtgaacgcgatgaccgtgatcacgacgggcaacaccacgcgccgatcacgaagcgcaggtcggtgcttcgcgccaccgccgccgccgcaccgggccagaccgaccacggacccgcaaaggccggcccgtcagacgattgtaggacacgtcaagaacctccaagaacggcagggcgcctatggtatccgggaggccgccctccagcgtgttgccggagacattcaagtactccagcgcgacgcagctgccgagctggggtggtatggcgcccgacaacctgttcgacgacaggttgagcacctgcagcatcaccatcttgctaatggcagcagggatcgtcccttccagttggttgccggagaggttcatgtagagcaagccactgagcgcggacaagtccgccgggatctcgccctgcagagcgttgtgcgagagatcaaaattctgcaggtccacgcatcgcgcaaggctcggcggtatggcgccggagaggcggttgtgactcagcacgagctcgcggagctgggtgaggttggagagcgtgtccggcacggcgccggtgagccggttgcgcgagaggtcgacgagccctagccgagggaccgtgccgagggacggcgggatctcgccggagagcaggttgttggagaggtacagccgctcgagccgctgcatggcggcgatgccccgtggaatcgatccgttgaggaggttgtgggacaggttcagcgtgaagatggcctccgggatgcgcccggagaagttgttctcgccgaggttgaagtagaccatctcgcgaatgcgcgtgagctccaccgggaccggcccctccaggttgttcccggagaagtccaaggagttgaggctggagaggttgccgagctcgggagggagtctcccggtgaacgagttcatcgacatggctagcacggtgaggcgggagaggcgccccagctccggcgggacgcggccggtgaggaggtttccggagaggttgagcacgcagaggtgggagaggttggcga

SEQ ID NO: 154576 - DNA, 2594 bp, Zea Mays
atgggcccgagagaaccccacacggctatctgctatacagatgggccaaaaggcccaaaacgcaatatagccaaccaattacgcaattacctagcccacgcactgtttgtctctgccgctgccacccgccgacgccgacgccgacgcgcgctctgcgtcggaaacctggcgcgtgcactctccgccggcgacctcctacgtctcctcccctcatgcggcaccctcctctccctccgcgtccttcacgcgcgcctcctcacacacccccagggcctcctccttggcagcctgcgcgcaaggaccaagctactcagctgctatgcggcactgggcgacctcgcctcagctcggatggtgttcgacgggaccccacgcccggacgcgtattcctacggggccatgctctggtgtctagtccaaacggagcgccacgcagatgctgtcgcgctgcaccatgacatgcggcggcggcggccctgccctgaggcgcaggacgattttgtgctgtcgctcgcgctcaaggcctgcatcaggtctgcggagtacagctatggtaggagcctgcactgcgacgccatcaaagtcggcggcgcggacggcttcgtgatgaacagcttggttgatatgtacgcaaaagccgaggacttggagtgtgcccggaaggtgttcgagagaattcccgaccgaaatgtggtgtcatggacctcgatgatcagcgggtgcgtccagaacggttttgcttcagatggactcctactgttcaacaagatgaggcaggacaatgtgcctcccagtgagtacaccatagcaaccgttatcacagcttgttctgcacttttcggtttgcaccaagggaggtggatgcatggatcagtgatcaagcaaggcttaatgtccaactcatttatcagtgcagctttgctggatatgtatgtcaagtgtggggagctagatcatgctcggtgtgtgtttgatgagctcagctacattgaccttgttctttggacgacgatgattgtggggtacacacagaatgggaaccctcttgatgcattacgcctgtttcttgacaagaggtttgcaaacattgctccgaattcagttaccacagcaactgtcctttcagcttctgctcaattacgtgacttgtctctaggaaagtctattcatgggttagctgttaagttaggtctggtagagtataatgtggtggggaatgcgttagttgacatgtatgcgaagtgtcaagctgtgtcagaggcggacagaatatttggaagaatttcaaacaaggatgttgttgcatggaattcgatgatatcaggttatgctgagaataacatgggtgatgatgctctgatgctcttcaaacagatgagcctacagggctcttcacctgatgccatctctgtggtgaatgccctgtcagcgtctgtttgtctgggtgatctgcttattggtaaatccatccatggttatgctgttaaacatgcatttgtgtccaatatttatgtcgacactgctctgctgaatctgtacaacaagtgtggcgatctcctatctgctcgtagggtgttcgatgagatgaatgaccgtaattctgtgacttggtgtgctatgattggcggttatggaatgcaaggcgattctgcaggttccattcatcttttcggtgaaatgctgaaagatggtgtctacccaaatgatatagcattcacaagcatcttatccacttgcagccattctgggatggttactgcagggaagaggtattttgatagcatggcacaacatttcaacatcacaccttccatgaaacattatgcttgtatggtcgatgtgcttgcccgtgcaggcaatctagaggatgcattggagtttatagataatatgccaatgcaagcagacactagtgtctggggagcttttctccatggatgcgagctccattcaaggttacagtttgcagaagaagctatcaagaggatgatggtgcttcatcctgaaagaccagatttatatgtgctgatatcaaacctgtatacctcgaatggaatgtgggacaaatctctagctatccggagatggatgcaagaaaaaggactagtcaaattacctggatgcagctccgtcggtcatgaaaatgggtgactgaacagaacagaaaagtttctccttttcacatcgtatgggccatacatacagtatggcaatgggaacaggacgtgtagaatttttatgtgctgatttgttatgatagtagaaagtgaaagcagccaaggagcccgagcgagattaaatagaagtggtagcactatctctggagtttcatatccagttgcagcaatcagattaaaaaaatcttagcgtgatttatggaaactcttggagatgctcttaccctccattaacgttaaaaatcgaagtgataatacattggcatcaaagaaaacaactggtagagtttgccttagcttttagtgattctaggtagtctgtacagcactacagctccttccgttatcttgtttgccaaaactatgtatcgttctgtagtctgcccaattgacaattgaatgattgattcaatctag

SEQ ID NO: 154577 - DNA, 2392 bp, Zea Mays
aaaaacaatggatccgccaaacatacagcttatcagcacacgagaagatgccgcaatagtaacgtcttttgtcaggcgccacctgtaaatttggatttttgctgctctcagaatctttcccatggttcctttgcttctgctgggtaccatgcgattaaggaatgccctcctcttcaatactttgacaaatattaatgctacaagaaatctagaaacgtctactgtctacggtctactgtccaattatacggccaattcactgttaagagttttggtaaactagtctctgaaagtttggtcactctggtgtccactttgcagttcccccttctctccaagagcggtctgttacagaggctgatagtagaggcgagccagaacggcagcgacgaagttgccatacaagacgtccctggcggagcgaagaccttcgagatctgcgcgaagttctgctacggcatggtggtgaccctgaacgcgtacaacgtcgtcgccgcgaggtgcgcggcggagtaccttgggatgaccgaggacgtcgagaagagcaacctggtgttcaagatcgaggtgttcctgagctccggcatcttcaggagctggaaggactcgatcatcgcgctgcagaccaccgacgcgttgctgccgtggtcggaggagctcaagctggtcggcagatgcgtggactctgtcgctgccaaggctaccgtcagcgcgtcgaacgttgtgtggtcgtacacctacaacaggaagtctgcgtcctcggacgagatcgtcgaggctcgcaggagctcccaggcggttcccaaggactggtgggttgaggatctgtgtgagctcgatgtggacctctacaggcgtgtcatggttgcggtcaagtcgagggggaggatcccctccgatgccatcggagaggcgctcaaggcatacgccgctagatggctgcctgagtgctgtgacgcgctggtagacgacgcctactctggagcgtacaagcacctgctcgagaccatcgtctggcttttgccctcggacaaggggtcttcggggatctcctgtcgtttcttcctgaagctgctgaaattcactgtcctcgtcggcgctggggagctcctgaaggaagagctcatggacaggactgtgttgcagctccacaaggcctcggtcagtgatctcctgatcccctccaggcctccggcgcagaccgtctatgatgtccagctggttcagacactcatcggcaggtacatgagccatgccggggtatctcaaggtgggatttttctcaacgaccttgaccaggagatgtttgagacgaacgtggacggtgaatctttgctagcgttgtgcaagctggtcgataggtacttggctgaagttgcctctgatccaaatctctctgtttcgagctttgtggatttggcgacttccatgcctgaaacagccagaccgacacatgatggattgtacactgccattgacgtatatctgaagttgcatcccggcctacccaagatggagaagaggaagatttcgaacctgatggacgtgaggaagctgtccaagggggcgtgcatccacgcggcgcagaacgaccgactcccgctgcgcgtggtggtccaggtcctcttcttcgagcagctgcgcgccgcgggagccgccgccgccgctgggacgcccagcgccagcgtggcgcggtgcatagcgcgcctggcggagcaggaggaagaggaggagcgctggaacgacggccgcgcgctgccggagcccccgacccccggcgcgctgaagaggcagctggggagcctgaagctgcagggcgaccaccaccagggcgcgggcgacgacgggcggcgcctggtggcgcgcagcaacagcgtggccaaccagagcagccggatgtcgctgtcgtcgcggtcgcggaggatctttgacaggctgtgggtcggcggagcgaagctgcccggggaggccgccgccgcgggcaaggggtcgtcggacacgtccgggagctcgcagagcccgcggtcgtcggcgaagccgccggagtccaagtcgtccagctcgtcgtcaaggaaccggcggtactcggtctcgtaggccggggccgggggccggccggtcggcggcggaggctgtacagagaggaaggagagcctggtccaagcctaaacgtagctgctgctaactttcagagttcatgttgatctcgtgctgcctgcagtatgtggcatgcagctagaagaaatctttgttctgtcagtccagttgttctatctaatcttgagataatccctggtttctgtaacagacttggaaactatgattcagtcgaattctccatgaactgggcaatcctttttggcggctccaccactcgtgtcatgtgcttgat

SEQ ID NO: 154578 - DNA, 2642 bp, Zea Mays
cgagaccgtcacggagaggaagacgagcacgcgtagcagcagcaggaggcagtggtagtaaaggggcaggtagtagtagtaaatgccagcctcctcgcctcaccaaaccaacaaaacaaaccatctgtcctcggctgcccccgtgcgtgtttcttgggactactacgacctctgctggtgctggccctggcctgcgccctcaacagaagagcgacgagagagagcccgggggcagaaggccagcgcccagcagcaggaggaggaggcgtgaaatgtaagcaagcggaggggagggacacgccgagctgaagccgcagagaagctgtcgtcaactgaactccgtctcccaacgagagagagagagagagagagaggtagcacagcagcagcagggcgagcggcgccgtgtttcctgcgagcccgtccggccgccatgaagttcatgaagctcgggtccaagccggacgccttccagaccgacggcggcggcggcgacgccagatacgtgctgtcagaccttccgtcagacatcgtcgtccatgtcgacgacgcaaggttctacctgcacaagttcccccttctctccaagagcggtctgttacagaggctgatagtagaggcgagccagaacggcagcgacgaagttgccatacaagacgtccctggcggagcgaagaccttcgagatctgcgcgaagttctgctacggcatggtggtgaccctgaacgcgtacaacgtcgtcgccgcgaggtgcgcggcggagtaccttgggatgaccgaggacgtcgagaagagcaacctggtgttcaagatcgaggtgttcctgagctccggcatcttcaggagctggaaggactcgatcatcgcgctgcagaccaccgacgcgttgctgccgtggtcggaggagctcaagctggtcggcagatgcgtggactctgtcgctgccaaggctaccgtcagcgcgtcgaacgttgtgtggtcgtacacctacaacaggaagtctgcgtcctcggacgagatcgtcgaggctcgcaggagctcccaggcggttcccaaggactggtgggttgaggatctgtgtgagctcgatgtggacctctacaggcgtgtcatggttgcggtcaagtcgagggggaggatcccctccgatgccatcggagaggcgctcaaggcatacgccgctagatggctgcctgagtgctgtgacgcgctggtagacgacgcctactctggagcgtacaagcacctgctcgagaccatcgtctggcttttgccctcggacaaggggtcttcggggatctcctgtcgtttcttcctgaagctgctgaaattcactgtcctcgtcggcgctggggagctcctgaaggaagagctcatggacaggactgtgttgcagctccacaaggcctcggtcagtgatctcctgatcccctccaggcctccggcgcagaccgtctatgatgtccagctggttcagacactcatcggcaggtacatgagccatgccggggtatctcaaggtgggatttttctcaacgaccttgaccaggagatgtttgagacgaacgtggacggtgaatctttgctagcgttgtgcaagctggtcgataggtacttggctgaagttgcctctgatccaaatctctctgtttcgagctttgtggatttggcgacttccatgcctgaaacagccagaccgacacatgatggattgtacactgccattgacgtatatctgaagttgcatcccggcctacccaagatggagaagaggaagatttcgaacctgatggacgtgaggaagctgtccaagggggcgtgcatccacgcggcgcagaacgaccgactcccgctgcgcgtggtggtccaggtcctcttcttcgagcagctgcgcgccgcgggagccgccgccgccgctgggacgcccagcgccagcgtggcgcggtgcatagcgcgcctggcggagcaggaggaagaggaggagcgctggaacgacggccgcgcgctgccggagcccccgacccccggcgcgctgaagaggcagctggggagcctgaagctgcagggcgaccaccaccagggcgcgggcgacgacgggcggcgcctggtggcgcgcagcaacagcgtggccaaccagagcagccggatgtcgctgtcgtcgcggtcgcggaggatctttgacaggctgtgggtcggcggagcgaagctgcccggggaggccgccgccgcgggcaaggggtcgtcggacacgtccgggagctcgcagagcccgcggtcgtcggcgaagccgccggagtccaagtcgtccagctcgtcgtcaaggaaccggcggtactcggtctcgtaggccggggccgggggccggccggtcggcggcggaggctgtacagagaggaaggagagcctggtccaagcctaaacgtagctgctgctaactttcagagttcatgttgatctcgtgctgcctgcagtatgtggcatgcagctagaagaaatctttgttctgtcagtccagttgttctatctaatcttgagataatccctggtttctgtaacagacttggaaactatgattcagtcgaattctccatgaactgggcaatcctttttggcggctccaccactcgtgtcatgtgcttgat

SEQ ID NO: 154579 - DNA, 2399 bp, Zea Mays
cgagaccgtcacggagaggaagacgagcacgcgtagcagcagcaggaggcagtggtagtaaaggggcaggtagtagtagtaaatgccagcctcctcgcctcaccaaaccaacaaaacaaaccatctgtcctcggctgcccccgtgcgtgtttcttgggactactacgacctctgctggtgctggccctggcctgcgccctcaacagaagagcgacgagagagagcccgggggcagaaggccagcgcccagcagcaggaggaggaggcgtgaaatgtaagcaagcggaggggagggacacgccgagctgaagccgcagagaagctgtcgtcaactgaactccgtctcccaacgagagagagagagagagagagaggtagcacagcagcagcagggcgagcggcgccgtgtttcctgcgagcccgtccggccgccatgaagttcatgaagctcgggtccaagccggacgccttccagaccgacggcggcggcggcgacgccagatacgtgctgtcagaccttccgtcagacatcgtcgtccatgtcgacgacgcaaggttctacctgcacaagttcccccttctctccaagagcggtctgttacagaggctgatagtagaggcgagccagaacggcagcgacgaagttgccatacaagacgtccctggcggagcgaagaccttcgagatctgcgcgaagttctgctacggcatggtggtgaccctgaacgcgtacaacgtcgtcgccgcgaggtgcgcggcggagtaccttgggatgaccgaggacgtcgagaagagcaacctggtgttcaagatcgaggtgttcctgagctccggcatcttcaggagctggaaggactcgatcatcgcgctgcagaccaccgacgcgttgctgccgtggtcggaggagctcaagctggtcggcagatgcgtggactctgtcgctgccaaggctaccgtcagcgcgtcgaacgttgtgtggtcgtacacctacaacaggaagtctgcgtcctcggacgagatcgtcgaggctcgcaggagctcccaggcggttcccaaggactggtgggttgaggatctgtgtgagctcgatgtggacctctacaggcgtgtcatggttgcggtcaagtcgagggggaggatcccctccgatgccatcggagaggcgctcaaggcatacgccgctagatggctgcctgagtgctgtgacgcgctggtagacgacgcctactctggagcgtacaagcacctgctcgagaccatcgtctggcttttgccctcggacaaggggtcttcggggatctcctgtcgtttcttcctgaagctgctgaaattcactgtcctcgtcggcgctggggagctcctgaaggaagagctcatggacaggactgtgttgcagctccacaaggcctcggtcagtgatctcctgatcccctccaggcctccggcgcagaccgtctatgatgtccagctggttcagacactcatcggcaggtacatgagccatgccggggtatctcaaggtgggatttttctcaacgaccttgaccaggagatgtttgagacgaacgtggacggtgaatctttgctagcgttgtgcaagctggtcgataggtacttggctgaagttgcctctgatccaaatctctctgtttcgagctttgtggatttggcgacttccatgcctgaaacagccagaccgacacatgatggattgtacactgccattgacgtatatctgaagttgcatcccggcctacccaagatggagaagaggaagatttcgaacctgatggacgtgaggaagctgtccaagggggcgtgcatccacgcggcgcagaacgaccgactcccgctgcgcgtggtggtccaggtcctcttcttcgagcagctgcgcgccgcgggagccgccgccgccgctgggacgcccagcgccagcgtggccaaccagagcagccggatgtcgctgtcgtcgcggtcgcggaggatctttgacaggctgtgggtcggcggagcgaagctgcccggggaggccgccgccgcgggcaaggggtcgtcggacacgtccgggagctcgcagagcccgcggtcgtcggcgaagccgccggagtccaagtcgtccagctcgtcgtcaaggaaccggcggtactcggtctcgtaggccggggccgggggccggccggtcggcggcggaggctgtacagagaggaaggagagcctggtccaagcctaaacgtagctgctgctaactttcagagttcatgttgatctcgtgctgcctgcagtatgtggcatgcagctagaagaaatctttgttctgtcagtccagttgttctatctaatcttgagataatccctggtttctgtaacagacttggaaactatgattcagtcgaattctc

SEQ ID NO: 154580 - DNA, 80 bp, Zea Mays
cgatgcgagcgagaggcaggccggcggcaggtggggagggcgctgtcctatgcgtttgttttacagccttacagtgtaca

SEQ ID NO: 154581 - DNA, 515 bp, Zea Mays
tctatatattgtaccccatctcctatgcaatacatcaagcactatagtttcctacagtaatggaaagtccaaattgtccttgtgaatatgttgttatggataatagttaaccaaccagtgttgtattgtgatatcagagtacaaatgcttaagaacatcttgatggtatgggttcatttccaagttgaaaaactattgtacaatacaagctgacttcacatgtttgaatgactcttttagaaaaaaatcacagagaaatactaacagtgcatgagaggaatgatgataccttccaataaattatccccatgatgcttgatcgtaacatcaacttgagctttgctagacgaaatgagtattggctatctaaaaaggacctagcataaaaaacgaaaagtgtaaacaaaaaatgctagttaatactaagaactaagagcatataatccaaggaaccaccaaagtaattctctttctatacacaaaggtccactaatatggtattctatttcagtgtt

SEQ ID NO: 154582 - DNA, 1417 bp, Zea Mays
acgtaaaaatttcattgctggctcagcttgcgccataccgcgtcgtgcggagttcttctctccttccgctcgaagagaagagaaaaaagaacggtccgtgctcggctgccgtgaatctctctcacctccccgaagcaagcgagcggggcagcgcgccaggaaggatcggaggagacgccatcaatcagcacttgcacgcgcgcggtcggccgcaggtggaggaagaagatgggcctgtgctcgtgctgctgccggtgcctggagctgctgtgctcggtcctcctcccgcccctcggcgtctgcctccgccacggctgctgctccatggagttctggatcagtgtgctgctcaccatcctcggctacctccccggcgtcctctacgccgtgtacgtcatctgctccgtcgacccccaccgccaccgcgacaacgacgactacgtctacgtagcatgacaagatggaccggtccccgtggtgctctggcccttacagctttaaattgggtgcaagatatacaaggaaatctctctctgatcggtattgagcaatattttcagttgtgggaagttcttggtggttttcagttacaaaataataatgacaatcatgtgtggaggtttagtagtaatggcttgtttagctccaaatcagcctacagagccttcttcattggggctgaaacctttgagccttggaaaagggtttggaagagctgggagcccctaagtgtaaggtcttcatttggcttgctatcaacaataaatgttggacagcagacaggctgcaaaagagaggtctagattatcctgaaaattgtgctctatgtgaccaagacgatgaaactgcacaggcagcacagcaccttctaacgaattgcgtctttgcaaggcatttttggcatagtatcttagctccaattgggctttctctggtttctaagaggagggatctttgttttgctgaatggtggaggaaaacatcagttaagattcataaaagaaaaggaaagggtttttatagtattgtcattcttggtgcttggagcctttggaagcatagaaacaggtgttttttttatggagctcggtcctatctgatctctttggagtctgggtttagagaggagctacatctttggattttggcaggggccaagaacttgcgttctctttacttgcgttctctttttgatccgggttagaggaaggtccttgagaggtgttggagtgcagggtgtgtcaggtgtgcgtatgggggtgagtctgtgtgcgttgactggtgtgtgttgctgtgggtgttcgtgtgttttcctgtttgttttcaggcctttttcctcttctattaatataatgatacgtatctttcttgcatattcgagaaaaaaaaatagatcagtattcacaagataataagg

SEQ ID NO: 154583 - DNA, 557 bp, Zea Mays
acgtaaaaatttcattgctggctcagcttgcgccataccgcgtcgtgcggagttcttctctccttccgctcgaagagaagagaaaaaagaacggtccgtgctcggctgccgtgaatctctctcacctccccgaagcaagcgagcggggcagcgcgccaggaaggatcggaggagacgccatcaatcagcacttgcacgcgcgcggtcggccgcaggtggaggaagaagatgggcctgtgctcgtgctgctgccggtgcctggagctgctgtgctcggtcctcctcccgcccctcggcgtctgcctccgccacggctgctgctccatggagttctggatcagtgtgctgctcaccatcctcggctacctccccggcgtcctctacgccgtgtacgtcatctgctccgtcgacccccaccgccaccgcgacaacgacgactacgtctacgtagcatgacaagatggaccggtccccgtggtgctctggcccttacagctttaaattgggtgcaagatatacaaggaaatctctctctgatcggtattgagcaatatttt

SEQ ID NO: 154584 - DNA, 746 bp, Zea Mays
acgtaaaaatttcattgctggctcagcttgcgccataccgcgtcgtgcggagttcttctctccttccgctcgaagagaagagaaaaaagaacggtccgtgctcggctgccgtgaatctctctcacctccccgaagcaagcgagcggggcagcgcgccaggaaggatcggaggagacgccatcaatcagcacttgcacgcgcgcggtcggccgcaggtggaggaagaagatgggcctgtgctcgtgctgctgccggtgcctggagctgctgtgctcggtcctcctcccgcccctcggcgtctgcctccgccacggctgctgctccatggagttctggatcagtgtgctgctcaccatcctcggctacctccccggcgtcctctacgccgtgtacgtcatctgctccgtcgacccccaccgccaccgcgacaacgacgactacgtctacgtagcatgacaagatggaccggtccccgtggtgctctggtccgtgtctctgctgctacctccgtcctctgtgctgtgtgcatctttttgtttggtttagtaaactaaatccatcctgtggccttctgtaaactgtaaattcgtatgtcgaatctgacaatctggacggattcattccataaactaagatctggtgttgcgggatctgtggagttagttagggttactttgctacctcgttcagttgtgcttgtgaaatgaaactgcagatggttattaaatcccctgcattttccctca

SEQ ID NO: 154585 - DNA, 120 bp, Zea Mays
gagagagagaggctaggatggaacgaccgaagcatcatgtggatataagaaggccagaagcgtcatttcaggttgctgggggagaaaacattaaaaagagttcctaagggttgaaaggat

SEQ ID NO: 154586 - DNA, 92 bp, Zea Mays
ttttttgcaaaatatacaaagcagcaaggaacattatatctgtatggacagtcgtgatctaatatgtgcacatgatatgctctctttattta

SEQ ID NO: 154587 - DNA, 1931 bp, Zea Mays
acgcggcgcagaccaagcccaccccaatatggcgctgctcgccgccgcggcacgccgccaccaccgcctgctcctccgcacccgctttctcgccaccacttcctccacataccctctccctcccgaccccgtcccagaccccgaccccgaccccatcacccccgcgccgtcccccgtccgcactcccccggacgagcagttcgcggcgtgggtgacgcggctgcgcccgggctttaccgcgtccgatctcgccgcggctatcaccgccgaggaggacccggacctcgcgctcgcgctcttccgatgggccgcgctgcgcccggggttccggcacgcgcccgaatcctacctcgccgcgctcaccgcggcctcgtctggccgccgccccgccgcggccgaggccctcgtccacgacgtcttcgcgggggcctgcgcgcccgacctcaggctcttcaacgcctgcctccgcttctgctgcgcgcgccgcagcctgttccagctcgccttcgacatgttcaacaagatgcgcgccatgcccgccgccgcagggtgccgcccggacgtcgagacctacacgctcctcctcaccgcagtcgtccgccgcgtgcgccgcccgccggcgtcgatggtctacctccacgccgtccggtccctctaccgccagatgaaggcctccggcgtggttccggacaccttcctgctcaacctcatcatcaaggcctacgcgcggtgcgtggaggtagacgaggcgctcaaggtgttccgtgaaatgccgctgtacggctgtgaacccaacgagttcacgtacggctacattgtgaaggccatgtttcagaagggcaggtcggacaaggggatggagtactttgcagagatgagggagaaggggtttgtaccatccggaggcgtgtacatgatcgccgtgtcggcgctggcattggagtggaggtttgacgaatcaaggcgggtgctgctggatatgctggattgtggtaggaagccagatatgatcacctacaggacgctgctggaggagatgtgccgggctggacgcacggaggaggcatttgatgtgctggaggagctgaaagggaggaagcgagggacattggaccagaggatgtattcagaattgctcgatgggctgcactggatctcccagcctcgtcaaaacaacagccaacctgcgctcgataagggttctgatgattgaaaaatgttcaacgtattgtcttgtattattgtggcactgatggtcatccaaaatcaaatgcatggctggttttagttgagaagactggctggatctgcttgaagattcactatgaattgatgtaaatgagtcacccatctcacattagcgctacacaagcatgattgatgcacgacccaaggttcaaagaataccttatgggaggtatggcatcaaaattctcatggtatactgatttcattattactacaagttgcggtgggcactgtcgggacagcagctcactttcaatggcaacatttgaagtaattcctggcgcagccattcatgaaaattgctttaggtatcacatgtgacaaacggctgcatacaattgcagtggtttacgtttagctcataaagtgcaaaactggaatggttcttatatgtttcttggagttatgtttgtctagtttctgtgttgtaatttaaaataaaaaatcttgtagcctggatttatggacatgttttgtagggtggccaggtctgtaggcaggcttcaattatgcaagtcactgtgtttggttgccttgttcggagtcaggccttacccatgtcgcgcagcttgacctctgtggcctggccgcaaatgaaggccccttcggaatacaggaatttttaaggaatcatatcaaaaatcagtttattttgacagaaaaaatatagaaagtaggaaaaa

SEQ ID NO: 154588 - DNA, 1758 bp, Zea Mays
tcggttcaccgctcgcgattcacgattcctccgcgtccaacttttccacggccgctcgcaccatcgtccgcccatctcgatttggctcgggctctcctcccccccaatccccaattccccattgtcttcgtccgtccagcaccagctttcctccgcaccccgatccggacagcctcgccggaaccctaaccctagcgcgccatggcgggatacgcccagcccgcatccagggccgtcgtgctccgcctggacgacctggcgctgcccccgcggcacctcaccgtccccccccacctccccgtctccgacctcctccgctccatcccgctcccctcgccctcctgctactacctcaccgccgacgggcgcccgctgccggcctcctccccggtggcggcgctcccgccgtcggcctccgtccagctccgcctccgcgcgctccggggcggcggcggcgacggcggcgccacgggcgccgagtcccgcgactgctacctctccatgtacctcgccaagaagcccgacaaggcggaccccaacgaggcgcgcctctcgcgcttcacctgctgcgcgctctccggggagcccctcgccgcgcccgccgtcgccgaccgcctcgggaacctctacaacaaggagccgctcgttgaggcgctgctccacaagcgcctgcccagggcgctgtcccacatccggggcctgcgcgacatggtccccatccacctgcaccccaggccgggcgccgacgccgccggggacgaggtccggttccagtgccccgtcaccggcctcgagttcaacggcaagtaccagttcctcgcgctccgtgggtgcggccacgtgctcagcgtcaaggcgctcaaggaggtcaagacgtccgcgtgcttggtctgccacgaggagttcggcgaggccgacaagatgcccatcaacgggactgaggaggaggtggccgagctcaggaagaggatggaggaggagagggggaaggcgaaggagaggaaggacaagaaggttctcagtgggaataagcatgctgctactgtcgtggcgccggtggtggcggcggccggagctgagaatgggaagaagggcgaggctgcttcagcaaagcgcttcaaggctgcggaccatgcgccagcccatgccaataaggaagtgtatgcgtccatattcacatcgtccaggaagtcggatttcaaggagacatactcgtgccgctcgcttccgctgggaagaaattgatctcatgccaagagcgattgcattgcatggaggtggtgatcctattgtgctgatttgcctcgctcgtgtcaccaacttcaatgttggttcctttatctggtggtgttatttatgtttgattggtgaccctgagcgtattttggctgttagagcagcgttaaattcaacgtagcaacgatgggtggaatctgcgatagtttggtcttgtgtagagtttgaattaaaagttgttacttggctgattgttccaaaaaataattgacaaacgccatggtcttcattgttgttgttgccacagtacagttaatccaagtccatggaattcaacggtgaggatgtatggacagttgcggttttgtggatgtcaacattgccagtttttcattattttcctatgtagtatctcagttctcgaatatttgttgccaactagtttatttagtttgtttttagctaaattgcgacaaataaaccactttaatcttgaaacccttttgatgtggactagttagg

SEQ ID NO: 154589 - DNA, 1263 bp, Zea Mays
ccaaagccgcgacatcagacacctccgttacctcgaccagcgtcgtcctcaatcaacgccatgcaaccgagcggccgtgcgatggccggcggcgagggcgggggcggggcgcagcagcagaccgacgacttcttcgaccagatgctgtccacgctgccttccgcgtgggctgacctgggcgcgggcgcggccgaggacctcgccgcgcagagccacttcggcgacgactcgtcggcgctgctcgcgtcccgcctccggcagcaccagatcggcggcggggacgtcaagtcctccgcctcccaccagtcccaggtcatgctgcagctcagcgacctgcaccgccacggcggcctggggggcgaggagagcgggctcttcacggaccggtccgctccggcgccggaggagatggagggcggcttcaagtcgcccaactccgccggaggtgaccactccttgttcaacgggtttggggtgcatggcgcggccaccgtgcagccaccatttggccagagtggatcgatgtcgcctgagagcctgggaggaacggcggcgagcggcggcggcgcacccccagctggtggggcagcttcatcggccggcggcggggcggcacccccgcggcagctgcggcagcggcagcgggcgaagagagggcaggccactgacccccacagcatagcggaacgtcttcggagggagaggatcgcggagcggatgaagtcgctacaggaactggtcccgaacgccaacaagacggacaaggcgtcgatgctggacgagatcatcgactacgtcaggttcttgcagctccaagtcaaggttctcagcatgagccggctgggcggagccgccggcgggatggcgcctctggttgcgagcatggcttcatcagagggaaagagcaatggaagcggcggcggcggcaacactaacgctaccaccaagagcggcaacggcggcgggctgcgggtggcggagcaccaggtggcgaagatgatggaggaggacatgggcacggccatgcagtacctgcagggcaagggcctgtgcctgatgcccatctccctggcgtccgccatctcctcggccacctcatccgcgtcgctcctctcccgcccgccccccgccgccgccgccggcggcggcggcggccagatgcacggtgccaacggcggcgctgccgccgcggcgacgaccatatcatcgcccgcgtcggctaacagctccggatgagggggactggggggagagcatgagcga

SEQ ID NO: 154590 - DNA, 406 bp, Zea Mays
gtaccggtggaattgctagagaatgggagagaatcaagggattgagcaagttcttggtaagttggttgaattgctgtcagcaagaagggacgaagctccatcttcaagtaaggaaaatattgtccatatagaaccagttcagaagctagagctgatgccaaatgaggttaaactggagggggtaaagaattatttggcttggtctaggagagccttgcgattgttgaaagcaaaaagactcgagggctatgttgatggaactgtcgttgagcccaaagacaagccaagtgctgaatggaaggattgggatgctataaactctttggtagcagcatggatgttaagttctatgatcccagcaattgctagcactattgatacaattataagtgctgcagaaatgtgg

SEQ ID NO: 154591 - DNA, 774 bp, Zea Mays
atggatggcccatgaaaggcgagcctgcctcgtcggccgtcgttccttttggcatttcacaaacgcagagacgtttctcctcgactccgcctcccccgctcctcaccgccgcgccgcctcgtccattgccgccgccgcatcaattgacccccggaccacgcgaatggccgctgaagactcaaaagatatcctaaagaagcgtctcccaaagaaaatcagagaagtccctgactgctattttctccctcgtcgatcatggccttctgcactggcaatctacggtgctgtatgtgctgctagctttggtgcagggatgcttcttgaggtttggataaacaaaaagatcaaagaggacagtggcattgtctgggagatggataaatgatgcaatgcatgctttgttgtggtgaatcccgcgttgtcatcatggacacagctagctctgaagatttctggtggaaattgacacaaccttgtttctgtatctggatctattatgcataatggcagaatgatgtcacaaacctttgagcctcattagtcgaataaactcaaattatccaaacagtataagaaactgttgttccggtgggcactgtcgcctatgcactggtaagcatcagtctgaacatttcttgtttctgatggttcggtggcatgttgtgatcaaatttggtgaacaatgacattttttgttgcgtcgatgacttttgaggggcagcggtacatcaaattatcgtgcattcacctgtatgttaagcagaaactttattg

SEQ ID NO: 154592 - DNA, 1659 bp, Zea Mays
tgttcccatcgcttttttccatgggagaactgcgtgaggggtcgagcgggagggagggttagagaggacgcgggtttcgtcgtcgctgcccctgcctccgccgccgcgcctagcgcccgcgaatccttcgacgcgggcgcgggcgtccatccggggcgcacctggcgcgcaccgcgagcggggtggacgcgcagccgtcgccgcggtcgctgctgtcgcgtatcctgctgcgtggcggcggcgacggcgggagtggcgggggaggagggttcgggtgccgggtgcggctgccgcggcggtacggcggcgggctgagggaggaacggaaggatggcgccgagcagggagagactccccgggttaaggtcgtcgagccgccgccgccgccgctgccagagctgcccctcgagacgccgcggagttcgctagggaggaagaagcccgaggaggagctggtgtccatgaacctgggcctgggcgcgagcctggtgctcctgctgtccaagagcgccgtggagctgaacaagatggtggagctgcgcgcgcagatggaggccctggtgtcggagatcaggcaagcgtcgcggtacagggaggaggaggagaagcaggcggcgagccaccctacttctgctgctgctgctgccgtcgctggtcccgccacgtcgcaggaatccgacggcggcagtagcgccaccaccaccgccgtgaaggacccgatcgcgttccccgcggccgacgccgacgccgacgccgcgtccaactgctcccgcacggcggtggtgatggacctcatggaggcggagctccaggccgagctgagccgcatgcagcagcagcgtgggcgcggcggtacggtggtgcacggccacggcggcgacagccggatcgccccgacgcgaggactcgagttgccgctgctgaaggtgaagacgaagggcgacgcccccgacagcgcgtcgcgcagctgcgtggactacgacggcggtggctgcgacaagcacgacgataatgatgaagtggacggcgagggcgaagaggacgacgacggcgatgaggaggaggaggaggatgacgtggagtacggcgaggacaggatgagtcccccgcacggcggcgtgtcggcgcgcgcgctggagcggcggctccacgagctgctgcagaagcggcagcaggaccggatcgtggagctggagtcggcgctggacagcgcgcagcggcggctccacgagaaggagcgcgaggtggtgtggtggcgcgacgccgccaagctcgtctcccaccgccgcgacgagtcgcgccggattgccaccgccagtgccaggtagagaaacgagagagagagagagagaggtggcgcgaaaggccggctggccgcctgcctttgtactgcagcctgcagcagatgtccggatggaatggggatgggggtcgtcgttcgtcatcacgctgcgcgggtgacgcgctgtaatgtactcctgcgagctggggcgagtgagcgacacgacccgcggcggcggcctcttgtcgcgcctctgccgtgcgcgcgtgcggctcggacggaggccgcggggttcggctctgcatttgcctgcacttggttgtcttgtacgtcgtgtcgttgtccggtgcggacgaaaaaaaaaatccttttgtgaa

SEQ ID NO: 154593 - DNA, 2530 bp, Zea Mays
cgcctggatgattaggcgatgccttaaggaccattattatctccatatcagaaacctttatatattgctgaactgagctttctgtttcaatgttgttcatgcaagttagtcaatttgttggtttaggaatttagaaagtgttcctgtagatttattcatggttacctgtcattgatgtcacttactatcctgttttgatacattacttttgtttattttgatgaaaaagaaccattggctagattagcaacaaatgagagaagaattgcctcatgtgttgagctacattgtgtcatgtgctactttcactttttgccctttggctctttggcagactatagtctttcctgaatcccgatactgattcttatgggcatcaactacaggtgcgccaagttcgtgaagcagacgtattgaagcagaaggcttatatgttattttatgtacgtaacagtattgggaagtcggtggtgtgcaaagataataatgctgctaatttgctcaagaagaaaacctctgaaaaaatctcaagtttgaatggtattgcacaaaccaatgtaagagcacaaaatttgaatggtgtgtctccatttggtgataagacgcacggcacaatcattggctactctacaatttccagcaagactaaaacaatccactgttcaaagaatgaggtcaaagctgaagatgctccagcctctcaaaacaatgctctaccttccacacaagcccccatagctcgaaatgatgttggtatcttgccaactaaaccaatgcagtttgctgtaaaaaatgaggagaaaacctcatcccaccaacctgcgccatttacaaatacttgtggtgaacaaacagttgttgggaggcccttgcaggaaatggaacctaaggctggtgcaggggaaaatacttctgttgtctctgctgttgctaatgatgccgctacattgtccaaggcagacaaactaacttctcagcctcaaacagctccatcttccaagccaactgccaatgtaaaggacacagctactgagtttgctacactgtctttatcaaagaaggattctgttgtttcaaatggtgctgtgcttagcattggatgtctcacatccggtgagaaagcaatgaacttatcagaatctgtggatcaagctaatgaaatcacaaaggcacttcctacgagtcagaacaatactgcaccagtaattgctcaagcagattgtggagtagagatcagctctggtgtcatcatgcacgttgctgtgtctgcttcatgcaatggaactacagagaaaaaggtgaattcgaagtcaaagaagtttgtgaggtatcctgttgtgaacatgtggttagggtccagacatctaaagccagggaagaaagcgaaccgcaagagaagtaaaatgataagacgtgttgtagcctgcaaggacgcggcaaatttatcttgtttgagtgagcagctgacgtcaacatcgtccactgcatgctctgaaaccgtagaatgtacctccagccatcagaaacggtcacatgctagtgcaaggtccaaagatgacgcccagtcctcgcaaaacaagcagaaggtcgacggagctcgtgtcggtgctggcacaagtgcaccttcttgcagtgccggcgttccaaagtctgatccgaacccttccacagatgctaaggttgtagcgacccagcctgccagtattcgcgcaacggacctgatggaagctaccgttccgcgctgggatgacgtagacatgccaaacataaaggtcgctgagccgcagtccaaacgcaagagcggtggctacatcttagatgagtgggacgaggagtacgaccgagggaagacgaagaaggtgcggaggtcaaagcaagactttggcgggccaaacccgttccaggaggaggcggactacgtatcgcagcggaggacgaagcagaaatcctaccgaggcaagtcttggaacaagcgggcctaacacggtagagaggggggagttgagagaatacgagagagagagagagagagagagaatccccggacgcacatgctgtttgttgttacgttttagcacccattggtgagggagatttacgtttaaaaaccatatccgtcgtcggtacggtagtccccattagttgtcgacgatgtgacgttttgggcagttttcgtagaacatttgaaacatttgttcggttgtaacggagtgctgtttagttgagttggggggaacaaaattggcgagactattttgctgcattctgctctgctgtttttagttactgatgaagaataaaacgatggtggtgatcagttttatgattcagtgcttgccaatgcgatctttatccttttgggaaggaaaaaaaaaatccatctttgcaatttggaatgtaattctcctcctttttctttttgactgtgctgtaactgtaagtgcagtagaaggccgcaaggcaaggaaaccagaccggtggcgcggtgttgtagttgtagctggcgatcccacttgtttttattgttttt

SEQ ID NO: 154594 - DNA, 3574 bp, Zea Mays
gtcctgtcaacgatccagatcgtcctgtcgccctcgtccttccaatccgggtatagggtttttagcgccgcctcccacctccaggtccccctctcttccgcggttccgccatcgcgtcgcgaacggcggccagaaaaaagaaaaagaaaaaaaaaacagctcgccgcaccaatctcccctaccatatcgatcgaccctgcaaggtttaatccaacagaattccaccggaaatttggtgaagtgctaatcgcttgcggcttgcctgcccggtctcgtggctttgtgctgctcccgctgtggtgaggaaccctaggatggcgggggtttcgatggcggcggcgcctgagggggtgctgcaccgccggattgagtttcatcttgcacggagaccgcatggctctgtggcggtgggcggcggcgggttccggatggagacgctgaacccggacgccgctggtaaggtggggcccggggaggcggtcgggagcagcgagggggatgcgaggaggccggagaagggagacagtggcgggatcgatccggagctcagcgtcgcaaggatctacctcgggagaattggtgctggattggaaaatcttgggaatacctgctatctcaactcagttctgcaatgcttgacgtacacggagccgttcgctgcctatttgcagagcgggaagcacacgtcctcatgtcgcacatccggattttgtgcattatgtgctcttcagatacatgtcaagactgctctagaatcaactggaaaaatagtgacaccatttcgtattgtcaagaacttgcgctgcatttctcgcactttccgaaattcaagacaagaagatgcacacgagttaatggttaatttgcttgaatccatgcataaatgctgtttaccttctggggtatcgactgagtctcaaagtgcttatgacaaaagcttagttcacaaaatatttggtggccgccttagaagtcaggtcaaatgcacacgttgcttacattgctccaataaatttgatcctttcttggatctcagtcttgagattgccaaggccacgactttggtgcgggcacttgaaaattttaccgaggatgagctactagacgagggtcaaaaggaatacgagtgtgaacgctgcaggcagaaagttgtagcaaagaaacgacttacaattgataaagcccccaatgtcttgacaattcatctgaagcgcttcagccctttcaatcctcgtgagaagattgacaaaaaagtggacttccaatcaattcttgatttgaaaccatttgttagtgactctaaaggaacagattttaaatacagcctttatggtgtcctagtccatacaggttggagcactcaatcaggccattactattgctacgttcgtacatccagcgggatgtggcacaatcttgatgataaagaggtgcgccaagttcgtgaagcagacgtattgaagcagaaggcttatatgttattttatgtacgtaacagtattgggaagtcggtggtgtgcaaagataataatgctgctaatttgctcaagaagaaaacctctgaaaaaatctcaagtttgaatggtattgcacaaaccaatgtaagagcacaaaatttgaatggtgtgtctccatttggtgataagacgcacggcacaatcattggctactctacaatttccagcaagactaaaacaatccactgttcaaagaatgaggtcaaagctgaagatgctccagcctctcaaaacaatgctctaccttccacacaagcccccatagctcgaaatgatgttggtatcttgccaactaaaccaatgcagtttgctgtaaaaaatgaggagaaaacctcatcccaccaacctgcgccatttacaaatacttgtggtgaacaaacagttgttgggaggcccttgcaggaaatggaacctaaggctggtgcaggggaaaatacttctgttgtctctgctgttgctaatgatgccgctacattgtccaaggcagacaaactaacttctcagcctcaaacagctccatcttccaagccaactgccaatgtaaaggacacagctactgagtttgctacactgtctttatcaaagaaggattctgttgtttcaaatggtgctgtgcttagcattggatgtctcacatccggtgagaaagcaatgaacttatcagaatctgtggatcaagctaatgaaatcacaaaggcacttcctacgagtcagaacaatactgcaccagtaattgctcaagcagattgtggagtagagatcagctctggtgtcatcatgcacgttgctgtgtctgcttcatgcaatggaactacagagaaaaaggtgaattcgaagtcaaagaagtttgtgaggtatcctgttgtgaacatgtggttagggtccagacatctaaagccagggaagaaagcgaaccgcaagagaagtaaaatgataagacgtgttgtagcctgcaaggacgcggcaaatttatcttgtttgagtgagcagctgacgtcaacatcgtccactgcatgctctgaaaccgtagaatgtacctccagccatcagaaacggtcacatgctagtgcaaggtccaaagatgacgcccagtcctcgcaaaacaagcagaaggtcgacggagctcgtgtcggtgctggcacaagtgcaccttcttgcagtgccggcgttccaaagtctgatccgaacccttccacagatgctaaggttgtagcgacccagcctgccagtattcgcgcaacggacctgatggaagctaccgttccgcgctgggatgacgtagacatgccaaacataaaggtcgctgagccgcagtccaaacgcaagagcggtggctacatcttagatgagtgggacgaggagtacgaccgagggaagacgaagaaggtgcggaggtcaaagcaagactttggcgggccaaacccgttccaggaggaggcggactacgtatcgcagcggaggacgaagcagaaatcctaccgaggcaagtcttggaacaagcgggcctaacacggtagagaggggggagttgagagaatacgagagagagagagagagagagagaatccccggacgcacatgctgtttgttgttacgttttagcacccattggtgagggagatttacgtttaaaaaccatatccgtcgtcggtacggtagtccccattagttgtcgacgatgtgacgttttgggcagttttcgtagaacatttgaaacatttgttcggttgtaacggagtgctgtttagttgagttggggggaacaaaattggcgagactattttgctgcattctgctctgctgtttttagttactgatgaagaataaaacgatggtggtgatcagttttatgattcagtgcttgccaatgcgatctttatccttttgggaaggaaaaaaaaaatccatctttgcaatttggaatgtaattctcctcctttttctttttgactgtgctgtaactgtaagtgcagtagaaggccgcaaggcaaggaaaccagaccggtggcgcggtgttgtagttgtagctggcgatcccacttgtttttattgttttt

SEQ ID NO: 154595 - DNA, 186 bp, Zea Mays
atgggctcgggaatcaggccggtgaccttcgcggggtcgccgtggattcgtctgggaccgcgacgggtgagtccgagaactggggcaccgctaatcgctcgccggacgtctggcgcgctcaccaaatcactgttcgccgtggtccggtctctgcgccacccgattgccggtgagaatgtcgccatc

SEQ ID NO: 154596 - DNA, 639 bp, Zea Mays
tgttgttgcgtaaacgtatctgtgaaagtacatgttttgggtgtgtgggcagctccatcatccatggatcagcctccaggatgtcttcgtcgaactttgggggactagacggcgtgctgctcgagggcgtgtgcgtgtctgataggaacacatccgagttgttgtcagaccattctgcggcggtggcggcggcatcagcatcaccagcttctgcatctcgggggatttctggattgggttcgactttggtgtcatccacttcgtgttcctcctgtgcagatgtatcattggagagttgacctccttgaaagttcggtccagaaccagaagcctcaggttctggagaagaatgcacactggcaagagaagaatggttttcagcaggttctatgtgatgaatctggacagttctgctgctgtttccagctgatgcgctgctggttcctgtttcctctagaggtattttttcgaagccatcgtgttctgtctgtaatcccttctgttttgaatcttcgtttgtgatgtgaacgcttttgcttgaccattccagatggctgaaggcatcaccaaccttggaaaggctttctttctcctcgctagataaccctgatttgtgaactgctgtgcctatttccatat

SEQ ID NO: 154597 - DNA, 81 bp, Zea Mays
tactccctccgttcttaaatatatgacgtcgttattttttaaaaaaaactttaaccacccgttttattcaaaatatttatt

SEQ ID NO: 154598 - DNA, 2768 bp, Zea Mays
gcgctgggttcgttcctgacctccgcccgccgctgccctcccccgcctcgtcgacaaatcacgccgcgccttttcttttcttttcttttctttctcagtttcaggtgttgttttgccactagctgctgcctgcctgctgccgccgccttttttccggctttcgcttttccgctctctgcaccagcctcaccctcccaaccgcgtctccgtccgctttctcttccgtcggggccggccgcacctcggacccatcaggtgctgctgtgctgggcgagttctcccccccttccttgcttttgtctggcattcgctcgctctagtttcgcgcaacccggccgccgccgcctcgggtttctcgcctgtggctttgagccgagaggttggggactcggtttccttcctgctctgagttgggtttcgcgcggctcggactttggccggcgggcgaataaaccggccggatgcttctgggcgctgcggccgcgaggatggaggagaagcgtgtgatcacggggagggagcgggaccagttccccgtcgggatgcgggtcctcgcggtcgacgacgaccccgtctgcctcaaggttctcgagaccctgctgcggcgctgccagtatcatgtaataacgaccaaccaggccatcaccgcgctgaagctgctaagggagaacagggacatgttcgatctggtcatcagcgacgtgcacatgcccgacatggacggattcaagctccttgagcttgtagggcttgagatggacctacctgtcatcatgttgtcagtgaacggggagacgaaatccgtgatgaaggggataacccatggcgcctgcgactatctcctgaaacccgtccgcatcgaagagctaaggaacatatggcagcacgtcgtcaggaggaagttcagcaagcgagagcgcagcaaccttgacgtctacaaagatttcaacaggctgccaggcgcggatccatgccacagccacggccacggccacggccagaccactgccggggcttccgaccagagcgggaggatcggcaggaagaggaaggaaatgcacagcgacgaggaggacgacggcgaggagaacgatttccaggagggcgacgagccctccgcggctaagaagccgagagtcgtctggtcgattgagctgcaccggaaattcgtcgcggccgtcaaccagcttgggattgataaagctgttccgaaaaggattcttgagcttatgaatgtggagaaactcaccagggaaaatgtcgcgagccatctacagaaatacaggctctatctgaaacggttaagtgctgtggcatcacagcaagctagcattgtcgccgcatttggaggtagagacccctttctccacatgggagcctttgaaggccttcagagctaccaacctttcgccccctgtgctgctctatcgtccttcatcccacaccacggctcgcttggtagaactaccgcggcagcattcggggtcccggagcttgctcctgccatcacagttcaagctgctgccagcaatggcatgataagccactgtgctggcgacgcaagcaagtttcagctctccggtatacaagaaaaccagcaaccaaatctgggacaaggctcggccacctctcttgggctgccccagctccaacagaagtggatccagcaagaaactggcgacttgtctgctgtcttctctgggagtgcactggctaacactctgtctggtgcactccagagagttgcgagcagtccattgccaccgcaagaacttttggagggcgtacaaaccaaagttagtgcccagccaccaataacaatggcatctgtgagttcagaacttgttgagaggactgttggagtttcggctaatttgcaggactccggtatatccccgcagggcactcttccaataaatgatggatttactgctgacaagttacagctgcaagatccattcgacagcaatggtggaacaaatttttcagtaaacatgcctgtttgtccctctggtagccttacagcatccagcaacgccaagggtggtgctagttcgtgcagtccagtgctgctcgctcctgatactgggagacattcaaactacttgcagtttggagttgcaggcaactctggacatgacatgaacgatattaaacaggaccatctgcatcaaggattgagcactggaggtttcaatcacgattttggcacctgtatgactgaacaaacagatccaaatgtgccgtatcttatgccacaaatgaagcctaacaccttgtcatcagaggataaactgaagcagaggaatatttatgatttggggattccaaagctccatggtggttttagctctagtagctgcaattttgatggtcttctcaattccatgatcaaagcggaaaaggatgatctctcattcacggatagcgacctggggtgcgacttctttccactcggtgcttgcatatgagacctcttaacaacccctcgtgcagattggccctcgacgggatgggatgggactacggcctacgggagaggttgtaaagtacactgcttaggagcattggccagtttatgctgcctaatgtgttactatgcttggtactgtgcacactagaaatgctagggatacaggtagctacggacatgccttgtaatctacatttcctcctcttcgaatgggaaatgaaagtgattatggttaggtaaaaaggagcaagtataatgctccaaattaacatcatcttcatcttaaaattttacc

SEQ ID NO: 154599 - DNA, 1390 bp, Zea Mays
ggggcaaataaaggattaactcaaaagaaaatggtcttgcggtcttgctctccttcctcgtggtcggcggccggtgcagctgtagccacgcgcgcctcggcaaaccctccgcctcctcgcccatcctcccctccatcccgtcccagccgcagggccatggactctgctgccggcgcaggccgccaccgcgttcgaatcgcagtcgtcggcgacgtgcacaatgattgggcccttgaggaagattcaaaggcgcttcgatttcttcagccggatttagtgctttttacaggcgattatggaaatgagaatgttgaacttgtcagaagcatttcagatcttcagttaccaaaggcggcaattcttggcaatcatgattgctggcacacacatcaattctcagagaagaaggtcgatcgtgttcggcttcagctcgcaagccttggtgagcagcatgttggatacaaatgtttggacttcccatcaattaagctgagcgttgttggtggacggccattttcttgtgggggtgataggctacttagaccaaggcttctctcaaaatgttatggtgtcaatgatatggctggaagtgcaaagaagatatacgatgctgctgcaggtgcaccagagggacattctgttgtattgcttgcacataatggaccaacaggtctaggttcaagaatggatgatatctgtgggcgggattgggtacctggtggcggtgaccatggcgatccagatcttgagcgagccatctccgatttgcaaagggaagccagagtttccatcccgctggtcgtttttgggcacatgcacaagagcctggcctacgggagaggcttgaggaagatgatcgcctttggagccaaccacatcatatatctgaacggagcagttgtgcctagagtgaaatttgcccaaacaactcctgggcacgagcaaaatcaacccgaaggatcgggatccagagctccaacgttgcgcgcgttcaccattgccgatctctatgaagggcgtgtggagaagatctctgaggtctgggtactggtgagtggcgccaggaccgaggtcgaggaggaaatcgtcttgtacaagcatcctcgagagcagcatatgtgatggttatgagaccattatcttaccaaaaaaagatgtggagttgtgagacgaaaatgtgactgttgtgaatgccgtaaatgtgggggcgatgctgaagttgtgtgttataaagtgccttgtattccaactgaaaggagcacttcattatagagagcctgttacggcttctacctctggcactctgtgactgttattagtaagtaataattgtagctgattgacggaagagagatcttttgaaaaagaaaaatgtgtctccattctaagg

SEQ ID NO: 154600 - DNA, 444 bp, Zea Mays
ctcaaaagaaaatggtcttgcggtcttgctctccttcctcgtggtcggcggccggtgcagctgtagccacgcgcgcctcggcaaaccctccgcctcctcgcccatcctcccctccatcccgtcccagccgcagggccatggactctgctgccggcgcaggccgccaccgcgttcgaatcgcagtcgtcggcgacgtgcacaatgattgggcccttgaggaagattcaaaggcgcttcgatttcttcagccggatttagtgctttttacaggcgattatggaaatgagaatgttgaacttgtcagaagcatttcagatcttcagttaccaaaggcggcaattcttggcaatcatgattgctggcacacacatcaattctcagagaagtaagagtcatgatctcatcctgaaaggagaaagtactaaagtaatttaatttcttttt

SEQ ID NO: 154601 - DNA, 225 bp, Zea Mays
gcaggaccccaataggacaatggaactcgtggcgtcgagtggtggcatgctcgggcttgcgctcctttgcaacaaggcattgtttcttgtgagggttcccatcaccattgtactcacatcacccgtcaccagggccctgagccgttggaggctcgtcaatttgtgttccgtggcatcgcacgagcacatacctagcaacagctatgcatctatatcaatagtcca

SEQ ID NO: 154602 - DNA, 1456 bp, Zea Mays
cgatgcgcccctccttggttcccggcccagacattcccgtggaagtagaagcaaacatcgattgcaacggcgcatcctggatctcgtcattgatcccagtcagtcccagcagaacgagcaggagaaggcgacgctcagcgcggggttcttgctgtttctacagcccctaggtacgggcgcggcgcagtcaccaaggcgggcttgcggcctcgcgggtgcggggcgcgagcgcgaccccggccgcgaccttgtctatactcgccagccgggcgggcgggcgagctgtggcatccgcgcacaacaaagctagctacgtactcgtgaaattcgcggcgcagcgcaagcgcgcgggagccagcgtgccggcgaggcgcaccgatgggctcctcggcggcgggctccaccccgacggcgcggcagcagcgcggcgcgggagtggatgcgggcgcggcgccgtcgtcgtcgagccccgtcttcctcaacgtgtacgacgtcacccccgccaacggctacgcccggtggctcggcctcggcgtctaccactccggcgtgcaagttcacggggtggagtacgcgtacggcgcgcacgacggcgcgagcagcgggatcttcgaggtggtgccgcggcggtgccccgggtacgcgttccgggagtcggtggccgtgggcgcgacggagctgagccgcggcgaggtgcgcgcgctgatggcggagctggccgccgagttccccggggacgcctacaacctggtgtcccgcaactgcaaccacttctgcgacgccgcgtgccggcgcctcgtcgcgcgcgcccgcatcccgcgctgggtcaaccgcctcgccaagatcggggtcgccttcacctgcgtcatcccgggcaacggccgcgccgcgcgcccgccctccgccgcgagccggagccggagccggtccgcgccgccgcggccgcggaccttcttccggaccttctccgtcggcccgcgcaggaacatgacggcgccctccccgccggcacacgcctcggcgtcaacgtcgtcggggtccaccacgtaaacggctccgtttctcgataatttcgtttttttatttttattgcctgatttttttattaaaaaaaactcagctctgtgcatatcattatttgatgggtccacctttcatctttgatagtagtagtgcgtgccaactagcaactggggggtcttaattcgacaagttgctactagtacgtacagtactgattctgctagtaggctctagtgatgttgtcatccggtgggggccgccgagctacggcttgtgtctgttgccagttgccagccagccacgagtgtttggtggtttaatcatacagcgggttgtggcggctcttgcttctttttctttgttttttttttttgccatcgattcatccatctatgctctctttgggcgagtgatccaacaccaactgcaacgc

SEQ ID NO: 154603 - DNA, 645 bp, Zea Mays
caccaaaccgcttcgcttcgctcgctcgtcagctccctgtcgcgcacacaacggacgcagaggccagagccagagcagctgcccccctcggatcggagcgagcagcggcaccaccatctgtccgtctccaatggcgcggccacagcaacggtaccgcggcgtgcggcaacgccactggggctcctgggtctcggagatccgccaccccctcctgaagacgaggatctggctgggcaccttcgagacggccgaggacgcggcgcgcgcctacgacgaggcggcgcgcatcatgtgcggctcccgcgtgcgcaccaacttccccgaggacgcaggcggcgacgggcagcagcagcaggccgcgccgtcgctcctctcccccgcgctcgtcgccaagcttcaccgctccaacctcgcgtccgctcaggcggcgcagggcaaggccgacgcctcggcagcagccgccgccgcgctcccgcgcgtcgcggcggcagtgcctgccggcatggggatctccgcctcgccgtcgccgtcggcgtcggcggcgggggactggagcggcgggctgcttgaggagcagtacgtggaccagatgatcgaggagcttctggactccaacttctccatggagatctcctactagctgcg

SEQ ID NO: 154604 - DNA, 366 bp, Zea Mays
atgccagcgcgggcctccttggggtcggcgagcatgttgacgatgcaggtgtcaatggcgtcctggttctcgacgcgggaggccctcgcggcgtagaggagcaccatgtccctgtcgacgcccttggagtacacctcgatgagggacttgtcgacggtgagcttgttgagggtgagggtgccggtcttgtcgctacagagcatgtccatgccggccatctcctcgatggccgtcatgcgcttcgtgatggccccctgctgcgacaggcggtgggaaccgatggccatggtgaccgagagcacggtgggcatggcgatggggatgccgccgatgagcaggacgaggaggttgtcgatgccgtcgcgg

SEQ ID NO: 154605 - DNA, 563 bp, Zea Mays
ctggagaagaaaaaacacatgagattctgggcaaacttgaagaacctacctccagtgcaaatctaatttcaacaccagctgttgagaaggtttttttcgagcttaaaacaagctgtactgaccttcacagtgttgtgggggatctgcttccagctgcaaaggcagttgtagatgatatattggctgcaaggatggagaaaggcgttagtttgaaagctgaagaagtaagaggtcaacgaacaacttgtggcactgcaggcccatgtgctcttaacgataaagacaggggttcaagtataggtaaaacctcgcagccttatgaattggaacccaacagcacagacctttcagtaccagtttctcctttggcaccacgagtaaagaagaatgggcgtaggaaggcaaggaggtggtgcttgttagaagaagaaacactaagaaagggtgttgaacagtatggtaggggcaattggaaggaaattttagataacaatcctgatgtttttatcggcagaacaccggtggacttgaaggataagtggaggaatatgattatccgataa

SEQ ID NO: 154606 - DNA, 4027 bp, Zea Mays
atggcgtcggcgagcaggggcaccggggtggcgccggcgggcgagcccggcagcccgagggcgtggggcggcgaggacgaggcgtgcagggcgaggaaagtgaagctgatgtgcagctacgggggccggatcgcgccgagacccggggacggggcgctgcggtacgtgggcggccagacgcggctcatctccgccccgcgcgccgcctccttcgcggacctgctgcggaaggtggaggcggtggacgaggcctcggcctcctctggcggcggggtggtcctcaggtaccagctccccggggatgacctcgactcgctcatctccgtgtccggcccggaggactacgacaacatgatggaggagtacgagaagctggccgccgcggcgcccgacggctccgccaagctccgggtcttcctcttcccggcctccggggccgacgcggggccccatctcgccgccgtggtggacgagtccgggcagcggtacatcgacgccatcaactgcgtctccacggaggccattgccacggccacggccatgcggcggaaggacggcgtcgccagcgccggctcctccgcgcacaactccgaggcggccgagtacagcggtctagtcgaaagtacgtcgccgcgggcggtgccgccgcctgcttccgttgcgactgagtattcgtattcaggtggagcgcattacctccgtgctttcccggagtcggttgggctcactgcagtctcggcgtcacctctggcgatgggcatcccggctcaaaaccccatcctggttaggacagagcagtcgacgttgccgcctcatcaggttgctgctgtttatgcagcagcaacacagcatcagccgcctcaagtgaccacttatgtgcaggagcagcagcagcagcagcctcaaggcacccattacgtaccacaacagcagcctcagtctgctgcttatgtgcagcagatgccgcagtcgtatatagagccgcagcaggtacactacatcaacgcccaacaatttggtgtgcatggggtgccacaatctgtcaactatgtgcctgtgcaaatgagccaattcatgcccaacattcctgtgacgggctctatggcgaccactgctgctcaagtgggaaagttgaagcccgcttccgcaggtgtagaacctgttccagagaccacgcagttcacaaggccagtgcaagctcaggttgatcagagttaccgggtggtgcacactccactgtcacagcttcctcctttgtcttctgtgcatctgcagacaaatgatgcgcagaggcagaaatttggtgcccaacaagcgatgacaagcgcagtaagcatgccagtggtgaccagctcaggcacaattcctgttgtggttagctcggccactgttccatcattgaggtatgatggttgcacaatgtgccaaaaagcattgccacatgcccattcggataatactatccgggagcagggaagttcttgtgcaatgggcaaccttgaggcagctccaatgttttacagcccacatcaaggcaccgcatccaacaaatctaatccaggtgcaagttcaggaacactcacgaactatgtggcagaaccaagagctgggaacacagcagtgatggcacaatttgattcgactcttcctgccagaaaacctgcagtccaggcgactgcatatgcggatacagttgtgccggttcaacccaccattattgctttcccagtgtctagtgcacctgctccaaaaggagtatttgtgggtcattctccttcggctggggctgaagatcatgtcaggtaccagcagcaaccattctcttatagcatgcaaccgccgctagttccagtgaatgtcccacaaggcattggtgccagtgcatacaaagattcaaatcatgcagcagtggaaccgcttagagaatatgcccgtgatcttcctcatgactatgctagagctattgatgctcgtatgcatgcagttcatttgggtcctattgcaccaccagaatctagtgtgcaaggaaatccttctattcctcatgttgtcattgatcatgccaaagttgggaagccacctgtaaataatgatgttacttctttctgcaaatctcaagctggagggtatcatatggggatcacaaatgcctttactgctcctgttttaacccaagaggacaacattgccaggcacagtgagcagccaccttgtgattttgatgttggtgcacaaaatgtccaacctgacataatccagcgaccaccactcaatctgcctgtccagagcaaccttagagttccgattgaaccacctgtttctaatgaaaagttcaccgttcaaccatctaactctggtgctcagcttcctgctgggcctcctctacagcatcctaaggaaatgcccaatcacttggtttgtgctctccccaatcgtagcagtaaatttcaattgcaggctactgttggaattgatcgtgttgaagctacacaagaaccagcatacactgattcacttttctcaaatcaggatccttggaaagcagtgggcaatgcttctttagtgcctccaagaccaagcaagttaactaaggaacctgttgtttctggaggtcaatatgctgatggtcatatgcctgatatgaacacacatgctgccttactctttgaagaagacccaagtttaaaggatatccacacagttaaattgaacaaaggatttgggaaagctaatattaagcgacaattacaagatgttgctgaaggggtagcagcatcagttcttcagccatcctttcctgaaaaaccagctgcattctctggggatcacatcgattcacatggagcagtaattgatgtgaaagttcagggtgaagggaataatcagtcagacaaaacaagccaggggattcaagttttagatgacatcgataaacttcagataataaagaacagtgaccttgaggaattgcgtgaactgggttctggaaccattggtactgtgtaccatggaaagtggagaggctcagatgttgctataaagagaatcaacgagcgatgttttgctgggaaggcatctgagcaagagcgtatgaggactgatttctggaatgaggcagacaagcttgcatctttgcaccatccaaacgtagtagcattgtacggtgttgttctagatggacctggtggatctgttgcaacggtaacggagtacatggctaatggctcactccgacaagcattgcaaagacatgaaaacaggatctttgatcggcgtagacgtctattaattgcaatggatgttgcttttggaatggaatatctccatgggaagaatatagtgcatttcgacttgaacagtgacaatctgcttgtcaacctaaggtatcctcaacgaccaatatgcaaggttggtgatttgggattatcaaaggtcaaatgccagacacttatctctggtggagtgagaggaacactaccttggatggcccctgagttgttgaatggcagcagcagcctcgtctctgaaaaggttgacgttttctcgtttggcatcgtgatgtgggagctactcacgggtgaagagccttacgccgaactgcactacggtgccattataggtgggatcgtgaataacacgctgcgacctccggtgcccgagtcctgtgacccccagtggaggtcactgatggagcagtgctggtcagccgaaccctcggcgaggccgagcttcaccgaggtaggcacgaatctgcgcgccatggcggccgctcctaccaaggcacaacaatcgaaatagacggttttagccttctgcctcctgcgccaccttctttttagcaggctgtttcagtcttcaaaccgaggaggtgccgtccctagcctagcctggctttttttttttgtacatgaataagttgaagaaagataggagaatgtcgtggcatgcttatagagtcgatggatggttgatgcttcctgtcttgcttttggaacgaatcgtggaaatatatagtacaacgtagtgt

SEQ ID NO: 154607 - DNA, 4024 bp, Zea Mays
atggcgtcggcgagcaggggcaccggggtggcgccggcgggcgagcccggcagcccgagggcgtggggcggcgaggacgaggcgtgcagggcgaggaaagtgaagctgatgtgcagctacgggggccggatcgcgccgagacccggggacggggcgctgcggtacgtgggcggccagacgcggctcatctccgccccgcgcgccgcctccttcgcggacctgctgcggaaggtggaggcggtggacgaggcctcggcctcctctggcggcggggtggtcctcaggtaccagctccccggggatgacctcgactcgctcatctccgtgtccggcccggaggactacgacaacatgatggaggagtacgagaagctggccgccgcggcgcccgacggctccgccaagctccgggtcttcctcttcccggcctccggggccgacgcggggccccatctcgccgccgtggtggacgagtccgggcagcggtacatcgacgccatcaactgcgtctccacggaggccattgccacggccacggccatgcggcggaaggacggcgtcgccagcgccggctcctccgcgcacaactccgaggcggccgagtacagcggtctagtcgaaagtacgtcgccgcgggcggtgccgccgcctgcttccgttgcgactgagtattcgtattcaggtggagcgcattacctccgtgctttcccggagtcggttgggctcactgcagtctcggcgtcacctctggcgatgggcatcccggctcaaaaccccatcctggttaggacagagcagtcgacgttgccgcctcatcaggttgctgctgtttatgcagcagcaacacagcatcagccgcctcaagtgaccacttatgtgcaggagcagcagcagcagcagcctcaaggcacccattacgtaccacaacagcagcctcagtctgctgcttatgtgcagcagatgccgcagtcgtatatagagccgcagcaggtacactacatcaacgcccaacaatttggtgtgcatggggtgccacaatctgtcaactatgtgcctgtgcaaatgagccaattcatgcccaacattcctgtgacgggctctatggcgaccactgctgctcaagtgggaaagttgaagcccgcttccgcaggtgtagaacctgttccagagaccacgcagttcacaaggccagtgcaagctcaggttgatcagagttaccgggtggtgcacactccactgtcacagcttcctcctttgtcttctgtgcatctgcagacaaatgatgcgcagaggcagaaatttggtgcccaacaagcgatgacaagcgcagtaagcatgccagtggtgaccagctcaggcacaattcctgttgtggttagctcggccactgttccatcattgaggtatgatggttgcacaatgtgccaaaaagcattgccacatgcccattcggataatactatccgggagcagggaagttcttgtgcaatgggcaaccttgaggcagctccaatgttttacagcccacatcaaggcaccgcatccaacaaatctaatccaggtgcaagttcaggaacactcacgaactatgtggcagaaccaagagctgggaacacagcagtgatggcacaatttgattcgactcttcctgccagaaaacctgcagtccaggcgactgcatatgcggatacagttgtgccggttcaacccaccattattgctttcccagtgtctagtgcacctgctccaaaaggagtatttgtgggtcattctccttcggctggggctgaagatcatgtcaggtaccagcagcaaccattctcttatagcatgcaaccgccgctagttccagtgaatgtcccacaaggcattggtgccagtgcatacaaagattcaaatcatgcagcagtggaaccgcttagagaatatgcccgtgatcttcctcatgactatgctagagctattgatgctcgtatgcatgcagttcatttgggtcctattgcaccaccagaatctagtgtgcaaggaaatccttctattcctcatgttgtcattgatcatgccaaagttgggaagccacctgtaaataatgatgttacttctttctgcaaatctcaagctggagggtatcatatggggatcacaaatgcctttactgctcctgttttaacccaagaggacaacattgccaggcacagtgagcagccaccttgtgattttgatgttggtgcacaaaatgtccaacctgacataatccagcgaccaccactcaatctgcctgtccagagcaaccttagagttccgattgaaccacctgtttctaatgaaaagttcaccgttcaaccatctaactctggtgctcagcttcctgctgggcctcctctacagcatcctaaggaaatgcccaatcacttggtttgtgctctccccaatcgtagcagtaaatttcaattgcaggctactgttggaattgatcgtgttgaagctacacaagaaccagcatacactgattcacttttctcaaatcaggatccttggaaagcagtgggcaatgcttctttagtgcctccaagaccaagcaagttaactaaggaacctgttgtttctggaggtcaatatgctgatggtcatatgcctgatatgaacacacatgctgccttactctttgaagaagacccaagtttaaaggatatccacacagttaaattgaacaaaggatttgggaaagctaatattaagcgacaattacaagatgttgctgaaggggtagcagcatcagttcttcagccatcctttcctgaaaaaccagctgcattctctggggatcacatcgattcacatggagcagtaattgatgtgaaagttcagggtgaagggaataatcagtcagacaaaacaagccaggggattcaagttttagatgacatcgataaacttcagataataaagaacagtgaccttgaggaattgcgtgaactgggttctggaaccattggtactgtgtaccatggaaagtggagaggctcagatgttgctataaagagaatcaacgagcgatgttttgctgggaaggcatctgagcaagagcgtatgaggactgatttctggaatgaggcagacaagcttgcatctttgcaccatccaaacgtagtagcattgtacggtgttgttctagatggacctggtggatctgttgcaacggtaacggagtacatggctaatggctcactccgacaagcattgcaaagacatgaaaagatctttgatcggcgtagacgtctattaattgcaatggatgttgcttttggaatggaatatctccatgggaagaatatagtgcatttcgacttgaacagtgacaatctgcttgtcaacctaaggtatcctcaacgaccaatatgcaaggttggtgatttgggattatcaaaggtcaaatgccagacacttatctctggtggagtgagaggaacactaccttggatggcccctgagttgttgaatggcagcagcagcctcgtctctgaaaaggttgacgttttctcgtttggcatcgtgatgtgggagctactcacgggtgaagagccttacgccgaactgcactacggtgccattataggtgggatcgtgaataacacgctgcgacctccggtgcccgagtcctgtgacccccagtggaggtcactgatggagcagtgctggtcagccgaaccctcggcgaggccgagcttcaccgaggtaggcacgaatctgcgcgccatggcggccgctcctaccaaggcacaacaatcgaaatagacggttttagccttctgcctcctgcgccaccttctttttagcaggctgtttcagtcttcaaaccgaggaggtgccgtccctagcctagcctggctttttttttttgtacatgaataagttgaagaaagataggagaatgtcgtggcatgcttatagagtcgatggatggttgatgcttcctgtcttgcttttggaacgaatcgtggaaatatatagtacaacgtagtgt

SEQ ID NO: 154608 - DNA, 4073 bp, Zea Mays
atggcgtcggcgagcaggggcaccggggtggcgccggcgggcgagcccggcagcccgagggcgtggggcggcgaggacgaggcgtgcagggcgaggaaagtgaagctgatgtgcagctacgggggccggatcgcgccgagacccggggacggggcgctgcggtacgtgggcggccagacgcggctcatctccgccccgcgcgccgcctccttcgcggacctgctgcggaaggtggaggcggtggacgaggcctcggcctcctctggcggcggggtggtcctcaggtaccagctccccggggatgacctcgactcgctcatctccgtgtccggcccggaggactacgacaacatgatggaggagtacgagaagctggccgccgcggcgcccgacggctccgccaagctccgggtcttcctcttcccggcctccggggccgacgcggggccccatctcgccgccgtggtggacgagtccgggcagcggtacatcgacgccatcaactgcgtctccacggaggccattgccacggccacggccatgcggcggaaggacggcgtcgccagcgccggctcctccgcgcacaactccgaggcggccgagtacagcggtctagtcgaaagtacgtcgccgcgggcggtgccgccgcctgcttccgttgcgactgagtattcgtattcaggtggagcgcattacctccgtgctttcccggagtcggttgggctcactgcagtctcggcgtcacctctggcgatgggcatcccggctcaaaaccccatcctggttaggacagagcagtcgacgttgccgcctcatcaggttgctgctgtttatgcagcagcaacacagcatcagccgcctcaagtgaccacttatgtgcaggagcagcagcagcagcagcctcaaggcacccattacgtaccacaacagcagcctcagtctgctgcttatgtgcagcagatgccgcagtcgtatatagagccgcagcaggtacactacatcaacgcccaacaatttggtgtgcatggggtgccacaatctgtcaactatgtgcctgtgcaaatgagccaattcatgcccaacattcctgtgacgggctctatggcgaccactgctgctcaagtgggaaagttgaagcccgcttccgcaggtgtagaacctgttccagagaccacgcagttcacaaggccagtgcaagctcaggttgatcagagttaccgggtggtgcacactccactgtcacagcttcctcctttgtcttctgtgcatctgcagacaaatgatgcgcagaggcagaaatttggtgcccaacaagcgatgacaagcgcagtaagcatgccagtggtgaccagctcaggcacaattcctgttgtggttagctcggccactgttccatcattgaggtatgatggttgcacaatgtgccaaaaagcattgccacatgcccattcggataatactatccgggagcagggaagttcttgtgcaatgggcaaccttgaggcagctccaatgttttacagcccacatcaaggcaccgcatccaacaaatctaatccaggtgcaagttcaggaacactcacgaactatgtggcagaaccaagagctgggaacacagcagtgatggcacaatttgattcgactcttcctgccagaaaacctgcagtccaggcgactgcatatgcggatacagttgtgccggttcaacccaccattattgctttcccagtgtctagtgcacctgctccaaaaggagtatttgtgggtcattctccttcggctggggctgaagatcatgtcaggtaccagcagcaaccattctcttatagcatgcaaccgccgctagttccagtgaatgtcccacaaggcattggtgccagtgcatacaaagattcaaatcatgcagcagtggaaccgcttagagaatatgcccgtgatcttcctcatgactatgctagagctattgatgctcgtatgcatgcagttcatttgggtcctattgcaccaccagaatctagtgtgcaaggaaatccttctattcctcatgttgtcattgatcatgccaaagttgggaagccacctgtaaataatgatgttacttctttctgcaaatctcaagctggagggtatcatatggggatcacaaatgcctttactgctcctgttttaacccaagaggacaacattgccaggcacagtgagcagccaccttgtgattttgatgttggtgcacaaaatgtccaacctgacataatccagcgaccaccactcaatctgcctgtccagagcaaccttagagttccgattgaaccacctgtttctaatgaaaagttcaccgttcaaccatctaactctggtgctcagcttcctgctgggcctcctctacagcatcctaaggaaatgcccaatcacttggtttgtgctctccccaatcgtagcagtaaatttcaattgcaggctactgttggaattgatcgtgttgaagctacacaagaaccagcatacactgattcacttttctcaaatcaggatccttggaaagcagtgggcaatgcttctttagtgcctccaagaccaagcaagttaactaaggaacctgttgtttctggaggtcaatatgctgatggtcatatgcctgatatgaacacacatgctgccttactctttgaagaagacccaagtttaaaggatatccacacagttaaattgaacaaaggatttgggaaagctaatattaagcgacaattacaagatgttgctgaaggggtagcagcatcagttcttcagccatcctttcctgaaaaaccagctgcattctctggggatcacatcgattcacatggagcagtaattgatgtgaaagttcagggtgaagggaataatcagtcagacaaaacaagccaggggattcaagttttagatgacatcgataaacttcagataataaagaacagtgaccttgaggaattgcgtgaactgggttctggaaccattggtactgtgtaccatggaaagtggagaggctcagatgttgctataaagagaatcaacgagcgatgttttgctgggaaggcatctgagcaagagcgtatggtatgaaatgttttcttttagattgaatccatcatgtgctatcttttcttttgtatgtagaggactgatttctggaatgaggcagacaagcttgcatctttgcaccatccaaacgtagtagcattgtacggtgttgttctagatggacctggtggatctgttgcaacggtaacggagtacatggctaatggctcactccgacaagcattgcaaagacatgaaaagatctttgatcggcgtagacgtctattaattgcaatggatgttgcttttggaatggaatatctccatgggaagaatatagtgcatttcgacttgaacagtgacaatctgcttgtcaacctaaggtatcctcaacgaccaatatgcaaggttggtgatttgggattatcaaaggtcaaatgccagacacttatctctggtggagtgagaggaacactaccttggatggcccctgagttgttgaatggcagcagcagcctcgtctctgaaaaggttgacgttttctcgtttggcatcgtgatgtgggagctactcacgggtgaagagccttacgccgaactgcactacggtgccattataggtgggatcgtgaataacacgctgcgacctccggtgcccgagtcctgtgacccccagtggaggtcactgatggagcagtgctggtcagccgaaccctcggcgaggccgagcttcaccgaggtaggcacgaatctgcgcgccatggcggccgctcctaccaaggcacaacaatcgaaatagacggttttagccttctgcctcctgcgccaccttctttttagcaggctgtttcagtcttcaaaccgaggaggtgccgtccctagcctagcctggctttttttttttgtacatgaataagttgaagaaagataggagaatgtcgtggcatgcttatagagtcgatggatggttgatgcttcctgtcttgcttttggaacgaatcgtggaaatatatagta

SEQ ID NO: 154609 - DNA, 4048 bp, Zea Mays
atggcgtcggcgagcaggggcaccggggtggcgccggcgggcgagcccggcagcccgagggcgtggggcggcgaggacgaggcgtgcagggcgaggaaagtgaagctgatgtgcagctacgggggccggatcgcgccgagacccggggacggggcgctgcggtacgtgggcggccagacgcggctcatctccgccccgcgcgccgcctccttcgcggacctgctgcggaaggtggaggcggtggacgaggcctcggcctcctctggcggcggggtggtcctcaggtaccagctccccggggatgacctcgactcgctcatctccgtgtccggcccggaggactacgacaacatgatggaggagtacgagaagctggccgccgcggcgcccgacggctccgccaagctccgggtcttcctcttcccggcctccggggccgacgcggggccccatctcgccgccgtggtggacgagtccgggcagcggtacatcgacgccatcaactgcgtctccacggaggccattgccacggccacggccatgcggcggaaggacggcgtcgccagcgccggctcctccgcgcacaactccgaggcggccgagtacagcggtctagtcgaaagtacgtcgccgcgggcggtgccgccgcctgcttccgttgcgactgagtattcgtattcaggtggagcgcattacctccgtgctttcccggagtcggttgggctcactgcagtctcggcgtcacctctggcgatgggcatcccggctcaaaaccccatcctggttaggacagagcagtcgacgttgccgcctcatcaggttgctgctgtttatgcagcagcaacacagcatcagccgcctcaagtgaccacttatgtgcaggagcagcagcagcagcagcctcaaggcacccattacgtaccacaacagcagcctcagtctgctgcttatgtgcagcagatgccgcagtcgtatatagagccgcagcaggtacactacatcaacgcccaacaatttggtgtgcatggggtgccacaatctgtcaactatgtgcctgtgcaaatgagccaattcatgcccaacattcctgtgacgggctctatggcgaccactgctgctcaagtgggaaagttgaagcccgcttccgcaggtgtagaacctgttccagagaccacgcagttcacaaggccagtgcaagctcaggttgatcagagttaccgggtggtgcacactccactgtcacagcttcctcctttgtcttctgtgcatctgcagacaaatgatgcgcagaggcagaaatttggtgcccaacaagcgatgacaagcgcagtaagcatgccagtggtgaccagctcaggcacaattcctgttgtggttagctcggccactgttccatcattgaggtatgatggttgcacaatgtgccaaaaagcattgccacatgcccattcggataatactatccgggagcagggaagttcttgtgcaatgggcaaccttgaggcagctccaatgttttacagcccacatcaaggcaccgcatccaacaaatctaatccaggtgcaagttcaggaacactcacgaactatgtggcagaaccaagagctgggaacacagcagtgatggcacaatttgattcgactcttcctgccagaaaacctgcagtccaggcgactgcatatgcggatacagttgtgccggttcaacccaccattattgctttcccagtgtctagtgcacctgctccaaaaggagtatttgtgggtcattctccttcggctggggctgaagatcatgtcaggtaccagcagcaaccattctcttatagcatgcaaccgccgctagttccagtgaatgtcccacaaggcattggtgccagtgcatacaaagattcaaatcatgcagcagtggaaccgcttagagaatatgcccgtgatcttcctcatgactatgctagagctattgatgctcgtatgcatgcagttcatttgggtcctattgcaccaccagaatctagtgtgcaaggaaatccttctattcctcatgttgtcattgatcatgccaaagttgggaagccacctgtaaataatgatgttacttctttctgcaaatctcaagctggagggtatcatatggggatcacaaatgcctttactgctcctgttttaacccaagaggacaacattgccaggcacagtgagcagccaccttgtgattttgatgttggtgcacaaaatgtccaacctgacataatccagcgaccaccactcaatctgcctgtccagagcaaccttagagttccgattgaaccacctgtttctaatgaaaagttcaccgttcaaccatctaactctggtgctcagcttcctgctgggcctcctctacagcatcctaaggaaatgcccaatcacttggtttgtgctctccccaatcgtagcagtaaatttcaattgcaggctactgttggaattgatcgtgttgaagctacacaagaaccagcatacactgattcacttttctcaaatcaggatccttggaaagcagtgggcaatgcttctttagtgcctccaagaccaagcaagttaactaaggaacctgttgtttctggaggtcaatatgctgatggtcatatgcctgatatgaacacacatgctgccttactctttgaagaagacccaagtttaaaggatatccacacagttaaattgaacaaaggatttgggaaagctaatattaagcgacaattacaagatgttgctgaaggggtagcagcatcagttcttcagccatcctttcctgaaaaaccagctgcattctctggggatcacatcgattcacatggagcagtaattgatgtgaaagttcagggtgaagggaataatcagtcagacaaaacaagccaggggattcaagttttagatgacatcgataaacttcagataataaagaacagtgaccttgaggaattgcgtgaactgggttctggaaccattggtactgtgtaccatggaaagtggagaggctcagatgttgctataaagagaatcaacgagcgatgttttgctgggaaggcatctgagcaagagcgtatggtatgaaatgttttcttttagattgaatccatcatgtgctatcttttcttttgtatgtagaggactgatttctggaatgaggcagacaagcttgcatctttgcaccatccaaacgtagtagcattgtacggtgttgttctagatggacctggtggatctgttgcaacggtaacggagtacatggctaatggctcactccgacaagcattgcaaagacatgaaaagatctttgatcggcgtagacgtctattaattgcaatggatgttgcttttggaatggaatatctccatgggaagaatatagtgcatttcgacttgaacagtgacaatctgcttgtcaacctaaggttggtgatttgggattatcaaaggtcaaatgccagacacttatctctggtggagtgagaggaacactaccttggatggcccctgagttgttgaatggcagcagcagcctcgtctctgaaaaggttgacgttttctcgtttggcatcgtgatgtgggagctactcacgggtgaagagccttacgccgaactgcactacggtgccattataggtgggatcgtgaataacacgctgcgacctccggtgcccgagtcctgtgacccccagtggaggtcactgatggagcagtgctggtcagccgaaccctcggcgaggccgagcttcaccgaggtaggcacgaatctgcgcgccatggcggccgctcctaccaaggcacaacaatcgaaatagacggttttagccttctgcctcctgcgccaccttctttttagcaggctgtttcagtcttcaaaccgaggaggtgccgtccctagcctagcctggctttttttttttgtacatgaataagttgaagaaagataggagaatgtcgtggcatgcttatagagtcgatggatggttgatgcttcctgtcttgcttttggaacgaatcgtggaaatatatagta

SEQ ID NO: 154610 - DNA, 4474 bp, Zea Mays
ccgcagtcgagcggagcggagccaacctcctgcagtgccaggcgcgtccggggccgaggggcgacggccaaccgaacgggagagtgtcaagtcaagtgggcggattgcgggaaggaaggaaaacctcccgcgcgactcgcgcctccgccctcctcgtcctcgtcctcgtcctccattccaacccctgcgtttcggattctgttgcgccctctccagagcctcggcgagcggtggaaactctaggtggcggcgacggcgatggcgtcggcgagcaggggcaccggggtggcgccggcgggcgagcccggcagcccgagggcgtggggcggcgaggacgaggcgtgcagggcgaggaaagtgaagctgatgtgcagctacgggggccggatcgcgccgagacccggggacggggcgctgcggtacgtgggcggccagacgcggctcatctccgccccgcgcgccgcctccttcgcggacctgctgcggaaggtggaggcggtggacgaggcctcggcctcctctggcggcggggtggtcctcaggtaccagctccccggggatgacctcgactcgctcatctccgtgtccggcccggaggactacgacaacatgatggaggagtacgagaagctggccgccgcggcgcccgacggctccgccaagctccgggtcttcctcttcccggcctccggggccgacgcggggccccatctcgccgccgtggtggacgagtccgggcagcggtacatcgacgccatcaactgcgtctccacggaggccattgccacggccacggccatgcggcggaaggacggcgtcgccagcgccggctcctccgcgcacaactccgaggcggccgagtacagcggtctagtcgaaagtacgtcgccgcgggcggtgccgccgcctgcttccgttgcgactgagtattcgtattcaggtggagcgcattacctccgtgctttcccggagtcggttgggctcactgcagtctcggcgtcacctctggcgatgggcatcccggctcaaaaccccatcctggttaggacagagcagtcgacgttgccgcctcatcaggttgctgctgtttatgcagcagcaacacagcatcagccgcctcaagtgaccacttatgtgcaggagcagcagcagcagcagcctcaaggcacccattacgtaccacaacagcagcctcagtctgctgcttatgtgcagcagatgccgcagtcgtatatagagccgcagcaggtacactacatcaacgcccaacaatttggtgtgcatggggtgccacaatctgtcaactatgtgcctgtgcaaatgagccaattcatgcccaacattcctgtgacgggctctatggcgaccactgctgctcaagtgggaaagttgaagcccgcttccgcaggtgtagaacctgttccagagaccacgcagttcacaaggccagtgcaagctcaggttgatcagagttaccgggtggtgcacactccactgtcacagcttcctcctttgtcttctgtgcatctgcagacaaatgatgcgcagaggcagaaatttggtgcccaacaagcgatgacaagcgcagtaagcatgccagtggtgaccagctcaggcacaattcctgttgtggttagctcggccactgttccatcattgaggtatgatggttgcacaatgtgccaaaaagcattgccacatgcccattcggataatactatccgggagcagggaagttcttgtgcaatgggcaaccttgaggcagctccaatgttttacagcccacatcaaggcaccgcatccaacaaatctaatccaggtgcaagttcaggaacactcacgaactatgtggcagaaccaagagctgggaacacagcagtgatggcacaatttgattcgactcttcctgccagaaaacctgcagtccaggcgactgcatatgcggatacagttgtgccggttcaacccaccattattgctttcccagtgtctagtgcacctgctccaaaaggagtatttgtgggtcattctccttcggctggggctgaagatcatgtcaggtaccagcagcaaccattctcttatagcatgcaaccgccgctagttccagtgaatgtcccacaaggcattggtgccagtgcatacaaagattcaaatcatgcagcagtggaaccgcttagagaatatgcccgtgatcttcctcatgactatgctagagctattgatgctcgtatgcatgcagttcatttgggtcctattgcaccaccagaatctagtgtgcaaggaaatccttctattcctcatgttgtcattgatcatgccaaagttgggaagccacctgtaaataatgatgttacttctttctgcaaatctcaagctggagggtatcatatggggatcacaaatgcctttactgctcctgttttaacccaagaggacaacattgccaggcacagtgagcagccaccttgtgattttgatgttggtgcacaaaatgtccaacctgacataatccagcgaccaccactcaatctgcctgtccagagcaaccttagagttccgattgaaccacctgtttctaatgaaaagttcaccgttcaaccatctaactctggtgctcagcttcctgctgggcctcctctacagcatcctaaggaaatgcccaatcacttggtttgtgctctccccaatcgtagcagtaaatttcaattgcaggctactgttggaattgatcgtgttgaagctacacaagaaccagcatacactgattcacttttctcaaatcaggatccttggaaagcagtgggcaatgcttctttagtgcctccaagaccaagcaagttaactaaggaacctgttgtttctggaggtcaatatgctgatggtcatatgcctgatatgaacacacatgctgccttactctttgaagaagacccaagtttaaaggatatccacacagttaaattgaacaaaggttggtacacactgtcatcctatactatttgggcagtattactatcatattatttcaaaataataatggactaagcaacaattcctctgacactctcttatcttttttactcctgaaaggatttgggaaagctaatattaagcgacaattacaagatgttgctgaaggggtagcagcatcagttcttcagccatcctttcctgaaaaaccagctgcattctctggggatcacatcgattcacatggagcagtaattgatgtgaaagttcagggtgaagggaataatcagtcagacaaaacaagccaggggattcaagttttagatgacatcgataaacttcaggttcttgtgtacctactatttatttcaacaccttatgcaaaattttaaatgtactatccttattttccactttgctaataacagataataaagaacagtgaccttgaggaattgcgtgaactgggttctggaaccattggtactgtgtaccatggaaagtggagaggctcagatgttgctataaagagaatcaacgagcgatgttttgctgggaaggcatctgagcaagagcgtatgaggactgatttctggaatgaggcagacaagcttgcatctttgcaccatccaaacgtagtagcattgtacggtgttgttctagatggacctggtggatctgttgcaacggtaacggagtacatggctaatggctcactccgacaagcattgcaaagacatgaaaagatctttgatcggcgtagacgtctattaattgcaatggatgttgcttttggaatggaatatctccatgggaagaatatagtgcatttcgacttgaacagtgacaatctgcttgtcaacctaaggtatcctcaacgaccaatatgcaaggttggtgatttgggattatcaaaggtcaaatgccagacacttatctctggtggagtgagaggaacactaccttggatggcccctgagttgttgaatggcagcagcagcctcgtctctgaaaaggttgacgttttctcgtttggcatcgtgatgtgggagctactcacgggtgaagagccttacgccgaactgcactacggtgccattataggtgggatcgtgaataacacgctgcgacctccggtgcccgagtcctgtgacccccagtggaggtcactgatggagcagtgctggtcagccgaaccctcggcgaggccgagcttcaccgaggtaggcacgaatctgcgcgccatggcggccgctcctaccaaggcacaacaatcgaaatagacggttttagccttctgcctcctgcgccaccttctttttagcaggctgtttcagtcttcaaaccgaggaggtgccgtccctagcctagcctggctttttttttttgtacatgaataagttgaagaaagataggagaatgtcgtggcatgcttatagagtcgatggatggttgatgcttcctgtcttgcttttggaacgaatcgtggaaatatatagta

SEQ ID NO: 154611 - DNA, 2440 bp, Zea Mays
  misc_feature (912)..(1011): n is a, c, g, or t
cctccaactgcatttaccttcaactgagcaaacagaaaattatacaagttcagagcaacaacactgagactgtacacagatgtgattgatgttgatctaaattacagttctttctccaagatcgatcagacgatctttttttttttgacatgaattacatgatggaaccgctatccgctaataccagagtccataaacaaagcgctccccaaacacgaaaaacaaaaccgttcatcactttgctcgcgatgatgggaggaggacacggcaaaggggggggccaaacggtccaaccaacaaatgtgcaccaaccgtgcctttgcgcgcgcaaagcgtgcaaaaactgccaaggcactcacgggttcgtcgtgcgcgtctcgctgtcctcctccgctccgcgccacatgcacaagcaggccggtcaccactcaccatgaccacccccactagccactgcctagcgtggcaacgccatgggggtagcgtagctggcgtgggccgacagcgacaaggcgccccgcgccgtcccagcccagggcaagccccagcaagaccagagcctcggccgcttctaggcgccgtcggcggcggcggcggcgccggcgtccacggcggcgcggcagaaggggcaccgtgaggtgccctcgagccagggcagcgcgcaggcccagtggaagcggtggccgcagcgcaggtgcgccagcacgtcgcccgcgcggaactcgtccaggcacaccgcgcactccgcctgctccgccgcggtccaccgcggccggctacaccgggatcagccgccgcatcacgaccttcttcgagtacacctcgcgctgcacgccggtctttttatttgtttcggaactctcgccgcgctcgtcccgcgccagtcggtccggaagaggcacgcccaaatannnnnnnnnnnnnnnnnnnnnnnnnnnnnnnnnnnnnnnnnnnnnnnnnnnnnnnnnnnnnnnnnnnnnnnnnnnnnnnnnnnnnnnnnnnnnnnnnnnncggatgaatcagccttgattcgttctcctaccttgccagaattgccggcgccgccgtggccggccgcaaacaggcagaaggaggaccgccgccccgtgcctcctccggccgcctccgctcccatccccgccccgccctgccggacccgccgccgccgcgcgcactccacgccggggagcatcccggccatgaggaccatccacgcagcacgcctccggtcgtcgtcctcagcagacctctactgtgccacacagggccgccgcgcgccagcaaagcagcgatcgacgacgcaccaggcgggggtgcgtgcgcctatgtaagtgacgagccggccgggcccacaggcgcacctaactatcgcgggcgcgtttccgtgccgaggatccagtagctctggcgagagccgtgcgggcgccggccgtttgaggcaagcgctcgtccgccatctcgtcttatttttgctccttctggtatggtgtattggtgtggtgtggtgtgggtggccgtgggcagcagtggtggcagtggctctggttgcaaggatccccaccccgcgctttaatagctgccactcgtgtcctgacaagggcgggggcgggggcgcggcggagcggccaactgcctcgccacgacgtggggtgccggccgggggagggggtgggaatcgtgggatcatggcatcggtctggtacgacgtcggggcccgcgcgggatggcgaggaaatccactggtgagtgagacggcgagaattattggggtcggatcaggtcgtgtcaggccaccacaccacactccaggatgtgatcgccgcccgacctgcatctatctattctcgcgttgaaagttgaaactgccaccggcactggcgcctccggaaagatctccccctgccgaccttgaaacgccaagtgagactgaacacagacacaggcacgagaagagccgtgccttcgagttccgatctggttggtggtcagtgctgcaatgcaaccgcgacgggcagagctcgactctcgaaacgaaggaatggggcaacctgacaggacaaaagtagccgggggacacatggtaactgaaccccctgctgacggctgacgagacgagacgagagcgagcgagaacggcccggcgccggcgccgagcagggagcggagcgcggcgtcgtccgttccgggccggccgggaagctggtgaggtgtgagagggaccatggcgccttcgccgaagcttccgggtagcagcggccagacagccgcatggcgcccgccattattcctcctggctcgcaccggctgccccacgtctcgttactatcggtgtggtgtgggacgtgggagtgggacggggctacagcggtgtgagcgccgggcccggccgggcccggcccgttccccccatctcgatggttcagtcattccgcatttcgct

SEQ ID NO: 154612 - DNA, 219 bp, Zea Mays
tgtttatttttattttacgccacattccacaacataacaaaatatatcaacaactatagcacaacatattttcacataaaacatctcacacacaatcacataacaatatttaaatccatagtctcatcaattacatcacaaaagtctcatccatagtcataagacatatctcatcgagttataataagagacaatatctcatacatagtcataataaaa

SEQ ID NO: 154613 - DNA, 1070 bp, Zea Mays
caatctccaggcctaggaaaaacaaccccggaccgcgtgcgtttcgcttccgcccctgctgtttctgtttcttggcgttcaccccctctttctctcgtggcgacgacgacgaccgtcgccttcccctacgcgctaggtgccagggtccgtcgggtccttcgctggcgacgggcaactaccaggcaacctagtggtgtgttcgggaacgtttccgagggcgggcggcggcccccagtggcgaagatgatccgactaccgacgtacgcagcaggaggcgtccgttgccatcttcttctcctttgagtatatgatactagcaacatccacagtatcaacattcgtgaagtatatattctatgttagtgacatgctaatggaaggtcaatgggagaaaaaggcagtgtatacattttacttggttcgtgagctatatgtgacttttcgcaacttcagaattcgcattgcagattatgtgcgctacagaaagatcacttccaacatgaatgaacgctttccagatgctacatcagaagagctcgatgtgagtgatgctacatgtattatttgccgtgaggaaatggctacagcaaagaaactgctcgatgggcatctgttccatgtgcattgtctaagagaaacaggagaacaggctgaagaagaggttcctctacggcttctccatgggagcttcagctccacaggaaggattctctctactgggacggtgccgtgctgcttgccccaatgtgcaagggttattgtatattaacaaccaacagtagtgtcgaaggagcacaagatgatgtgtgagcacaaagtggccagcaagaatggagtcatggaacatcggcaggaggggtgcgacagcggcaaccgatgtatcccttggacaatctggttttgacatgatgcaaatcaatgtgctgtacattgtattctgcacttgcacagattgtttggctaattacaggattatctcaatgttttggtttggatttaaagtacacttatgtatgaaatatttattggtactcatctatattatattaattatattattattaaatata

SEQ ID NO: 154614 - DNA, 640 bp, Zea Mays
atcgatgtctgtggaatcatcttcttcaagattaccgaggtttgattcggaggaagaaggcaaaagcggctgtgtgtgatcattatcaactgttggagagtgtgaatccaatgggttttttttcttcgggaatagcgtcatcttcaatggtattgccagtggagcgaaaatgagaagaaccataacgacaagcagagaatagttcataatgtcattgacagccacgacgtgatccaatattgtagccccaaccagataaaccccaagaagaacgcttgccacttgcgcaaacataaaatggacttgctctgcgttcgtctccaccagagagggttcgcagggctgaacaaagtacattcccaggaggcacacggcaggaattcccagagcgagagagagcaaaaggttgatgggtgaatcacggagcactccggtgtatatttcagtgtaaacagcggcacttaaacccgagtaccctttcagaatgccagcaacggcacctctgctgagcgggaagttcctcatgttggtcactagaacggcagtcgccaaccatgcaccaccatttgtagcaagacataacgcaaaccaaatctgcaaaaaaggtcattagtcaatttacactatccatcgaagtaaa

SEQ ID NO: 154615 - DNA, 737 bp, Zea Mays
cggccttcagtatcgcttcgcgaaacctgaaatcctctccccttcttggtcttcttctcttcggctttatggccccttcaccctcggctaagaggacatcgatgtctgtggaatcatcttcttcaagattaccgaggtttgattcggaggaagaaggcaaaagcggctgtgtgtgatcattatcaactgttggagagtgtgaatccaatgggttttttttcttcgggaatagcgtcatcttcaatggtattgccagtggagcgaaaatgagaagaaccataacgacaagcagagaatagttcataatgtcattgacagccacgacgtgatccaatattgtagccccaaccagataaaccccaagaagaacgcttgccacttgcgcaaacataaaatggacttgctctgcgttcgtctccaccagagagggttcgcagggctgaacaaagtacattcccaggaggcacacggcaggaattcccagagcgagagagagcaaaaggttgatgggtgaatcacggagcactccggtgtatatttcagtgtaaacagcggcacttaaacccgagtaccctttcagaatgccagcaacggcacctctgctgagcgggaagttcctcatgttggtcactagaacggcagtcgccaaccatgcaccaccatttgtagcaagacataacgcaaaccaaatctgcaaaaaaggtcattagtcaatttacactatccatcgaagtaaa

SEQ ID NO: 154616 - DNA, 630 bp, Zea Mays
atggactgggtggggctgcacccggacgtggccttggagtacgcgctgctcttcgcgcgcaaccagctcggcgccgccgacgtgcgccacctggaccacgagttcctcctcagcatgggcgtcgccgtcgccaagcaccgcctcgagatcctcaagctcgccaggaaggagtcgtcgtcgtcccaccgcaaggccgccgccatcgccgtcgtcctgccgtggcgcgccaccaggctgctcgccgcggcggtgcaccggtccgcgcgctcggcgctcggtcgcctccgcgcctgccgggaccggaaccgggagcggggcagggacagggacagggcggcggccgtcctcgccacgcagcgcgtgcctttgctgcggcaccgcggcgggagggtcgcgctcgcgcatcgccacagcagctgctggagcaaggccgcgccgcccgtggctaccatccgtactggcgggaagctgctggtcaagacgctgcccgcgcccgctgcctccatagccgcatgccgcctcgtgagcacggacgtctgcagctgcgacgaagacgaggaggtggcggtgatggacggcggcgaggcgatgcggtgggagtccatgttccaggacctgaggccaacttag

SEQ ID NO: 154617 - DNA, 327 bp, Zea Mays
atggacccgtccggcaacgggacgcggccgttgagcgcgttgagcccgaacacgaccttggcaccggatctccggaagaaggcgttgaggtcgtcccacctgcgcaggggcaggcagccctgcgagaagccgtgcatctccgacgcgttcctgacgaacggcgcgcacggccgcccggcgccgtacccgtacatcaccttgtcctgcagcgaccctcccaggcggagcagcagcggcggcgagaaggctctgacggcattgagcaggaccttgttggagagatccaggttgagcaggccggcgcggccccaggcgcaggtgccgtag

SEQ ID NO: 154618 - DNA, 2894 bp, Zea Mays
gaagagcgtgcagagcgagacgcgtcgcctcctcccttcccccaccccgccgccgccctcgcgtccgtccgtccgtccgtccgttattagggttcggtcgccgccatggcgatcctctcggcgctcgccaccgaggtgctcatccccgtcgccgccgtcatcggcatcgccttcgccgtcgtgcagtgggtggtcgtgtcgcgcgtgaagctctccccggccgcgtccggcggcagcggcggcaaggccggctacgccgactccctcatcgaggaggaggaggggctcaacgaccacaacgtcgtcgtcaagtgcgccgagatccagaacgccatctccgaaggagcaacatcgtttcttttcaccgagtaccaatatgttggtatcttcatggctatcttcgctgttgtgatcttcctcttccttggttcggttgagggattcagcacgaagagccagccctgcacatatagcaaggacaagtactgcaagcctgcgctgttcactgcactctttagcactgtgtccttcttgcttggagccatcacctctctggtctctggtttccttggcatgaagattgccacatatgcgaatgccagaactaccctggaagctaggaagggtgttggcaaggcttttatcactgctttccgctctggcgctgttatgggtttcctgcttgcatcaagtgggcttgtggttctgtacatcacaattaatgtatttaagttgtattacggtgatgactgggagggtctttttgagtccatcactggctatggtcttggtgggtcgtccatggctctcttcggaagagttggtggaggtatctacacaaaggctgctgatgttggtgccgatcttgttggaaaggtcgagaggaacattcctgaggatgatcctaggaacccagctgtgattgctgataatgtcggtgacaatgttggtgacattgctggaatgggatctgatctctttgggtcatacgcagagtcttcttgtgctgcccttgttgttgcgtctatttcatctttcggaatcgaccatgatttcactgggatgtgctacccactccttgttagctctgttggtatcattgtctgcttgatcaccaccctttttgctactgatttctttgaagtcaaggctgtgaaagaaattgagcctgcacttaagaagcagctcatcatctccaccgtcctgatgacttttggtattgctctaatcagctggttggcccttccagctaagttcaccatctacaacttcggtactcagaaggaggtttccaactggggtttgttcttctgtgtttcaattggtctgtgggctggtttgattattggttttgtcacagaatactacactagcaatgcatacagtcctgtgcaagatgttgcggattcgtgcagaactggtgctgccactaatgtcatttttggtcttgctcttggatacaagtctgttatcatcccgattttcgctattgctgttagcatctatgtcagtttctccattgctgcgatgtacggcattgcagttgccgctcttggtatgctgagcacaatcgcaactggtcttgctattgatgcttatggtcccatcagtgacaatgctggtggtattgctgagatggctggaatgagccacagaatccgtgagagaactgatgctcttgatgctgctggcaacacaactgctgctattggaaaggggtttgccattggttcagctgctcttgtgtccctggcgctttttggtgcctttgtcagcagagctggagtgaaggtcgtcgacgtcctctcccccaaggttttcattggtttgattgttggagccatgcttccgtactggttctctgccatgaccatgaagagtgttggaagcgctgccctgaagatggtggaggaggtccgcaggcagttcaacaccattcctgggttgatggagggaacagccaagcccgactacgcaacctgtgtgaagatctccactgatgcttccatcaaggagatgattcctccgggcgctctggtcatgctgactcccctcatcgttggaaccctctttggcgtcgagactctctccggcgttcttgctggtgccctggtttctggagtgcagatcgccatctctgcttccaacaccggcggtgcatgggacaatgccaagaagtacatcgaggctggtgccagcgagcacgcgaggaccctcggtcccaagggatccgactgccacaaggccgctgtgatcggtgacaccattggtgaccccctgaaggacacctccggcccgtccctcaacatcctcatcaagctcatggccgtggagtccctcgtgtttgcccccttctttgccacccagggtggcctgctcttcaagtacctgtaaaagggacaacaccaagcacacagcagaagtatacgatctcccgaccgaccgtggacaatatcgaataactcctgccaaatcgccagttccttttgtgtactgtgcgctagccgccgcctagctgcactgctgtatttttgtttcaggattgctgctgctgttcgcattcaatctttgggcctcccggagccgccggaggcgcgttttactgttagccttactactcttactccctgtagctccacgtagaagaaaccgatgtcctgcgtctggcaatttttcttagtcccttgatgatggcgatgatgctgaaacctttttttgaacaatgatacatgatgattgttgcgttgtactggtggtaaatcacggtccgtattggcctgttctgttggtgcccatttccaatcatccaatgtcgtgctctgcgttatacgattgctgtttgtactgtcatagctgctgccgacaaggtcataaagaaccttaaacttgaagcc

SEQ ID NO: 154619 - DNA, 855 bp, Zea Mays
gaagagcgtgcagagcgagacgcgtcgcctcctcccttcccccaccccgccgccgccctcgcgtccgtccgtccgtccgtccgttattagggttcggtcgccgccatggcgatcctctcggcgctcgccaccgaggtgctcatccccgtcgccgccgtcatcggcatcgccttcgccgtcgtgcagtgggtggtcgtgtcgcgcgtgaagctctccccggccgcgtccggcggcagcggcggcaaggccggctacgccgactccctcatcgaggaggaggaggggctcaacgaccacaacgtcgtcgtcaagtgcgccgagatccagaacgccatctccgaaggtgaggccgcccgccgggggttcctcagatctggggccgatgctgggtccgcctagatccacgcgtttctcggctgctccggcgaggattatgtttttttagtgtccgtcgtttgttaataggatatgcacacgtttctctaagagtgggtgagatctttgcggggggtagaaggtccggagttttgctacccgttcgtttatttagtgggtttcacgctgatctggtcatctggcggtgaagttcctattattaggctgcggatgcctgggtgagctcgaatgccattctatttttaccctcttccgggaccgtagcaactgtctaggtagcacaaaatcatcattttgttaggaccgaagcgagtttcaggttgcatgattttttcggaatggaagacaaatatctatgtctgtgtggggtgggtgggtgggggctcggtacctctggggactaacaattggtgtatcccttccccccttcaaacccttcaaactatgtacttttttatg

SEQ ID NO: 154620 - DNA, 1900 bp, Zea Mays
cttcttctccggtatccaccaccgcttcatctcggtaccgcgactcgtcgacatttcggtgagtaatcagtgcgataagaggtgcgccgacctttgatccagagtagtggcagcctggcacgccgtcgcgtgctcatacctgttctcttcaggcaccgccttccgccttccgccgcccagaccggcgaccggctacctgtctatgctgccttcctgcctccaggatctcccacgacggcacgaattgcctccgcccgtggttgatttcggttaggccttgccttgccgcttaattcagatgaggtgttgttgaggtcttgaggacatcacgtcgtcactagtggactatttctaaatccagtttgtcaagtgagtggacgaccccaagcctctttgctagccagtgaaatccaccaataaacaaactctggaaaaaaaatccaggagagcattccacttatggcggatgaatcatggaggattcctatgttagtgcaagaactggcggccaaggtgcagcaaccaccaagcaggtacatgcagccggagcagtatcatcctgtcagcctagacgttggtgccgagacactggagcccatccctgtgatcgacctcagccggctgtcgactgctggtggtgccgacgacgacgagagcggcaagctccggttggccctgcagacctggggggctcttcctggttgctaaccatggcatagaaaccgatttgatggacgatttaatggaagcgtcaagagagtttttccatctgccgctcgatcgaagagaagcacaagtgcagcaacttgatagacggcaggcatttccaggtggaaggatatggaaatgagacccagtgagatccgaggatcagagccttgactggatggatggatcgactgcatctcagtcagggtagaaccggaagacgagaggaatctcgtccattggcctcagcatcccaaaactttcaggggtcttttacatgagtacacattgaactgcaagagaatcaaggactgtatccttgggacaacagccaagactttagggcttggcgaagactgtttcgccagatttaactactacccgccgtgtccaaggccggatctcgtctttggcgtgaagcctcactcggacagtagtggtgtccttaccattcttctcatcgacaaagacgtcagtggactgcaagttctcagggatggcgtgtggcacaataatgtcccagctagtcctttcatgttgctgattaacgtaggagacttcatggagataattagcaacggggtcttgaggagcccggtgcacagggcggtgagcaacgcggagaaggagaggatctcgttggccatgttccacggcctggatcccgacgaagagattgagccggcgcccgctgctcttttaagcgagaaccagccggcgcggtacaggacactgaaggccaaggagtacctgctggccgggttctatgaacattttttttgtagattcatcgagtctgtgaagatccatctaaacgaggtttgatgtctcagttccccggctgcgtgacgaaagcattgttttgtttgtctcttagttcgaatctacgtcgtttagaggcgtcttagatggtctgtcgatcccaaaacaaatcctaagacctctcctccccgacgggtccctcttaggaccgagatcctagtgctgttggtgaactccgtcgtctatacgcacgcgcggaccatctaactcgtcgggcagaaaccctaacctctgcgcaggtcgtggaccgtccgcgcttccgtagagagcgccgctaccggtactcattgcactgattggcgccagactggcgccaacacatactaatggcttattcgttttcgtggattggagtgaatgagacggattt

SEQ ID NO: 154621 - DNA, 1356 bp, Zea Mays
cgtcggttcgtcgggcgtagcggcagcgatgatattttagtcgtactcgtacagaagccacagccctctgctagctagctagctcctgctagaatggaaagtgcaggaggggaagctcggccggtgctgccgccgccgccgccgccggtgcaagagctcgccggcgcagcgaacgacgtgccagctcggtacgtcgcgcgcgcaggcaacgagcccaaggtcacggtaaccgcgccggtcccggtcatcgacctcgcccggctgtgccagccgggcggcggcgccgacgaggcctcgaagctccggctggcgctcgagtcctggggtctcttcctggtgaccaaccacggcatcgaggccactctcatggacgccatgatggacgcgtcgagggagttcttcaggcagccgctccaggagaagcagaagcacagcaacatgatcgacggcaagcacttccagctccaagggtacgggaacgaccgggtggcgtcggaggaccaggtcctggactggtgcgaccgcctttacctcttggtggagcctcaggaggacaggagccttgacctatggcccgcatgtctaagggacgttctgcacgatttcaccacagagtgcacgagagtgaaggactgcctgcttcgagaaatggcgaaggcgctagatgagctcggcgacgacgacgactacttcatcgaccagttcggcgacagggccgacacccatgccaggttcagctactaccctccgtgcgcgcggccggacctcgtcttcggcctgaggcctcactccgacggcacgttcctctcgcttctcatgctagacgacagcgtcggcgggcttcaggttttccgggacggagcctggtacgacgtgcgcaccagacctcacaccctgctcgtcaatctaggagaccaaatagagataataagcaatgggatcttcaagagcccagtgcaccgggttgtaacaaacgcggagaaagagaggctatcagtggttctgttctattctatagatcctgagagagaaatccggcccgctgacaaactgatagacgagaaccatccagcactatacaagaaggtgaaagtcaaagaatatactgctggactctacgaacatttctctcgagggaaattggttaaagagactgcaaagatatagcttgttcgctttggattaaatccatggactaatccttagagacaaaaacactgtataagtagtaaaagtcggtacgaattaaagctcaagctagtcgtatctatgtaatgaataagggtgaaacctttgcgatcctagataataaatgaaattaatttttaataaaataaagtgtatatagttcgttgc

SEQ ID NO: 154622 - DNA, 1246 bp, Zea Mays
cgtcggttcgtcgggcgtagcggcagcgatgatattttagtcgtactcgtacagaagccacagccctctgctagctagctagctcctgctagaatggaaagtgcaggaggggaagctcggccggtgctgccgccgccgccgccgccggtgcaagagctcgccggcgcagcgaacgacgtgccagctcggtacgtcgcgcgcgcaggcaacgagcccaaggtcacggtaaccgcgccggtcccggtcatcgacctcgcccggctgtgccagccgggcggcggcgccgacgaggcctcgaagctccggctggcgctcgagtcctggggtctcttcctggtgaccaaccacggcatcgaggccactctcatggacgccatgatggacgcgtcgagggagttcttcaggcagccgctccaggagaagcagaagcacagcaacatgatcgacggcaagcacttccagctccaagggtacgggaacgaccgggtggcgtcggaggaccaggtcctggactggtgcgaccgcctttacctcttggtggagcctcaggaggacaggagccttgacctatggcccgcatgtctaagggacgttctgcacgatttcaccacagagtgcacgagagtgaaggactgcctgcttcgagaaatggcgaaggcgctagatgagctcggcgacgacgacgactacttcatcgaccagttcggcgacagggccgacacccatgccagacgacagcgtcggcgggcttcaggttttccgggacggagcctggtacgacgtgcgcaccagacctcacaccctgctcgtcaatctaggagaccaaatagagataataagcaatgggatcttcaagagcccagtgcaccgggttgtaacaaacgcggagaaagagaggctatcagtggttctgttctattctatagatcctgagagagaaatccggcccgctgacaaactgatagacgagaaccatccagcactatacaagaaggtgaaagtcaaagaatatactgctggactctacgaacatttctctcgagggaaattggttaaagagactgcaaagatatagcttgttcgctttggattaaatccatggactaatccttagagacaaaaacactgtataagtagtaaaagtcggtacgaattaaagctcaagctagtcgtatctatgtaatgaataagggtgaaacctttgcgatcctagataataaatgaaattaatttttaataaaataaa

SEQ ID NO: 154623 - DNA, 799 bp, Zea Mays
cgggcgtagcggcagcgatgatattttagtcgtactcgtacagaagccacagccctctgctagctagctagctcctgctagaatggaaagtgcaggaggggaagctcggccggtgctgccgccgccgccgccgccggtgcaagagctcgccggcgcagcgaacgacgtgccagctcggtacgtcgcgcgcgcaggcaacgagcccaaggtcacggtaaccgcgccggtcccggtcatcgacctcgcccggctgtgccagccgggcggcggcgccgacgaggcctcgaagctccggctggcgctcgagtcctggggtctcttcctggtgaccaaccacggcatcgaggccactctcatggacgccatgatggacgcgtcgagggagttcttcaggcagccgctccaggagaagcagaagcacagcaacatgatcgacggcaagcacttccagctccaagggtacgggaacgaccgggtggcgtcggaggaccaggtcctggactggtgcgaccgcctttacctcttggtggagcctcaggaggacaggagccttgacctatggcccgcatgtctaaggtgtgatcttcccatgatgttgatcgattaattactccaatataattctactagctacttggtgaaggactgtctgccacatgcatgtctaatataattctatatatgcagggacgttctgcacgatttcaccacagagtgcacgagagtgaaggactgcctgcttcgagaaatggcgaaggcgctagatgagctcggcgacgacgacgactacttcatcgac

SEQ ID NO: 154624 - DNA, 1479 bp, Zea Mays
ctttccttcgtcagttccgggcttccggccttctatggagaagcttccttcagtgagtcctccctttccgtttaaggcagcaagcaggagcagacaggaggcgccgagagcccagcgtcggagatctccgccgccatggagacgctggccagcgccatgcggcgcgagaaccgccggtccaaggccccgccctcctcctctgcttcctccgccctcgcctcgggcagggtccctctcgtcatggccttcctctcctgcctcgcctggctctacgtcgccggccgtttgtggcaggacgcgcagacccgggcgatcctgtccggcctcctcgagaagagctctaccagcgtcccgaaggtgctctcggtggaggacaagcttaggaaccttgggtgcaaggcgattggaaggaaaattgttgaggcggagatggacctgaccaaggccaagagcgaggggtacctgtgggggaacaggactgcagctgtggactccgacaagaagcagcagcttcttgccgtcattggagtttacactgggtttggctcccgtctcaagaggaacgtcttccgtggctcctggatgccaagaggtgatgctctgaagaagcttgaggaaaagggtgtagctattcgttttgttattggtcggagtgcaaatcgaggtgatagcttggaccgtaatattgatgatgaaaatcggcagacaaaggacttcttgattcttgaaagtcatgaagaggctgcagaagaattaccgagcaaagcaaaaattttcttcagtgctgcagttgaagcctgggatgcagaattttatgtcaaagttgaagataacattaatcttgacttagctgggttaattgagatgctcgaaggccgtcgaggtagccaaggattgtacatgggttgtatgaaatcagggatggtcataagtgaagagggccaacaatggtatgaacctgagtggtggaaatttggagattcaaaaacgtattttcgacacgcttctggttctttgtttatcctctcaaaaaatttggctcgctacatcaacataaatagtgcgtcactgcagagttatgcacacgatgatatatcagtaggttcatggatgatgggactgaatgcaacttacgtggatgatgaccggttgtgctgcagcagttccagacaagagaaaatctgttccaatgcttgagcggaaggcgtggctgctggcctgttgctgtacatcctgatgaagattttgcacacctgtcattttgtatacactgctttcgtgaaccggaaaaggctactatccagatagaaacggcttgcaccaaaatttaggaacttccatcaaaaagaaaaaaaaagaacaattttttccatccatgagtattgttggaactaatattgggtctgtttgtttcggcttctggcagcttctggccaccaaaagctgctacagactgtcaaccgctcagcttttcagcca

SEQ ID NO: 154625 - DNA, 1518 bp, Zea Mays
atggagaagcttccttcagtgagtcctccctttccgtttaaggcagcaagcaggagcagacaggaggcgccgagagcccagcgtcggagatctccgccgccatggagacgctggccagcgccatgcggcgcgagaaccgccggtccaaggccccgccctcctcctctgcttcctccgccctcgcctcgggcagggtccctctcgtcatggccttcctctcctgcctcgcctggctctacgtcgccggccgtttgtggcaggacgcgcagacccgggcgatcctgtccggcctcctcgagaagagctctaccagcgtcccgaaggtgctctcggtggaggacaagcttaggaaccttgggtgcaaggcgattggaaggaaaattgttgaggcggagatggacctgaccaaggccaagagcgaggggtacctgtgggggaacaggactgcagctgtggactccgacaagaagcagcagcttcttgccgtcattggagtttacactgggtttggctcccgtctcaagaggaacgtcttccgtggctcctggatgccaagaggtgatgctctgaagaagcttgaggaaaagggtgtagctattcgttttgttattggtcggaggttttgttctggatctatacctttgagttactgcatcattcttagttcagaatttaacaatatcattgtcattcccgttttctattatattagaaaaatataatccattttccatctctcgttttattgattatgtatacctttttggacctgcagtgcaaatcgaggtgatagcttggaccgtaatattgatgatgaaaatcggcagacaaaggacttcttgattctttaagcattttggattgggcaggaaagtcatgaagaggctgcagaagaattaccgagcaaagcaaaaattttcttcagtgctgcagttgaagcctgggatgcagaattttatgtcaaagttgaagataacattaatcttgacttagctgggttaattgagatgctcgaaggccgtcgaggtagccaaggattgtacatgggttgtatgaaatcagggatggtcataagtgaagagggccaacaatggtatgaacctgagtggtggaaatttggagattcaaaaacgtattttcgacacgcttctggttctttgtttatcctctcaaaaaatttggctcgctacatcaacataaatagtgcgtcactgcagagttatgcacacgatgatatatcagtaggttcatggatgatgggactgaatgcaacttacgtggatgatgaccggttgtgctgcagcagttccagacaagagaaaatctgttccaatgcttgagcggaaggcgtggctgctggcctgttgctgtacatcctgatgaagattttgcacacctgtcattttgtatacactgctttcgtgaaccggaaaaggctactatccagatagaaacggcttgcaccaaaatttaggaacttccatcaaaaagaaaaaaaaagaacaattttttccatcc

SEQ ID NO: 154626 - DNA, 1979 bp, Zea Mays
tttgttgctggcaactcgtgatggtttttccagccttggtgaacattggcagtggctacagcttgggcaggggctggtggcagcgcaaaggagagtgagagggaactttaaggcaaaaacacttttctggttaatccatatggatacatccaaaagatgttatatatatgatccacccttcttaattcaattcaagctttcgccacaaagctctcttattctctaatactgataactttttggcggccccgaattggaggggtatggaggttgcagcatgctagccgtaccctctggttgctgcaacatgtagatgtaggtggtggctactgcctcttgggttcagctgggctgcttggcccatgggcattatgccaaaaacataaatgtgtaaaagtgtacttacagaagacataaatggccaaaagggggagctatttggtgccttgaaataaataaaataaaaaatatgttctttggcttctgcctactatttaaaatttacaaatgatttgcaggtgagtcattagaagatgctttgaggcaattatacctcattgatgcaattgatgaaaacggacaaataacggatgttggacgagttatggcagagcttcctcttgagccgtctctttcaaggactttgattgaagcaaatgaattgggatgcctatctcaggcgttaactgttgcatcgattttgtcagcagaaataacattgcgatcagttagcaaggacgtggtggatggaaagaggaaaaggcaggagctccctgatgggtctggctggggtgaccatatacaattgcttcagatatttgaaagctgggaccaaactggctatgacacaaaatggtgctctcatcatgatttgcaggtgcggggtatgaaattgagcaaagatgtgaggaaccaactatgtcagattattcaaaaaattgcaaaaggttcaactgatgtggatgcaaggaaaagccggaagaatgaccctgattatagaaagctgaggagagctctctgcgtaggatatggtaaccagctagctgagaggatgctgcatcacaatggctaccatactgttggctataggacccaacttgtacaggtgcatccatcttctgtactggaaggcgatgagtatggaaagtttccaatgtacgttatttatcatgagctgataagtacaactcgtccatacatgagaaatgtctgcgccgtcgagcaagcctgggttcagcctatattaaagaagctcgacaaattagacataaacagattaagtggtggttcgagtgcaccgggagattctgaacttctgggagacaataagcaagtgaactcgtcaaagaatgacgtgggtgtaaaacaatcagaggtggacagtaaaatccaggcagctcgagagcggtaccttgcacgaaaaggcaagaaatgacaatcgacacgtttaactgatcgctcagcatccttctggtcagcctgaagcttctctgaagatcataccgaggaaccattcgtgttattgtgggtggtgtatgcttcaacgtgcacaaacaagagaatttcttatgtaatcttttgtttgaggactctaaccttttcttttatttggcattactgtgatgtgaccttttccttgggccgaaatattttacaggcttttctgcatgggctagattcttttcccccatattcctatatggtgttgtctgttgaggtcttgtccctcctgcctagcatatgttgagtcccaagcaaggcaacaccgcaatatgatgcgatcttggaagtgatactgatatgcgctctgcttgggtttctctaacaaattttagagtcccgctctccctccctccgttccaaaatataatttgttttagattaattacacattcattaagtaacatatgaatataatttgtatgtatattcattatcatttgaatgaatgtggacaaaaaaaagtgggctagaaggaa

SEQ ID NO: 154627 - DNA, 1691 bp, Zea Mays
aacaatagttgttgaaaacttaaagtggctgtatatcttattttcccttgaggtgttttgtttttctaagtttgcacaaagatattaacaataccgtttcttatttctttaggttcgtgattgattgtggttatgtaaagcagcgccaatacaatccatcaagtggaatgtattcacttgatgttgtccaaatcagcagagtgcaggctgatcagcgagcagggcgagctggtagaactcggcccggcaagtgctataggctatacccaatttccatatatcagaatgagtttcttgaggcaacagtccctgaaattcaacgctcttctcttgctggaagtgttctgtatctgaaatcgttaaatcttccagacatcaacatactgaagtttgattttctagatccaccatcacgtgagtcattagaagatgctttgaggcaattatacctcattgatgcaattgatgaaaacggacaaataacggatgttggacgagttatggcagagcttcctcttgagccgtctctttcaaggactttgattgaagcaaatgaattgggatgcctatctcaggcgttaactgttgcatcgattttgtcagcagaaataacattgcgatcagttagcaaggacgtggtggatggaaagaggaaaaggcaggagctccctgatgggtctggctggggtgaccatatacaattgcttcagatatttgaaagctgggaccaaactggctatgacacaaaatggtgctctcatcatgatttgcaggtgcggggtatgaaattgagcaaagatgtgaggaaccaactatgtcagattattcaaaaaattgcaaaaggttcaactgatgtggatgcaaggaaaagccggaagaatgaccctgattatagaaagctgaggagagctctctgcgtaggatatggtaaccagctagctgagaggatgctgcatcacaatggctaccatactgttggctataggacccaacttgtacaggtgcatccatcttctgtactggaaggcgatgagtatggaaagtttccaatgtacgttatttatcatgagctgataagtacaactcgtccatacatgagaaatgtctgcgccgtcgagcaagcctgggttcagcctatattaaagaagctcgacaaattagacataaacagattaagtggtggttcgagtgcaccgggagattctgaacttctgggagacaataagcaagtgaactcgtcaaagaatgacgtgggtgtaaaacaatcagaggtggacagtaaaatccaggcagctcgagagcggtaccttgcacgaaaaggcaagaaatgacaatcgacacgtttaactgatcgctcagcatccttctggtcagcctgaagcttctctgaagatcataccgaggaaccattcgtgttattgtgggtggtgtatgcttcaacgtgcacaaacaagagaatttcttatgtaatcttttgtttgaggactctaaccttttcttttatttggcattactgtgatgtgaccttttccttgggccgaaatattttacaggcttttctgcatgggctagattcttttcccccatattcctatatggtgttgtctgttgaggtcttgtccctcctgcctagcatatgttgagtcccaagcaaggcaacaccgcaatatgatgcgatcttggaagtgata

SEQ ID NO: 154628 - DNA, 1805 bp, Zea Mays
tcagttttgattgcagtgcacgtaaatcagttattcctgtgcctggactatgaataggctgtaaatcccctattaatatcactattgctgtcttatactccctccgtcccattatattagtcgttttaggtgttgatttttgtgtctatgttcaaatggattatgatgaatctagacataaatataaaatacatacactaagtattgtatgaatcttataattatctaaaacgaattttaatttgtaatttgagggctcatgttggatttcagctctagtgcacccctacttgctggggatcaatagggtgtttggttggataatgggggtgattgatctttccactccttacattttgtttggttggtggaattgaatgggttgatccatcacaacttcaaccctcacaagctaataattagtatataagcatgaggaatgggttcactctactgaaggttgaacccgcgatgcagcccatataaggcttttgttgttgttgttactgaaggttgaacccgcgatgcaacccatataaggcttttgttgttgttaaatgtgcttcaaaactaccatttatgtagtataggtgctctctgttgaccaattagtctaggaaactataggtttcgttaatttgtcttgatcctagtaccagcttaaaaattaaaagggtcgtataaatggaaataggaactaaggagatgtaacaagtgattactcagggtaatacagtactgatgattagtccttacgtgccctctgttggatattaaaaaagcacacagaaatgtgatatttggaaatgataaatgccattattttttatttctgtctcatcagttgtcactttagtggattgctgtaaattgtccaagtttttttaatccaaagtctcctttgattcctatagtgtcatctcggggaaacaggtccacataagttaacctgaaatgttgttaatttaggttcaactgatgtggatgcaaggaaaagccggaagaatgaccctgattatagaaagctgaggagagctctctgcgtaggatatggtaaccagctagctgagaggatgctgcatcacaatggctaccatactgttggctataggacccaacttgtacaggtgcatccatcttctgtactggaaggcgatgagtatggaaagtttccaatgtacgttatttatcatgagctgataagtacaactcgtccatacatgagaaatgtctgcgccgtcgagcaagcctgggttcagcctatattaaagaagctcgacaaattagacataaacagattaagtggtggttcgagtgcaccgggagattctgaacttctgggagacaataagcaagtgaactcgtcaaagaatgacgtgggtgtaaaacaatcagaggtggacagtaaaatccaggcagctcgagagcggtaccttgcacgaaaaggcaagaaatgacaatcgacacgtttaactgatcgctcagcatccttctggtcagcctgaagcttctctgaagatcataccgaggaaccattcgtgttattgtgggtggtgtatgcttcaacgtgcacaaacaagagaatttcttatgtaatcttttgtttgaggactctaaccttttcttttatttggcattactgtgatgtgaccttttccttgggccgaaatattttacaggcttttctgcatgggctagattcttttcccccatattcctatatggtgttgtctgttgaggtcttgtccctcctgcctagcatatgttgagtcccaagcaaggcaacaccgcaatatgatgcgatc

SEQ ID NO: 154629 - DNA, 105 bp, Zea Mays
gaagaagaccaaaattgcagccaaacagaaaaactctatcctcttctcatgctgcaagaagacaggccaaccccaactgccacaacactaaagactagaattagc

SEQ ID NO: 154630 - DNA, 931 bp, Zea Mays
atgtctattgtgccttgtgatgtgtgtgtctgtgaattctcaatggatcgtgacccatgggcaaaattccgacgcccaaacagtgagcacccagcccaatcagaggagacacgcacgcaccagcaccctggtgtggccggtgcccggcggccaaacgcgatgccatctccgtctccagccccgccgccagtgctgccgatctcggagcacgaggacgagatagtcgccgcggtggacgcgaacccagtggtggtggtcatcggcgagactggctccggcaagagcactcagctctcccagatcctccaccgccgcggatacacccgtcggggtgccatcgctgtcacccagccccgccgcgttgctgcggtttccgtttccagaagagtagctcaagagcttggtgttccacttggggatgaagttggttatgcaattcgatttgaggacagaacttcagaaagaacatgcataaaatacctcacagacggcattcttctccgtgaaagcctttcaaatcctgagttgaagcagtactcagtaatcatactggatgaagctcacgagcgtagcttaaacactgatatccttttaggtttgatgaaaagattgatcaaggaccgagcttcagatttaaaagttttaatcacctctgcgactcttgacggtttaaaagtttcaaagttcttctcaggatgccctgtgttaaacattcctggaactttattccctgtggagaaattttacagcactgatcgcccaacaaattatatagaatcttcactcagaacagctatagatatccatgccaaggaacctcctggagatgtcttaatatttatgacaggaaaggatgatattgacaagatggtatcaaaattggaggaaagaattcgaaatcttgaggagggctcctgcatcgatgctcttg

SEQ ID NO: 154631 - DNA, 382 bp, Zea Mays
atttgtttcatttcattcacataattgccactcatgattctgatttgcttcaatacgtctacgcagatacgccatgtggtacaaagagcaggagaagctttcccacagatactaaatgggatgtcctccaagttgctgcggcttgtcgcagttgaattttccatgatgggttgtataatctgtcaatgtcatttctttgctcagttttagttcaacccattttcacctttccatatgcatatacggtatctgtgcctggcaaacatattttgaggctagctaaatatgaaccttttgtctcttaagttgttaaataaagcaaattatctgacagtttttcttgtttttgtgtttaagaattggtatctgggttttcactttt

SEQ ID NO: 154632 - DNA, 707 bp, Zea Mays
attttgtcggtaaagaacgtgtgaggatggtgcactagcgaagcccttgtacataatggcattcgggcgaatcccccgttccataatggcataattccatatttctccagctgttccgccgagcgaacgacccacaaccagaagccacccattggcgtacgcgaggcgatcggagcatcccgtcccaagaggagaaactccggccggcgacgcgggggaaaatggggaagacgccggtgcggatgaaggcggtggtgtacgcgctgtcgcccttccagcagaaggtgatgccggggctgtggaaggacatcaccaccaagatccaccacaaggtcaccgagaactggatctccgccacgctcctcctcacccccgtcgtcggcacctaccaatacgccatgtggtacaaagagcaggagaagctttcccacagatactaaatgggatgtcctccaagttgctgcggcttgtcgcagttgaattttccatgatgggttgtataatctgtcaatgtcatttctttgctcagttttagttcaacccattttcacctttccatatgcatatacggtatctgtgcctggcaaacatattttgaggctagctaaatatgaaccttttgtctcttaagttgttaaataaagcaaattatctgacagtttttcttgtttttgtgtttaagaattggtatctgggttttcactttt

SEQ ID NO: 154633 - DNA, 1708 bp, Zea Mays
cacggcgctcaggccgtggcttactggcttccacccacagccttcgcacttccctccttcctcgcaaatggccgtcgccgtccccaacgctcccggccgcctcttccttctccaatccaccccgttcccgaaccctagcagctcggcatccgccgctcgagcccaatccttccgcgtaccacccctccgcctctcgctattccgacgcatggctgggcgctcgctgacggtgatcgcaggcgcctccggcggctccgaacgagatctcagcgcctccgcagtctccgtggaggccctggactccgtcgcctccgattctgacttagagacgaaggagcccagtgtgtcgacgatgctgacgagcttcgagaactcgttcgacaagtatggggctctgagcacaccgctgtaccagaccgccacctttaagcagccttcagctacagattatggaacttatgattacactagaagtggtaaccctactcgtgatgttctccagagcctcatggctaagcttgagaaagcagatcaagcattctgcttcaccagcgggatggcggcgttagctgcagtaacacacctccttcaggctggacaagaaatagttgctggtgaggacatatatggtggttctgatcgtctactctcgcaagttgtgccaagaaatggaatagttgtaaaacgagtagatacaacgaaaattagtgatgtggtgtctgcaattggaccctccactagactggtttggctcgaaagtcccacgaaccctcgtcagcaaattactgacattaagacaatctcagagatagcgcattctcatggtgctcttgttttggttgacaacagcatcatgtctccagtgctctcccgtcctatagaactgggagctgatatcgtgatgcactcggctaccaaatttatagcgggacatagtgatcttatggctggaattcttgcagtgaagggtgagagtttggctaaagaggtagggtttctgcaaaatgctgaagggtcgggtctggcaccttttgactgctggctttgcttgaggggaatcaaaaccatggctctgcgggtggagaaacaacaggctaatgcccagaagattgctgaattcctggcgtctcacccgagggtcaagcaagtaaactacgctgggcttcctgaccatcctgggcgagctttacactattcccaggcaaagggagcgggctctgttctcagttttctcaccggctcactggccctctcaaagcacgtcgtggagaccaccaagtacttcagcgtaacagtcagcttcgggagcgtgaagtccctcatcagcctgccgtgcttcatgtcccacgcatcaatccctgcctcggtccgcgaggagcgtggcctaaccgacgacctcgtccggatatcggtcggcatcgaggatgtcgaggacctcatcgccgatctggaccgcgcgctcagaactggcccggtgtagacatcgccgatccttaggtcatgtcaagctatcttttgatgattcattggttgactgcttgcgtgatgataataatgggaatgttgcttggatacgccgctggtgatgaacttaacgcgccccaactgttgttagcgtcgacatgtaggatcagcgccccaactgttgttagcgtcgacatgtaggacccgctgatcgtgcagcgccctcatcctatgctcaggctat

SEQ ID NO: 154634 - DNA, 1971 bp, Zea Mays
gttcaccgcaccccactcttcgcggcgcgttgcaggaacttcccgtattccccacgcgtccgagcgcacagcgtcacggcgctcaggccgtggcttactggcttccacccacagccttcgcacttccctccttcctcgcaaatggccgtcgccgtccccaacgctcccggccgcctcttccttctccaatccaccccgttcccgaaccctagcagctcggcatccgccgctcgagcccaatccttccgcgtaccacccctccgcctctcgctattccgacgcatggctgggcgctcgctgacggtgatcgcaggcgcctccggcggctccgaacgagatctcagcgcctccgcagtctccgtggaggccctggactccgtcgcctccgattctgacttagagacgaaggagcccagtgtgtcgacgatgctgacgagcttcgagaactcgttcgacaagtatggggctctgagcacaccgctgtaccagaccgccacctttaagcagccttcagctacagattatggaacttatgattacactagaagtggtaaccctactcgtgatgttctccagagcctcatggctaagcttgagaaagcagatcaagcattctgcttcaccagcgggatggcggcgttagctgcagtaacacacctccttcaggctggacaagaaatagttgctggtgaggacatatatggtggttctgatcgtctactctcgcaagttgtgccaagaaatggaatagttgtaaaacgagtagatacaacgaaaattagtgatgtggtgtctgcaattggaccctccactagactggtttggctcgaaagtcccacgaaccctcgtcagcaaattactgacattaagacaatctcagagatagcgcattctcatggtgctcttgttttggttgacaacagcatcatgtctccagtgctctcccgtcctatagaactgggagctgatatcgtgatgcactcggctaccaaatttatagcgggacatagtgatcttatggctggaattcttgcagtgaagggtgagagtttggctaaagaggtagggtttctgcaaaatgctgaagggtcgggtctggcaccttttgactgctggctttgcttgaggggaatcaaaaccatggctctgcgggtggagaaacaacaggctaatgcccagaagattgctgaattcctggcgtctcacccgagggtcaagcaagtaaactacgctgggcttcctgaccatcctgggcgagctttacactattcccaggcaaagggagcgggctctgttctcagttttctcaccggctcactggccctctcaaagcacgtcgtggagaccaccaagtacttcagcgtaacagtcagcttcgggagcgtgaagtccctcatcagcctgccgtgcttcatgtcccacgcatcaatccctgcctcggtccgcgaggagcgtggcctaaccgacgacctcgtccggatatcggtcggcatcgaggatgtcgaggacctcatcgccgatctggaccgcgcgctcagaactggcccggtgtagacatcgccgatccttaggtcatgtcaagctatcttttgatgattcattggttgactgcttgcgtgatgataataatgggaatgttgcttggatacgccgctgctacgccttctcgtactagtccgctaggatttgttcaccttgggtgaaaggctgcccgctgtcgagctgtcggcttgtgggatgtggccaccggcggcagcagtgccgcggtgagcaaacatgcctgtggtttcttccgtgcatgccctgaattctctatcgttagcacttgtacatcccaatttgtgtgtaggaaaacgcgaacgccacgcattttaacatatctatcactttttactaacagtgattattatcactagacgcaaagtacagcagaagaacgtatcagtatagtggaaattgccgtatgttctc

SEQ ID NO: 154635 - DNA, 1690 bp, Zea Mays
gtcggtctagagaacgcgaagcgcctcgccgacgccgaccgccgctccccaccaacagttcaacaccaagccggtccacccttgcaactgcgccatgccttccccctccaactcccactcttcgtcctccaactccagcgaccgcgacgatgacggcggcggtggtggaaacggccgctcgtgggccgcggctgagcgcgtcgcctcgtatctccggaaccataagtcggtccacgccgtttgcgagaagctcggcgtcgacaccaaggcattcaccccgatccccgccggcgaccgacgcgcgtgctcgcccccacccgctggatccatctgcgtgtacgcggacgcgctggaagccgggatgcgcgtcccgctcgaccccttcttctgcgagctgctctcgcacttcggtgtcgccccgagccagctcgcgcccaattgctggcgcatcatggcggccttcctcgcgctctcccgctccgccggcgtgcacccgccatcggtccccgttttcctgcacttcttcgcgctgcgcgtgctgaaggttaagggcctctactgtttcgccccgaaggacaccgctgggatagatccatcaacctattccatgatgcagaacatgcgggcagagaaggcagccgccgaagcggcggaagcagccaaggtcgccgcgaagagtgaacctggctgcagcgcgtcgccgggctggacgccgttgtccgggaagaagaggccggcggaagacaacacaagggaggccactggtcacgggtcggcgtctgtcccgcccggcttctccacgcgccaaaaacgaaagctgcagcacgcaccggacagacatgacggcgacacggtcgagtgggaggcggcgcggcagcttctgcagggcgtcatcacgccggcgcgggagcgcgcgttcttgatggcggatcccttcagcgtcatcgcgacaagctacatcgcgacgctccaggtccgattctgatccttggcgccgccgcagcatatatggcggcgcatcgcggcgtgggtgcacgtacgtacttatgtcgctcgctgcgtcggcgcgcaatgcaggcggcgaactacgcgacgttctcgttggggcacgcactgaagctccatgaggagctggagaaggccaaggccgagctcgcggaggcgaagaagacgacggaggccgagctgaagagcgccaaggaggcggcggtgcaggagttcctgggctccgaggagcacgagcgccggctggtggaggaggcgctcaaggggtacgagcggggcttggaggacatgaagcgcgtcgcgctgcggctccgccctgacgtcgacgcggctcagctgttcgtgcctcctggcgggtttcagtagctgtgccgttttcagccatagtgaaacttgtgtaaaattctacagtagctagcaggctcccttccacgattagttcatcttgatccaccttgatatggtgatgatctgttttgaaccaaatggccgttctggttcgttcggttagaggtggacaagccctgaggaagttcaattccatggtgtggctctgtaactatactagtgcttgttgttgtgacctaagaccgcccccagtacctgcctcgcctccggtacccgtacgatagtacaaaatattgttctatactttataatatttatagagttaagtttaaatgtg

SEQ ID NO: 154636 - DNA, 1382 bp, Zea Mays
acagttcaacaccaagccggtccacccttgcaactgcgccatgccttccccctccaactcccactcttcgtcctccaactccagcgaccgcgacgatgacggcggcggtggtggaaacggccgctcgtgggccgcggctgagcgcgtcgcctcgtatctccggaaccataagtcggtccacgccgtttgcgagaagctcggcgtcgacaccaaggcattcaccccgatccccgccggcgaccgacgcgcgtgctcgcccccacccgctggatccatctgcgtgtacgcggacgcgctggaagccgggatgcgcgtcccgctcgaccccttcttctgcgagctgctctcgcacttcggtgtcgccccgagccagctcgcgcccaattgctggcgcatcatggcggccttcctcgcgctctcccgctccgccggcgtgcacccgccatcggtccccgttttcctgcacttcttcgcgctgcgcgtgctgaaggttaagggcctctactgtttcgccccgaaggacaccgctgggatagatccatcaacctattccatgatgcagaacatgcgggcagagaaggcagccgccgaagcggcggaagcagccaaggtcgccgcgaagagtgaacctggctgcagcgcgtcgccgggctggacgccgttgtccgggaagaagaggccggcggaagacaacacaagggaggccactggtcacgggtcggcgtctgtcccgcccggcttctccacgcgccaaaaacgaaagctgcagcacgcaccggacagacatgacggcgacacggtcgagtgggaggcggcgcggcagcttctgcagggcgtcatcacgccggcgcgggagcgcgcgttcttgatggcggatcccttcagcgtcatcgcgacaagctacatcgcgacgctccaggcggcgaactacgcgacgttctcgttggggcacgcactgaagctccatgaggagctggagaaggccaaggccgagctcgcggaggcgaagaagacgacggaggccgagctgaagagcgccaaggaggcggcggtgcaggagttcctgggctccgaggagcacgagcgccggctggtggaggaggcgctcaaggggtacgagcggggcttggaggacatgaagcgcgtcgcgctgcggctccgccctgacgtcgacgcggctcagctgttcgtgcctcctggcgggtttcagtagctgtgccgttttcagccatagtgaaacttgtgtaaaattctacagtagctagcaggctcccttccacgattagttcatcttgatccaccttgatatggtgatgatctgttttgaaccaaatggccgttctggttcgttcggttagaggtggacaagccctgaggaagtt

SEQ ID NO: 154637 - DNA, 1744 bp, Zea Mays
cacggtctcacggaggagtcgtggtggtggcacgggtcacccgcagcacacgaaaaaaaacaacaaaaaagattggattcttgaggagcgcaacgtgctggctccgtgtctctctcgcccttctcccgtctccgctccgcctccgcgcgtccggcgagaccgcgagagcgagacgatgggaatgctacaaattccccttctgagtccgaccctcctcatccaatagtaccacctgctcgctgctccgccaccgctctcgctcgatcgcccccctcgttcgtcggccttcgcttccagacctccgagtcctcaatctgcagctttggtaattggtcgtatagtccctcatcatcggaatggtggggtcacttatctttcccacacctaatgtggatccgaaggcagagaatcctaatgagatggttacagccggtgtgctttcaagccttcagaatttcctacgcaagtgcctcatagccatcctctcatatggcccaatgccgaagcacattgcatttattatggatggcaatcgtcgatatgctaaattcagaagcatgcaagaaggagcgggtcacaggatgggtttctctacccttattgcaagtctgatgtactgctatgaaatgggtgtgaagtacatcactgtctacgcattcagcatcgacaattttaaaagggacccaagtgaggtggaatccttgatgcagttaatggaggaaaaaatcaacgaactcttagagaaccgaagtgtaatcaacaagattaactgtaagatcaacttttggggtaacttggacttgttatatgagccggtgcggttggcggctgagaagctgatggcgagcacagctgggaacacagggctggtcttttctatctgcatgccatacaactcgacttctgagattgtcaatgctgtcagtcaagtctgtgcggaaaggatggaaatgtttcagagcgaacatattggcgaatgcaatggtcatgctgcaaataacggtgtgcgatcagagatttcagtggcggatttggatcgccacatgtatagtgccgaatgcccagatcctgatattgtcatccggacttcgggcgagactcgattgagcaatttcctcctttggcagacaacgtttagtcacttgcagaatccagatcctctgtggcccgagttctctttcaggcaccttgtttgggctgtcttgcagtatcagagagtttaccctgctctggagcataacagaaagttggctaagaagcagttgtgattccatgttacttgcaaggaggtatcatgaagggctattaacatcaaacttttccttctcaatttcctggtaatggtaaatgcaaagaagaacatactagcatataacattatgaatagatcaccatgtaacttaagtgtgattgctaccgtaaccatgtaacttatttgagctcgtacaaatgctgtgattcctaaatatatatatatatatagagtgcctggggtaacatggtgtgcgagagcatttctttgttttgcacgacaaagaccggatgcttcaaagcgcccatgtttgacaagtgaaaagaaaggagttcgaagtaaaacaataggccaatgtctgttttccatagtccaataagtagaccactgataatgtctgttgatcatattttgcatccagccaagtagaccactgaaaaccaaggtcatgcacgtacagaaatatatatgcaagtttaacgtctgatggct

SEQ ID NO: 154638 - DNA, 1619 bp, Zea Mays
gagagcgggcggagagtgtgagttgcgcccgatgtgccgtggcggcatgggaggaagagggagaagggcggacaggatcaaatcgccctcgacccccacactagagctccacctcccttgacatccttctccaccgccctagttgcaagacgaccgccgccctgcaaggaccgtcgacgacggtgctcatcgccgctttggtaattggtcgtatagtccctcatcatcggaatggtggggtcacttatctttcccacacctaatgtggatccgaaggcagagaatcctaatgagatggttacagccggtgtgctttcaagccttcagaatttcctacgcaagtgcctcatagccatcctctcatatggcccaatgccgaagcacattgcatttattatggatggcaatcgtcgatatgctaaattcagaagcatgcaagaaggagcgggtcacaggatgggtttctctacccttattgcaagtctgatgtactgctatgaaatgggtgtgaagtacatcactgtctacgcattcagcatcgacaattttaaaagggacccaagtgaggtggaatccttgatgcagttaatggaggaaaaaatcaacgaactcttagagaaccgaagtgtaatcaacaagattaactgtaagatcaacttttggggtaacttggacttgttatatgagccggtgcggttggcggctgagaagctgatggcgagcacagctgggaacacagggctggtcttttctatctgcatgccatacaactcgacttctgagattgtcaatgctgtcagtcaagtctgtgcggaaaggatggaaatgtttcagagcgaacatattggcgaatgcaatggtcatgctgcaaataacggtgtgcgatcagagatttcagtggcggatttggatcgccacatgtatagtgccgaatgcccagatcctgatattgtcatccggacttcgggcgagactcgattgagcaatttcctcctttggcagacaacgtttagtcacttgcagaatccagatcctctgtggcccgagttctctttcaggcaccttgtttgggctgtcttgcagtatcagagagtttaccctgctctggagcataacagaaagttggctaagaagcagttgtgattccatgttacttgcaaggaggtatcatgaagggctattaacatcaaacttttccttctcaatttcctggtaatggtaaatgcaaagaagaacatactagcatataacattatgaatagatcaccatgtaacttaagtgtgattgctaccgtaaccatgtaacttatttgagctcgtacaaatgctgtgattcctaaatatatatatatatatagagtgcctggggtaacatggtgtgcgagagcatttctttgttttgcacgacaaagaccggatgcttcaaagcgcccatgtttgacaagtgaaaagaaaggagttcgaagtaaaacaataggccaatgtctgttttccatagtccaataagtagaccactgataatgtctgttgatcatattttgcatccagccaagtagaccactgaaaaccaaggtcatgcacgtacagaaatatatatgcaagtttaacgtctgatggct

SEQ ID NO: 154639 - DNA, 909 bp, Zea Mays
tcgacgcgacactctgacacgctacggcctctcggcggggcccggcaacagaccgggcagcagcacggcagccatggcgtcgagttcgaccctggatttggcgatgggccccggcgccctcctcccccgcagcgcggtcccgtacgcctccttcgctccaggaaggggaaggagcgcgagcggaacgaggagcaggaatctggcgctctccgcttcctcctccaacggtgcagcagtgccatccctgacaacagattcggagaagaagggcccagtgataatggaaattccactggaccaaatccggaggccactgatgcgaacgcgggccaatgatccagtcaaggtgcaagaactcatggacagtatccgtgtcatcggcctccaagtacctattgatgtgttggaggtcgatggggtctattatggcttctctggatgccaccgctacgaggctcaccagcgccttggtctcccaaccatccgctgcaaagttcgccgtgggacaaaggaaacactgaggcaccatatgcgatgagttatattttattcagttacaaagtgatctgtgtatctagagctaaaacagaagcttccatggtcttttcgtcgtctcgtctgcaattctccatacctgtaaatgttgtccaaacagagtggtgaatagtacttctgtacccagcagcatcagaaaatgttaattttgcctacaacactcttttcgatcagtggatggatgagtaccacccgctcagtagatcattccatttctacgagatttttgtaaaaaaagaaaaatgcagcagcagtcggcacgctgtgtcatttagatcatctagaaaaccagaaaaaacgagtcatgtaacttgtttggctcgtgcaaaaaaatattcaaaaccaagtttgctt

SEQ ID NO: 154640 - DNA, 899 bp, Zea Mays
acttggaaaatcgatctactcgatgttgtacatgcgtgacgctcgaatcatgccatttctgtgctgatcggcccatttgctctaacatctagcccagataactcttgtggtacacatcgacgcgacactctgacacgctacggcctctcggcggggcccggcaacagaccgggcagcagcacggcagccatggcgtcgagttcgaccctggatttggcgatgggccccggcgccctcctcccccgcagcgcggtcccgtacgcctccttcgctccaggaaggggaaggagcgcgagcggaacgaggagcaggaatctggcgctctccgcttcctcctccaacggtgcagcagtgccatccctgacaacagattcggagaagaagggcccagtgataatggaaattccactggaccaaatccggaggccactgatgcgaacgcgggccaatgatccagtcaaggtgcaagaactcatggacagtatccgtgtcatcggcctccaagtacctattgatgtgttggaggtcgatggggtctattatggcttctctggatgccaccgctacgaggctcaccagcgccttggtctcccaaccatccgctgcaaagttcgccgtgggacaaaggaaacactgaggcgagagcaccttccttcagcttggattccatttttgaattacttgatgcactgaacttcagtttgctctttcaggcaccatatgcgatgagttatattttattcagttacaaagtgatctgtgtatctagagctaaaacagaagcttccatggtcttttcgtcgtctcgtctgcaattctccatacctgtaaatgttgtccaaacagagtggtgaatagtacttctgtacccagcagcatcagaaaatgttaattttgcc

SEQ ID NO: 154641 - DNA, 537 bp, Zea Mays
ggtgtgcactatgcaggcgtgcccaagtgcagcagtgccatccctgacaacagattcggagaagaagggcccagtgataatggaaattccactggaccaaatccggaggccactgatgcgaacgcgggccaatgatccagtcaaggtgcaagaactcatggacagtatccgtgtcatcggcctccaagtacctattgatgtgttggaggtcgatggggtctattatggcttctctggatgccaccgctacgaggctcaccagcgccttggtctcccaaccatccgctgcaaagttcgccgtgggacaaaggaaacactgaggcgagagcaccttccttcagcttggattccatttttgaattacttgatgcactgaacttcagtttgctctttcaggcaccatatgcgatgagttatattttattcagttacaaagtgatctgtgtatctagagctaaaacagaagcttccatggtcttttcgtcgtctcgtctgcaattctccatacctgtaaatgttgtccaaacagagtggtga

SEQ ID NO: 154642 - DNA, 637 bp, Zea Mays
agaggccagaggcccaaccctatatcctgtgtctcgtgtgtttcctctgtcgtgcttaagggaagggagacgggttctctacatcttcttgcgcctctactgctgacgggagggaagggagcggatctggtgatccgcggtaacgtagttctcaacaccgacgtccttgaccctgctctgatgcgatcaggacggctggaccgcaagattgagttccctcacccatctgaagaagcaagagctagaatcttgcaaatccattcaagaaaaatgaacgtaaatccggatgtcaacttcgaagaattggctcgctcaacagatgacttcaacggagcacagctgaaggcagtctgtgtagaagctggcatgctcgctctacggcgggatgctacagaggtaactcacgaggacttcaatgaaggaatcgtgcaggttcaggcaaagaaaaagtcaagcttgaactactatgcttaagctatatgcaaaaatgtcagaaccacaagttagtttgtaacactactgtgtggatgatcgaagctacgtttttacgtttgcgttgagatgcgagtttttaacattgcctcagatttttcttcagcctcaggctccccagaaaactgtttgcttaccatctgtg

SEQ ID NO: 154643 - DNA, 1645 bp, Zea Mays
cgcgacagagggaaaaaaactcagaaacccaactcgctcgttcccgcaactcgcatcttctcgtcgacagctccaactccggaacccttgtcgccggcgccggcgatgtcgtcatctaccgcccccgccccggcggcggcgatggccgtggacgatgcggaggacgaccagctcgcctccatgtccacggaggacgacatccgggcctcccgcctcctcgacaacgagatccgcgtcctcaaggacgagttgcagcggacgaacctggagttggagtcgttcaaggagaagatcaaggaaaaccaggataaaattaagctcaacaaacagctaccctacctcgttggcaatttcgttgagatcttggaaatgaatcctgaggatgaagctaaggaggatggtgctaacattgatttagattcacaaaggaaaggaaaatgtgttgttctgaagacctccacaagacaagatccgaaggcagagaatcctaatgagatggttacagctggtgtgctttcaagccttcagaatttcctacgcaagtgcctcatagctagcctctcatatggcccaatgccgaagcacattgcatttattatggatggcaatcgtcgatatgctaaattcagaagcatgcaagaaggagctggtcacaggatgggtttctctacccttattgcaagtctgatgtactgctatgaaatgggtgtgaagtacatcactgtctacgcattcagcatcgacaattttaaaagggacccaagtgaggtggaatccttgatgcagttaatggaggaaaaaatcaacgaactcttagagaaccaaagtgtaatcaacaagattaagtgtaagatcaacttttggggtaacttggacttgttatatgagccggtgcggttggcggctgagaagctgatggcgagcacagctgggaacacagggctggttttttctatctgcatgccatacaactcgacttctgagattgtcaatgctgtcagtgaagtctgtgcggaaaggatggaaatgtttcagagcgaacatattggcgactgcaatggtcatgctgcaaataacggtgtgcgttcagagatttcagtggcagagttggatcgccacatgtatagtgccggatgcccagatcctgatatcgtcatccggacttcgggcgagactcgattgagcaatttcctcctttggcagacaacgtttagtcacttgcagaatccagatcctttgtggcccgagttctcctttaggcaccttgtttgggctatcttgcagtatcagagagtttaccctgctctggagcataacagaaagttggctaagaagcagttgtgattccatgttatttgcaaagaggtatcatgaagggctattaacatcaaacttttccttctcaatttcccggtaatgggaaatgcaaagaagaacatactagcatataacattatgaatagatcaccatgtaacttaagtgtgattgctaccgtaaccatgtaacttaaccatgtaacttatttgagctcgtacaaatgctgaccactgataatgtctgttggtcatattttgcatccagccaagtagaccactgaaaaccaacatgcacgtacataaatatatatacaaactagtcaagtgc

SEQ ID NO: 154644 - DNA, 1531 bp, Zea Mays
gcacaattatttatgacaatgtttattgacgagacaagtgaagcactaaccgattattcgcacatctcgtccttaaacacaaatcacatgtctcataatttatatcttcgacccactctatcctacaccacgatgaatacataaaatatatttagcaaagactaactcattagccgactatggaaattactaatcatgttttacgctttatttaatttaccacaactaacacactactttacgacgaagtgctttagcaaacaattaatacacccgcgaccgatccctacgacgtacaaaagaactatcgtagccacatatatatccgatctaacaacaaaataacacatcggctcaccatatcaaacctcagtcgtggttgctgcacatgtggcgcgaagacgaatgcgccgtcaatcgcgggagatcgaagcaaagtcgaaggagcacgacgggcaccgtggcgtggcaaggtggggcacccgccacgaaggggttgttgtggctgtcggttggcgtggcagagcccacgggtggctgacgacgcaccgcgacctgactcggcattgcgtcaaacaggtggcgcgcgcggcgtgctgctgctacttggcgctgcacaacaagggagcgagcgagcagcagcgaagccaaccaccatgcacgggaggggcttggccagagcaggggaaaaaaaatgaagctcggacatggctgcacttggggaggcggcatcgagtcccaaggcaatatcttgcacaagaaaataaatcagggagggtaggcgctgctcgaccatagggaagaagaggagccggctgggtggaaagacggacagggcgttgtagggatatgggagcggctgctctctgctcttggggaagaagggcgacgctggctgggagagggggttcggccatgccaagaacagagaaagaggagggagatgtgctgctgtttggcgccggcaagggaagctacagggcgtcggcggccatggaggagcagggcgcggtcagtgaaagtagagctgctgcctggcgccatgtacagcagagagagggaggaagggcgagcagcagcaggggagggagagcacgagcgccatggggcgagctcacctgcaggactgatcgagatctctgccaacgatggaagaacaggtcaccaacgcagccatggcagagatggcagaggccgaacagaggtgggggagctcaaagcctgatggaggccgagcgctatggagaattggggcgctacacaggggagggccgagcaggaaacagaagatgaagcaagggagctcgaccatcaaggatgttgggcggccatggagaaggcgtggccctggagcttcggtgtccgaggagccagggagatggagtcgctcctgctccatgcgcctgtgaatggagaggagggagactgcagggaacccggacgccatgggattctacccttgctgctggaggtgccgagctccatgggagaagaaggctccctgcttgcttcgtggggaagaaaaagtggc

SEQ ID NO: 154645 - DNA, 4347 bp, Zea Mays
atgcccagggtccctctttctgcaggccgaccaacggctaggcggcgctccgcccacaacccgagctgcttcaccctggccccgcgagcgactccgcccacacgcttccgcgcagctcgccgggtgcggcagcatgatcgcgcacccaagcttgacccgacgtccggggagctgttcgcgctcagctacgacatgatcaagcgtccctacctgaggtacttctacctgcggcccgacggcggcaagtcgggcggcgtggagatcccgctggagcagcccaccatggtgcacgacttcgccgtcacggagcggttcgtggtggtgcccgaccgccagggtaatttgcagcatgagtacagtggaaatgactgtctccaacttaaaggacatcagacatatactgaagtatcttctctccttgagcacttgaagctttgcatgttcttctcaaagaaatcttttttagcatttctgaagtttggtgggtacaaacaagaagacattcttattcacaaggctaaggcgaggctcatgcagtcttctttcgcattggtgtgtgacaaaagaaccaagtgcttgctgcttttcattcggggtgctatcagcactaaagagcgcctgactgcagcaacttctgctgaagttccttttcaccatataattctatctgaaggaaagatcagcaatgtagttttaggtaagttgcagtccgaggttctcaaggatgccatctcccagatagttcaggatgccaataagaataggaagttcactgagactgttgagcttcagattagtctgaagaattatgaagagggctgtggcgatgacgagggctgtggcgatggagatgccagcggcaagcgcttgaccaaggagatttacgctcgtctgtgccgatccaccctctttgatgccggcagaaaggaattctggattatgaagaacaagggagccctttgcataagtatatcatcaaaggcaatgactattaccaggatagatgatcggaggtactggagccacctcgccacaggggaatcaagacaggtggcggagattgcctcggagcccgaccgcgccgccgcgtacgcacggttgcttctcctacagcgcggctgcgccgacgacgcctcctccgccgccgagctcgccgcggaattaccttccaccctcctcccgctcctcctccgcgacgcggccgccgatgacgaggccgtcgccgcttctgcgctcaagtgcctcggcttcgcgctctaccaccccgtcctcgtttctactatttcagcacagatgacccaattggtattggataccttggtacatataatcatgagcactcggatgaagtctgcttgcaatttgggtgtctggtgcttctcggttcaacaactgaacccattgattatagaggatagagcagatccaatgcttattgctattgttcatgcgctcgacaatccatttggttccttgtccacaacatttgaggcagctcaggctatcatgaagcttggtggtcaaagtcccaaaagaatgagggacctatcaagcttgtgggttccaccagtataccggagactcttaagtgctgacaaggcagaaagggacatggtagaaaggtgccttattaaggtgtcatgtgttattctaccacctcaacctctcctttccaaggctgttgcttcagaccttgagcagaagctactctcctgtatggtaaatatgcttgatgatccttccaagaaagttcaaactgtgaagtcatggggatggattgtatctttgcttggtccagatgcagtgaacaatagacctctgcttaataaacttataaaggttcctgagcagatgtttactgatctgaatccacaagttcaggttgctacaatggtttcctggaaaagtttggtggatgcattttttccttctcaggcaactgagattgtggcccagcaaactgtgatttccccattaaaacccattgaacaggcaagtgcacaggtgaaaaggataagattaattatggtgcctatatgtcgagttctgtcaagaagtcgcaatattgtacttagctcttcttgtttgagtacatggcattaccttctacatagacttggtaatctgatcaattatttacccattctggaggctgcttttggaccaatactcaaaataattttctcttttgggatcaatgatcagaacaagccactgtggtcattttgcttgaacctttttcttgattttgtttcatcaaaaaatagggtcagagaggatttatgtgccccagtgaatcagaacttgctagctcaatcatgcaagcatatcaaggccttattggatattcaacacatcaaatggttaccatgggatattagttgctttaatttccaactcaatattcttggcataattcttaagccagaactattccaggacataattcctgaaacaatggtgattgttatggattctgcaacagagattttcagatttcttctaaaaggtattcaaatcgaacttagagagcagcgtgcttatgaacaagtcaatgaatgcattactaacgcgtgcaagtttgcaaagaggttgttgctggatcatgtaggaaagaatagtgttatcaagtgtgctgcattactggaatttggtcttcggtttatgaaagttattgcgaaggaactagatcattctttgttagcttctgaaaacattgaggtatgcttagacatcgaacacataaaggagaaccaacatgcagaatgcagcccaaagctgtccttaccaagaatcagatcactctcttacatggagatggtttctccagcagtttatgtgactgcactgtctctgtccatgatatctcagtatactggagagttttctcatagagatgcagatgaattagtttcaattctggatccatcatcagatgccctggagaattttcatactgctgtctcttttatgtatatgcagatcaggcggccaacatgtaacaaggaaagattaaaatggttgatggtttggaactcgtttgcaaaaaaaatgaacagtcaaattatctcttatttggaaaccaattctggattatgttaccatgatgttctccatcagttcttctgttatccaatccttaattttttataccccaaggggatatccattcttttgaatgctgaaaatagctccgagtcaaaattttctgtcctgcaaaacctggagatggaatcaacaattgaagtttatagatccctctctacaaactcctgtaattcgaagtttttttccaaggttttctttgatggtttttacaaatacttggtttgcactattgatgaaaacatggcattgttccaagccaaccttgagcatttgtcggaggagtttgaaaatgctagtgtcctttctgctcttggtgaaatagtcattggactgttacagaatgatcaaatgttgacctatgctaatcaagagttgaaggaaacacctgaagattcttctgtgtgcagacaaccggaacttttcttgaattgcttcaagcttgctaataggtttatgaagttgtcaagttttcatttcaaagcaaatccagctggacagcaccaggtcacaagcaggtttttttcatctttatctaattttgctgggcatctcactttaaaggaagatgttcttcttttcgagattattggagaccaacttaccgagtggctctctttaagcatcatattgtactctgaaatgcaacaaggacaaattgttgttcatcttgagaacctttggctcaagatggttgagtgcctgaagaggagtcagctagttagtgatgttcccttaataaatcagaagcatcgacttcttcaagctgcactcaatcgcccacatcgccccatttcagttgcaacagcatcagtttgcagagtagcaacacatggcaacacaaccctgcaccctggttgcttaatttctgaatttgctgagttattaatgcatagaagaaaggctcttgatagctccaggaaaacagtcatcacatccaatcctactgatctcacggccgagaggtatgatggatctgtgaatgtctcggtgggtttggggaggaagaggctgaagatcatgaagtattcaactaaaccaaaggaactcaacaaaaatagagccaacatgggcatctcaccaggtaatacggaaaatagggcgtgtaggaaaccagaattaatattggagatgctacagaggaagacatagttgtttgaactcaatgttaggtttaaagaacataaatgtgtacatacgtatagaaagcggaaggtcagtgcaatgatcccctgcaaaaga

SEQ ID NO: 154646 - DNA, 1233 bp, Zea Mays
ctcacgcgtattaagccatccccctcaccacctagggtttccttttacagccgccgccgacgccgccgccgacaccgacgcatctctcagcctccccgcactcgcttccgtcgccgcagccgccacttcgcagccatgggtaaggtgcacggatcgctggcccgcgccgggaaggtccgcgggcagacgcccaaggtggcgaagcaggacaagaagaagaagccccgcggccgcgcgtacaagaggatgcagtacaaccgccgcttcgtcaccgccgtcgtcggcttcggcaagaagcgcgggcccaactcgtccgagaagtaggcgcgacgccgttgggctcgcatgcctatgcctatgctcttgctcttcctggtagtagttttcgttgtgcaagcagaagaagatctttttttgttgttgttccagtctcagtttcgtgcggtgagatgagagcttgagattatatgtcaacctccttattaatcgaggatgaatttttgagatatgatgatacgtggcaatgacttcttgcccctttttgcattctttgtgaaatgttatgcaaataggtgggttaaatcattcgtcgattggctacatgacattgactagatttgcctaatttgtttgtttggttcggcgttcctcgcttgattaaggaacctgctgttttttcactcgttattgctggcattatggtccagttataaatttgaatggttagcccactttgaaaccagcttgctgataagatctgtactaggttcgggtagtttgtgggagcggagccgagcctgctatttgattgaaggtgcttgttctatccttgttttgacactgtagaatgataatttgcggtgtgaacgataattggaaatgtaagccttgtgtaaagtgaggttcaagctttgctcaatcccgattctcgaagacgatttgagtctccaaacgatctgtattccattcccctgcctccaatcgtaccttggtttgtaacctggtagggttccattttcttgcgagtctcccatgtttgttagtgcagcattgcgaacagcggctgttgtgtttttgcaaccgagtatgtgattttgaattgaggaacctgtacattttttatatttcaattttttgacagcaaatctgtttcggaaagctgaactaaacacacgaaacaccagttttcctgatttccacaatcctctcttttgcaaaaaaaaaaaaaaaaaa

SEQ ID NO: 154647 - DNA, 2140 bp, Zea Mays
cgtcgctatcgaccccatcgcgttgccggatcgagctcagctctatctcgaaccttggttcgccgcacggcaccagaagcacggccgtgttctcatcccctccacacgtttccgcctcccgatccacgtccgccgttagccgcggccgacacagctcctcctcctcctcgcagctcttctccagctctcggaggcccgaggtttcatcgacccgcgctccttcatcctcgacacctcactccggcggcgcgggtccgcagtgctgcacatcgcgagccgcgcggcacagccgcacttgttgtccttcgtgcgtggggtgcggttcgacgcggcggcgggatggcggcgagcgcgcgggacagcgccgatgcagcggagcgagttgtggatgaccacgacggctgggcgtcggacgccgagatggacgtggagatggatgtggtggaaggcgatgccgaccggagggacggcggcgcggatggtgatgatgaatacttgctgctcactaggataagggacacgtcagcagctgaagcaagggcaggaaaggatatacaaggtataccatgggagaggatacacatagccaggcaagattaccgaaaagctaggttggaacagtataagaactatgaaaatttccctcaatcaggagagctcatggataagttgtgcaagcaagtggagaagagcagcaagtattatgaatttcagcacaacactagatcagtgaagccatcaattctccattttcagcttaggaatttgttatgggcaacatcgaagcatgatgtctattttatgtcaaattccacagtaagccactggtcatcattgtctcacaaattatcagaggttcttgacttctctgggcatgttgctccagcggagaagtatcctggcagtttactagaaggtttctctggtgttcaagttagcacacttgctgtgaatgagggtttggtggtagctggcggttttcaaggagaactaattggcaaagatgtggaaggctgtagtgtaaaattctgtatgaggacaactttgagtgacaatgccataacaaatgccatagatatacacagatcgataagtggaagcctgcacattacagtatctaacaacgattgtggtgttcgtgaatatgatatggagagatatcagctcgtgaaccactaccgatataactggccggttaatcacacatccgtgagcccagataagaaacttttggctgtggttggagatgatcgagatgctcttcttgtggattcacgaaatggaaaggtaacctctaccctagttggccatctggactactcatttgctacggcatggcacccggacagccggacattcgcgaccgggaaccaggacaaaacctgccgcatctgggacacccgcaacttgtcgacctcacttgcagtactgcggggcaacatcggcgcgatccggtgcatccgctactcctccgacgggcggttcctggtgttctcggagcctgccgacttcgtccatgtgtacagtgtggctgcggactacaagaaacggcaggagatcgacttctttggtgaggtgtccgggatcacgctcagcccggacgacgagtccctgttcatcggagtgtgcgaccgcgtctatgccagcctgttgcagtacaggatgatccgcggattcgactatcttgactcatacgtgtgaagaactgagctttggtgaccggtgttgtgctaggtgctggctgaaggttctgatgcgcggttcagggaatatatctgcctgctcttagttcatggcgaatgatggttcggtgggactcgacgccagcgaatctgccgtgtaaatagtttagaatttgaagcgtagtgtagtgctgtggaccaatgctgtctctgaacatacatatgatcagagtaatgtgtgtttgcgctgttagtttcagactccggaatacaaatagttttggaccaaattcctaaagcctgtttgtactgtggaacacatgaaagggctagtttgtattcacttcgatatatgtgttgttattattgagttccctggacagtgtttcaaatttaaacatcgtatttttagatgcataataaaaacatgtatgcagatataacatgtatatttgtta

SEQ ID NO: 154648 - DNA, 993 bp, Zea Mays
ccgtcgctatcgaccccatcgcgttgccggatcgagctcagctctatctcgaaccttggttcgccgcacggcaccagaagcacggccgtgttctcatcccctccacacgtttccgcctcccgatccacgtccgccgttagccgcggccgacacagctcctcctcctcctcgcagctcttctccagctctcggaggcccgaggtttcatcgacccgcgctccttcatcctcgacacctcactccggcggcgcgggtccgcagtgctgcacatcgcgagccgcgcggcacagccgcacttgttgtccttcgtgcgtggggtgcggttcgacgcggcggcgggatggcggcgagcgcgcgggacagcgccgatgcagcggagcgagttgtggatgaccacgacggctgggcgtcggacgccgagatggacgtggagatggatgtggtggaaggcgatgccgaccggagggacggcggcgcggatggtgatgatgaatacttgctgctcactaggataagggacacgtcagcagctgaagcaagggcaggaaaggatatacaaggtataccatcggagtgtgcgaccgcgtctatgccagcctgttgcagtacaggatgatccgcggattcgactatcttgactcatacgtgtgaagaactgagctttggtgaccggtgttgtgctaggtgctggctgaaggttctgatgcgcggttcagggaatatatctgcctgctcttagttcatggcgaatgatggttcggtgggactcgacgccagcgaatctgccgtgtaaatagtttagaatttgaagcgtagtgtagtgctgtggaccaatgctgtctctgaacatacatatgatcagagtaatgtgtgtttgcgctgttagtttcagactccggaatacaaatagttttggaccaaattcctaaagcctgtttgtactgtggaacacatgaaagggctagtttgtattcacttcgatatatgtgttgt

SEQ ID NO: 154649 - DNA, 1179 bp, Zea Mays
gcagcacgcatagagcagagagagacacgaggagtacagtacaatcccacaaatacagattctgctctctgctcatggcaacagcaaggacgctccataggcagctgcgccgccgtgtcgcggcagctctgctggtggtggcgacgacgtgcatcgctctgccagccatagcacccgctcccgtcgccgcagcggcgccaaccctcgccaccacgtccgcgaccgccgccaccgacgccgtcggccaagccgccgcgaccctcggcgcctccgcgcctgctactacacctcctcctcctcctgccgcaggcgacgacgatgcattcttcagcaccttccgcgacctgtgcctcaaccgttcatccgcgaacgacatcagcaagtgcctcccggcgatcgccgccgcctgcaaagcgttcaacgccaagatcgatgccggcctcggcgacgcgacgagcggcagcatcgatctcatatccgtcgcgcgtgacgcgctggcctcgggcgacccggcatcccaggcccgcgccaccgcgtgcgccgtggcgaccgtcgactcgagcggcggcaggcggaactgccaccgcgtagacctccgcaagaaagtagcgctgccggataaactgcgcagcaggctggtggctcaagcgcccaagcgcctcgtcaggatgtgcgggcagatcctgtacgagataccggcgtgccgattcactgagctccgcgcagataaatgcttgggtctctttcggcaggggaagagcacgttcgagaccagccgtgacttcaaggagacggttagcgttagtgtgctacgggatcctaaatcctatactgagacagtgactcggacggtgccggtgcatgtggactgctgcagcctaagcgacaggtgcctctgccagttgaagaagaagctgggcaacaacaccaccatcccgtgccttgcgaagaaggagctacaagcttgcaactgacgaagcgtgcgtgcttctcgggtcgcatcgcacgtgtgcgtcgtactagtacccactctatatgttccctttgcgattggttggtgaatgcattcctttctacagtgctagtatacatgcatggaaacgtggattcagtttgtatgggaaataaaagtctgtaccgcaattgctctagcgtcctctttttttagtcgttcatttt

SEQ ID NO: 154650 - DNA, 366 bp, Zea Mays
atggcggctagccttctcttcctggcgacagagcttctcttcctggcggcagagcttctcttctccctgccacgatcccccatccgaggtagccagggtcgcattcggcgcgcgcacgcgaacccacacagccatcccccgcggaagacggctcctggacacagttcacgccacgctcgaactcactctcctttgcacgatcgtgggtggctcactgtgaagggagggacagacggcaaccccggcgtcctgccttatagccccgaggcaggccagatccaggagtccgagtccgcggtggagcacgtgctttggagcagcgacagggagcgcccgccatggatctcggtgtccggcccgtgctaa

SEQ ID NO: 154651 - DNA, 874 bp, Zea Mays
atttttctcctaattgccgttgaggcataccgcatacgtttctcccccattcctctccccactccgaaccctagccaccgtgctcacttcccaggtcgaacccgccgcggcgcgagtccacggcagtgcaggacctgatcctgcggtctaggccgcggcggtgagatggtgatggtgtcaggcggcggggggaacgcgtgggcgaaggagatgaccctccgccgcaggatagccagcatattcaacaagacgcaggaacacttccctactctgaaagactacaacgattatctggaagaagttgaggatatgactttcaacctgatcgaagggatagatgtcgaggagattgaagcaaaaattgcaagataccaacaggaaaatgcggagcagatatacttgtccagagctaaaagggcggaagatcttgcggcagcacttaaagcaagcaggatgaaccctgtaaaggccgaagcaaatgatacggagttcagggccagtatgcacctgccgctgttcttgggggagtggctcagcctcgccccacaggtatggcgccccaactaatcggcagtgggtcggatcctctgcaaggagacgacgaggagaccaggagactacgcgcagagcgagcagcacgggctggcggatggactgctgaattgagcaagagaagagcgctggaggaggcgtttagcgccatattcatctaggattagatcaaaaagcaacacatggcctggaggaaagccagcatacttaaaatggctgtcaaactacaaagcgttggatgatctgtgtcgtgattatctttgggacatggaattctcacaaattgtggtgaagcaccctttgtgtgcctttggttgcaaaa

SEQ ID NO: 154652 - DNA, 911 bp, Zea Mays
atttttctcctaattgccgttgaggcataccgcatacgtttctcccccattcctctccccactccgaaccctagccaccgtgctcacttcccaggtcgaacccgccgcggcgcgagtccacggcagtgcaggacctgatcctgcggtctaggccgcggcggtgagatggtgatggtgtcaggcggcggggggaacgcgtgggcgaaggagatgaccctccgccgcaggatagccagcatattcaacaagacgcaggaacacttccctactctgaaagactacaacgattatctggaagaagttgaggatatgactttcaacctgatcgaagggatagatgtcgaggagattgaagcaaaaattgcaagataccaacaggaaaatgcggagcagatatacttgtccagagctaaaagggcggaagatcttgcggcagcacttaaagcaagcaggatgaaccctgtaaaggccgaagcaaatgatacggctgctgggagttctcagggtattagtggcggggcaggagttcagggccagtatgcacctgccgctgttcttgggggagtggctcagcctcgccccacaggtatggcgccccaactaatcggcagtgggtcggatcctctgcaaggagacgacgaggagaccaggagactacgcgcagagcgagcagcacgggctggcggatggactgctgaattgagcaagagaagagcgctggaggaggcgtttagcgccatattcatctaggattagatcaaaaagcaacacatggcctggaggaaagccagcatacttaaaatggctgtcaaactacaaagcgttggatgatctgtgtcgtgattatctttgggacatggaattctcacaaattgtggtgaagcaccctttgtgtgcctttggttgcaaaa

SEQ ID NO: 154653 - DNA, 1628 bp, Zea Mays
gtggcgagaccatttcggcggttgaggcgacacggcagaagtgagcaaagcgttcaggtgcggagccgcggagggatgggcggcaggagggaggccatagagcgggagctgaagaagcttcgggcagagcgggaggagctcgacggccggatacggctgctggaatcgcagctcgaggcagggcctgcgggattcaacggtgcggcggcggggaaaggagtaggggacgatgcgtgcggcgggagtggagcgtgccagagccgcgtgggtaacgagtttgctccggacggtagcctcccggcggatatgatctaccggtacagccgccacctccttctcccggacttcggggtcgaaggccagcggaagctgtcacagtcgtcgattttagttgttggggctggaggtttgggctctcccctggcattgtatctagcagcttgtggtgtcggtcgcttgggcattgtggatggtgatgatgttgaattgaataatcttcatcgacagataattcataaagaagcatatgttggacaatctaaagtgaagtcagcagctgatgcttgccgggagattaattcctctatcaaagtagtagagtatcaccatactctgaagccatgcaatgctttggaggttgcacggaaatatgatatagttgttgatgcaactgacaaccttcctactaggtatatgatcagcgattgctgtgttttgctgaacaagccacttgtatctggtgcggcattaggcttagaagggcagttgactgtttatcatcataatggaagcccatgctatcggtgcctctttccaactccaccacctgtggcagcctgccagagatgctcagacagtggtgtccttggggttgttccgggagtgattggttgcttacaagctctggaggctataaaggttgcaactggtgttggtgagcccctatgcggaagaatgctactatttgatgcactctctgctcgtattagagttgttaaacttcgtggaagctctccagattgcacccattgtggcgaaaactccgttttcacagaagaagactttcagaagtttgactatgagagcttcacacagtcaccaatgtctgataaggcagcaccaagcgtgaacgtactcccagagagcgcgcggatcacttgcagagagtacaagaaactggccgacgatggtgaacctcatctactgttggacgtacggcctgcgcatcacttccagatagcttcgatctctccgtcccacaacatcccgctctccatgctggaagagaagctgcccgcgctcgaagcctcgctgaaggaagcaggagaggggtcagccttggttgtcctgtgtaggagaggtaatgactctcagagagccgtccagcttctccgcgagaagggattcgcctccgcgaaggatatcatcggtgggctgcaggcatggggacgagacgtcgatcctgatttccctgtgtactagcgagatggaaatagatgcactacaccttgtaacagtttgaatgccgccagagattctggtggtgttgcaagaacgagaactctggtactatgatttgggtactaattttgccataccgtgtacttgcaaatatatatatatatata

SEQ ID NO: 154654 - DNA, 865 bp, Zea Mays
gtggcgagaccatttcggcggttgaggcgacacggcagaagtgagcaaagcgttcaggtgcggagccgcggagggatgggcggcaggagggaggccatagagcgggagctgaagaagcttcgggcagagcgggaggagctcgacggccggatacggctgctggaatcgcagctcgaggcagggcctgcgggattcaacggtgcggcggcggggaaaggagtaggggacgatgcgtgcggcgggagtggagcgtgccagagccgcgtgggtaacgagtttgctccggacggtagcctcccggcggatatgatctaccggtacagccgccacctccttctcccggacttcggggtcgaaggccagcggaagctgtcacagtcgtcgattttagttgttggggctggaggtttgggctctcccctggcattgtatctagcagcttgtggtgtcggtcgcttgggcattgtggatggtgatgatgttgaattgaataatcttcatcgacagataattcataaagaagcatatgttggacaatctaaagtgaagtcagcagctgatgcttgccgggagtaagaaactatccttttggcagttttctctgattgattgccaaccaaatatatttgattcactatcccactatatcacatatgttgtctcaagtcaggattaattcctctatcaaagtagtagagtatcaccatactctgaagccatgcaatgctttggaggttgcacggaagtatccttacaatatatgctatgacagacacaatattgtttcctcaaagccaacactcttgttttcagcattaactaaaataccctcagatatgatatagttgttgatgcaactgacaac

SEQ ID NO: 154655 - DNA, 900 bp, Zea Mays
atgggaccgtgtaccgaggcgcgctcaaggacggcactgtggtggcgatcaagcggtgcgtatcgacgacgacggacgagcggcgcaggccggaaggagttcggcagggagatgctcatcctgtcccaggtcaaccacaagaacatcgtcaagctcctggggtgctgcctcgaggtggaggtgcccatgctggtctacgagttcgttcccaacggcacgctgttccatttcatccacggtggccgctgcgacgccccgctctccactcggctgaagatcgcccaccagtccgcgctggcgttggactacctgcactcgtgcgcgtcgccgccgatcctccacggcgacgtcaagtcctccaacatactcctcgacgaccggtacgccgcgaaggtgtcggacttcggggcctcggtggtggcgccggccgacgaagcccagttcgtgactctggtgcaggggacctgcggctacctggaccccgagtacatgcagacgacggcgctcaacctcgacgggcccgagagcgagaggagcctctccgtgagcttcctgtgcgcgctcaaggaggggaggctcatggacgtggtagacgaccgcgtcaagggcgaggacaacgtcgttggggtgctggaggaagtcgcggacctcgcgaggcagtgcctggagatggctggagagaaccggccggcgatgagggacgccgctgagaggctcggcaggctgagtaaattagtgagccggcacccgtgggtgcagcgggaccccgacgagatggagatggagagcttgttgctcgctgccagagagccgtcggtggccggcgtggagacggtgagcactgcgtttttgaccatggagaggagcgttggccgcggcctgctggagtttggtcgttag

SEQ ID NO: 154656 - DNA, 1716 bp, Zea Mays
aaagccgaatccgaagccaagagccgtatcgacatggaactctccctgacctcatctgctgctctgcagttcgtcctgctcctccccctgttctctgtgctctgcatactctacctgcgccaggatcccaagaagcagcctcgcgctcatggcctcaaggtctacccgctcgtcggtaccctcccgcacttcgtcaagaaccagcgccgcttcctccactggtccaccgacgtcctcaagcgcgacccctcgcacaccctgtcgttcaaggcgctcggcctcaccggcggcgtcatcacggctaacccggccaacgtcgagcacatcctcaagaccaacttcgccaactaccccaagggcgagctgacggtgtctatgatcgaggacttcctcgggcacggcatcttcaactccgacggggagcagtggctgtggcagcgcaaggccgccagctacgagttcagcaagcgctcgctcaggagcttcgtggtcgacgccgtccggttcgaggtcgtggagcggctgctgccgctgctcgaccgggcgcagcgcgacgggcggacgctggacgtgcaggacgtgctggagcgcttcgcgctcgacaacatctgccgcgtggcgttcggtgacgacccggcgtgcctcgccgaggaggagggcatgggcatggcgatggcggcgcagcagaggcagagcgccgagttcatgcgcgccttcaacgacgcgcagagcgccatcatggcccggttcatgtcgcccgtgaagtcgctgtggcgcctcaagaggctgctgaacgtggagcccgagcggcggatgcgcgaggcggtccgcaccgtccacggctacgccgacaggatcatccgcgagcgccgggcgaggggcgaggcggccgggcccgcgcgcgacgacgacttcctgtcgcgcttcgccgcgagcggcgagcacagcgacgagagcctccgggacgtggtcaccaacttcctcctcgccgggcgggacacgacgtcgtcggcgctgacgtggttcttctggctggtctccacgcggcccgacgtggaggagaagatcgtgcgcgaggtccgcgcggtgcggcgtctgggaagcgcgggcgcggcggcgccggcgttcagcttcgacgagctgcgggacatgcagtacctccacgcggccatcaccgagtccatgcggctgtacccgccggtggccatggacacgcacagctgcaaggaggacgacttcctccccgacggcacgttcgtcggcaaagggtggctgacgacctactccgcgttcgtgatgggccgcgtagaggacatatggggcgcggactgcgaggagttcaggccggagcggtgggtcggcgaggacggcgcgttccgcccggagagcccgttcaagtacccagtcttccacgccgggccacggatgtgcctcggcaaggagatggcgtacatccagatgaagtccattgctgcatgcgtgctcgagaggttcagcttccagttcgtcggcggcggggagcggccggggctcgtgctctcgctcacgctgcggatgcagggcggtctgcccatgaaagtggtcaccaggacgaactcggctctaggctagactttccacaccagacagtatccatctcaatacacatacgattggacggtttagggagattggggtgtaatttcacttagttttcgagctgatccatgtcaaccc

SEQ ID NO: 154657 - DNA, 1388 bp, Zea Mays
cgttgtcaacaagatagaatattatattccatttcgtataacgttttcatatatcatctgcagatcaagaagtgaagaccgaagaacttcgacgacagagcagagaaagggctagcacttgattaacatggtacatcgactgattaagcaagctacacgcttagcatcggagttggaaaagttcccgagtcctgacgagaagcaacgcattacgtacgcatactcgcgagagcaagaactagagaaatcacggagcaaatggtagacatgctactactagctagcgctagcttgcacaggatgccatcacatcatgcatgcatggcggcgcgtatagaagtgttggctggtggtggtgttcatcagtcgtagagcggcgggcactggaagcccgacggcgcgtgcttgccgcaggtgatgagcaggttgagcgcgatggggaggtagatgttgatgttgagcaggcgcgcgcggatggtggtgcagaggcacagcgccgcgtccaggtccgccaccccctgcaccagcgggcagcacttggacctggcctcctgcccgatcaccaggtggatcagcccgctcagcacgtccacgcacgcgttcagcttcagcgtgtcgatcgggcacgtccgcaccgccggcggcgtcggcggaacgtacggtggcacgtagggtggtgatggccgaggcgtcggggggacgtagggtggcacgtacggtggtggtgatggccgaggcgtcggtgggacgtagggcggcgtcggtggaacgtagggcggagtcggcggccgtggcgtcgggggtacgtacggcggtgacggccgaggcgtcggcgggacggggacgtatggtggcacgtagggcggtgagggccgaggcgtcggggggacggggacgtatggtggcacgtacggcggtgagggccgaggcgtcggcgggacggggacgtatggtggcacgtagggcggtgacggccgaggcgtcggcgggacatacggtggcacgtacggcggtgacggccgaggcgtcggaggcacgtacggagggttgcacggcgggcacttgggcggcttgccatggtggtgcttgggcggcttgctgtggccgccgccggagccggagccgggtgaaggccacgtcggcgagccactgccgggcgcgcccggtgcacagttgctgctctgccacgccagcgagccggggagcaggaggaggccggcggcggcggcgaggagcaggaggacgggaactgaggtggaggttgccattgcgccttggctcaacgcagcggcgcgcgacgggctgttctgtgcacactgcagcgcacgcgtctccttttatagaggaggagcgtcacgtacggtccctccgcactctgactctctggt

SEQ ID NO: 154658 - DNA, 492 bp, Zea Mays
gacgagcagggcagcgctgctgcagggaggggaccgggcgcgggcggaccgtcggttggcgtggggcagcggcacaaacggccagagcgacacgatgggagcggcggctccgggagaggcgctggacggggatccgccggtcgctcgccttcttcctcaacccgccgctggactgcgtcgcctgcccgccgggcgcgctcctccaggagaacaagcaggtcggcggcccgcgcgcgttcggaggaagacgagcgcccgaggaagacgacgagcagggccaggggacgacaggccggtcgacggacggagcgctgcgcagcgcaccaaagcagccgccacccgccaggcaagaggccacagccaagcagggtctgggcgcggccccggcagccctggcggcgctcggcagtgggggaggagagagccggcggctgggagggagagacgccgtcggttgggggccggcagctgggagaggagggtgggaaaaac

SEQ ID NO: 154659 - DNA, 98 bp, Zea Mays
ggtgccaaatggcggaggaggtggtggtagtagcaagagcaggagatgaggctactctggtgtggggagtggagggcaagtgaagagaatagaggggg

SEQ ID NO: 154660 - DNA, 412 bp, Zea Mays
gtggccgcggcggtggtagacgagcgtggggttggcgaagcgagtcggggtcgacggggccgctcgtggcgcaggcggggtcgacggggccgcgcgtggcacaggcgtggtcgacggggtcgagcgaggcgcaggcggggtcgacggggccgcgcgtggcgcaggcaggatcaacggggccgcgcatgacgcaggcatgatcgacgtggccgcgtgtggcgcaagcggggtcgacggcgccgcgcgtggcgcaagcggggtcgatggcgccgcgcgtggcgtggagatgggcgcgagctgtggcgtcgtggctgcacgaggagcaggtaacggcgcaatacggggcgccagggttgggggggaaccgggtcggactcgaggagagagtcaagatcggtgggtggggtggagc

SEQ ID NO: 154661 - DNA, 1407 bp, Zea Mays
catatgaatagaaaagaacccctttgcgcaaggcaaacccccacccagctcacctcggcgatggcatcggcggcggccgtggagtgggaggcggcggcgcggaaggtgctggtggcgcgcaagccctgcttcgggctacctacggcctgcccaacctgcctccccgtgctcctctacctccgcatggcgcaggttcccttcgacatccacgtcgacacctccttccccgatgccgatcacataccatatgttgaatttggggattgcgtggctttcaacaacgagaaaggaggcgtaattgagtatctcaaggatgagaaaattgctgacttgaactcaaatcacccaaatatttcatccaccactgtgctagatacaaaggccatggtttcgtcctggcttgctaatgctttgctgtatgaactctgggtggttagtgctggaagcattgcaaatgatatctacttctctgatctcccttggcccattggaaagatactccattggaataaaactagacatgtgaagcagctacttggtataacaaagctcaatgctgcagaaaaagaagaggagatatacctgaaggcaagtgctgcttatgactcattgtctttcagattaggggatcaagtctttctatttgataatagccctacagatgttgatgctcttttccttggacatgctctttttgtcctcagtgcgttgcctgatacatctgtgctgaggggcacattgcagaagcatgacaacttggttagctttgctgagcatcacaaggtccagttgctggaaacctcatcatcgtcatcgtcagggttaggatcatcacctagcccgtcatcatccacccccaggagaagaccatctgctgaccacagttataagccaaaacccagagccaagaaggaacggacggaggaggaaaagaaattcaggcgaagagcaaagtatttcctggccacacaactcgttgcagttcttgtgttcctttcgctgatgggtggggttgatagttccgagctagacgacgaagatggcttggattatgatgattagatcctccctgtgctgttacacttgattagttccaacgacaaactgcctggttggttcggggtgctgtgagaatttgttccaacattggaaaatgtgttacgcttgattttagctaggaattcactgagttggtcacccatcggcagtttcataagctacttcggctgtaaacatacttgtctccgaagtttttttttttttgggcttcagtgaaccaaacttgtaagcaaattcgaattttggagttttggttttggagacgcgctgcttctgtatgatgagatctgttggccgcaacatatttgggaggaaaaaaaataaggggctaaaatcccctgcttattt

SEQ ID NO: 154662 - DNA, 1356 bp, Zea Mays
catatgaatagaaaagaacccctttgcgcaaggcaaacccccacccagctcacctcggcgatggcatcggcggcggccgtggagtgggaggcggcggcgcggaaggtgctggtggcgcgcaagccctgcttcgggctacctacggcctgcccaacctgcctccccgtgctcctctacctccgcatggcgcaggttcccttcgacatccacgtcgacacctccttccccgatgccgatcacataccatatgttgaatttggggattgcgtggctttcaacaacgagaaaggaggcgtaattgagtatctcaaggatgagaaaattgctgacttgaactcaaatcacccaaatatttcatccaccactgtgctagatacaaaggccatggtttcgtcctggcttgctaatgctttgctgtatgaactctgggtggttagtgctggaagcattgcaaatgatatctacttctctgatctcccttggcccattggaaagatactccattggaataaaactagacatgtgaagcagctacttggtataacaaagctcaatgctgcagaaaaagaagaggagatatacctgaaggcaagtgctgcttatgactcattgtctttcagattaggggatcaagtctttctatttgataatagtgcgttgcctgatacatctgtgctgaggggcacattgcagaagcatgacaacttggttagctttgctgagcatcacaaggtccagttgctggaaacctcatcatcgtcatcgtcagggttaggatcatcacctagcccgtcatcatccacccccaggagaagaccatctgctgaccacagttataagccaaaacccagagccaagaaggaacggacggaggaggaaaagaaattcaggcgaagagcaaagtatttcctggccacacaactcgttgcagttcttgtgttcctttcgctgatgggtggggttgatagttccgagctagacgacgaagatggcttggattatgatgattagatcctccctgtgctgttacacttgattagttccaacgacaaactgcctggttggttcggggtgctgtgagaatttgttccaacattggaaaatgtgttacgcttgattttagctaggaattcactgagttggtcacccatcggcagtttcataagctacttcggctgtaaacatacttgtctccgaagtttttttttttttgggcttcagtgaaccaaacttgtaagcaaattcgaattttggagttttggttttggagacgcgctgcttctgtatgatgagatctgttggccgcaacatatttgggaggaaaaaaaataaggggctaaaatcccctgcttattt

SEQ ID NO: 154663 - DNA, 3083 bp, Zea Mays
aaacaaatccgaagcacaaagcaggggcctcttcgcaaatcccaccaccaccatcaccgcctcccagatccgcctggccgtcctcctcgtccgccactgcggcggtgatccctcgccgccccgcccttgataccgtcgagaggatcgtcgaggacttcgccatggacctcgccatcaatcccttctcctccggtacccgcctccgggacatgatacgtgcgatacgcgcgtgcaagacggcagcagaggagcgcgccgtggtgcggcgggagtgcgcggcgatacgggccgctatcagcgagggcgaccaggactaccggcatcggaacatggccaagctcatgttcatccacatgctcggctaccccacacacttcggccagatggagtgcctcaaacttattgctgccgcaggcttccccgagaagcgcatcggctatctaggactcatgctgctgctcgacgagcggcaggaggtcctcatgctcgtcaccaactctctcaagcaagatcttaaccactcaaaccagttcattgttggtcttgcactctgtgcccttggcaatatatgttctgctgaaatggcgcgtgatcttgctcctgaagtggagcggctgttacaaaatagggaccctaatacaaagaagaaggccgctttatgctctgtgaggattgtacgaaaagttccagacttggcagaaattttcatgagtgccgccacatcattactgaaggaaaaacatcacggtgttctgatatctgctgttcagctttgcatggagctatgtaatgccagcaatgaagcattggagtacttgaggaagaattgccttgaaggactggtccgaatactgagagatgtatccaacagttcatatgctcctgaatacgacattggtggcatcacagatccattcttacatatccgagtgcttaaactcatgcggatactgggccaaggagatgcagattgcagcgagtatatcaatgacattcttgctcaggtttcaacgaaaaccgagtcaaataagaatgctggaaatgctattttatatgaatgtgtggagacaataatgagcattgaagctacaagtggtttacgtgtgttggcaattaatattttgggtcggtttttgtccaaccgcgataacaacataagatatgttgccctaaacatgcttatgaaggccattgctgtagacacacaagcggtgcagaggcacagggcaacaatattagagtgtgtcaaggatgcagatgtttctattcgtaaaagggccctggaacttgtttacctacttgtcaacgatacaaatgtaaagccattgactaaggaacttgttgattaccttgaagtgagtgatcaagatttcaaggaagacctcactgctaagatatgctcaatagttgaaaagttttccctggacaggctatggtacttagaccagatgttcagagttttatctctggctggtaatcatgtgaaggatgatgtatggcatgctcttatagttctagtgagtaatgcatctgaacttcaaggatattcagtcaggtcattatataaagcattgcaagcatctagtgaacaggaaagtttagttagggtggctgtttggtgcatcggtgaatatggagaaatgctggtcaacaatcttagtatgttggacatggaggaaccaattacggtaacagaatatgatgctgtggatgccgtagaggctgctcttcagcgctactctgcagatgttactactagggctatgtgtcttgtctctcttttgaagctttcctcccggtttccaccaacatcagagaggataaaagaaatagttgcgcaaaataaagggaatactgtgcttgaattgcagcaaagatctattgaattcagttccattatacaaagacatcaatcgatgaaatcatctttgcttgaacggatgcctgtattggatgaagctaattatttggtgaagagagctgcttctatacaggctgcagttccatctgtaaattctgctccagcagtcacttctggaggcccatttaagcttcctaatggtgttggaaagcctgcagctcctttagctgatttgcttgatttgagttctgatgatgctccagtgactacctcggcccctacaacagcacctaatgattttctacaggatctgttgggcattggcttgactgattcgtctcctataggcggagctccgtctacaagcactgacattctgatggatcttctatctattggttcatcttctgtacaaaatggaccaccaacggcaaactttagccttcctggcatagagactaaatctgtcgctgttacacctcaagttgtggatcttcttgatggtttgtcctcaggcacatctcttcctgatgagaacgcaacctaccccacaatcacagcattccagagtgcaactttgaggatcacattcagtttcaaaaaacaacctggaaaacctcaggagactacaattagtgcttctttcacaaatttagcaaccactacattcacagatttcgtcttccaggcagctgtgccaaagttcatccagttgcgtttggacccagcgagcagcagcactcttcctgccagtggaaatgggtcagttacacaaagcctcagtgtcaccaacaaccagcatggccagaaaccacttgcaatgcgtatccggatgtcttacaaagtgaatggtgaggacaggctggaacaagggcaaatcagcaactttcctgctgggttgtagggccacctgtgtctatagggtttgggttgctctttcagacttatgcttgcctgctagtgagttgtgtacactggtagttggtttttggccgtccattatctctttatatatatagtgtacagtagatgacagcgattaatgatatatcctcagttttgccgaaatgtatttttatcttggtgcatatcggacttcagggtaaccaaaattttcacccttttccccgcgtaccaagcaccaaaggaatgtgttgtaccatgatattccccaatgtaattatttatttttctaatcattgtacaagcttattgtgcagac

SEQ ID NO: 154664 - DNA, 3152 bp, Zea Mays
aaacaaatccgaagcacaaagcaggggcctcttcgcaaatcccaccaccaccatcaccgcctcccagatccgcctggccgtcctcctcgtccgccactgcggcggtgatccctcgccgccccgcccttgataccgtcgagaggatcgtcgaggacttcgccatggacctcgccatcaatcccttctcctccggtacccgcctccgggacatgatacgtgcgatacgcgcgtgcaagacggcagcagaggagcgcgccgtggtgcggcgggagtgcgcggcgatacgggccgctatcagcgagggcgaccaggactaccggcatcggaacatggccaagctcatgttcatccacatgctcggctaccccacacacttcggccagatggagtgcctcaaacttattgctgccgcaggcttccccgagaagcgcatcggctatctaggactcatgctgctgctcgacgagcggcaggaggtcctcatgctcgtcaccaactctctcaagcagtatccaccctgtctgcacttaacagttgtgtttgttgattgttatgcgttgtttctgattgtaattacttaacgtgggcagagatcttaaccactcaaaccagttcattgttggtcttgcactctgtgcccttggcaatatatgttctgctgaaatggcgcgtgatcttgctcctgaagtggagcggctgttacaaaatagggaccctaatacaaagaagaaggccgctttatgctctgtgaggattgtacgaaaagttccagacttggcagaaattttcatgagtgccgccacatcattactgaaggaaaaacatcacggtgttctgatatctgctgttcagctttgcatggagctatgtaatgccagcaatgaagcattggagtacttgaggaagaattgccttgaaggactggtccgaatactgagagatgtatccaacagttcatatgctcctgaatacgacattggtggcatcacagatccattcttacatatccgagtgcttaaactcatgcggatactgggccaaggagatgcagattgcagcgagtatatcaatgacattcttgctcaggtttcaacgaaaaccgagtcaaataagaatgctggaaatgctattttatatgaatgtgtggagacaataatgagcattgaagctacaagtggtttacgtgtgttggcaattaatattttgggtcggtttttgtccaaccgcgataacaacataagatatgttgccctaaacatgcttatgaaggccattgctgtagacacacaagcggtgcagaggcacagggcaacaatattagagtgtgtcaaggatgcagatgtttctattcgtaaaagggccctggaacttgtttacctacttgtcaacgatacaaatgtaaagccattgactaaggaacttgttgattaccttgaagtgagtgatcaagatttcaaggaagacctcactgctaagatatgctcaatagttgaaaagttttccctggacaggctatggtacttagaccagatgttcagagttttatctctggctggtaatcatgtgaaggatgatgtatggcatgctcttatagttctagtgagtaatgcatctgaacttcaaggatattcagtcaggtcattatataaagcattgcaagcatctagtgaacaggaaagtttagttagggtggctgtttggtgcatcggtgaatatggagaaatgctggtcaacaatcttagtatgttggacatggaggaaccaattacggtaacagaatatgatgctgtggatgccgtagaggctgctcttcagcgctactctgcagatgttactactagggctatgtgtcttgtctctcttttgaagctttcctcccggtttccaccaacatcagagaggataaaagaaatagttgcgcaaaataaagggaatactgtgcttgaattgcagcaaagatctattgaattcagttccattatacaaagacatcaatcgatgaaatcatctttgcttgaacggatgcctgtattggatgaagctaattatttggtgaagagagctgcttctatacaggctgcagttccatctgtaaattctgctccagcagtcacttctggaggcccatttaagcttcctaatggtgttggaaagcctgcagctcctttagctgatttgcttgatttgagttctgatgatgctccagtgactacctcggcccctacaacagcacctaatgattttctacaggatctgttgggcattggcttgactgattcgtctcctataggcggagctccgtctacaagcactgacattctgatggatcttctatctattggttcatcttctgtacaaaatggaccaccaacggcaaactttagccttcctggcatagagactaaatctgtcgctgttacacctcaagttgtggatcttcttgatggtttgtcctcaggcacatctcttcctgatgagaacgcaacctaccccacaatcacagcattccagagtgcaactttgaggatcacattcagtttcaaaaaacaacctggaaaacctcaggagactacaattagtgcttctttcacaaatttagcaaccactacattcacagatttcgtcttccaggcagctgtgccaaagttcatccagttgcgtttggacccagcgagcagcagcactcttcctgccagtggaaatgggtcagttacacaaagcctcagtgtcaccaacaaccagcatggccagaaaccacttgcaatgcgtatccggatgtcttacaaagtgaatggtgaggacaggctggaacaagggcaaatcagcaactttcctgctgggttgtagggccacctgtgtctatagggtttgggttgctctttcagacttatgcttgcctgctagtgagttgtgtacactggtagttggtttttggccgtccattatctctttatatatatagtgtacagtagatgacagcgattaatgatatatcctcagttttgccgaaatgtatttttatcttggtgcatatcggacttcagggtaaccaaaattttcacccttttccccgcgtaccaagcaccaaaggaatgtgttgtaccatgatattccccaatgtaattatttatttttctaatcattgtacaagc

SEQ ID NO: 154665 - DNA, 1517 bp, Zea Mays
cgcagctgcgaggctggtctccgctgttacgtctctgcccgcctctcccccacccctcctctggtccaagtccccccaccgcagcggccaccactccatccgagtctcttcgactccaagccgttccgctccccctgttccgcgcgacgccgatgcaccccaagctgccgcgggccgcgcgcaggctcctctgctgcggcggggccgccgcgtccccggaggaggacctgtctgacgaaggaaggcgatcgttgaggtgggtgttctcgttgagagaacttcgatcagcaacaaacagcttcaattacgataacaagatcggagaagggccacttgggagcgtgtattgggggcaagtctgggatggttctcagattgctgtcaagaggttaaataacgcaaagaacggcacagaagccgaatttgcttcagaagtcgagatactgggaagaataagacacaaaaacctcctgagcttccgtggatactgtgcggacggacccgagcgcgttctggtgtacgacttcatggcaaactcaagcctgtatgcacatctccatggaccgcattccgcggagtgtctcctcgactggcggaggcgagcgtctatcgccatgggcaccgctcgggctctcttgtaccttcatcgccacgcaacgcctaagataatccacggaagcgtcaaggccaccaacgtgctgctggattcagacttccgggcgcacgctggcgatttcggtctggcaaggcttattcccgacgacggaacggaccacgaaaagatagccagcagcgagagccagcgaggctaccttgctcccgagtacgccgccatgtccggcaaaccaactgcaggctgcgatgtatacagcttcgggatcatactgctggagcttgcgagcggcagaaggccagtcgagaagtcgggttctggcaaggcttgtggaatccgaagctgggtgctcccgctcgcaaggcagggcaggtacgacgagattgcggactcaaagctgggcgacaagttctctggacctgagctgagaaggatggtgttggtcggtctagcgtgtacacgttcagaacctgaaaagagacccacgatgcttcaagtcgtgccgttgctgaaaggcgagtcgaaagaaacgcttgttaagcttgaaagggaggagttgttcagcccagactcgacgacggtgagttcgcagggaacaccgaccccagatgggagcacggactctgcgccgccgctgaagaaagataaagaactggttggggcgtgagttgcgatatattgctgttctaggagattgtagagtgcgtatttgtggtattgatgattagtctgtgcggtttgacgtgaatgggaattgtataggcattgtttttttctaagttttttttttctgtcccttttgagggagtaaggaagagccggcgggctggagtactctgttgctttgcagctttttggttcattatgcttcgtctatcgagcttgtcgccgagtctggcccctc

SEQ ID NO: 154666 - DNA, 1175 bp, Zea Mays
agaaagagtcagagacacacacacacgcagacggacggaccactagcaaacagcagcgccccacgatcagcacccctgccgccggggcaaactgctgctgctgccgatccggtccgggggatggagagggacgccacagccttctgcccgccgccccagcccgccccggctccggcgtcgcatgcggcggtgctgggcgccggtgtcgcggtcgcggtcgcgccggcggcagggaacggccgcggcggcggcggcggagggaagcagtaccgcggcgtccggatgcgcaagtggggcaagtgggtggcggagatccgcgagcccaacaagcggtcgcggatctggctcgggtcctactccaccgccgaggccgccgcgcgcgcctacgacacggccgtcttctgcctgcgcggccgcgccgcgcggctcaacttccccgaccagctcgacggcgcgcaggcggcggcggcggcggacagcacggagggggcgcgcaggaacggggccgggctcacggccgccgccatccgcaagaaggcggccgaggtcggggcccgcgtcgacgcgctccactgcggcgccggcgctggcctagcgggcggcggcgcctctccgctgctgctgtcccaccgccgtcgacccaagaaccccgacctcaaccgggagcccaccccggacacctcggacgacgagtaaagcggggctagtttttgtcgccgttcttcgtcctcctcggtctaccagtccctactccctagctacatagctgtagcagatagagcaagcaaccaggtggacccaggaggccaggacacacggaggggcgcgggaggtcccggtcgcagcgcaaggtgttcgatgggctgcggatgagctccatccaataatggagtcgcgacgtcgacgtcagggccggaagcctagcctatcgtgcgagctctcccggtctccccgtagcagggtgacactgacagacgggtgcgtgcgggcgggcgggcgggcatgtagctcaagcaagacggctatgtacctctcagccttggcataaagacgtgtaaaggaaaacatatatatatactccccggcaagcaagatgtgttttttcactgacggatccgatctgaatttggcctgcggtttcaacagtattttgtctatatataatataaattgct

SEQ ID NO: 154667 - DNA, 2185 bp, Zea Mays
agcagccatccagcagggcctccgtttgtccgtctcctctctctacaggctgttcgtgcccccaagcaagcactacgcgcgcgaaaaaaaataaaaaaaaaaggcacgtcatctggatctcttgctctagctcactcaacctcaccaaaatgtgcaggctgctccgactccgagaacaggacggtcatgccgcgcgcaccggtttcccttcccatgccgctaccacctcccgactcccgagtcacgactgggggaccacccgatggacgatgattgatgcactgaaagcaagagtgggttggtggtggaccgtggcagtctaccaaatgtcgctgctctccccgcccggccggaacgaggaaggaaggcgaccaccactccacgccggtcgtgccaggtcggcagtcagagtcagccgcgcctgcgcgcgtccctttcccaccaacccctctccctccccgcactcgacagccacggccgcgacggcgtccgcgtgcaccggacaccacggccagacccgaggccacacagccctctgaccaaacgcacggatccggccagccacccaccccgcccccctagcggccgccacccacccgtgcgcgcggcgcaccaaggcctggcccggcagtggcagccaggctctcacacgcctcgcctagtcgccttgccgccgcgcgttatataagagccgccccggcaggcacggtcggtcaatccagcaatacccgacgcgcaagccagtgccgcacccagaccagatctccgcgacatatcagtcgttcgtccagctaactgcactgcactgcactgcacgcaatggccaccacggcgaccgaggcggccaaggctgcaccggcgcaggagcagcaggccaacggcaacggcaacggcgagcagaagacgcgccactccgaggtcggccacaagagcctgctcaagagcgacgacctgtaccagtacatcctggacacgagcgtgtacccgcgggagccggagagcatgaaggagctgcgcgagatcaccgccaagcacccatggtatgtcccgctagcttttcgccctgtcgtacgtggtggattcgagtgtgtgggcctgctggacgtggacagaccgagatctgagaacgaacgtggcgtggcgtgcaggaacctgatgaccacctccgccgacgagggccagttcctcaacatgctcatcaagctcatcggcgccaagaagaccatggagatcggcgtctacaccggctactcgctcctcgccaccgcgctcgcactcccggaggacggcacgatcttggccatggacatcaaccgcgagaactacgagctaggccttccctgcatcaacaaggccggcgtgggccacaagatcgacttccgcgagggccccgcgctccccgtcctggacgacctcgtggcggacaaggagcagcacgggtcgttcgacttcgccttcgtggacgccgacaaggacaactacctcagctaccacgagcggctcctgaagctggtgaggcccggcggcctcatcggctacgacaacacgctgtggaacggctccgtcgtgctccccgacgacgcgcccatgcgcaagtacatccgcttctaccgcgacttcgtcctcgccctcaacagcgcgctcgccgccgacgaccgcgtcgagatctgccagctccccgtcggcgacggcgtcacgctctgccgccgcgtcaagtgaaaaaaagaagaagaagaaaaaaaacataataccctgcgttcctgctgccccggctgtctggcccccactactgccaccgacggcggcgccgaacccccgttccaatcatcatatcgtagacgacgcgcagcattaaactatcaatcaccggatctggctctttcttggccctgtactgtactattaatgttccgttcttgtttttttattcggaattgtcgccgtttcagtatacgtaaatctcgaggtcgataatacagtaatactaccaatttaactgtatactcctaccgtctggatggttttgttttgttttgtttcgttctccctgcgcgtgtcgaaattccgatttcgaattatttggtcaaaacccaagctgtcaaattcggtcgatgcttccaccacatgtttttgacagagatggcaggcaaccctcgcatcgcgcatgttcaccgacagcgacgcc

SEQ ID NO: 154668 - DNA, 2077 bp, Zea Mays
agcagccatccagcagggcctccgtttgtccgtctcctctctctacaggctgttcgtgcccccaagcaagcactacgcgcgcgaaaaaaaataaaaaaaaaaggcacgtcatctggatctcttgctctagctcactcaacctcaccaaaatgtgcaggctgctccgactccgagaacaggacggtcatgccgcgcgcaccggtttcccttcccatgccgctaccacctcccgactcccgagtcacgactgggggaccacccgatggacgatgattgatgcactgaaagcaagagtgggttggtggtggaccgtggcagtctaccaaatgtcgctgctctccccgcccggccggaacgaggaaggaaggcgaccaccactccacgccggtcgtgccaggtcggcagtcagagtcagccgcgcctgcgcgcgtccctttcccaccaacccctctccctccccgcactcgacagccacggccgcgacggcgtccgcgtgcaccggacaccacggccagacccgaggccacacagccctctgaccaaacgcacggatccggccagccacccaccccgcccccctagcggccgccacccacccgtgcgcgcggcgcaccaaggcctggcccggcagtggcagccaggctctcacacgcctcgcctagtcgccttgccgccgcgcgttatataagagccgccccggcaggcacggtcggtcaatccagcaatacccgacgcgcaagccagtgccgcacccagaccagatctccgcgacatatcagtcgttcgtccagctaactgcactgcactgcactgcacgcaatggccaccacggcgaccgaggcggccaaggctgcaccggcgcaggagcagcaggccaacggcaacggcaacggcgagcagaagacgcgccactccgaggtcggccacaagagcctgctcaagagcgacgacctgtaccagtacatcctggacacgagcgtgtacccgcgggagccggagagcatgaaggagctgcgcgagatcaccgccaagcacccatggaacctgatgaccacctccgccgacgagggccagttcctcaacatgctcatcaagctcatcggcgccaagaagaccatggagatcggcgtctacaccggctactcgctcctcgccaccgcgctcgcactcccggaggacggcacgatcttggccatggacatcaaccgcgagaactacgagctaggccttccctgcatcaacaaggccggcgtgggccacaagatcgacttccgcgagggccccgcgctccccgtcctggacgacctcgtggcggacaaggagcagcacgggtcgttcgacttcgccttcgtggacgccgacaaggacaactacctcagctaccacgagcggctcctgaagctggtgaggcccggcggcctcatcggctacgacaacacgctgtggaacggctccgtcgtgctccccgacgacgcgcccatgcgcaagtacatccgcttctaccgcgacttcgtcctcgccctcaacagcgcgctcgccgccgacgaccgcgtcgagatctgccagctccccgtcggcgacggcgtcacgctctgccgccgcgtcaagtgaaaaaaagaagaagaagaaaaaaaacataataccctgcgttcctgctgccccggctgtctggcccccactactgccaccgacggcggcgccgaacccccgttccaatcatcatatcgtagacgacgcgcagcattaaactatcaatcaccggatctggctctttcttggccctgtactgtactattaatgttccgttcttgtttttttattcggaattgtcgccgtttcagtatacgtaaatctcgaggtcgataatacagtaatactaccaatttaactgtatactcctaccgtctggatggttttgttttgttttgtttcgttctccctgcgcgtgtcgaaattccgatttcgaattatttggtcaaaacccaagctgtcaaattcggtcgatgcttccaccacatgtttttgacagagatggcaggcaaccctcgcatcgcgcatgttcaccgacagcgacgcc

SEQ ID NO: 154669 - DNA, 2156 bp, Zea Mays
agcagccatccagcagggcctccgtttgtccgtctcctctctctacaggctgttcgtgcccccaagcaagcactacgcgcgcgaaaaaaaataaaaaaaaaaggcacgtcatctggatctcttgctctagctcactcaacctcaccaaaatgtgcaggctgctccgactccgagaacaggacggtcatgccgcgcgcaccggtttcccttcccatgccgctaccacctcccgactcccgagtcacgactgggggaccacccgatggacgatgattgatgcactgaaagcaagagtgggttggtggtggaccgtggcagtctaccaaatgtcgctgctctccccgcccggccggaacgaggaaggaaggcgaccaccactccacgccggtcgtgccaggtcggcagtcagagtcagccgcgcctgcgcgcgtccctttcccaccaacccctctccctccccgcactcgacagccacggccgcgacggcgtccgcgtgcaccggacaccacggccagacccgaggccacacagccctctgaccaaacgcacggatccggccagccacccaccccgcccccctagcggccgccacccacccgtgcgcgcggcgcaccaaggcctggcccggcagtggcagccaggctctcacacgcctcgcctagtcgccttgccgccgcgcgttatataagagccgccccggcaggcacggtcggtcaatccagcaatacccgacgcgcaagccagtgccgcacccagaccagatctccgcgacatatcagtcgttcgtccagctaactgcactgcactgcactgcacgcaatggccaccacggcgaccgaggcggccaaggctgcaccggcgcaggagcagcaggccaacggcaacggcaacggcgagcagaagacgcgccactccgaggtcggccacaagagcctgctcaagagcgacgacctgtaccaggtaaacaagctgagcgcaatgagtggctgaatctgaccgggatctgagtctctgaccgcgggggaagaatgatccgcagtacatcctggacacgagcgtgtacccgcgggagccggagagcatgaaggagctgcgcgagatcaccgccaagcacccatggaacctgatgaccacctccgccgacgagggccagttcctcaacatgctcatcaagctcatcggcgccaagaagaccatggagatcggcgtctacaccggctactcgctcctcgccaccgcgctcgcactcccggaggacggcacgatcttggccatggacatcaaccgcgagaactacgagctaggccttccctgcatcaacaaggccggcgtgggccacaagatcgacttccgcgagggccccgcgctccccgtcctggacgacctcgtggcggacaaggagcagcacgggtcgttcgacttcgccttcgtggacgccgacaaggacaactacctcagctaccacgagcggctcctgaagctggtgaggcccggcggcctcatcggctacgacaacacgctgtggaacggctccgtcgtgctccccgacgacgcgcccatgcgcaagtacatccgcttctaccgcgacttcgtcctcgccctcaacagcgcgctcgccgccgacgaccgcgtcgagatctgccagctccccgtcggcgacggcgtcacgctctgccgccgcgtcaagtgaaaaaaagaagaagaagaaaaaaaacataataccctgcgttcctgctgccccggctgtctggcccccactactgccaccgacggcggcgccgaacccccgttccaatcatcatatcgtagacgacgcgcagcattaaactatcaatcaccggatctggctctttcttggccctgtactgtactattaatgttccgttcttgtttttttattcggaattgtcgccgtttcagtatacgtaaatctcgaggtcgataatacagtaatactaccaatttaactgtatactcctaccgtctggatggttttgttttgttttgtttcgttctccctgcgcgtgtcgaaattccgatttcgaattatttggtcaaaacccaagctgtcaaattcggtcgatgcttccaccacatgtttttgacagagatggcaggcaaccctcgcatcgcgcatgttcaccgacagcgacgcc

SEQ ID NO: 154670 - DNA, 1910 bp, Zea Mays
agcagccatccagcagggcctccgtttgtccgtctcctctctctacaggctgttcgtgcccccaagcaagcactacgcgcgcgaaaaaaaataaaaaaaaaaggcacgtcatctggatctcttgctctagctcactcaacctcaccaaaatgtgcaggctgctccgactccgagaacaggacggtcatgccgcgcgcaccggtttcccttcccatgccgctaccacctcccgactcccgagtcacgactgggggaccacccgatggacgatgattgatgcactgaaagcaagagtgggttggtggtggaccgtggcagtctaccaaatgtcgctgctctccccgcccggccggaacgaggaaggaaggcgaccaccactccacgccggtcgtgccaggtcggcagtcagagtcagccgcgcctgcgcgcgtccctttcccaccaacccctctccctccccgcactcgacagccacggccgcgacggcgtccgcgtgcaccggacaccacggccagacccgaggccacacagccctctgaccaaacgcacggatccggccagccacccaccccgcccccctagcggccgccacccacccgtgcgcgcggcgcaccaaggcctggcccggcagtggcagccaggctctcacacgcctcgcctagtcgccttgccgccgcgcgttatataagagccgccccggcaggcacggtcggtcaatccagcaatacccgacgcgcaagccagtgccgcacccagaccagatctccgcgacatatcagtcgttcgtccagctaactgcactgcactgcactgcacgcaatggccaccacggcgaccgaggcggccaaggctgcaccggcgcaggagcagcaggccaacggcaacggcaacggcgagcagaagacgcgccactccgaggtcggccacaagagcctgctcaagagcgacgacctgtaccaggtaaacaagctgagcgcaatgagtggctgaatctgaccgggatctgagtctctgaccgcgggggaagaatgatccgcagtacatcctggacacgagcgtgtacccgcgggagccggagagcatgaaggagctgcgcgagatcaccgccaagcacccatggtatgtcccgctagcttttcgccctgtcgtacgtggtggattcgagtgtgtgggcctgctggacgtggacagaccgagatctgagaacgaacgtggcgtggcgtgcaggaacctgatgaccacctccgccgacgagggccagttcctcaacatgctcatcaagctcatcggcgccaagaagaccatggagatcggcgtctacaccggctactcgctcctcgccaccgcgctcgcactcccggaggacggcacggtcggtgccctttctctctttctctctctctctctttcccagatctgccacccacccagaccaaggatctttacccctctctgtctctctctctgttgctcgtccccccgcagatcttggccatggacatcaaccgcgagaactacgagctaggccttccctgcatcaacaaggccggcgtgggccacaagatcgacttccgcgagggccccgcgctccccgtcctggacgacctcgtggcggacaaggagcagcacgggtcgttcgacttcgccttcgtggacgccgacaaggacaactacctcagctaccacgagcggctcctgaagctggtgaggcccggcggcctcatcggctacgacaacacgctgtggaacggctccgtcgtgctccccgacgacgcgcccatgcgcaagtacatccgcttctaccgcgacttcgtcctcgccctcaacagcgcgctcgccgccgacgaccgcgtcgagatctgccagctccccgtcggcgacggcgtcacgctctgccgccgcgtcaagtg

SEQ ID NO: 154671 - DNA, 1446 bp, Zea Mays
agcagccatccagcagggcctccgtttgtccgtctcctctctctacaggctgttcgtgcccccaagcaagcactacgcgcgcgaaaaaaaataaaaaaaaaaggcacgtcatctggatctcttgctctagctcactcaacctcaccaaaatgtgcaggctgctccgactccgagaacaggacggtcatgccgcgcgcaccggtttcccttcccatgccgctaccacctcccgactcccgagtcacgactgggggaccacccgatggacgatgattgatgcactgaaagcaagagtgggttggtggtggaccgtggcagtctaccaaatgtcgctgctctccccgcccggccggaacgaggaaggaaggcgaccaccactccacgccggtcgtgccaggtcggcagtcagagtcagccgcgcctgcgcgcgtccctttcccaccaacccctctccctccccgcactcgacagccacggccgcgacggcgtccgcgtgcaccggacaccacggccagacccgaggccacacagccctctgaccaaacgcacggatccggccagccacccaccccgcccccctagcggccgccacccacccgtgcgcgcggcgcaccaaggcctggcccggcagtggcagccaggctctcacacgcctcgcctagtcgccttgccgccgcgcgttatataagagccgccccggcaggcacggtcggtcaatccagcaatacccgacgcgcaagccagtgccgcacccagaccagatctccgcgacatatcagtcgttcgtccagctaactgcactgcactgcactgcacgcaatggccaccacggcgaccgaggcggccaaggctgcaccggcgcaggagcagcaggccaacggcaacggcaacggcgagcagaagacgcgccactccgaggtcggccacaagagcctgctcaagagcgacgacctgtaccagtacatcctggacacgagcgtgtacccgcgggagccggagagcatgaaggagctgcgcgagatcaccgccaagcacccatggtatgtcccgctagcttttcgccctgtcgtacgtggtggattcgagtgtgtgggcctgctggacgtggacagaccgagatctgagaacgaacgtggcgtggcgtgcaggaacctgatgaccacctccgccgacgagggccagttcctcaacatgctcatcaagctcatcggcgccaagaagaccatggagatcggcgtctacaccggctactcgctcctcgccaccgcgctcgcactcccggaggacggcacggtcggtgccctttctctctttctctctctctctctttcccagatctgccacccacccagaccaaggatctttacccctctctgtctctctctctgttgctcgtccccccgcagatcttggccatggacatcaaccgcgagaactacgagctag

SEQ ID NO: 154672 - DNA, 1099 bp, Zea Mays
cgacagcgagacgatactatcacacccctcctccctaccgtcccccgtaatcctcgcgatcgccatcgcccgcctcgcgtcgggtctgccctaccctgcgctcgcggagctattaggcgtcccgccctccgccccccgcgccacctcccgccgcctccgccgggtgctcctcgccaacttccgcttctggctcgccttcccctccgacccaaccggcgcctattccgccccgctcccctcctgccgcggcgcgctctgctgcgcgcgcttcgccggccctaccggcccgctcgccacccagctcgtggcgggcgcctcctcccgcgtgctctccctcaccgcgggattccgcggcgaccgcacagacctcgaggtgctcaggctgtcctcgttgtaccaggaggccgagcacggcaagttgctcgactcccagcagtacttggttggggatgggggtgggtacccgctgctgccctggctcatggtgcctttcccagggccactggtgcctggctccccggaggcggagttcaatgctgcgcacagggcaatgtgccgccccgtgcggcgtgttatccggagcttgatggggtggggagccatcgctaggctccacgaggaggaaagctctcgagcagctgtggcgtgcattgggacatgtgcgatgcttcacaatgtgctgttgtccagggaggattactctgcattggcgccggatgttgaggaggcagacagtgatttggggggactgcacagccaaagagatgacgctggtgccggagcaggactcgagatcgatggccgtgcattggcgttgcggagcgcattggcagcaacaacgagggacctgcgagcgcctgactagccatggtgattctttcacaatttctgtcattgtcgattctttttaatcatatgtagattgtatagtggtgaacattttgattcaattggattcatcacccttcagttagttgattgctcaatgaataaagtaagaaagaaattagactgtcacttgacacatatttcgagcgttgactcaatatgactgtatgcactcatctagttgaaatccaaccctgatcatttctacacc

SEQ ID NO: 154673 - DNA, 127 bp, Zea Mays
caagcacatagaaacaaatacatcgctagctcgccaccaacaatggcctcaaggtactctatcctgcttgccacaacggcactggctatgttgttcgcattcggttcgtgcaccaccccactcacct

SEQ ID NO: 154674 - DNA, 2763 bp, Zea Mays
atcctgagctcggctcctcctcagaaaaacacaagggaagacagctgcctacccaacctaccagccatggcgccacattcttactccatagcccccgtccaaagcgagctgaacatgacgctgtacaacaaggaggtgtacggtgggcgggggaccaacggagtgaccactctagtgaaccgagggccaatcggcaccacctgggtcttctcgtggcctgtcaccgacgggcccgccggcgccgacgcgaacgtcgtcggccatcttcagggcaccggcgttcaagtcgccacttaccccgactacatgtggcactactcccttgggctggtgttcggccagggaagcaggttcaatgggtccacactacaaatacaagggacttccaaaataaatggcgagtggagcattgttggagggacaggagaacttgctatggcaaagggcacggtcagacgcacagaagtttcgtatacgggaaatataaggatttcagaactcaatatacatgtgctttacactccaatgtgacctatacagatgtaagtataatgcaccccagtgtttaatgtgatgggcatttatttttcctatttaacaagttagctacgtacatatttagtttaccagaatttccataataacgtccagactatatatgtaacacatttggaaaatgatgatgcattggttgtttgttgaactgtttctttttttttacttatatattacgcccttcccctcaaatacaagctatcatagaaattttggatatattatgggataaaattaaagaaatgacacatgtaactaaagagatctcgagcataccatatattggtgctttacgaagttcatttgttttaaaatgcttataatttggaacaaattttgaatgcttaaggttctgtttgggtcctcttagctaatagatatttttttctctttttatgatctattagcacctattagtaaggtcaaatggctaataggcaaataatttatcggctctctaactagcaattagtcaatttattagctagcccgtttgaaacctaaggtgctaaatagccaacaaattgtttgtccgatgaatctgttatatttttggacggagggagatgtgcctaaactgtttggttgtcattgtttaaatcattgttttatatgcatgaatgtaagtatgtaaccatcatatggacaatttagtatgagtattttttccataagcatgcattgatgatgatgtcctgtttgaatatactactacaatacatgtgcgttacgacgacacacaagaaaaaatattacactttaccttagccaaaatgcatagaaatgtattagttgaaaaggagtccgaccctcttttttatatttcgctcggtcgcttgtccttctttagctaacgaggtagtactatgtgggagcgctacattgcatgtgacttcttttcgtgctgggcttggatggtcacgctcatctgtgggggtaacgacccactaataagagtttgagtggttttcacggcctatctatgagataacggtatactgctaggacagtccggtgaacaccggacagcccggtgaataatagtcgcagcgccttcgctttttcctgagagcgccgagttcgtcgccgggccagcctgggcaccggacactgtccggtgcaccacaggttggtgctggtttgactgaacatagctaattcttctccacttcttttcctcttttcttggcaatgtctctagtacttagataaacatgttaatacccaaaaacaatttactagggctagaaacataccttggctcttgatgtgcacttctaaatcacttggcacatatgaacttaaaacaatgtgttggccatctaatcacaaaaacatttatagaaatggctcaagggcacatttccctttcagaagtgtctaagggtctagctaacccaggcctaaccattcaccttggaagaatctatggttttggctaacccaggctaaaagggatacacgacctctgcaaagtgtaaaactggtatatcagtcgtgctcacagttaagagcgactcgggactctcacgtgattaatatatggaagtaaatttaacgagacatgcattgtattgtggatattttgtttatgttcatttatttaattgggatggtatgtacttgtacttaattaaaagctaatgcccaacctcagccatatttcttggtaagccttacactacacttattcttgcacacttgctgggcaataaccgtatgagagctcacacttgctataaacaatacccaggtcaagaacaagtatctctggaggaggactactatgataagttcgatgagatctagggtgtggagaagttatcttaatctggtttattttatttagttatttttgtaagatgttttgtcatgtaataaagattgtgacattggtttatatacacactgagtcgtcatatatgtgaaatttgatcctgacacgtacatatgaggtgcatatggatttgtccttaaatccgggtgtgatattacttgagtgaggagagggttgaaagagacccagtcctcggactcctcaacagagacataggtttctctttgaaatcaaactctagtaaacaaaccaccatgtctcctatgcattttccttccctatttgcatttgtcttttcccattcaagcaaaacttgctttgttcttcatttgagctttaccttttgatattctgttgctagcctctattcc

SEQ ID NO: 154675 - DNA, 175 bp, Zea Mays
tatttttggacggagggagatgtgcctaaactgtttggttgtcattgtttaaatcattgttttatatgcatgaatgtaagtatgtaaccatcatatggacaatttagtatgagtattttttccataagcatgcattgatgatgatgtcctgtttgaatatactactacaatacat

SEQ ID NO: 154676 - DNA, 826 bp, Zea Mays
atcctgagctcggctcctcctcagaaaaacacaagggaagacagctgcctacccaacctaccagccatggcgccacattcttactccatagcccccgtccaaagcgagctgaacatgacgctgtacaacaaggaggtgtacggtgggcgggggaccaacggagtgaccactctagtgaaccgagggccaatcggcaccacctgggtcttctcgtggcctgtcaccgacgggcccgccggcgccgacgcgaacgtcgtcggccatcttcagggcaccggcgttcaagtcgccacttaccccgactacatgtggcactactcccttgggctggtgttcggccagggaagcaggttcaatgggtccacactacaaatacaagggacttccaaaataaatggcgagtggagcattgttggagggacaggagaacttgctatggcaaagggcacggtcagacgcacagaagtttcgtatacgggaaatataaggatttcagaactcaatatacatgtgctttacactccaatgtgacctatacagatgtaagtataatgcaccccagtgtttaatgtgatgggcatttatttttcctatttaacaagttagctacgtacatatttagtttaccagaatttccataataacgtccagactatatatgtaacacatttggaaaatgatgatgcattggttgtttgttgaactgtttctttttttttacttatatattacgcccttcccctcaaatacaagctatcatagaaattttggatatattatgggataaaattaaagaaatgacacatgtaactaaagagatctcgag

SEQ ID NO: 154677 - DNA, 1658 bp, Zea Mays
aggcgctggctggctagctgacaccgaggagccggggcggaatccgtccgctgcagcacagccgcgcccgggggaaaccgccaaaaccccgtaaaaagtccaggaaaaaacaagcccaaagcgggcgagtgcgcggccgcgggcaagcaaccggccacccacctagctcggctccgctcagcggcagcaccgcaggccgcagcagcacggcatgggcgcaaacactaaaaagaagggagcggccgcgcctccaccccaaacccacctcgcctcctagtcccccccttcgccttctctcccgagtcccatcggagcccggagctctctcgcctcccgcgaggctgtgtggtgaggcgcggacgagatgaacgagcaggggctcggtggtctcggcgggggccgcggggccgtgcaggggcacgggcgggaggcgatggcgctcttgcagcaccagcagcttcaacagcaacggcggcagctggaggaggaggatgaggtgcggcgccagatgttcggcggggtggcggcgttcccggcagcgctgggccacggccagcaggtggactacggggaggacgccggcgggctcggggacagcgacgcgggcgggtcggagcccgagccaccgccggagcggacgcgcggggggtccggcggcggcggcggcaagcggagccgcgctgccgaggtgcacaacctctccgagaagaggaggaggagcaagatcaacgagaagatgaaagcgctgcagagcctgatacccaactccaacaagaccgacaaggcatccatgcttgacgaggccattgagtatctgaagcaactgcagctccaagtgcagatgctgtctatgagaaatggtgtttacttgaaccctccatatttgtctggcacaattgagcctgcacaagcatcacaaatgtttgctgcagttggtgggggcaacattacagcgtcaagctctggggcagtgatgccaccagtaaaccaaagttcaggacttcaagtatttgatccattaaatcctccacgagaccaaccactgtcttttgtattaccaaatgtagacaaaaccattcaagaagctccctttcacttggaatcatcgcagttccaccctcgaccatttcgaatgcctgaatcttctgagatgatgcttccaggtgaggtagtggcaaagcaccagctaacttcaattcaaggaagagttagtatgccaggaattggtatgaaccccattaggcaagaatcatccactgtaaaagctgatcagtttgatggttgctcacatagcaaagagtgactacgagatatgtgccacaaaatgcatgacaagttcagcttaggaaatggcaaccgatgaggaccgaaggcaagatgacacagttcagtaacccagctgacagcctggcacgcaggcttcccctttattttcctctgttactgcaatagtaacttaaatttttaggcttcccctttattttcctctgttactgcaatagtaacttaattttttttaggcttcacctttcctttttgtttgaaaattagcagggcagtattaattaatagtacaaaaccatgtatcaccaagatttcaggggttgaaacttgaaatgccaatattcaccaagctttagttttttttcaaagagtaa

SEQ ID NO: 154678 - DNA, 651 bp, Zea Mays
gaagaggatggactagatagcgggataggaggtggacaattgagaatatttggctgcaaccttgttgatgacccaggattctgtggtggaaccgtcaacccctgtactcctattggctctctcctgggatttctaggtataggaagccttctcacttcggacccatgtactggacctatttgtggctgcagctgtacagttccacaatgtgtttcctgtgaaacatgttgcatgccagatgctgaagaggtttcaagagaaggagagactgcatctgtgataacagggtgcagaacattttgaggtagaatagattccaaggtccctaatgaacttgagcccagcccactatggaagccatgttgcttcccccattatttccatcccctcgattcagatcttctgtctgagctgtcatagggaaatctgtaagatagtctgatacagacaaatcttgactattcaacacaggctttgaatcttctggagccgatgcccaatccatttgcatatcaccatcatcattgccatttatcagatctatgacatctcgagaaggtgaaccagtttctacagcatctccagcctgctgaattgtgtcacctctatgtctatcagatttttcatcctgagctggaacaactttccaag

SEQ ID NO: 154679 - DNA, 3629 bp, Zea Mays
atggagaagcggctagcgtacgcggccttgctcccactgctcctcctcacgctccgcatcctccccctgccctccggctcccccaactgcagcggcggcgagggggaaaccccgcccgcgtccaggcacgtggtgcggttcctggagtaccgccgcgcggaggagcaccgggagtacctggacgcggggctccgtgacggcgcccccgcggcggcgtggcgctgggtggagcggcggaaccccgcggccgcgttccctaccgacttcgcggtgctcgagatccgcgacgcgcaccgcgaggccgtcgtggcggcggtgcgggcgctcggccgcgtgcgggacgtgcacgccgacgccacctactcgcgctccgccctttcggcggcgccggatcggtcgcgtcctccccggcgggggaagctgttcaccgccatgtcgttcgagggcgaggaggagggtggcggagagaccggcaattcgtcttctgctgcctgggggcggaagcttcttctgcagagatcacaagttacatccctttttggagctgaacggttatggggaagaggcttcactggcaagaaagtcaaaatggccatttttgacactggtattcgggccgatcatccacattttcgcaatattaaggagcgcacaaattggacaaatgaagacacactaaacgacaaccttgggcatggaacatttgtagcaggagttattgctggccaagatgcagaatgccctggatttgcacctgatactgagatatatgcttttcgagtcttcacagatgctcagatatcttacacatcatggttcttggatgcatttaactacgcgatagctaccggtatggatgttttaaacttgagcatcggtggacctgattacctggatctcccctttgtggaaaaggtctgggagctcacagcaaacaacattattatggtatcagctattggaaatgatgggcctctatatggcacattaaacaacccagctgatcaaagcgatgttattggtgttggtggtattgattacaataaccatatagcttcattttcctctagaggcatgactacgtgggagcttcctcatggttatggtcgtgtgaaacctgatgttgttgcatacagtcgagatataattggatcaaagatcagcacaggctgtaagaccctttcaggcaccagtgtagcaagcccggtggttgctggtgtagtatgtttgcttgttagtgttatacctgaagacaagcggaaattgatcctcaaccctgctgctatgaaacaggcccttgtggagggtgcttctaaactttcaggaccaaacatgtatgaacaaggtgctggcaggcttgatctctggcagtcatatgaaatcttaaaaaattaccaaccacgtgcaagcatatttcctactatgcttgacttcaccgactgtccatatttctggcctttttgtcgtcaacctatgtatgctggagctatgccagtaatcttcaatgctacaatcctgaacgggatgggggtgattggttatgtaaaggatcaacctttatggcaaccttctgaggatattggcaatcttcttagtgttcacttcacctactcagatgtcatctggccctggacgggataccttgctctacatttgcaagttaaagatgagggttctcagttttcaggcataattagtggcaatgttactctgactatttataccccagcagctcatggagaaagcagcccacggagtagtacatgtattcttcacatgaaggtcaaggttgttccaacacctgttaggtcaaaaaggatactgtgggaccaatatcataatattaagtatccttcaggatatgttccaagggattcccttaatgttcataatgatatccttgactggcatggtgaccacttgcacacaaacttccacattctgttcaacatgctaagagatgcagagtactatattgagacacttggatcaccacttacttgctttgatgctagcaattatgggacattgcttatggttgatcttgaggacgaatactttgatgaagagattcagaaacttagggatgatgttatacacaagggacttggtattgctgtttttgctgagtggtaccatgttgatacaatggttaagatgacattctttgatgagaacacccggagttggtggactccaattactgggggtgcaaatattcctgcaattaatgaacttctggcaccatttggcattgctttgggggacaaaattcttactggtgacttctcaatcaatggtgagcagacccactatgcttctggaactgatatagtgcaatttcctgcgggaggtttcttgcatagcttccagctccaagaaaactcaaagacggtgcaagatcacataggaacactggatacagaaagcacccaggggaaaggcaagctctcctcaattcttggagtaatagaagcaggggaagggaggattgcagtgtatggtgattcaaattgtcttgacagtagtcacatggtaacaaactgctattggcttttgagaaaaatattggagttcactggaaacagagtgaaagataatgtccttttctcagaggcagcacagttaaagtttcctgtttttgagaatatccatcatccatcacgtagaacggatgtaaacttttcaacatactcaacagttgttggcaaggaattaatctgccaccaagattcccggtttgaggtttggggaacgaaaggctatggtgtccaaccaataggcacatcaagaaagcttccagagtaccagatgcatgaaagttctagttctcccaatgtaacaatacaaattgctggcagtagacaagataaagttgaaaggcttcaaagaaatctttcgataccaaatgctgctaaatttgatgataaaagagattattttggatttattggtcatgaggaggttgacataggaatgttaatggcaagccaatggatgataccttgcttcgctgccactgcttgccttatgttgtatcttagttgtagagtgcaacaaaaacgccgcagacgaaggaaggggtcggtggctagtgctaatcggctaacaagtatggtataattcgtcattcgcgcggtggtgctgaaaaggtttttttagcgtatctaagtttcaggcctccagccatgatggataaccaggaagcgccatctgcgcagcatgacagaattttagtagccagaaatccctggtagtgaagacacattttaactcggcaactagaggctgaacttgagagaaagctggctcgtcacttctgtggtcacatggaaagcagcttgtcttcccagattcagccattcgtggcatctactgctgttgcttgtagtcgctcacaattttgttcttcgccacacgtagttgtagccacaaaaatcgctgagagccaatatctagggtagaagctagagctagtcatttgtcatctccttggaatatgtgaaggagatttgagcttctctgtagatccatgagcaataaggggcagggggactcggcatgagcttggcaggtacaaaggaggcttaggcttattgggaactttgtaaagtaaattttgtattgtt

SEQ ID NO: 154680 - DNA, 454 bp, Zea Mays
cttttgttatctatgtaatattacaatggtaaaaattacgtccattttgcattcgaaccagacgactaggtttttttacataagcaaactttccttctaccggcttttgtggaatattatagttgtaaaatttatgtcagccgattcgattcccggattttgtggaatattacaaacgactttgcttttttgcactagaaacacagggcttccatccctcaaaaggcattaacccaggaatctaattacaccaacatgtcgacatgtaagcacagataagaaaatactttacattgatttgtagggctttaccctctccgaagagagggagcccttccagaaattctcagtggcccagtgggccaaagagggggtttggaaatagttttcaaccagcaattgacgcgcctcggtatgacctcataagctgcgtcattgccccaagcgcaaagat

SEQ ID NO: 154681 - DNA, 206 bp, Zea Mays
ccaatgctccgaattttacagcagaatacttgtcaataactcaatcgataccaatgctagggtccgaagcctctttgatttaggtacctatatatataccattgtctttagtcacttaacacggcacgcgaataaagctgagctctgtgatcaggttggcgcaaaacacgcaaacatgctgcaatttttccttcactggaccttag

SEQ ID NO: 154682 - DNA, 1190 bp, Zea Mays
atggcatccattccatgggggcaaaggaggcagtggcacaagctgacacgaccgacacacgccgatgggttagccttaccagaaggaaccccatccgtccagtgcggatccaccacaggactggtcgcgctcgcgctcgcgcgccacgccggtgtacaacaacagccccagcgagtcgccgtcgcacccctctacggccgccactcccgctcctcctccgtcagcgcttctccggcggctcgcgggggcggcggcggcgggcgcaaggtgctcaacgacaagggctggcccgagtgcagcgtcatcgaggaggaagggccctacgagggcctcggcgccggggacagcggcctctcccgccgctgccagatcgtgctcggcttcctcaccttcgtcctcctcttcaccgtcttctgcctcgtcatctggggcgccgcccgcccgtacgagcccgaggtcgtcgtcaagagcctggtgatggacgacttctacgctggtgaaggcacagaccacagcggcgttccgaccaaattggtcacgacgaactgttcgctgcacgtatcggtgtacaaccctgccacaatgtttgggatccatgtcacctccggccccatccgtctgatctattcagagatctcaatagcagtcggccaggtccgcaggtactaccagccgaggaagagccaccggacggtgacggcggtgatccacggcgagaaggtgccgctgtacggcgccgggggcggcctgacgctgtccacgagcgcgggcgggggggcggtgcccctgacgctggacttcgacctcacctcccggggctacgtgatcggcaggctcgtgcgggtgacgcacagggcgcacgtgacgtgccccgtcgtcgtggacgccaggaggaccaagcctgtcaggttctccaagaaggcgtgcgccgtgtacaaggcctgagcttgagagctcgtgaaacctgtgatcgaccgagcgttagcaatgcgtgttcttgcaaagatgtagctattgtgttgatggtgaagaacaataagcgcacacgtatggtcttgtcgatatatcgcgctgtaaaggcctgttgttcttgtgtgtgtatccctttttcagggcatgatcgtagagatggaagatgacttaccatgacaattttcctatacctttataacttcaaatttttttattca

SEQ ID NO: 154683 - DNA, 1449 bp, Zea Mays
cccttcctcatacaccggtacacacctagctagctagtcatatcatgcagcatcggtactagtactacatccgtgcatcaccatgcattatataaacccagccacactactagctagctcacaagacagcagaggcactagttatcacatccaccataacatgaccatggctaccgcctcagcttcgctagctctcatgttcgcctgcagccttctccttgcaggcacggcgttcagtgatgataccatagccatacccttgttggagcggttcaaagcctggcaggctgaatacaaccgcacctatgcgaccccagaggaattccagcaacgcttcatgatctacagcgagaacgtccggttcatcaagaccatgaaccagctgtcgaccgggagctcatatgagctcggtgagaaccagttcaccgacctcaccgaggaggagttcaaggacacatatcttatgaagctcgacgagcagccccctgcagctgaggccatgccaccgaccgtcggcaccatgagcacagcaggcatgtccaacggcaacaacaccggcgaggctcccaacagtgtggactggaggaccaagggagcagtgacgcgggtcaaggaccagcaacaatgtggctcttgctgggcgtttgcaacggtggcgtccatcgaaggtgtgcaccagataaagacaggtcgtctggtgtcgctgtcggagcaagagatcgtggactgcgaccgtgggggcaacgacaacggctgccgtggcggttcccctagatccgccatggagtgggtcacccgcaacggcggcctgaccaccgagtcggactacccgtacgtgggcagccagagacaatgcatgagcggcaagcttggtcaccacgcggccaggatccgtggctaccaggcggtgcagcgcaataacgaggccgagctggagcgcgccgtggcgggacagccggtcgccgtgttcgtcgacgcgagcagggccttccagttctacaagagcggggtcttctcgggcccctgcgacaccaccaccgtcaaccacgtcgtcacggtggtcgggtacggatcaaccggcagcgacagcggcggacgcaagtactggatcgtcaagaactcgtggggtcagggatggggagagaatggctacgtgcggatggcgaggcgtgtcagggctcgggagggcatgtgcgccatcgccatagagccctactacccagtgatgtgatatctccgtactagttaccggctgcctcctgatcctaaacaagctagtatgcttggagaaggatgcatggaattaaataaactacaactcaacgaaacagtgtgtgtattgccctatgtcgttcgatgttatcgtttgtatagatgatctacaacttttattttggtggttttatcatacgaggtcgtttgaaaaactcgaaaaattaaggataaaaa

SEQ ID NO: 154684 - DNA, 214 bp, Zea Mays
gggtcggcgatgacattgacagaaaacacatgccacaaattttgtatgaagacgaggaccatgataaggtcatattgtcgtcggacagtgaccttatagctgccgtagaccacgcaagacagatcggttggaagagcctaaggctgcacttggactacgcccaccggaagagaggggacggttcctcagacttcgagtacgctggcaaggatgc

SEQ ID NO: 154685 - DNA, 110 bp, Zea Mays
agaacgacatgcacgagccgtccgggatgacgtcgaagagaaactcgggcctatgacgcacgaccactcacctattagtgtagtatataagatttaacaagaaaatttaa

SEQ ID NO: 154686 - DNA, 348 bp, Zea Mays
atggagatgtgcagatgtgggaggaagggatcgcgggcggccgagaccttgccgatggccgccgtcgcggggctcggccacggcgacgcgagcgcaggcgcgggcgccgatggagatgcgcagaggtacatggagagcaaaccaacgcattggcaccctgcccacactgtaaatctcaaggacatcttggatgtgaacaaaattaacatgtctctctcagtccagcacaccatgaactttcaaaacatccgggagaagaacatcaggaggtctgagcttgttatagagttgaagaaaatattcaaggagatgtccatccggtaccagctttctaccccagaaagttga

SEQ ID NO: 154687 - DNA, 420 bp, Zea Mays
aataattatcaggagtacttgaagttaaagacaagagttgagttcttacaaacaactcagagaaatctacttggtgaggacttgggtccacttagcgtgaaggagttagagcaacttgagaaccaaattgagatctctctcaagcaaatccgatcatcaaagaaccagcagatgctcgaccagctctttgatctcaagcgcaagactcccgaaatactaatcaacggtgaggttttgcaggaacaacaactgcaagatgctaacaaagatttaagaatgaagatagaagaaactagtgaagaaaatgtgctgcgactgtctagccaggatattgggtgtagtggatctagtgggcatggtgatgaagccaaccaagaacaccttcaacttgctcttgatccttcgctgcatatagggtga

SEQ ID NO: 154688 - DNA, 1215 bp, Zea Mays
atgaaggaacagcttccagtgcctcttgtaccgatcatcggcaagggagtgctagaggaggaggttatggtgagttttgtcacgactaatggtgagcccacgactacgaccacgtcaaagctggtctggtggaacctcgtggatcagatgacgatgacgctgacatcctgcacctctgctgcgatgctgccgaccaggacacgggcatctccgtcgcgcgcgctctacaagtctggatccatcatcgtgctcggcaagactaacttccttaggccaggcatgcctccttgcttgactcatgatgaaaaccaagacgtaatatgccacaaacctaatagagtaaacatgttgttcactagagaaaattttaatcgctttcatctggtgttcttattattggatcccataaccatatggacagccacaaagaaaagtggcctgattagctacaagaagatcttgttccatggactcgatctctggactgcactatcgttgcctcagcccctaggtcgtgctgccctctggcctcctcatcgtacaattcaccaacatctccaatgtttcagaaaaatagtttctccaatgtgggcaatgacattgcttagcttgtatgttagagttcatgtcaccatattaggtagccatctctacttggattttgcccagtgtacaaatggtgcacacttacaagtagaatctgacacctttaatggaaatggacacaagaccttggttgcaatggatgattatcttgtcactgacaaaatcactgcattcatagtgcaaatgcaacatgcagcaactgaagtccttaaagaattcagcacacattcagtacattttgaactatgttccttgccattatattatgtctctcaagttattgatgttcttggtgaaatgaacatgaccacatactcgtatgatattttctggcgggtaacgggttacccgatatccgcggatatcctgcggatacgggcatgggtcgaaaattttacctgcaagctctcgcgggcacggataagcactagaggcgcggatatgttggcgggcgggatggctggttccgcctacaaccgcgtggactacttctcgcccgacatcatctcccagctcctcgcattcgccaacaagttctgctatgagggcttgaatccaacctacgacaaccgggtcacaaccatggtgctggctctcgacgacgcctga

SEQ ID NO: 154689 - DNA, 515 bp, Zea Mays
atgtcggtgaacaacctctttgtaactgtctttgcaggcgaagaccttgtcctagaacgaaaagtaccattccacaggctcacatgggaacaagctggtcttgttgttggaaaaggtttgatagacaatgttttgagtgactacttgtgggcgaaagcgatccttctcacaacaaccacggtcgctacagctagcctcacaatccaagttctgattgctgccattgtggacacgctcaccggtcatgctcctcatctactgaactatgtcggagccgctgtcgtcctagttggtttcgctggaatcaacataccagctggagagtctccacaggatgttcagcaggagcaggaaactccgattgttagcatggtcgatgacgacccggttcatttgcccagcagtaccaatgctactgatgttgtctcagaccctagggccgtgtgatttatcaacaatgtatagagctaattatcaattttggcctctctcagtgtttctacgtttttagtaag

SEQ ID NO: 154690 - DNA, 2197 bp, Zea Mays
gctcaagtcaattcataaactcacaatggcggcaacggcataccccactgtggtgctcatcccactatgcgtcccaggccacctcgcgtccatgatcgaagccggcaagcggctgctcggcagaagccgctgccccatgtccctcaccgtgctcatcacgcagatgaccatgtccgccaacctgatgtccgacgtcgacgacatcatgcgacgggaagccgactccggcctggacatccgcttcgtccacctccccgccgtggagctccccaccgtccaccacggcctcgaggacttcatgatgcgcttcatacagctccacgcgacgcacgtcaaggaggccgtctccggcatgtcgtccccggtcgccgcggtcgtggtggactacttctgcaccaccctgttcgacgtcgcgcgcgagctcgcgctgccggcgtacgcctacatgccgtccggcgcgtcgatggtcgcgctcatgctgcggttaccggcgctggacggggaggtgtccggggacttcgaggcgatggaaggaacggtcgatctgcccgggatgccgccggtgccggctcgtctcatgccgtctccgctgatgaggaaggacccgaacttcgcgtggctggtgtaccacggcaagcgcttcatggaggccgacggggtcatcgtgaacacggtggccgagctggagccgtccatcctcgcggccatcgccgacggcctctgcgtgccaagacgccgcgctccggccgtctacccgatcggcccggtcctgcctctcaagccgccgtccgcgcccggcgacggcgagcaggtagtagcacagcggcacgagtgcgtgaggtggctcgacgcgcagcccccagcgtccgtcgtgctgctctgctttgggagcatgggcggcagcttcccgtcgccccaggtccgcgagatcgccgacggcctcgagcgcagcgggcaccgcttcctgtgggtgctccgtggcccgccaccgccggacggttccaagtacccgacggacgccaacgtccacgagctgctcccggaagggttcctggagaggacgaagggccgaggcctcgtgtggcccacgtgggcgccgcagaaggacatcctcgccaaccccgccgtcggcggcttcgtcacccactgcggctggaactccatcctcgagagcctgtggcacggcgtgccgatggtgccctggccgcagttcgcggagcagcacctgaacgcgttcgagctcgtggccgtcatgggcgtcgccgtcgccatgcaggtggacaggaagcgcggcaacttcgtcgaggcggcggagctggagcgcgcggtccggtgcctgatgggcgggtcggaggagaaggggaggaaggcgcgggagaaggccacggaggcgaaggccctgagccggaacggcgtggccagcggcgggtcgtcggacgtgtcggtgcagaaactggcgcgagagattttgcacaagcacgacgacaaggggtgtgccaccgcaagcggggagagcatgggcagcgtcgtcgttcccgcatctccggccagaataatatgatcccccgaacacggagaaatcgccgtcgtccacgaataaatcggaggccgccatgcgatccgtctggcactgctcacgttgtttggcattgttcacaatcgccgtgtgcactgtagtttcttatccgcagtaactttaccattcgaaataatgtagtatagcacgcgctgcttcttcctaagtccgtgtagcgtagcccgcgtgttcgagctagtttgtgttaagttgaatgagttaatggatgctagttgtagtcttgtagtcttttagtgaactagagagtactgtgcgtgccggagatgatgaggtgtcgcaaattgagtagtacagaaattctttcttctgggctccttttggacaaagctagcttccttttctttactaggaaaaggaggcgcgcttcgcggcgccctacttccatatacattatatataaacacagtgtagaaacacaaacacattgtagaaacacaaacatattgtaggatacaatatgacaatataatacatatggcgcgggcgcaggttccacaactgtctctaaaagacagcgtacatgcagttgcgaaacagtgttcagtacaacagtacataactctaacagtttacagctccatagactatacatgtacggtg

SEQ ID NO: 154691 - DNA, 1329 bp, Zea Mays
agaaagacaatgtctgaaaaaccaggtgtgttaggattcataagaaaatatatatagagtaatctgacttactacgcctagcaatctgccatctcttcgaacttcaaaagttggaataccccgggccctcctcgttcggtgcagaaaagcaacgaacacctgcgcgcgagaaacccgcccccgtcgccgtcgtcggcctccagccgccgcgggcgatgggttgcttgttacccgatcaggcgttcgtgcggctgcggaaccgcacgtacggcatgtacctctacgcccacgaggacggcgcggccgtcgtcctgaagccgcaccgcgcctgcctgcaaacggtgtggcagttgcaccggatcctgcgcgccgaccgcaacctcaactacatcctcttccgcagcgccgcctacggccggtacctcaccctctcgcgcgagacgtcgccgatctaccccggtcatagtcaccaagtgaaccacacgttccagggcgtctacgagaccccgatgcaggacgacgtcctctgggtgattgcctctgcggacaacctccacgccgtcatattccacgccacttaccgtgtcctccgctccagcccctcgaacatgctcctcttcggtcacgccttcgtcgtcggcgacatctatcacccggtcaattacggcaccactatacattggacggttgaggaaattcccgtgagaccagaaccaccagtcattcacctcccaactgactgtccatttgtcacttctggatatctggcgcgggggatcatatacatgcgggcagatgatcacgggaacgtcaacccacgctccaggggatgctggttattctacggcaactgcttgttgcaactgagagccgacctagcgaagctgctcaaggaaccggccgactgcatcacgctatgcgtgcgggccggctcccaagggcggctgacccctttggtcatcgatctgccttccaacgatagtgacatggagatcattgtcctcaccaccatgtcaccggcggttttggcattgcgtcacccagatgttgatgcatggtagaagaatacaaaagcaggatttctcaacaccacggttcgagtactacaaatgagtgaagcactatgtggggtgaacgattctgcacagtttcattgtttgtaattgccaacttcatatatgtagatgataacaagaacacgttcccttctgaaagaaacgaagtaaatgttggtagtttactctgtatcttgttccctggatgtggaggaatggattctttcatttacgtgatgaaataaaatcccaaatctgaatgacttttttactt

SEQ ID NO: 154692 - DNA, 812 bp, Zea Mays
agaaagacaatgtctgaaaaaccaggtgtgttaggattcataagaaaatatatatagagtaatctgacttactacgcctagcaatctgccatctcttcgaacttcaaaagttggaataccccgggccctcctcgttcggtgcagaaaagcaacgaacacctgcgcgcgagaaacccgcccccgtcgccgtcgtcggcctccagccgccgcgggcgatgggttgcttgttacccgatcaggcgttcgtgcggctgcggaaccgcacgtacggcatgtacctctacgcccacgaggacggcgcggccgtcgtcctgaagccgcaccgcgcctgcctgcaaacggtgtggcagttgcaccggatcctgcgcgccgaccgcaacctcaactacatcctcttccgcagcgccgcctacggccggtacctcaccctctcgcgcgagacgtcgccgatctaccccggtcatagtcaccaagtgaaccacacgttccagggcgtctacgagaccccgatgcaggacgacgtcctctgggtgattgcctctgcggacaacctccacgccgtcatattccacgccacttaccgtgtcctccgctccagcccctcgaacatgctcctcttcggtcacgccttcgtcgtcggcgacatctatcacccggtcaattacggcaccactatacattggacggttgaggaaattcccgtgagaccagaaccaccagtcattcacctcccaactgacatgatcacgggaacgtcaacccacgctccaggggatgctggttattctacggcaactgcttgttgcaactga

SEQ ID NO: 154693 - DNA, 1059 bp, Zea Mays
acccgagggatatctgtccccacacttccctttacatatttagggctaccgatggggacgacaaagccaagggttgagcactatggacccattttgagcaagactgaaaggaagttgacctccatctcttctatgttgtcacatgcagggagacttcagcttgtcaactctgtcctcttgtctctgctaacatacgtcatgtgcaccttacaagttctagcagcggtcttggagtacattgacacagccagacgccactgtttgtggcgtaattctgatagcaatgcaaaatctaagcctctggtgacttggaataaatgcacacgaccgaagaaaaaaggtggtctaggggtcatcaacctaagaagccagaactcgtatctccgaatgaaatttcttgacaagctctacaacaggaaacaaatcccttgggttaacctggtttggaatacctactactcttccggcaagacccctcatgcatccaagttcatgggctcgttttggtggagagatgtccttaaactttgtgatatcttcagaggaatatccagctgtgaggttggagatggtaaaacagttctattttggcatgatttatggaatgacaacatccgcagaaacaagtatccaaggcttttcaccttcgccaaaaatcaaagcatttcagttgcttcctttttgactcaggagaacttgacagacagtttccacttaccccttactgagcaagcaaacaccgagctgcaatggctcctggatgaagtgcagcaaattcgagaatcagtgattgaaccaaaagagaaagactcttggagttatatttgggggaatagcacctactcgtcagctaaactttaccactacactttcaaaaatgtgaatcctccaaaaccctttctctggatctaggagtccagatgttcaaacaagcttaaagtcttcacctggatgctgttgatggacaggctgaacaccagaaacatcctaaagagaaagaacttcaaggttcaaggcgacaactatagatgtgttctttgtcaacttcaaagagaagaa

SEQ ID NO: 154694 - DNA, 220 bp, Zea Mays
gtttaacaacattgcacattgcaagacttgacagttcaaatttggtggtcgcaaaagtgtggagacttgaattcatataaagttaggcttaacattagtgcaaacagttgtattttagtttagatttagagtacacttatgtatgcgttatttgacaatgtttatttatgatatattgaatggtacttatttatattatattaattataatgttgttcaa

SEQ ID NO: 154695 - DNA, 238 bp, Zea Mays
gaaaactggcaagagaattgcctgttatattaaaaagaaggtgagagccagcaagagctaaaatatacaagtacatcacactagggaatgattatagatgtccaataagcacgaggcccgcgaacccggcacgaagcccgctgtttgggcccggtccgagcccggcacggcccggttctatgcgggcccgggccggcccgacacgaataagcggaccgggctcggacaggaaactagg

SEQ ID NO: 154696 - DNA, 434 bp, Zea Mays
gcgctccccgcggatgcggcgggcgagctggatgtccttgggcatgatggtgacgcgcttggcgtggatggcgcagaggttggtgtcctcgaacaggccgacgaggtaagcctcggcggcctcctgcagcgcggcgacggcggaggactggaagcggaggtcggtcttgaagtcctgcgcgatctcgcggaccaggcgctggaagggcagcttgcggatgagcagctccgtgctcttctggtacttgcggatctcgcgcagcgccacggtgcccgggcggaagcggtgcggcttcttcacgccgccggtcgcaggggccgacttgcgcgccgccttggtcgccagctgcttcctcggggccttgccgcccgtggacttgcgcgccgtctgcttcgtgcgagccatcgttgcggggatttaggctggggacgaag

SEQ ID NO: 154697 - DNA, 108 bp, Zea Mays
gtcaaattatgcattacaaattccaattgagaagtatacgatttatatactgataatgattatgataggattacttgaaaagagaagtctcataacctagtagaagag

SEQ ID NO: 154698 - DNA, 1307 bp, Zea Mays
tggcggcttcctgccgccaccgccgccgccgtcacacgccgccgcagagctagctagctaccgacgaagacaaggcgtcaatggccaaggcgcctctgctgcctctgtcgctgctcgtgcacgtcgtcctcgccgcctcctttccggccccgtgcacggcgcagggtcgcaccgaaaacatctcggccgtcgaggccgcggtccgcgcccgcgcgtccgagctgctccgcgacaccaccaccaacgacacgacgcagcccgtcgacctgctgcccctcccgggcaacctctccggcgcgggcgtccgggcctgggcgctgcgcgtgagcagcaacgcgctctgggccgacggcgtcaacgccgccggtttcgtcgtcccgccgcgcgtcgtgccggccccgttcgcgcgctgcctcaccatcgtcttcgagcgcttcaccggcggctcggcggccgcgttcgccgcgccgcgcctctacgcgctggccgcgcccgtggccggctttttcgcgtacgacgcggcggcggggcccgacgcccgggtctcgctccgggcgctcggcgcgccggtgcgcgtcgagttcgatgacgagctgtcggcggcggctctggacaaggggttcgacgcggccgccgcgctgtgcgtgacgttcgcggccagcggggaggtcgtggccacgtacgccgtcacgtcgggctccgcgtccacgtgcgcggtcaccggcacgggccacttcggtatagtggtgcggctgcccgagacgccgccgccagcctcagccgggtggtgggcgtggacggtgggtgtcggcgccggtggggtgctgggagccagcgtcttggcgctctcggtggccggcgcgatcagctggagcaggaggcggcgatgggaggagatggagcggcgggcaatggccggggaggaactggggaggatgacggtgcgcgggagcaggatgccatcggcgaaggtggtaaggacgcgccccgagttggaggagcccagcacgccgccgtagcccgtagcggcaggccagttcctctccgagtaccaccagccgctggcgctgaggattctaacgtttccctcgttgttttgccacacatggggtggcccaatcaactaactttcttgcagttttcagcgaaaaatcgtctgcggcgcaagagaagcgtacaactcaatttgcatgatccggattacagatgcagtcgaaatagatatttattcttttgggtcaactttataggattgttattgtacaaaatgcatttttcatagtacatcggaatacttcgttcacttc

SEQ ID NO: 154699 - DNA, 1678 bp, Zea Mays
cgggcatcgggctaaacgggtacgggttcgggttttttgggtaacgggcttcgggctcgggttttatgcccagtcctagtctgcagccagtagcacgagcaccggagcacgagattgttttctccaatggcggagccgcggagcagtggagcaagaccgagcggccggccaacgcccaatgggccaagcaggaaggagaggcaggagccagagacggaggccaccgcggccgcggacggacaagcaggcggtcggccggccaggtgaggagcgtgctgcggcggctgtgctgcgcgtgcctgttgttggactgaatacctaggttttgctctttactgggccgatttaaggtatggcgcgggccatacttggccataacgggccctccgcccctgtccctccctcctccagtcctccggatcaggccgtcaacgaacgaggacagcagtcagcagcactctcacatccaacggcccagatggcgagcaaacacaaacccaacgaatcaaattcgactacttgggccgtgttgggcaataaaagcccaacttatcaaaccagagcgagcccaccaagcagccgccttcttcctttgcggaggcggaaacccgaaaacccttcctcttccgccgacctctcgacagcattagacgcaggcgccgccgactgccgtggagagcgcgaggtagctacgggtgctagggtttggctcgagatggggaaggcaaagagcaagggccctaaattcgcggcggtgaagaagattatcaccaagaaaaccatcaataagtacaaggaggatgtgctgaaccacaagaagaaggacgcggacaaggagaaactcggccggaatgtgccgcaggtttcgtcggcgttgttcttcagctacaacacagcattggggccgccgtatcgggtgattgtggataccaacttcatcaatttctcgatacagaataagctggatttggagaagggaatgatggattgcctttatgcaaaatgtaccccatgtatcacggactgtgttatggctgagcttgaaaagctggggcagaagtatcgtgtggccttgagaattgccaaggaccctaggttccaaagattagcatgcacacacaagggaacctatgctgatgactgcattgtggagagggtcactcaggtaaaagctctctcttcttgaacactctttgtttgtttggagcatgagtactgggagtattctattaagtgctaactctatagcgagttcgtaagatagctcctgctagggaacttgtgacttacacttatcactagtaaactgcgacattgggcacaaaagtgaattaattgtgtatataatgtacattcctagtttcttttcaaatgttaatttagagatatatgcaagttcttgaagcattggctgttcaaatttcaaactttatgcttagccaacatttgagaggtgtctgattgctttagaatttacttttgcccaatctttgagaggtgtggctgaatgctatgttttccgagattagagattttactatatctgttcccaaggtgaaccaaaaatagcacttgtgttttctccgctgaatccttttcccatgcttgtctaaaggattgtgtctgtatgtagtatccaatttgttcctagttaatcaactgggacttgcatgtgagt

SEQ ID NO: 154700 - DNA, 645 bp, Zea Mays
atggcgcgctggcggttgcaattgtctcagtgtggtggatttctaagagtggttatcaccatcactcttgttactgtcctggtgatagtgaaaaagaagcaaaatggaatgctactgttccgaggccctgcaaatggtattatgccaaagaaaggtggcggcctggcgggcgaacccgcgagcgcgctgcgggtggcgggcgacggggcgagccacgagcgcctgggcggctggcggtggcggcctggcgatggcgggccgcgggtgatcgcgctggagaggaggcaggactgcaggaccaggacgcaggagccaggaggtgccgaggagggtagaagaaagcagccggcagggagcggcgctgcggcggctggagctgaggctggacgcaggacggctatcgctaggtcgcgtcgcgcgaggatgggcctctactgggccgtgactgccgacgaccggggttgcagcccaggcagccccgggtggagatccgcccctgctacctactgcctgctggtgcgcgagtggaggtggagcagtgggactgggcgactggccggctgctccggtgctgcctgctggtgcccgtgcgccgtgccgtggtgccgcctgggactggccgactgggagaggacagaggagtga

SEQ ID NO: 154701 - DNA, 286 bp, Zea Mays
cattggccctgggcccacatgtcattggctcagggaggtcttcttcttcctcggtttctcacgtgaacagcaggaggctgctgctggttgtgtccctggccgtgtcgatgccagagcaaggaggagaggggggatcccacggcgaggtactggagcgtggggagaaaggagctcccgccatggggacgacgcctgctcgctgctgggattcgaggaaaccaaggaaccggtctagaggggagcttgcaatggcgccatgcgaggagccgcctgatagaaatggagc

SEQ ID NO: 154702 - DNA, 352 bp, Zea Mays
ttcatgccgtaccgacgcaatggagatgcataatagtttcctgattctggaggcgagcgaaaggatgattttaggacgatcttctcatggtggctggatactggacaatcagtgtctctgttactttgttgccctagccgtacaatcgtcagctccgtgcataatctctactacttacttcttaagaatagagtgtaggcgtccacagtgggtttttatgtttctcatttcactctctgcattttcagttacaactacactgcatatgatggcagatttgttcatatattactccagctgacattttcactatcgcaacatctttactactatttgttttttgcatataaat

SEQ ID NO: 154703 - DNA, 105 bp, Zea Mays
tttttatcctattttattagataattcttatgaacattaggttgtctcaactagcttctgtgcactatttgtcctgcattttccccttgccttgcttttctgaac

SEQ ID NO: 154704 - DNA, 306 bp, Zea Mays
cagatcttagtgccaacgtcttctgtgaaaggaagcaacatatcaattggaggttctcttcagcttcttggtttctgcacctttgaggcatgtgttggcatattctggccgtcaatcatgaagatgagatctcagtacattcctgaggaagcgagaagcacaatcatgaacttcttccgcataccactcaacttatttgtttgtgtggtgctttacatcgtgaatgcattccctatcactgtcatgtttgggatgtgttctatcttcctcttcatggcagccatcttgcagagacggttgatggtt

SEQ ID NO: 154705 - DNA, 122 bp, Zea Mays
gtttcctgccaaattcccttcccattttccatcaccacttgcaaaggagactaatattcattcttctcaaatctttgacccctaaaccccctttctctttgggtttattaatcttgatccac

SEQ ID NO: 154706 - DNA, 1780 bp, Zea Mays
cccaaagccacccccacgtgagggaggtgagggcggtaggttctgccctaccggcggccccgcgcagcctgaccgcgagtactctgggtcgacgaactgaaacggcggggtgaaatctgatctgcagctcctgaaaacttgccacgccacttcgaagtatctgaaaacggtcataagctttggaggagtcacaaatgaccataaagatgaagctaaaaagcacggcctgtctattttctcttgggacgaattcctggtcatgggtggctctcataattttgatctgcctgaaaagaagagatctgacatctgtacaataatgtacacaagtggcacaacaggagaccctaaaggagttatgttatcaaatgaaagccttcttgtaaatattgcaggccctgattctgtacttcagtatcttggtgaagcttttgatcaagacgatgtctatttgtcatatcttccactagcccatgtctttgataggatgtttgaggaagtgttcatttaccatgggtcaaaaataggattttggcgtggggatgtcaaacttttggttgatgacattgcagcactaaaaccaacagtattttgtgctgttccacgtgtgctagacaggatatattcaggtcttacaactaggatatcttctggtggtatgctgaaaaaaactttattcaacattgcttataagatgaaactgggcaacatgaggaaaggaattaaacatgagaaggcagccccattctttgacaaattagttttcagcaaggtgaaagaaaggcttggtgggaaattaagagttattgtatctggaggtgctcctctagctgtaccagtagaagaatttttaagggttgtgacatgtgcttatgttgttcaaggctatggactgacggaaacttgtgcgggatctatagtttcgataccaaatgaacactccatgcttgggactgttggtccacctgtccaacatatagacgtacgtctcgagtcagttccagagatgggttatgatgctttgtctagtgtcccgcgtggagagatatgcataaggggaagtgttctgttctctggatactacaaaagagaggaccttgagcaggaagtcatgattgatggctggtttcacactggagatattggcgagtggcagccagatggatccttaaaagtgattgatagaaagaagaatattttcaagctttcgcagggggaatacgttgcagtggaaaatctagagaatgtgtatggtgttcttcaagatatagattcgatatgggtatacgggaacagcttcgaatcttctctcgtcgccgtcgccaacccgaaccagcaagctctcgagcgctgggcggaacagaacggcgtcaccggaagcttcgctgagctgtgcgagcatccaagggccagagaacatattctcgcagagctcaccaagatcgccaaggacaagaagctgaaaggctttgaggccataaaggctgtccatctcgaccctctgccgtttgacatcgagcgcgacctcatcaccccgacgtacaagaagaaacggccgcagatgctcaaacactaccagggagtaatcgacgcgctctacaagggcatgaagtgagacggcacgtttgcagagtcgcaaggggtactgttgtgaattgtgatgcacatatttgtctatatgttgtttcagtatctgtggtgtgtggagtcactcggaaggttgtgtattgttgtattgagataaggggaatataaataaaataaaaattagtttgggtac

SEQ ID NO: 154707 - DNA, 2247 bp, Zea Mays
aggggagggactgggaggcatcgtcgcaagcaaagcaaacctctcggggacagagaggctgtacgctgtgcaccttcttctgtgtctcgtctccgacgtactcctctgtctcgtcggagaagaagagagaagatgaagcacctggtggaggtggaggcggcgacggcgaccgcggggccggcgtaccggaacgcgcgggcgaaggacggcctcctgcaggccccggcggggctccacagctgctgggacatcttccgcgcgtccgtggagaagtaccccgacaaccagatgctgggtcgccggagagtcgtcgacggcaaggcgggcgagtacacctggtggacttacaaggaagtctacgacgtcgtgatgaagctcgctgcatccatggacaagtccgggatcaaacagggtgaaagctgcggcatatacggcgcgaactgccccgaatggattgtcagcatggaggcctgcaacgcgcttgggatctgctgcgtccccctctacgattctctcggtgctggggcggtggagttcatcatttgccatgccgaaatacagatcgcgttcgtggaggaaaagaagatcacagagctcctgaaaacttgccacgccacttcgaagtatctgaaaacggtcataagctttggaggagtcacaaatgaccataaagatgaagctaaaaagcacggcctgtctattttctcttgggacgaattcctggtcatgggtggctctcataattttgatctgcctgaaaagaagagatctgacatctgtacaataatgtacacaagtggcacaacaggagaccctaaaggagttatgttatcaaatgaaagccttcttgtaaatattgcaggccctgattctgtacttcagtatcttggtgaagcttttgatcaagacgatgtctatttgtcatatcttccactagcccatgtctttgataggatgtttgaggaagtgttcatttaccatgggtcaaaaataggattttggcgtggggatgtcaaacttttggttgatgacattgcagcactaaaaccaacagtattttgtgctgttccacgtgtgctagacaggatatattcaggtcttacaactaggatatcttctggtggtatgctgaaaaaaactttattcaacattgcttataagatgaaactgggcaacatgaggaaaggaattaaacatgagaaggcagccccattctttgacaaattagttttcagcaaggtgaaagaaaggcttggtgggaaattaagagttattgtatctggaggtgctcctctagctgtaccagtagaagaatttttaagggttgtgacatgtgcttatgttgttcaaggctatggactgacggaaacttgtgcgggatctatagtttcgataccaaatgaacactccatgcttgggactgttggtccacctgtccaacatatagacgtacgtctcgagtcagttccagagatgggttatgatgctttgtctagtgtcccgcgtggagagatatgcataaggggaagtgttctgttctctggatactacaaaagagaggaccttgagcaggaagtcatgattgatggctggtttcacactggagatattggcgagtggcagccagatggatccttaaaagtgattgatagaaagaagaatattttcaagctttcgcagggggaatacgttgcagtggaaaatctagagaatgtgtatggtgttcttcaagatatagattcgatatgggtatacgggaacagcttcgaatcttctctcgtcgccgtcgccaacccgaaccagcaagctctcgagcgctgggcggaacagaacggcgtcaccggaagcttcgctgagctgtgcgagcatccaagggccagagaacatattctcgcagagctcaccaagatcgccaaggacaagaagctgaaaggctttgaggccataaaggctgtccatctcgaccctctgccgtttgacatcgagcgcgacctcatcaccccgacgtacaagaagaaacggccgcagatgctcaaacactaccagggagtaatcgacgcgctctacaagggcatgaagtgagacggcacgtttgcagagtcgcaaggggtactgttgtgaattgtgatgcacatatttgtctatatgttgtttcagtatctgtggtgtgtggagtcactcggaaggttgtgtattgttgtattgagataaggggaatataaataaaataaaaattagtttgggtac

SEQ ID NO: 154708 - DNA, 603 bp, Zea Mays
ggacagcgaacgcgaccaaaccaagccatggcagccaaccccaaccactgcctccgccgcctcgcctcagctctctcccacggtccccggcctccgactcctcccgcgtccctcctcttcccccgcctcgcgctctccagctccggcccctccacgggcccgacgccgccgccgccggatgccgtaaggaagggggagggagaggaagcggcggaagccagggccgccgaagccgaagccgaagcggggaaggaggaggagcatgaggacgacggcggcgcgcacgtgagcaaggccaccggcgaggtcggcggcccgcgggggcccgagcccacgaggtacggtgactgggagcgcgccggccgctgctccgatttctgaaccgccgctggccgcgaggtgaggccgtcagcgtcagcacggaacctgtggatgtggttccgtatcgtactgttggatttgtctgtcgtgtgctagtagtgtgcctgttgtcacctgtgcaaagggcggcgttaaatttgcgttttgcttcgtcttctggggaataaacagagttgacagtactcggctcaaaaagttcagatcgactcagttgttgttgtt

SEQ ID NO: 154709 - DNA, 2586 bp, Zea Mays
gctaggcagacgggcgcgacgcaaaaagctttgttctcagcggaagggcctcagcctcacgggggcgaggccgcgaggcgaggctataaaacgctgccccacccaagccaaccgcctcgtcgttccatccagctctcccagcgcgctgctcgactcgactcgacttcctctgcaacgcgtgtccggtgtaggctgagagagtgagtgagaggcgagatgaggagcgggcggctggcggtggcggtggcggtggctctggcgtgggcgttcgcggcgtcggcggcggcggcggcgcagaagtacaatgccatcttcaacttcggcgactccatcaccgacaccgggaacctctgcaccaacgggaggccgtcgcagatcaccttcacgcagccgccctacggcgagacctacttcggcacgccgacgtgccgctgcagcgacggccgcgtcatcccggacttcctctgctccaggttcggcctgccgttcctgccgccgtccaagtccacgacggccgacttcaagaagggcgctaacatggccatcaccggcgccacggccatggacgcgcccttcttccgctcgctcggcctctccgacaagatctggaacaacgggcccatcagcttccagctgcagtggttccagcaggtcacctccgccgtgtgcgggcaggcctctgttccctcactgacgaccatcaaccatcatcatcacccgcacgcagactgcaagagctacctggccaactcgctgttcgtgttcggcgagttcgggggcaacgactacaacgccatgctgttcggcaactacaacgcggaccaggccagcacgtacacgccgcagatcgtgagcgccatcgcggccggcgtggagaagctgctggccatgggcgccacggacgtggtggtgccgggggtgctccccatcggctgcttccccatctacctcaccgtctacggcacctccaacagcgccgactacgacgcgctcggctgcctcaagaagttcaacgacctctccaccaaccacaacgcccagttgcaggcccagatctccgccctccaggccaagtacaagtcggcgcgcatcatgtacgccgacttctactccgccgtctacgacatggtcaagaaccccggcagctacgggttcagctcggtgttccaggcgtgctgcggctcggggggcggcaagtacaactaccagaacagcgcgcggtgcggcatgtcgggcgcgtccgcgtgctccagcccggcgtcgcacctcagctgggacggcatccacctcaccgaggccgcctacaagcagatcaccgacggctggctcaacgggccctactgccgccccgccatcctccacagctaagctaagcgaggggagggcgattaattttttattgttgccatgttatttatacctgtgtttacgttgccgggaaaaaagtgtcccggcagctgcatgcatgtgttgcctcttgtaacttgttatactggtggtcttcatttacaaatcaaatggtatagatttttcatggaaccaaggcatgtggtcggggctttatagagaacttttgcagcaatcactctccaaggtagcctgtctgctgcgacttattcggaaacggcttctactttttctaccgtattctgtctttataaattgcaattaaattgcaactgcaactgagcgctagtccaaatatctgaacaaagcgctatccgtatcgcccgtcaggagggcccgtgatagggtctttgcgcttggctccaagcctccaacgcaccatcaccaagtccttgcagaagatatatcataagagccctccaagcatctgtttctttgcatccatatcgccgctacaccatcacaacaaacctttcggtgtccggacagcgaaggctggttgaccggtgaacatgagcactgtttcaaacagatgaaattaaatgcagcagagcaaaataacgaccaagttgctggttccaagtagaatggtgagaaagcggctgctagagtgatcaccctcaaggctcagctttgctcacttagctatggatggatcaggcgaagcagacggctcagattttactccaaaaaagagaacctcagggaatatccctaattccagccgatcacagctaggtgtatgcattgtctatcaatcgccgatgcatccattccttctagtttctatacaacaaaattccttttttgctacggtacaggatgaacgttccaaacgtcgatcgcggctccactgcaaaaaaaaatgcaatgagtggctttgctacagtgctgccttgagcagcgctgccacattgattgcacctgataaatgaatgaatcaaacgaatactccaaacgcatctactgagtgagggcggaggtcaactatcggatccgttagtttgtgttccaaccgagaaatcatcagtcctcggactcggacacctcggctgcaacggttggaccacctgtgcattcttttctttgatgaagctctagcatttttacctctgggtggcatagccctgcgtcacatatttggacattagcgaagctccagcttggtctttagtgatt

SEQ ID NO: 154710 - DNA, 1152 bp, Zea Mays
atgaggagcgggcggctggcggtggcggtggcggtggctctggcgtgggcgttcgcggcgtcggcggcggcggcggcgcagaagtacaatgccatcttcaacttcggcgactccatcaccgacaccgggaacctctgcaccaacgggaggccgtcgcagatcaccttcacgcagccgccctacggcgagacctacttcggcacgccgacgtgccgctgcagcgacggccgcgtcatcccggacttcctctgctccaggttcggcctgccgttcctgccgccgtccaagtccacgacggccgacttcaagaagggcgctaacatggccatcaccggcgccacggccatggacgcgcccttcttccgctcgctcggcctctccgacaagatctggaacaacgggcccatcagcttccagctgcagtggttccagcaggtcacctccgccgtgtgcgggcaggcctctgttccctcactgacgaccatcaaccatcatcatcacccgcacgcagactgcaagagctacctggccaactcgctgttcgtgttcggcgagttcgggggcaacgactacaacgccatgctgttcggcaactacaacgcggaccaggccagcacgtacacgccgcagatcgtgagcgccatcgcggccggcgtggagaagctgctggccatgggcgccacggacgtggtggtgccgggggtgctccccatcggctgcttccccatctacctcaccgtctacggcacctccaacagcgccgactacgacgcgctcggctgcctcaagaagttcaacgacctctccaccaaccacaacgcccagttgcaggcccagatctccgccctccaggccaagtacaagtcggcgcgcatcatgtacgccgacttctactccgccgtctacgacatggtcaagaaccccggcagctacgggttcagctcggtgttccaggcgtgctgcggctcggggggcggcaagtacaactaccagaacagcgcgcggtgcggcatgtcgggcgcgtccgcgtgctccagcccggcgtcgcacctcagctgggacggcatccacctcaccgaggccgcctacaagcagatcaccgacggctggctcaacgggccctactgccgccccgccatcctccacagctaa

SEQ ID NO: 154711 - DNA, 464 bp, Zea Mays
ggacaacgaagctgtgcgtgctatattgctattgcatggagggccaaccgagaagcggcggcgcttcgtggggcccgcctgcggaggccaccaggccgggcgggcggcggccgacgacgacgacgcagaaccaacagcagcagcagcagcaggtgaaggtgaagcacatcgtcacgagggaggtgagcacggaccaggccaacttcaaggacgtcgtgcaatggctcaccgggaaggactccgcggccgcgcgcgccgcggtggtggctgctggcgccgacggcacgagcagcagctggagcgccggtggtggcgcggtcgccgcccgcggggctactagtactgctactggagttgcttcgggttcagtagttgtgtttgaggacaacgtagccggagccggagccggggcgacgacggtgttcccggcggatgaggaggcggatatgaagcggtggtggtga

SEQ ID NO: 154712 - DNA, 415 bp, Zea Mays
atacagatcactcggatcgcgacacccgaaatcacgaaaaggaaaagggtggcgcacacgctgagcgccggagcgggcgccaccaagttcctcgcggccgcggcgcggttcgcttgggggcagggtccgccggaggttgcgctagtgtgggagcggcgggagctgctagggccgaggcgcccgccgcgagtggcgacgcaggtgttcgaccgcgtcctcgcgctcgacggcggcgtcgcgcggcgcgggccgtacggaaccgatgtggaacggcgcgaacagcagcgtctgctcacgagggaatgcttccacgtgagcaacgcgcgcgtggaggcgctcagagcgcggatcgctgacgaggctggcgtcaagttcacttccttcgaggttgtcgccgcgttcctttccgcgccag

SEQ ID NO: 154713 - DNA, 628 bp, Zea Mays
aaaaattatatctccaactttttctttagtgcagaatttggcccagtacagatagaagcttttatgacatggtttagtagccatctgtttggcttttcgtttgctactcatccgtcgaacatgcatttggtcccaaaaaagggtcaagctcctatcactgttcatcatttggaatctttgagacctacaagtttgtagcggctcatttatctcttcaaaatcctaccagcacatggtagtaaaatatagatgataatttagttgtttgtcaggactcaggatgaagcttgctaacgaacaaaactagatatctccgccactgccactgatggcgagaccgccccggtgcatcttcaggggtgagagggcaggggaaaagcagcggcagcaacactagtcaagggccagcacactgagatccaagcattccactatcgagcagcggagtaggacaaagataaatgacaggcaagctcgttgagctcgaatttcatttttgaattgtactgagctgatcagaaagtaaaaaaactagccacaacatagcgaaactgagtgagccagctgcctgcatagcatgtcataattacatcatcacatgaacttgtcagttgagtttttgaaggtg

SEQ ID NO: 154714 - DNA, 1141 bp, Zea Mays
atggcagatgctatggtgtctccagccacggcgagagccttaccctctgccaatctgggtgttgatggcaatgtagatgatagaagtgtggagcaaattgtcatgaagatctctccagggacacatcatggttgtcaagaccctgtctttgccgagactgtggcagatgctatggtgtctccagccacggcgataaccttttcacatcttgatcctaatttgggtttggttgagcctattgcggctgtggcagacattcagatgtctccagctgtggtggttcccagtcttctatcttctcaatttggcgagcaggaggatttccagccaatgcagagggaagagttccttaaatttgttactcggcaaccttctaaactgcttcatgctcctccagtcatcttgaagaaggataacataatgccctctagatcggtaccacgacgcagccgcagagttgctggagtgggcgttgaattttgaagctttctggcccaagattgatggttttttggagattgtttcgttggcatggcattctgtcccagtttcgaattgtcctttttccactttgaatattaagttcaaggctactgctaaagggctcattgaatggagtgctaaaaaagttgggaatattttgtccactttggctcttgcccgagtgttgttgcatcacttggaagttgcccaagactctcgccttttgtcatcagctgagttgtggtttaaagtaaaccttaagaaacattctctggcccttgcttcccttcaaaggactattgctaggttgaggtccagaattgggtggctgcgtgagggggacgccaacactaaattgtttcatatgcattccagatttcgaaagaagaaaatttttgttacaaaactggtgtccaatggagcagtcctctctagtcatgatgacaaggccaatctggttgatgatttttatggcatgctactggggctctacagtgatagagaccatactatatccttggaaaatatggggattccaaactttgatctgccagccttggatgctccattctcaaaaaaggaagtgtgggatacaatctggcttattcccttagacaaggctcctagtccggatggtttcacggggagattttataaa

SEQ ID NO: 154715 - DNA, 1349 bp, Zea Mays
ggctgctttggtctgtttcgccaattggttggggtttggagttttgggtaggaggagcagagggtgatcgaggcgcagatcaggatgcggcagcaggaggtacaggacgatgcagagcggatgaagaacaagcggactgcaactttgggtgacgtagtagcatcagcacaggtcgattcttgcaataccgatggtgcatcaactgcagttgcaaacagtccacgaggcaacgatgttctctcgtccgaagtgcagcattctgagttgatatcgaggaattctgaagccttcaaacagatgcggggcaataattttgaggtggatcttgaagaagtaatgcttatggaggcaatttggctctctatacaagatcaagaagctttgggaaatccaggatgtgttagcactacaccgtcatcaattccttcaaggccttttgatgatggtgatatgacaacgaccgctgaagcagcttcttctggtggatttgcttgtgcagtcgcagctttagctgaacagcagcatatgcatggagagtcttctagcgcatcaccttgccaaacaataaggtttggcacccttagcagaccagacagatccactacacaggatctgagtgtagctgggagcagttcttcggactccagagttgaggaaccaccaaccagcaatacacaccgaacaatagaggctgcagagtattctaattctaatgtccagtggtccgaggtggccgaggctgggaccagtattgctgaatctgatggtacagtggaggctggtgttgacaattcatccacttcggctgggtccaacattgattctgttagtgttcctgatagcttcgaggagcagatgatgctggccatggctctctcgttggtcgatgcccgtgctagagcaggttctccggggttagcttggcggtagcatttccttgtaggcccttccactccttatactattcttttcggttgtgctgcgttttgttcctaagtgttccaattgccacgtaaaacatgggggattagatggggagcaggctcaaatttgacgaactgacagtgatacttgtgaatagtgggataaatctgtacatttgaagccagtggtttggctaattttatctcctcttctttcgattcttgaggaagaaattggattctcaggcagatttctgcctacagaagttgtgcctgatgatgttgaaacattgtgtaaatacggaaacgcactcacatttttttcatgtcccggtggtttttcctgcttgctatgtcgaacactgcatatgcatatagcggaatgacatcttataaataaagtttctaaattttccttttgtatcg

SEQ ID NO: 154716 - DNA, 1938 bp, Zea Mays
agcgacgacggcacgagcagaggggccgtcgagccgtcgaggagaaacaccccttttccctttccatttcgtctcgtcccggctcgttgccggcggatagaaatcttctactgacttctcccgtgtcgtgctctctctctgccggcggatagaaatcttctactggctcgctgcgacgcgtccggcctctcctctcctctcctcaccccccccccccccccgcgcgggagcgggtggttgcggtggcggctgaggtttagtcgagggacccggccgaccagcggtcgcgcggcggagccgagggcaaggggatggggaaccaggtcgggggccgacggcggcggcggccgccggtggacgagcgctacacgcgcccgcaggggctgtacccgcacccggacatcgacctcaggaagctccgccgcctcatcctcgaggccaagctcgcgccctgccaccctggcgccgacgacgcgcgcgccgacctcgacgagtgccccatctgcttcctgttctaccccagcctcaaccgctccaagtgctgcgccaagggaatttgcacggagtgcttcctccagatgaagtcgcccacctcgtgcaaaccgacgcagtgtccgtattgcaagacgctgaattacgcagtggagtaccggggcgtgaagaccaaggaggagaagggcatagagcagcttgaggagcagagggtgatcgaggcgcagatcaggatgcggcagcaggaggtacaggacgatgcagagcggatgaagaacaagcggactgcaactttgggtgacgtagtagcatcagcacaggtcgattcttgcaataccgatggtgcatcaactgcagttgcaaacagtccacgaggcaacgatgttctctcgtccgaagtgcagcattctgagttgatatcgaggaattctgaagccttcaaacagatgcggggcaataattttgaggtggatcttgaagaagtaatgcttatggaggcaatttggctctctatacaagatcaagaagctttgggaaatccaggatgtgttagcactacaccgtcatcaattccttcaaggccttttgatgatggtgatatgacaacgaccgctgaagcagcttcttctggtggatttgcttgtgcagtcgcagctttagctgaacagcagcatatgcatggagagtcttctagcgcatcaccttgccaaacaataaggtttggcacccttagcagaccagacagatccactacacaggatctgagtgtagctgggagcagttcttcggactccagagttgaggaaccaccaaccagcaatacacaccgaacaatagaggctgcagagtattctaattctaatgtccagtggtccgaggtggccgaggctgggaccagtattgctgaatctgatggtacagtggaggctggtgttgacaattcatccacttcggctgggtccaacattgattctgttagtgttcctgatagcttcgaggagcagatgatgctggccatggctctctcgttggtcgatgcccgtgctagagcaggttctccggggttagcttggcggtagcatttccttgtaggcccttccactccttatactattcttttcggttgtgctgcgttttgttcctaagtgttccaattgccacgtaaaacatgggggattagatggggagcaggctcaaatttgacgaactgacagtgatacttgtgaatagtgggataaatctgtacatttgaagccagtggtttggctaattttatctcctcttctttcgattcttgaggaagaaattggattctcaggcagatttctgcctacagaagttgtgcctgatgatgttgaaacattgtgtaaatacggaaacgcactcacatttttttcatgtcccggtggtttttcctgcttgctatgtcgaacactgcatatgcat

SEQ ID NO: 154717 - DNA, 1579 bp, Zea Mays
cggcccgcgagaggggatggcgtccacggctcgcccgctccgctcttataacagccgcttcctacgtctctcgcgcatcccttccgagcggaagcggcagcccgtcaggattcaaatctgccggaaacctgtatcttcatccagtatcaaggggaagttctgttgttgtgtgttcggtgatggatacatccaaaagcaagcaaggaccagaacatctccttgttcttgtccatggtatcatggctagccccaaagactggacatatggggaagcagtgctgaagaggcggttgggtgatgattttttcatatatgtgccggtttatgaactaaatggatgttaaaaaaagtgtatgcaaacatctttgtctacagctagttcaacgaacagctacaccaaaacctttgatgggattgatgttgctggaagaaggtcttggaagtggttaacaagatgcccagcttgagaaagatttccttcctagcgcattctctgggtggtttgtttgctagatatgttattgcaatactccactcagtctcagtggaaacaaagaatgcaggacagagtagtgcacttattgttcctacaacaagagggccagcaaaatcgagatgtgcttcaggattaggttctattgctggattgcggccaattaattttattaccttagcaaccccacaccttggggttagagggagaaatcagcttccgtttcttcaaggcctatcaatcctagaaaagcttgctgcgcctttggctcctttaattgttgggcgcaccggtgctcaactcttcctcactgatggtgatcctagcaaggcacctctcctgttacagatggcatccgactgtgatgacaaaaactacatatcagccttggcagcttttaagaaccgtgtcctgtatgccaacgtctcgtacgaccacatggtcggctggcgaacgtcttcactaaggagagagaagaatcttataaagccctcacatcgttcactggatggctataagcacattgtgaatgtggaatactgttcgcccgtgtcatcggagggcccacatttcccttccaaggctgccagagctaaagaagctgcacagcgatcgccaaaccgagaaaataccgaggagtaccaccaaatgatggaggaaggttggctggaagaaggtggacgtcaacttccattcgtcattctggccttactctgctcacaacaacatacacgtcaagaacgagtggcttcacaatgctggcgctggtgttatcgcgcacgttgcggacagcatcaagcagcaggagtcacggccatgtcttcctgccaatctatagcagtagcattcagcaatccatttgttcaaattatctgtcgctagcaaataaacccatgaccaaactctgttcgtcagcatccactgagcggcgaaatatttgggactgggacacacaataagctgtgtatcattatcggccgcctaggttttacattgtttgatgtcaattgtcaaatggcatgtgtttcctcatggaacagacgaagcattcgaagttgatataaagacaacctaaattgtcatata

SEQ ID NO: 154718 - DNA, 1682 bp, Zea Mays
cggcccgcgagaggggatggcgtccacggctcgcccgctccgctcttataacagccgcttcctacgtctctcgcgcatcccttccgagcggaagcggcagcccgtcaggattcaaatctgccggaaacctgtatcttcatccagtatcaaggggaagttctgttgttgtgtgttcggtgatggatacatccaaaagcaagcaaggaccagaacatctccttgttcttgtccatggtatcatggctagccccaaagactggacatatggggaagcagtgctgaagaggcggttgggtgatgattttttcatatatgctagttcaacgaacagctacaccaaaacctttgatgggattgatgttgctggaagaaggttagcaaatgaagtacgtcctttgaagtttgtcctagaaaaaaggtttcaaacattctccttgttggagactgatatctcctgttcctggatcctaatgaactgcttagaagctctgataattgtgcctatggaaacaggtcttggaagtggttaacaagatgcccagcttgagaaagatttccttcctagcgcattctctgggtggtttgtttgctagatatgttattgcaatactccactcagtctcagtggaaacaaagaatgcaggacagagtagtgcacttattgttcctacaacaagagggccagcaaaatcgagatgtgcttcaggattaggttctattgctggattgcggccaattaattttattaccttagcaaccccacaccttggggttagagggagaaatcagcttccgtttcttcaaggcctatcaatcctagaaaagcttgctgcgcctttggctcctttaattgttgggcgcaccggtgctcaactcttcctcactgatggtgatcctagcaaggcacctctcctgttacagatggcatccgactgtgatgacaaaaactacatatcagccttggcagcttttaagaaccgtgtcctgtatgccaacgtctcgtacgaccacatggtcggctggcgaacgtcttcactaaggagagagaagaatcttataaagccctcacatcgttcactggatggctataagcacattgtgaatgtggaatactgttcgcccgtgtcatcggagggcccacatttcccttccaaggctgccagagctaaagaagctgcacagcgatcgccaaaccgagaaaataccgaggagtaccaccaaatgatggaggaggagatgctccatggcttgcagaaggttggctggaagaaggtggacgtcaacttccattcgtcattctggccttactctgctcacaacaacatacacgtcaagaacgagtggcttcacaatgctggcgctggtgttatcgcgcacgttgcggacagcatcaagcagcaggagtcacggccatgtcttcctgccaatctatagcagtagcattcagcaatccatttgttcaaattatctgtcgctagcaaataaacccatgaccaaactctgttcgtcagcatccactgagcggcgaaatatttgggactgggacacacaataagctgtgtatcattatcggccgcctaggttttacattgtttgatgtcaattgtcaaatggcatgtgtttcctcatggaacagacgaagcattcgaagttgatataaagacaacctaaattgtcatata

SEQ ID NO: 154719 - DNA, 1787 bp, Zea Mays
cggcccgcgagaggggatggcgtccacggctcgcccgctccgctcttataacagccgcttcctacgtctctcgcgcatcccttccgagcggaagcggcagcccgtcaggttatagctcactcttgatcgcttcctggtttgctaagcgatttgcctctcgtggttcggtgacggatcggaggcgctgcgaattcgaagctggtttctctgggctaagtcgattcggacttacttgttcagtaggtgtagtgtaggcgtgtagctcgatagacgagaagaatatttggcgtcgaagtttcagctaagcaacgagatcaggaagtttcagcaaagctcctggattaaatatttggcatcatagaggattcaaatctgccggaaacctgtatcttcatccagtatcaaggggaagttctgttgttgtgtgttcggtgatggatacatccaaaagcaagcaaggaccagaacatctccttgttcttgtccatggtatcatggctagccccaaagactggacatatggggaagcagtgctgaagaggcggttgggtgatgattttttcatatatgctagttcaacgaacagctacaccaaaacctttgatgggattgatgttgctggaagaaggttagcaaatgaagtcttggaagtggttaacaagatgcccagcttgagaaagatttccttcctagcgcattctctgggtggtttgtttgctagatatgttattgcaatactccactcagtctcagtggaaacaaagaatgcaggacagagtagtgcacttattgttcctacaacaagagggccagcaaaatcgagatgtgcttcaggattaggttctattgctggattgcggccaattaattttattaccttagcaaccccacaccttggggttagagggagaaatcagcttccgtttcttcaaggcctatcaatcctagaaaagcttgctgcgcctttggctcctttaattgttgggcgcaccggtgctcaactcttcctcactgatggtgatcctagcaaggcacctctcctgttacagatggcatccgactgtgatgacaaaaactacatatcagccttggcagcttttaagaaccgtgtcctgtatgccaacgtctcgtacgaccacatggtcggctggcgaacgtcttcactaaggagagagaagaatcttataaagccctcacatcgttcactggatggctataagcacattgtgaatgtggaatactgttcgcccgtgtcatcggagggcccacatttcccttccaaggctgccagagctaaagaagctgcacagcgatcgccaaaccgagaaaataccgaggagtaccaccaaatgatggaggaaggttggctggaagaaggtggacgtcaacttccattcgtcattctggccttactctgctcacaacaacatacacgtcaagaacgagtggcttcacaatgctggcgctggtgttatcgcgcacgttgcggacagcatcaagcagcaggagtcacggccatgtcttcctgccaatctatagcagtagcattcagcaatccatttgttcaaattatctgtcgctagcaaataaacccatgaccaaactctgttcgtcagcatccactgagcggcgaaatatttgggactgggacacacaataagctgtgtatcattatcggccgcctaggttttacattgtttgatgtcaattgtcaaatggcatgtgtttcctcatggaacagacgaagcattcgaagttgatataaagacaacctaaattgtcatata

SEQ ID NO: 154720 - DNA, 2175 bp, Zea Mays
tcggccttgccattggcacagctttgggggagctgctggcgccttcgcgtgcgtgcgtgcatgcagtgcgcctttgcttttgccaagggttgccaaagctataggggggccaacccaacgtacgagaggagcgcgcgcacggccgagtcggcggaataacggcggattcaaatctgccggaaacctgtatcttcatccagtatcaaggggaagttctgttgttgtgtgttcggtgatggatacatccaaaagcaagcaaggaccagaacatctccttgttcttgtccatggtatcatggctagccccaaagactggacatatggggaagcagtgctgaagaggcggttgggtgatgattttttcatatatggtaaagcatgctagcatttgaattcttcattcactaggttcaatactagtcattatctaaccatttgttctagcttctacagtgccggtttatgaactaaatggatgttaaaaaaagtgtatgcaaacatctttgtctacagctagttcaacgaacagctacaccaaaacctttgatgggattgatgttgctggaagaaggttagcaaatgaagtacgtcctttgaagtttgtcctagaaaaaaggtttcaaacattctccttgttggagactgatatctcctgttcctggatcctaatgaactgcttagaagctctgataattgtgcctatggaaacaggtcttggaagtggttaacaagatgcccagcttgagaaagatttccttcctagcgcattctctgggtggtttgtttgctagatatgttattgcaatactccactcagtctcagtggaaacaaagaatgcaggacagagtagtgcacttattgttcctacaacaagagggccagcaaaatcgagatgtgcttcaggattaggttctattgctggattgcggccaattaattttattaccttagcaaccccacaccttggggttagagggagaaatcaggtgcatcaccaaaatgtttcggattacgtttacaaaatatactgcacattatccagcaaaggctcgattcctgggaaaacgaactctctatttgttattttgttcattcatgtagattttgaagttgcatggtatgatttttacaagcttggattatatcattgctgaagtggtcaataccaactagcatctataacttttgaggaaaaaacgacgaacttattgggacctgttcctgttagtgctgatcaatttctttgacacatgcttatatgtttttcccccgaattaccagcttccgtttcttcaaggcctatcaatcctagaaaagcttgctgcgcctttggctcctttaattgttgggcgcaccggtgctcaactcttcctcactgatggtgatcctagcaaggcacctctcctgttacagatggcatccgactgtgatgacaaaaactacatatcagccttggcagcttttaagaaccgtgtcctgtatgccaacgtctcgtacgaccacatggtcggctggcgaacgtcttcactaaggagagagaagaatcttataaagccctcacatcgttcactggatggctataagcacattgtgaatgtggaatactgttcgcccgtgtcatcggagggcccacatttcccttccaaggctgccagagctaaagaagctgcacagcgatcgccaaaccgagaaaataccgaggagtaccaccaaatgatggaggaggagatgctccatggcttgcagaaggttggctggaagaaggtggacgtcaacttccattcgtcattctggccttactctgctcacaacaacatacacgtcaagaacgagtggcttcacaatgctggcgctggtgttatcgcgcacgttgcggacagcatcaagcagcaggagtcacggccatgtcttcctgccaatctatagcagtagcattcagcaatccatttgttcaaattatctgtcgctagcaaataaacccatgaccaaactctgttcgtcagcatccactgagcggcgaaatatttgggactgggacacacaataagctgtgtatcattatcggccgcctaggttttacattgtttgatgtcaattgtcaaatggcatgtgtttcctcatggaacagacgaagcattcgaagttgatataaagacaacctaaattgtcatata

SEQ ID NO: 154721 - DNA, 2249 bp, Zea Mays
tcggccttgccattggcacagctttgggggagctgctggcgccttcgcgtgcgtgcgtgcatgcagtgcgcctttgcttttgccaagggttgccaaagctataggggggccaacccaacgtacgagaggagcgcgcgcacggccgagtcggcggaataacggcggattcaaatctgccggaaacctgtatcttcatccagtatcaaggggaagttctgttgttgtgtgttcggtgatggatacatccaaaagcaagcaaggaccagaacatctccttgttcttgtccatggtatcatggctagccccaaagactggacatatggggaagcagtgctgaagaggcggttgggtgatgattttttcatatatggtaaagcatgctagcatttgaattcttcattcactaggttcaatactagtcattatctaaccatttgttctagcttctacagtgccggtttatgaactaaatggatgttaaaaaaagtgtatgcaaacatctttgtctacagctagttcaacgaacagctacaccaaaacctttgatgggattgatgttgctggaagaaggttagcaaatgaagtacgtcctttgaagtttgtcctagaaaaaaggtttcaaacattctccttgttggagactgatatctcctgttcctggatcctaatgaactgcttagaagctctgataattgtgcctatggaaacaggtcttggaagtggttaacaagatgcccagcttgagaaagatttccttcctagcgcattctctgggtggtttgtttgctagatatgttattgcaatactccactcagtctcagtggaaacaaagaatgcaggacagagtagtgcacttattgttcctacaacaagagggccagcaaaatcgagatgtgcttcaggattaggttctattgctggattgcggccaattaattttattaccttagcaaccccacaccttggggttagagggagaaatcaggtgcatcaccaaaatgtttcggattacgtttacaaaatatactgcacattatccagcaaaggctcgattcctgggaaaacgaactctctatttgttattttgttcattcatgtagattttgaagttgcatggtatgatttttacaagcttggattatatcattgctgaagtggtcaataccaactagcatctataacttttgaggaaaaaacgacgaacttattgggacctgttcctgttagtgctgatcaatttctttgacacatgcttatatgtttttcccccgaattaccagcttccgtttcttcaaggcctatcaatcctagaaaagcttgctgcgcctttggctcctttaattgttgggcgcaccggtgctcaactcttcctcactgatggtgatcctagcaaggcacctctcctgttacagatggcatccgactgtgatgacaaaaactacatatcagccttggcagcttttaagaaccgtgtcctgtatgccaacgtctcgtacgaccacatggtcggctggcgaacgtcttcactaaggagagagaagaatcttataaagccctcacatcgttcactggatggctataagcacattgtgaatgtggaatactgttcgcccgtgtcatcggagggcccacatttcccttccaaggctgccagagctaaagaagctgcacagcgatcgccaaaccgagaaaataccgaggagtaccaccaaatgatggaggaggagatgctccatggcttgcagaaggttggctggaagaaggtggacgtcaacttccattcgtcattctggccttactctgctcacaacaacatacacgtatgtcttgttcttctggagtgatgtatttttctctctagtttgatccaaattcttctgtattaaagaagagccatccaaattcgtggcatctatgcaggtcaagaacgagtggcttcacaatgctggcgctggtgttatcgcgcacgttgcggacagcatcaagcagcaggagtcacggccatgtcttcctgccaatctatagcagtagcattcagcaatccatttgttcaaattatctgtcgctagcaaataaacccatgaccaaactctgttcgtcagcatccactgagcggcgaaatatttgggactgggacacacaataagctgtgtatcattatcggccgcctaggttttacattgtttgatgtcaattgtcaaatggcatgtgtttcctcatggaacagacgaagcattcgaagttgat

SEQ ID NO: 154722 - DNA, 104 bp, Zea Mays
gcaggatggatgaccatcgaccatcgacgatcgaaaggagccctcggcttgcgtagccgccaagacgtggtcgggactcgggataataggctgttcattttagc

SEQ ID NO: 154723 - DNA, 3232 bp, Zea Mays
gccgcgtcgcatcgcatggctgaggaagacgcggcggccgcggcgggctctcccatcctagacctgccagagcctctgctgctccacatcctgggcttcctcgacgacgcgcggtcccggcaccgcgccgcgctggcgtgccaccggctcctcgcggcggagcgggccacgcgcgccgcgctctcgctgcgcggggacccacggtcgaacgcgtttctcttcctcaggccgactttctgcttcccggcgctggagcggctcgacctctcgctggtgtcgccgtggggccacccgttcctctcctccgcggcgccgtccgccgacgccgtcgcaccgtccgtgacggcggaggaggtcgcagagcagaacgccttcatcgcggcgcgcctcgcctactgcttccccgccgtgtcctcgctcgccgtctattgccgcgaccccaccacgctcgccagcctcaccccgcactggaggtccggcctccgcagtgtcaagctcgtgcgctggcaccagcgcccgcccggcctcgacgcaggcgcggatctcgagcctctcctcgaggactgccccgcgctcaggacgctcgacctctccgagttctactgctggacggaggacatcgagccggcgcttgcagcgcacccggcagccgccgcggcgctcacggagctcgacctcggcctcgcgggcgccacggacgggttccacgccgccgagctggaggccatcgccggatcctgccccagtctccagaagctcgtggcgccctgtgtgttcaaccctcggtatattgacttcgtcagcgacgacgcgcttctcaccatcgccgccaggtgccccaagctggcgatcctgcggctccgggaacctttcgagccggcggccaccggccaacgagaggacgcggcaatcaccgtcgcagggctggtttccttcttcgctgcactaccggcgctggaggatttcacgcttgacatgcggcataatgtgcttgagacagcgccggcgatggaggcgcttgcccgcaggtgcccacggatcaagttcttgacgctggggggcttccagggcttgtgcaaggcatcttggctgcacctcgacggagttgctgtgtgcggttcgctggagtcgctatgcatcaagggctgtttggatctcactgacgccagccttgctgccataggccgtgggtgcgggaggcttgctaagtttgccatccatggctgtgatcttgtcacaccagctgggatcaggagactagcaactgctcttcggcccacaatcaaagaagtcagtatcttaaactgccggcttctggacacggcagcatgcctcactgctctaagtccgatccgtgatcgcattgagagtcttgagatcagctgtgtctggaaggaagttgaacagcctgagagtgtggccaacggcatagccggatgcaatcatgaagatgacgatctcggtggtgaagtatcatatgagtctgcttcgaagaaatgtaggtacatggaattggatgatctagtcagctgggagatgctgcgttcactctccctctggttccctgccggtgaggtactctccccactcatctctgctgggcttgatagctgccctgttctagaggagatctcaattaaagtggagggtgattgccggacatgtgcacgccctggcccattatttggcctgagtgatcttgcaggtttcccagtgctggccaagatgaagttggatctgagtgaggcagttggctatgctcttactgcaccagcaggtcaaatggatctctctctgtgggagcgattttatttgcagggtatagattcactaatgactttgtatgagctggattattggcctccccaagacaaggaagtgaaccagcgtagcctaacactgcccgccgtggggctgctccagggctgcgttggactcaggaagctcttcgtccatggcaccacgcatgagcatttcctgacctttttcttgaaggtgccaaatctgagggacatgcagttacgggaggactactatcccgcaccagagagtgatatgatgaacacagaaatgcgagccgagtcttggctccggttcgaggtgcagctgaacaacaggctaattgaggattaacggtgaatttggtgagctgtgggagcatcagatgaatacagagaggtgctgatttacttgaacaaagtggagttgatgccggggtggtgctgtgcgatggatgatcacggaagtagcaagggtagctgccgtgcttgtgtatccgacaattatcggtgatctttactagttgcttttccttttaaaaataagagtgtatgataagggagttgatgcagaattcagatatttgcatgagtttggacgataaactagaatcgagagaattttgcagggatgtttttttccctcccatttttgagctgagtccagttgaacaccgaccggattaagtggcaattaatgaatggtcctgtgcgctgtaacaatctacgtggttctgtaaaaacaaattaaaaaatgtcatttttgtggtctattttcccagtgctgccataacatagtgatgatggtcacgtccaaaaaataaaagatagtttgatcacatctaaaattgatgaatgatcattacgcaagaaatatggcagcctgatcatcaggcaagaagcacagcaaactcctgctccagaatggccagaatccttgtttcatttgacagaatgctattttttttcccttctatgcaggcatcaagaacaagctttgccccggccctttgcctcccctcactggccgcatggatatttgacgagaccgacgtgccgaacaagaccggcatccaacgcggagagaagatctcgccactaccacaagctgtctacggctgcgcccggcgccgtgctgaagatgatgccgcgcgatcgtggcaggggtttcgtctttccgaggggcaaatccgggcgattcttagtgcccctctactcttgttctgatccataaacaggtggcgcccgccgctagtgcctttcagtccagctgcagctggaggcctgacgagttaaaaggcagttgcccgcccctctggcccctctagagcagatccaatttataattcatttgatttttttatcaccgacttgtcttatttaatttattaaaaaaactaaattgtatttaaagtatattatatatatgctaaatgatatcactgttaaagttg

SEQ ID NO: 154724 - DNA, 2320 bp, Zea Mays
gccccccgacttcccattcccaccgcgcgcacccgccaaatcaaccaccccttcgtcgcccccgttccgtcccgtcccgttccggcaggcagccactcgcgaaggcgaagacgcaggcgccgagccgccgaccccacgggcccccaccccactcccgccgcgcctctccctccgcgtttccagatccccccgctcgcccgtgccgcggcattggcaccggcaccccgccgagcgcccgcaatgcgagccttctagcttcccgtagcacggacggaatcgcgagaggcatgcatcccaagcccgagggcggcgaagccaacggggccgccgcggaggcgggctccccgcggtccggcaacttccggcagcggagcatgcacgccgcccccgcggatccggaggcggcgcgccgggcgttcgatgtcgagaaccccccgccttgctccgccgccgcgggcggcgggctccggcccagcgagtccgtcaccaagctggagtcgctggagcgcgcggagcgcgccgcgctggcgcccgccgtcgtgctcaggaccgggttctacatcctggtgtggtacgcgttcagcacctgcctcaccctatataacaagacgctgctgggggacaagctcggcaagttcccggcgccgctgctgatgaacaccgtgcacttcgcgctgcaggcggggctctccaagctcataatcttcttacagtccaaggggccggaggccgccgtcgagatggggtggaaagactacttcatcagagtttccaaggagacggagtttgacttcttgggcttcatttttgtgacgcttgctgctgttatgtcgggattccgttggtccatgactcagattctactgcagaaagacacttacggcctgaagaatccaattaccttgatgagccatgttacgccagtgatggccatagccactatgatactatctctattactggacccttggagtgaatttaaaaaaaattcatatttcgataacccttggcatgtcatgcgcagttgcctacttatgcttataggaggaactttagcttttttcatggtgttaacagagtatatacttatttcagcaacaagtgccataaccgtcacaatagctggagtagtaaaagaatctgtaaccattttggttgcggtattttatttccatgatgaatttacttggttgaaaggggttggtcttttcaccattatggttggtgttagcttattcaattggtacaagtatgagaaattcaaaaggggtcatatagatgaggatgatgccaactctccttcatgtactggtgacgtcaagtacattattctagacgacttggagtatcaggatgaatttgaggaggaagatacataattttgtagtacagcgactttcaactgccacaggcttgttcatgcctgacccattgatacctgcccattgaaatattacttatggaggttttctctggaaaacatacatgaacacacctaaggctaggtgtgattatactatgctcgccaaaatctgatgcgatctgtgtgagctatgtttgtcacgatggatgttgaattctcatcttgattgaacagtcaggctaactacactgtcaagcactccatcggatcagaattcccattttgcgaagattagcagcggttacagaatgacatgcatgctatagcaggaactgctgagaatgctcgggatctgtatatttgttgttgtctttgcgttagtgcgcttgcacatattcattcttgaacctccacatttttggtgacgaggtgtactcattctctatataggcctgtttgtaaaactgaccagatgataccccacacgtgctgtttttcccttaaaacctagggagcggcatttggttttcgctgtatactgtttcggggcaccgaatatgttgtggcttgattgggaactggttataagaaaagcatgatagattgggaactgaatttctgttatgccgccaagtaaaggcacctagttcgaataattgccaaaatatctcttcggaggggaaaaaactttggttagcttttatgtttgggatttttctctgctcttgcttttcacaatcgccatgacttcagaattctaatgtttgagcgaaggaatgggacttctgggcattacgaacagtgtctaaggacccgaaagttttcctttactaaacttgttcggatgctaattagaagtatatattaaatctagtgtaaatataaaactaattatatataaggtctaagcgataagacgaatatattatactaattagttcatgattcgattttgca

SEQ ID NO: 154725 - DNA, 276 bp, Zea Mays
atggccgcgtgcagccgcagactggcggcgctcgcccctctcctccttctcctgtccctcgccgtggcgacgacgctcgtggcgccgcctccgtgcgcggcggcggccagggtgctgctgcctgccgccgcgtccgccggtggggccgaggaaggtggtgccagcagcggaggagacggacggacgtcggcggcgacgacagcggcggtcgctggcagtaatgctaatgccgcgcgggtgatgggctccgtcccgagccccggggtcgggcactag

SEQ ID NO: 154726 - DNA, 3002 bp, Zea Mays
gggaggagaagaacaaaccctagagcagacggcgtaaacggacggcggcgcggcgggacggatgaagaccacagccaggggcaggaagcgaatcagggagctgctaatggtcatcagccgcgcgcgttgccaaatcttcaaagggcggacgatgccaataatgcaattgacgtcttcggaagtccaagtatctgaagcccaatgtagacgatgccaaataagcaaaaaatctcaaaatctagttgccgagacgaccgccacccccccccccccccccccgccgccgccgccgccactggcgctactcctatcggcggggggctgaagaatatggcagccgcctccgcctccacgcgacaagcgacggcggaggcgtgcagtagccacgtccaccacgcgcacctcgcggctctcctcaacgcttccgcgcgcttgcctccgctccctctcagccgcctccacctcccgctctcgctccccacggcctcccgcctcgtcgcgtccttccctccactcccgctcctcgtctgcttcctccgcgcgctccgcctcctcccctcctcgccgccgcgcccctttgactcgctcatcaagtcatatgcctcgctccccaaccgcgcctccctcgctgctgcggcgctcgcgttcgccaggtcagccgggtacgtgccctctgtgctcgcctacaacgccgtcctcctcgcgctctctgacgcgtcgctcacctccgctaggcgcttcttcgactccatgcttagcgacggcgtggcgcccaacgtgtacacctacaacatcctcgtccgcgcgctgtgcggccgcggacaccggaaagaagcgctcagcatcttgcgtgacatgcgcggcgcaggctgcggccccaatgtcgtgacttacaacacgctcgtcgcggcgttcttcagagccggggaggtggatggcgcggagaggctggtcggcatgatgcgtgagggcggcttgaagcccaacctggtgaccttcaattcaatggtgaatgggatgtgcaaggctgggaagatggaggacgcacgcaaggtgttcgatgaaatggtgagggagggtttggcgccggatggggtcagttacaacaccttagtgggtgggtattgcaaggcagggtgctcgcacgaggcattgtctgtgtttgcagagatgacgcagaaagggatcatgccagacgtcgtgacatttacgtcattgatccatgtaatgtgcaaggctgggaacttggagcgggcagtgacattggtgaggcagatgagggagaggggcctccagatgaatgaggtcacttttacagccttgatagatgggttctgcaagaagggattcttggatgatgcattgcttgcagtaagggggatgaagcaatgcagaataaagccttcagtggtgtgttataatgcacttattaatggttattgtatggtaggaagaatggatgaagcaagagagttactccatgaaatggaagctaaaggactgaagcctgacgttgtgacatacagtacgattatcagtgcgtactgtaagaattgtgatacacattctgcatttgaattgaaccaacagatgcttgagaagggtgttcttccagatgcaatcacctactcatcactcataagggttctttgtggggagaaacgactcagtgacgctcatgtgctcttcaaaaatatgattaagcttggcctacaacctgatgaatttacatacacatctcttattgatggccactgcaaggagggtaatgtggagagtgctctttctctgcacgataaaatggtaaaggcaggagttcttcctgatgttgtgacttacagtgtgcttattaatgggcttagtaaatcagcacgtgctatggaagcacaacagttgctcttcaaattataccatgaagatccaattccagcaaatactaaatatgatgccctgatgcattgttgtagaaaagctgagcttaagagtgtgttagctctcttgaagggattttgcatgaaaggtttaatgaatgaagctgataaagtttatcaatcaatgttagacagaaactggaatcttgacgggtctgtctacagtgtgcttattcatgggcattgtagggcaggaaatgttatgaaggctctcagcttccataagcaaatgctgcagggtggttttgctccaaattcaacaagcacgatttccttgattaggggtctatttgaaaatgggatggttgtggaagcagatcaggtgattcagcagttgttgaactattgttcccttgctgatgcagaagcatcaaaggctcttattgacctcaacttaaatgaaggtaatgtggacgcagtcttagacgttctgcatggcatggcaaaggatggactgcttccaagtccaagatgagggtgattttcaacattcaagaaccaccctctctgtggaatactggagacctgatggtcatgtttggtacatattgtctcatgagtcataacacgagcatccgaatcagtgttatgtggtaagaacggtctgccctaaatcatgatgtgctccatatggaaaaggctgaaagaagttgcctcatgctgcattattgtgtaaactgagcaaccatttctatctcattaaccgctctgctcttaacaagtgaaatgaattttagttcttgataaatacttgattttgaagggcaggctggtttagtgatgagagttgtttcactaagtcaccggatcataggttcgaagcaacctctctgcatttgcagaggaaggctggtattgatttatcctttttctagaccccactcacgtgggagtctctggcactaggtctgcccccttttataaatacttgattttgtattagcagctttttgtattgttgtttataataattattaggttagaaaaggttgtactgatattttatgatgtattacttattgtcttacttttagacactataataaaagatcttgatatatgtagttagtg

SEQ ID NO: 154727 - DNA, 179 bp, Zea Mays
tcacctctaaatacacaagtgtagcacccagttgactactttaaaagaaagcatcataggcaatttttgaaccaaagaaacccacatgcatcatgagatgtttgcatatttggcatcgtcttcagcaactcttcaatccaaacaaacccacaggcgtcacaagtcaagctctaaaccaa

SEQ ID NO: 154728 - DNA, 2082 bp, Zea Mays
atgcggaaggttgatcgacccccaaccaattcgaagtgtttaatcattgagtcaagtcaagaatgtttcagtgttgacattccatgctcgactgacatggcagaccctacaaatacgccttctgatggtgatcctccgcagcatagaaagacaagtgttgcagctgctgctaaaaacattgctatgcctaatgtggatgatgatgatgactttgagccacccaaaaagaagtgcaatatctcaatggatgccccaaataagacgcagaagctagaccccagggacatgactcttcgtattggtccagacaaagaactcaaaatcaccaagcagactgtccatcagatattgggtcttccaaatttgggtggtggaaagccccttaatattaatgaagcgaacgctgcggcaacacttcgggcctcattgaatattaccaaggatgagtttgttatttcaaagctccaagatagactgaggctaggccaggatgatgatctttctatcagatgtttttttctcattctcttcaaccggctgctattcccaacagctagctggtctatttctttcaatgaggttgtacttacagaagaaatggagcgattccctcaaattgattggtgccatctaatttttagtgacttatgtgaggctgcccagagatggcacaacaggagcattaacaatgtgtcggcgacgatatatggctgttccatcattgttcttctgtattatttggatcatttgcatcatgctgctgctccaaacaacaaaaatggcactccacgcataaagtattttaataagaatattataagggcgttgtcaatggccgataagcggaagcctcgccagggtggtgaaccatttggtgtttgcccttttcgtagcagcagtgagacatgttacgtctcaaaatcgccaactacttgccagattgagtttcctatgaggccagaaacttttgatgaagacccaaatcaacatgatcgacttcccaatataatcatccaactccctcttatgcaagacttgatggcaaataagattcagatgcttcctgtacatcaacgccagaagttccaagctacgttgattgattatgacttagaggttggcaaaatatttgcctctatcaagcaatgtttgaatactattggtacaaagcagtccaatctagccgctacatttggagaattgattgatgaggttcttcgggccgatgaatctgttacaccaaatactgttagtcagacagtggtaggtggcacagttgaaaatgattctggaccagtatttgacaagactcctattgggagtgtttctgcaccaggtctcttcttatctgaattagaatgtgctcgcgctcttcgggcatacttgtgttctaggttcattgaattggacagaaatataattgactttggtgaacatcgcgccaattgttgtgacatacaacaatcttttgctgatggcgcatgtctcgacaacgtgtttatgcaatgtgtcattgagtgtgtccgcgatgactggtctaaacatattcctccactcaatgctcaccagctcattctagatgttaatgttgggataatggtacccatgctacgatctggacattggacattgtatgttgttaatcttcagattggacgcatacatgtgttagattccaacccttatggaccagagatgggtgggactatctggaaaaattaccattgtatacctatggatttgggtgataggaaggtttcatgggccatgttaatgatgagtaggctcaatctagctattcaaaatgctcgaccaagatcagctctccctgcttttttgaagtaccctattgaactcatgaataactgcccaacaatgaaattggggtctaatgattgtggattctttgtcatgagatatatgcagaactacgactacatggttggagctatgaatgcagtcattgatccggataattcagaggacattcgctctcttgtactgcattacctaatattccatcgactaaatagaaacagcttcgtggtctcccatctggacagattcaagttctctcagtag

SEQ ID NO: 154729 - DNA, 203 bp, Zea Mays
ccaaacggggccttaatatagcgatctcattcatgattcgtggcactctgggttggacagcttgcaacatcttgaagccactgtagccctttaggtccttggtcatggccttatgctcagcaggaaaccttggaaacctgctactgatcattgtcccggctgtatgcgttgaaagaagggaacccgtttgggaacgatcccaa

SEQ ID NO: 154730 - DNA, 756 bp, Zea Mays
atggctccaaggaatatagccccgcacctcttcgacctaatcccgagaaagaacaattcggttgcccacgaactcagcggacaacattggatcaaaacactaagaagtaggatcacttccagtgttcagattgaggagtttgtctctctttggactagactctgggatttccagctgcaacctgactcaccggataccattgcctggaatcggtctcctgatggcatcttctcagttaaatcggcctacagagcacaattcattggctcgtacagtcaccttaatgctaaccttgtctggaaggcacgcgcagaaccaaaatgcaaaatttttgcttggattctcctgcaggaaaaactactcacggccaacaatctcgccacccgtgggtggcctcatcaatcgtcttgtgccttttgcaacggaacccttgagactggtattcacctgtgcctacattgtcctttcgcccgtgcggtgtggagacaaatcctggcttgggaaggtgtaatcctccctgcccagtctgaccttgcttccgccaccaacattcaggagtggtgggaagctgcgactcccccactaccaaaaaatcagaaacgcgctttcaatggaatcgtgatttacacaatgtggaacatctggaaggagaggaatcgcaggattttcgaaagtgtcgcccttcccccggtccaagtcgccttaagaattaaagaagatgtttcacaatttaggcgggctttgcttcccatgtaa

SEQ ID NO: 154731 - DNA, 2649 bp, Zea Mays
atgggcccttcctcccccgcgctcgcccctacggcgaccgagctccaaagcagcgccaccgccagatccgcccgcctccggccgtccccggctcctgccggctgcaccaagtcagatccaaccccgcccccccctccagcaccaccagctcgccctcctgtgtcccagctcccaccgccaccgccctcacatctaccgccggcccgcccttctgatccaactgcatgccgtgcgccggcggccccctaccaaaccaagcgggtgaggtttgcattcactgcaagcaccacgccgccccgcattcactacccctccgccgtatcccgcagccacagtgccacccccgccccgacagctggttcgaagcccccgtctggaagctgcgaccgcattgaagatgaggatcttgaaggatggacgacgattcggcgcaggcgtggacgcgccgcccgcgcaggcctaggctgcgccccagcggcgcctcgccttctctcagcccatgcccctagccgtctgatggtaagcctacgaggtaaatgcgctcgctgcttgagtagggatcacttggccattaattgcagggatccggtcaagtgcatcaaatgcaagcgctccgggcacaggtcttggcagtgctcgtggattgttagcaggccgactactatcccccaacgtcaacctccctgcctcgacttccacaacttcccgccgctcgccgctccgtccatggcccttccaggtgacccagcattgcgcccggatcattcctggaccaccacttctgccacccgcgtcatggagagtgagctcgaacggctgagctcccatgcagtggtggtttggctcagctgcgaccgccccgacatcagcctcgacagggtggagcgggccttctgctcccgctttggggtgcggccggtggacatcacggtatcccgaagcccacctgcggacttcctcgtgatcttcgcgcaccggcaccaccgggatgcggccgtcgctgctagggacttcccgcttggcaaccttgacttccgcatcaggccgtggcagctgatcacccttggagaacgtcacgacctcagcttccacgtgaggctgtgcctcgagggcatccctcctcatgcgtggaatgaaagcatcgccaagcgtgtcgtggcccgtgcctgcgtcttggactacgtcgaagacgactgcctctcctccaccatgaaggacgcccgctgcctcaacctttgggcgtggacagaaaatccgtctgacatcccgaaggtcatctggcttacaattactggctctgtgatggtgatccatgaaggtgtgccccctccagtgggccaatgtggcctcactttccgggtgcttgtccacctcgacttggtggaggggccgccgggccgcgatgcgcttcctaccactcgctccctcacctggcgccatggtgtcgtcgacggggagcgcgtgcgacgtgaccgacacgatccgcccccggcagacctccgcaacgaccgtcgaaatcgggacagagatgatgaagacgaaggagatgaacggcgtgggcgtcgacagcataatggggagagctggagctctcgtctctttcgcagcctctcccgtgcgtcgcgaggcccggaccgttctgtttcgcggcgcgagcaacaccgcgacataggatccaggaatggaggacgacaccaccaccttggactcggttctgcgccccagcctttggagaagaggcacgtgcggggccatagccgagaacgacatacacatcgccaccaagagcaccgccatcgctcctccccccgctcgcttcgccagctcccagtgatccccacggggatccgcagacgctgcaatcaggcctctgctccctgcttcgagaaggaccgcaaaccttcccctcagtcgcctctgcttcggaccacgggagaagggggtgctgagggatctccgctggctggacagaaccgttcttcaccgccgcacctgtgcaagagcctagggctgctgtcttcgcatggtgcacgtcgctacttgcctggtcgtgtctaccgcagacgcgcttatcctaccatgccagtaccggaacagtgcccgccatcgccggccacactaaacgagacacctacagaggcctcgacgccggagacaattcagactgcccccagcactgaagctgactctatggacgacgcgcctaatgggtcggggctggaagaggcgccaggccttgtggacgctgctgctgggcttgagccggaagggatacccccttctctttcggcgtccttcatcaacaacttcacccgcccagcagcccaacccctgctccaccaacaccagcaagccccgtcaaacccgaagaagaggggaaggcatggggtcaggccggtccgcaggagcaagcggctcgcggcggttgtttggccacgcggcaacatacaagagcgcgctcgccaagtcctcatgaagcggctggggatcttgcctagcattggccagccaacagctgctgctaatggtgaagctgcactggagcactacatcaacctcttcaagggtccgctgacgaccgtggctcttcaggcactgctacccctctgtggaattattccgcaggggcagacagtgcagggatcttga

SEQ ID NO: 154732 - DNA, 1351 bp, Zea Mays
atcgcatctcgtgcagtgacacaagtgagctcagtaaagccagccaaagttcagacttcagaagaagcgagcgagcaggaggaggacaggaagtatggcgcactaccagcaggggaggcggcagcaagtggacgagtacggcaacccggtccctgggggccacggtgtccagggccagcagctgggtgaagccgccggcgggtacggcgtcgcaggcaccggcagctacggcggccagcagcaggccgggtatggccccacgggcaccggcacgcatgacgccgggggctacgacggctcggaccatccgggttacggggctaccggaacgggcgtcgacgacgccggtggcccaggtgcgtatggagcagccacgggcacgagagcccacggcacgcacggcggcgtgaccgggatccaggacggcgccgccggcctcaccggtggtggtctgcatggcgcaacaggcatggggacgactaccggtactggcgcgcacggtgccaccggaatgctcgacacgggggtcttgggcggcggagggcacgcggccaccggcatgcccgccggccacggcacgcgtcccggcgccacaggcgtagctggaaccggcggcgcgttcccccatgcagctgagcacaagacgggcggcggcatccttcgccgctccggcagcagctccagctccagcagctcgtcatctgaagacgacggcatgggtgggcgccggaagaagggcctgaaggagaagatcaaggagaaaatgccaggaggccacagggaaggccagggccaggcgacggccaccggtgcgtacggcgggacagggtacgtggctgggccgacgaccggaggcccccacgagaagaagggtgtggtggagaagatcaaggagaagatcccaggcggccacaaggactacgaccagcatcagcacaccaccgcggcaaccggtggcggcggtggctatggcggaaccaccgacaccacgtatgggacgacgaccactgaaggcactcacgagaagaagggcttcatggacaaaatcaaggagaaactccccggtcagcactaagcactaagcagctgcctctttcctcttccggctagctgcctctttcctcttccggttggcgactgcctgtaagtacatgtatacagaataaataaagcaataaagaataagcggcagctacgtatgtgtgtgtttttgtgtgtttgcattgtaaggcagctacgtatgtgtgtgtgtttgcattgtaaccacctcagtaatcctgtgcgttcatgatccttctatgtgacttcatgtgacgaagtagaaggaataagaaagtcaaatcttactatt

SEQ ID NO: 154733 - DNA, 1426 bp, Zea Mays
  misc_feature (958)..(958): n is a, c, g, or t
gaaaatcgatttgtccacatttcagccggacaccaccgtgtcgcccccgcgtcctaaacctctcacctcgccggggtccggtagccacgaacgatgttccgccgcgcgctcctctcctccgtctccccactccacggaacggtacgaatcccgagccccagctattctcctatccaagcccttctcgctcaatggagcaggtacgcctccgtggtctcatcctcggccccgccgccgccgccgccccctccatctccgcctcaaggtccatcgaggtcgagcggtggaggtcccacttcctcgtcgctgaaccctgcagaggtcgccaagttcgcctccatcgccgagacctggtgggattctagtggcccattcaaacctttgcatgtgatgaatccaacccgactgtcttttatccgctccactctctgtagacatttcaggagggatccaaattcatctaagccacttgaaggtctcaaagttattgatgttggatgtggaggtggcattctgtcagagcctcttgctcgaatgggtgctaccggtactgcaattgatgctgttgacaagaatataaagattgcaagtattcatgcggcatctgatccaacaactgcttctattgagtattgttgtgcaacagctgagggactggtaaaagagaaaaggctgtttgatgctgtaatttctcttgaggtgattgagcatgtcgccaatcctttggagttctgtgaatccctctcggctttgacaattcctaatggtgccactgtgatttccacaatcaaccgatcaatgcgagcatatgccactgcaatagttgctgctgaatatatcctcagatggcttcctagaggcacacatgagtggtccaaactggttaccccggaggagcttgtcctaatgctgcaaaaggcttccgtctccgtcgaagagatggcagggttcgtttacnatccgttgagcggagaatggtccctgtcagaaagatatcagtgtgaactacattgcttttggcgtcaagaagggcgaggcatcattgacaaatgacagagaagcaagtttatcatagcgaagaaaaacacgtgaccttgaattgtcgggcatcattttcagaggaccaattcatgtcactgaaatctattgctaagtatgcaaccaagtagcagaagagaattctcttgccctttgttagtcttggaaactggagcttgtggagtgatgcttcctggaagcgccattgagaagtcaagttgacaacaagtgactgctaacaagtagagctatctgccttttttgggtaatgtttcaggcagtttttctcaattttgtggcagtcactgatctaaataaaaatactactacactgctgtacgtgaaaactgaacagatttgctgtctggaaatgtaactatttttaaca

SEQ ID NO: 154734 - DNA, 1604 bp, Zea Mays
cccccctcgcttaaaagctgtagctcacacgagccgtgccactgcgagggaaggagggagagaaaaaggggagcccgatccaatcccaatcccctcccgccgcgtcacatcgccgccgtcctcgtgccccgttacctctaaaaccctagcggggagccgccgagccggggatgaagatccagtgcaacgcgtgcggggccgcggaggcgcgggtgctgtgctgcgcggacgaggccgcgctctgcgtcgcctgcgacgaggaggtgcacgccgccaacaagctcgccgggaagcaccagcgggtgccgctcctgacggacgccgccgccgctgccgccgcagcggcgccggccgtgcccaagtgcgacatctgtcaggaggcttctggatacttcttctgcctagaggaccgtgcactactttgtagagactgtgatgttgctatacacacagtgaattcctttgtttcagtacatcagagattcctgctaactggagttcagtgaatcaaccagtgagacatcagccaaggagaagcccgacagttcaattttcagttgaagggagtgcttctgttcctaccaaaaatgtaacaaatggagattgttcaaggcagaattttgtcccaacagccagggcagaagtggttgattggactatgaataatagtacaattcgatcagtagaatctccgcctaagtacatttcagaggaaagccccacacttctgcaatctagccagaccacaacagtcttctccaaccaaattaatggcaatagtgatggggcctaccacttgtcattctcaggtggtaatgtgacagacagcctaccagattggcccgtggatgagttcttcagtaactcagaatatggtccaaactttggcttctccgagaatggttcttctaagggtgataccgctaagctggggggcgctggtggatctccacaatgccgtttggctgaaggctcagttgctgaggaactattagggcaggtgcctggattgatcaccgatgaatatatgggccgagtacctgagaattcatggacagtgcctgaggttccctctccaccaacagcctcggggctcaactggcatgggaatttgtgtttccctgcgtatgacagcaccatgtttgttcctgaaattacctccctccagaactcccaaagtcacttcaccgtaccttccagtttcaagcgccggagaagagagtactaagaggcgacaagaagatcactagacaccactgtccggtctaggccatcttgagaaaggcttcttggtgggccaaatgacgaaagaaaatatccaggactgagtggtcattcaaacatcaactgagctatccagtagccaggttttaagtgtgttgtaatgcttcaatgtgtttcattttctaaagacctgagcttcgcttgtgatttgttccgagctgtacggtgtcgattttgtgtatataatataatataccgaaataaagggtacccattatgagtatatgatcattccgaaataaagggtatcccgtatgagtatgatcattcgcgagtacatcgcacactggtggtggcacattaagttacttctgcaatac

SEQ ID NO: 154735 - DNA, 1730 bp, Zea Mays
ctaaaaataaataaacaaagcgcgcacctactaatcaaaacgcaacagcgcactcgcccccctcgcttaaaagctgtagctcacacgagccgtgccactgcgagggaaggagggagagaaaaaggggagcccgatccaatcccaatcccctcccgccgcgtcacatcgccgccgtcctcgtgccccgttacctctaaaaccctagcggggagccgccgagccggggatgaagatccagtgcaacgcgtgcggggccgcggaggcgcgggtgctgtgctgcgcggacgaggccgcgctctgcgtcgcctgcgacgaggaggtgcacgccgccaacaagctcgccgggaagcaccagcgggtgccgctcctgacggacgccgccgccgctgccgccgcagcggcgccggccgtgcccaagtgcgacatctgtcaggaggcttctggatacttcttctgcctagaggaccgtgcactactttgtagagactgtgatgttgctatacacacagtgaattcctttgtttcagtacatcagagattcctgctaactggagttcaggtgggtcttgatcctgctgatccagttccacctattgctgaaaagcatgttaatgctgttggtggatcagtgaatcaaccagtgagacatcagccaaggagaagcccgacagttcaattttcagttgaagggagtgcttctgttcctaccaaaaatgtaacaaatggagattgttcaaggcagaattttgtcccaacagccagggcagaagtggttgattggactatgaataatagtacaattcgatcagtagaatctccgcctaagtacatttcagaggaaagccccacacttctgcaatctagccagaccacaacagtcttctccaaccaaattaatggcaatagtgatggggcctaccacttgtcattctcaggtggtaatgtgacagacagcctaccagattggcccgtggatgagttcttcagtaactcagaatatggtccaaactttggcttctccgagaatggttcttctaagggtgataccgctaagctggggggcgctggtggatctccacaatgccgtttggctgaaggctcagttgctgaggaactattagggcaggtgcctggattgatcaccgatgaatatatgggccgagtacctgagaattcatggacagtgcctgaggttccctctccaccaacagcctcggggctcaactggcatgggaatttgtgtttccctgcgtatgacagcaccatgtttgttcctgaaattacctccctccagaactcccaaagtcacttcaccgtaccttccagtttcaagcgccggagaagagagtactaagaggcgacaagaagatcactagacaccactgtccggtctaggccatcttgagaaaggcttcttggtgggccaaatgacgaaagaaaatatccaggactgagtggtcattcaaacatcaactgagctatccagtagccaggttttaagtgtgttgtaatgcttcaatgtgtttcattttctaaagacctgagcttcgcttgtgatttgttccgagctgtacggtgtcgattttgtgtatataatataatataccgaaataaagggtacccattatgagtatatgatcattccgaaataaagggtatcccgtatgagtatgatcattcgcgagtacatcgcacactggtggtggcacattaagttacttctgcaatac

SEQ ID NO: 154736 - DNA, 1308 bp, Zea Mays
atgaagatccagtgcaacgcgtgcggggccgcggaggcgcgggtgctgtgctgcgcggacgaggccgcgctctgcgtcgcctgcgacgaggaggtgcacgccgccaacaagctcgccgggaagcaccagcgggtgccgctcctgacggacgccgccgccgctgccgccgcagcggcgccggccgtgcccaagtgcgacatctgtcagctggtgtggtgcagaagcaggggtgaaggggcttatgagctgtatctggatgtggccaaccggcttcaggggctcatgcggctggcacaaggagcaaacaagcaacaaccttatcctgagttgctatcattatttgaggcttctggatacttcttctgcctagaggaccgtgcactactttgtagagactgtgatgttgctatacacacagtgaattcctttgtttcagtacatcagagattcctgctaactggagttcaggtgggtcttgatcctgctgatccagttccacctattgctgaaaagcatgttaatgctgttggtggatcagtgaatcaaccagtgagacatcagccaaggagaagcccgacagttcaattttcagttgaagggagtgcttctgttcctaccaaaaatgtaacaaatggagattgttcaaggcagaattttgtcccaacagccagggcagaagtggttgattggactatgaataatagtacaattcgatcagtagaatctccgcctaagtacatttcagaggaaagccccacacttctgcaatctagccagaccacaacagtcttctccaaccaaattaatggcaatagtgatggggcctaccacttgtcattctcaggtggtaatgtgacagacagcctaccagattggcccgtggatgagttcttcagtaactcagaatatggtccaaactttggcttctccgagaatggttcttctaaggcaaagcttgagagtgacatcctttctggcatctacatgaagaaaggtgataccgctaagctggggggcgctggtggatctccacaatgccgtttggctgaaggctcagttgctgaggaactattagggcaggtgcctggattgatcaccgatgaatatatgggccgagtacctgagaattcatggacagtgcctgaggttccctctccaccaacagcctcggggctcaactggcatgggaatttgtgtttccctgcgtatgacagcaccatgtttgttcctgaaattacctccctccagaactcccaaagtcacttcaccgtaccttccagtttcaagcgccggagaagagagtactaa

SEQ ID NO: 154737 - DNA, 1129 bp, Zea Mays
taaggaacaattggatctataccattaaaagatccaaactttagatatataccatggaccccacatgtcattgactcatgtggacccacatgtaagtgagatagtaatgatatgatccaaaagtggtgatcttttaatggtatgatccaaatttccctaaaaataaataaacaaagcgcgcacctactaatcaaaacgcaacagcgcactcgcccccctcgcttaaaagctgtagctcacacgagccgtgccactgcgagggaaggagggagagaaaaaggggagcccgatccaatcccaatcccctcccgccgcgtcacatcgccgccgtcctcgtgccccgttacctctaaaaccctagcggggagccgccgagccggggatgaagatccagtgcaacgcgtgcggggccgcggaggcgcgggtgctgtgctgcgcggacgaggccgcgctctgcgtcgcctgcgacgaggaggtgcacgccgccaacaagctcgccgggaagcaccagcgggtgccgctcctgacggacgccgccgccgctgccgccgcagcggcgccggccgtgcccaagtgcgacatctgtcaggtcaggcacccaggccccgaggcccgagccctcgtctccgctgcctctccctccattcctgtagctcgattgggttggtggtgagttggagttgtcgtgcggtagctgccactgccaggctgggaattttctactaaccgtctgatcccaagctaccagggtagtctcgcctaatgatttggctcgcgaagtgaataggcggctgaagcaaagctgttgttgatgcttcgatctgtagcaaactgccttgccttaccttacctgggcagcttcccttgggatgccgagtctgtttctggagcgttggcggaattgctatacgatatacactatgttttactgatgatctgactggaccaggacagcagtgagttcaattttagctcctacaggctttccctatcccggggaaggcatcatgatgtgatctgtggctggtcctgcaggatattgtaattatgaagaaaccgactcggatgttgtactgatgtgccactcttgaggacccaaagcaccatttgtcgaccctatttcttcggg

SEQ ID NO: 154738 - DNA, 899 bp, Zea Mays
gtcgcccccacgctagtcgcccaaactacgcaaccgatatattccccagcacccccgttccagccgtccaaccgagacaccgcgtgcgaaccaagcagaccccagcagaagaagcgaagtcgtcgccggagcaggaggaagagcgagcagcaagatgtcgtggcaggcgtacgtcgatgaccacctgctgtgcgacatcgaaggccagcacctcagcgccgccgccatcgtcggccacgacggcagcgtctgggcacagtccgagaacttccccgagttaaagcctgaggaggttgctgggatgataaaggactttgatgaacctggaactcttgcaccaactggtctttttgttggaggtacgaagtacatggtgatccaaggtgaacctggagttgtcatccgaggaaagaagggcactggaggcattactatcaagaaaactggcatgtccttgattatcggtatctatgatgagccaatgactccagggcaatgcaatatggtggtggagaggctcggcgattacctgatcgaacagggcttctaagtttgtcataatgctattttggtcattgggcacttaagtttgcacctcatttggttctgtaatatgtgggcttgtgcatgtgcttggcgtattgcatgcagtgaataatttatcttcgcgttgggttggtgacaatgttgggaacggatttgaattggggtttatgcttgccatctcctcatatctcgaactcagctgctgtttcactgagtaatgtacatttccctggtaatggtacttgtgcactctgctgctttatggaaaagagtgcattttactgatgtgcttggccgtgttgttgaatatttcccgtagttattttcaactccctctctgttccaatttataa

SEQ ID NO: 154739 - DNA, 986 bp, Zea Mays
gtcgcccccacgctagtcgcccaaactacgcaaccgatatattccccagcacccccgttccagccgtccaaccgagacaccgcgtgcgaaccaagcagaccccagcagaagaagcgaagtcgtcgccggagcaggaggaagagcgagcagcaagatgtcgtggcaggcgtacgtcgatgaccacctgctgtgcgacatcgaaggccagcacctcagcgccgccgccatcgtcggccacgacggcagcgtctgggcacagtccgagaacttccccgagttaaagcctgaggaggttgctgggatgataaaggactttgatgaacctggaactcttgcaccaactggtctttttgttggaggtacgaagtacatggtgatccaaggtgaacctggagttgtcatccgaggaaagaagaaatgttttaacatttccctctcacatttcagtaacacccttgcaaatgttctttgatttacgcggttgtttccacattcgttacagggcactggaggcattactatcaagaaaactggcatgtccttgattatcggtatctatgatgagccaatgactccagggcaatgcaatatggtggtggagaggctcggcgattacctgatcgaacagggcttctaagtttgtcataatgctattttggtcattgggcacttaagtttgcacctcatttggttctgtaatatgtgggcttgtgcatgtgcttggcgtattgcatgcagtgaataatttatcttcgcgttgggttggtgacaatgttgggaacggatttgaattggggtttatgcttgccatctcctcatatctcgaactcagctgctgtttcactgagtaatgtacatttccctggtaatggtacttgtgcactctgctgctttatggaaaagagtgcattttactgatgtgcttggccgtgttgttgaatatttcccgtagttattttcaactccctctctgttccaatttataa

SEQ ID NO: 154740 - DNA, 1393 bp, Zea Mays
gtcgcccccacgctagtcgcccaaactacgcaaccgatatattccccagcacccccgttccagccgtccaaccgagacaccgcgtgcgaaccaagcagaccccagcagaagaagcgaagtcgtcgccggagcaggaggaagagcgagcagcaagatgtcgtggcaggcgtacgtcgatgaccacctgctgtgcgacatcgaaggccagcacctcagcgccgccgccatcgtcggccacgacggcagcgtctgggcacagtccgagaacttccccgagttaaagcctgaggaggttgctgggatgataaaggactttgatgaacctggaactcttgcaccaactggtctttttgttggaggtacgaagtacatggtgatccaaggtgaacctggagttgtcatccgaggaaagaaggtacagtggggaacagattttctaatagaagaaatgctttgatgcctttttcgtttgcttatgttaatttttacccaaaaacaaactcagttcatatctgcagtactatattattattaaaatatgtaatatggatcaagcttgtgtatagaattattaagtaggagtactgtataaaaaaatgcctggatacttggtcatgattactcgtgttaattagtacgcctgctgaactctgctagtttattgcatttgcaagcttttgtagcatgtatttacgatcactgtacgaagtgggcagtaatttgtcctgcaggctgaattgccttgtgtgttgtcagtaaattatggttacatccatccattaaactattaaaattaacttgtaacatgcaacaccagttagcagcaaatccttagactgtcactagcggatgtgcaatctactctagagtggaatctcttagtcatataagaaatgttttaacatttccctctcacatttcagtaacacccttgcaaatgttctttgatttacgcggttgtttccacattcgttacagggcactggaggcattactatcaagaaaactggcatgtccttgattatcggtatctatgatgagccaatgactccagggcaatgcaatatggtggtggagaggctcggcgattacctgatcgaacagggcttctaagtttgtcataatgctattttggtcattgggcacttaagtttgcacctcatttggttctgtaatatgtgggcttgtgcatgtgcttggcgtattgcatgcagtgaataatttatcttcgcgttgggttggtgacaatgttgggaacggatttgaattggggtttatgcttgccatctcctcatatctcgaactcagctgctgtttcactgagtaatgtacatttccctggtaatggtacttgtgcactctgctgctttatggaaaagagtgcattttactg

SEQ ID NO: 154741 - DNA, 1970 bp, Zea Mays
caattcgctcgatctccaatctggcaaatcccctcatctctcacacaacctccgaatcaaacgctgaatcgcgccaaatttactcttgatctatctccaaacccgccgctatctctcatcctgctattgcaatttcatccaaaacttgctccctcggaagccatcaccatggccgcggaggcgggcagtcggcgcggggcggcggcgcggaggaaggcgaaggaggcggcggtgggcgccgccgcgagggttctcttctacccgacactgctgtacaacgtggtgcggagcaaggtccaggccgagttccggtggtgggacgaggtcgatccgttcgttttgctcggagcggttccattccgcagcgatgtaacacgcttacagaagcttgggatatgtggtgtgataaccttaaatgaaccatttgagactttggtaccatcatctatgtataaggcaagtgacattcacgtgggatcgatcaccttgttattcctacaagagattatatgtttgctccttcacttgtggatattaatcaagctactgatttcattcatagaaatgcgtcttgtgggaaaataacatatattcactgcaaagctggaaggggccggagtacaacagtcgtcttgtgctatctggtcaaatacaagaatatgacacctgctgcagctttcgagcatgtacggtctaaaagggctcgagtgctgttgacacattcgcaatggaaggtactgaaaagaccataagtcggttcctccatcctaaaacacgaagactcgcaatggaatttatgatctttcatgatgtcaccttctgtgattttaatgaacttgggaagctggaagagttagcctccctcaaatatttttgcttacgctggtagatattggaacacaaactctaaccctaaactgtgttgagagatatatttataatagagatgttgggccaaagcccattacacatggccctattacaacgcaatcattatatctctaacaatcataatggtatagctaactaggaaagcatatgctactttttagcaacatttccctttcttagtaaggaaataaatccactttgcaccaaatatttgcagagcacctacatctatttttttttagtttttcgtggaaaaagaacacactagtgatattcggagttgatgtaaagttgtaaacatgacattatcagagcaatgctgcagcccattaggtgtttagattgcgacatccaggctccagctactcttttctggtgatcaatgatgaaccattttatacagctgggaccaaatcgacccttaatggacccagtacatcccattaattagagcaagagtaaacgctgggttgtcactggtggattctgaatgtttctggatggtcctgatagccctgtagttagtttcttgatgtggaagcttgaataattgctcatatgaaaactatcatgtattctaggtggctttgattgttgcaggctgttcaagaattcagcaagaagaacacggaccgtcctgctctcacgagcggtcccgcaacagcatctccagcacgggacgcggcaccggtaacagtagcggatctgaacggcaataatgctccagagtttcttgcggaggatgccagcttgtctagacgcaacaccacaccgtcgaggccaacgattaagatgctgtcatgcttgtttccttctcgcgtctgatgaatggtcgctggacgtcgggtgtccgaggcgcatgcgtggtagcccccggtcgatctgtccgcgaagcggtgtgcagtgcaggacggcggcagcatacctttccgaaaagaaaacggcatcagcattggcgttagtcatatacttgtccatattcacccgatttgcctgtatatatatataccttcgtcatgtggaaattcgttgttgagaattgagatgcatctcttacccgcacttgaatgaatggcctg

SEQ ID NO: 154742 - DNA, 1190 bp, Zea Mays
caattcgctcgatctccaatctggcaaatcccctcatctctcacacaacctccgaatcaaacgctgaatcgcgccaaatttactcttgatctatctccaaacccgccgctatctctcatcctgctattgcaatttcatccaaaacttgctccctcggaagccatcaccatggccgcggaggcgggcagtcggcgcggggcggcggcgcggaggaaggcgaaggaggcggcggtgggcgccgccgcgagggttctcttctacccgacactgctgtacaacgtggtgcggagcaaggtccaggccgagttccggtggtgggacgaggtcgatccgttcgttttgctcggagcggttccattccgcagcgatgtaacacgcttacagaagcttgggatatgtggtgtgataaccttaaatgaaccatttgagactttggtaccatcatctatgtataaggcaagtgacattcacgtgggatcgatcaccttgttattcctacaagagattatatgtttgctccttcacttgtggatattaatcaagctactgatttcattcatagaaatgcgtcttgtgggaaaataacatatattcactgcaaagctggaaggggccggagtacaacagtcgtcttgtgctatctggtcaaatacaagaatatgacacctgctgcagctttcgagcatgtacggtctaaaagggctcgagtgctgttgacacattcgcaatggaaggtggctttgattgttgcaggctgttcaagaattcagcaagaagaacacggaccgtcctgctctcacgagcggtcccgcaacagcatctccagcacgggacgcggcaccggtaacagtagcggatctgaacggcaataatgctccagagtttcttgcggaggatgccagcttgtctagacgcaacaccacaccgtcgaggccaacgattaagatgctgtcatgcttgtttccttctcgcgtctgatgaatggtcgctggacgtcgggtgtccgaggcgcatgcgtggtagcccccggtcgatctgtccgcgaagcggtgtgcagtgcaggacggcggcagcatacctttccgaaaagaaaacggcatcagcattggcgttagtcatatacttgtccatattcacccgatttgcctgtatatatatataccttcgtcatgtggaaattcgttgttgag

SEQ ID NO: 154743 - DNA, 111 bp, Zea Mays
gttgaagatcattatattaatagttcaataatttttgtagttcatgtccatttttttaaatgtattgtacctatgttgcaaatctattttgaagtgtgtactaaactatgg

SEQ ID NO: 154744 - DNA, 888 bp, Zea Mays
atggtaaaccaataccatgtgaagataaagatacacgcgtatttgttttccccttttttctggggggagggggtaaaaaaagatcaaaacgtcatggcaatacactcctctctggcggcggcgaacaggtcggaggtcatgtacctctcgcccccgctcggaaacacggtgacaatcatcttccccttgctctcttctcgcgccgcaaccttcaagcaggccgccaggttggccccggaagagatgccgacgagcaggccctcctccctggccagcctccgggcgcccgccatcgcctcctcggtggtcaccgtgacggcctcgtcgatgaccgaggtgtccagcacttccggtatgaatcccggccctattccctggatcttgtggctgcctggttccccgcctgaaacaactgggctctcggcaggctcaacgcagatgaccttgacgctggggttctgcgtcttgaggtacttgccgacgccagacaccgtgcctcccgagcctgaaccggccacgaatatgtccaccttaccggcggtgtccttccagatctcaggccctgtccatctaacatgcgcttcaggattcgctctgttggagaactggtcgaggacgtgcacgttgggcagctccttcttgagctcctcgaccttggcggttatgcccgggaaccccagggatggatctgcgcttgccaaacgcaaggatgagtcgtgtcgtgagtgcagtgcagttcctccgctctgctcaactcaactcattacttggcagccactggcagcacagcatgtgatacctgttacgtacagctctgcgcccatgtatgtcagcaggatctgcttgtcgagcgagtactggcctggcatgaccgcgacgaacctgtag

SEQ ID NO: 154745 - DNA, 98 bp, Zea Mays
atgttgaggccacaaagatacattgactgtgttatttggttccccctattacacaagctattcttgattaaacaagcagttgaaatgtttgatgttca

SEQ ID NO: 154746 - DNA, 1421 bp, Zea Mays
ctccgatcacgtggcgtggacaaacggacggcgcagaacttccccgccacataggcacgcgcgccagcccgaaccgaaccaaaccagccctgaccatttcagttcggctgctgcaagaaccgaacagagcagctgcgacgagcccaaccagtgagggggagagatggcccgtcgcgccgtcgccttgctcgtcgccgtcgcgctcgcgaccgtgctcctgcatacggcggaggttgcggcggggcagaagaagccggcgacggccgcgaggcgggaggacatcccctacatccggtgccaggtgtgcgagcggatcgcgcgcgagatctccgcgcaggtcgccaagaagcaccaggctctcccgccctccaagaaggtaccggagatcgagatcatcgaggtcgcggagaatgtctgcaacctaaagaagcaggaggcggattggatgcttcggatcgatatcgtcgagaaaggcgacaagctcgagcttgttgagcaagatgaggaagggcattgcaatgcagaatgcaagaccattgagcgtgcatgtcaggaggtgataggatatgctgataccgatgttgctgagtttgtatacaaaaataacccctcggtcgatcagcttatgaaatttctctgcaaagatctttcgaaagcatgtgccaaggacccaccgccagttccaaaagatcgtgtccctggggaaccatttgcaaggaagccatcaaaggatgctgagatggaaaagatattgagatcaatggagggtatgccgggagccccaagcatgaaaatgtactccagggacgatctgatgaaaaataactttggtactgaagacgacgacgaggaggatgatgaagatgaggatgacaacttcccaaagaacttggggaaagctctgaaaaacaagggctctcaaaagaaagatttgaaacagcaagtcgtgcagcagttcaaggataccagcaagaagttgaaagggcatgtaaacaaggtgtccggtatggtaaagaaatggtggaaaggggcaaagaagcctgccaaatccagcaaaagcaaaactgagctctgaagcattgttgaatcacgtcagtaaatctcatccgtcttccacttctcctggagcaaagttttagatggttatcggaagataaaagttacagcaacgcaaccagggcttttgttagagagtttagctacataaaacgtgtacaattgtttgtttttaacttctgttatttgcagtgtacactagtaaaagaactgaactccgatgatagtttttttccagattagtcgtgtcccaattggtcgttatagtgtttgatactctataaaactaaacagctggtgacgccagggaattagtttattggctatgcataatcgaacttttcactaattaatgacttgctgtc

SEQ ID NO: 154747 - DNA, 765 bp, Zea Mays
cacacacacacacactctctctctctctcttatgaattatgattacgatgacgaagaggaagaggtcagaagagttggcggcggtagttatcgcttccggcgatctcgcgcgtggagtcccgagtcgccaaggctgccgaaccctacggccaggccaagatttagtagtagctactataaatctgcagggtcgccagcactttggcctctcaacgcacgccccccgcccgacgtttccgatctcgtttctctcctcccgagtagcgaaatcttcgtacattctgagatgcagatcttcgtgaagaccctcgccggcaagagcatcaccctggaggtggagagctcggacacggtcgagaacgtcaaggccaagatccaggacaaggagggcatccctccggaccagcagcgcctcatcttcgccggcaagcagctggacgacggccgcatcttggccgactacaacatccagaaggagtccacgctccacctcgtcctccgcctccgtggtggtggcggcggccagtgatctggtctgctgatcgcctcctgccatggggactggctagcacatgccgccttcctgcctgccagtgcgtgctcgtttcgtctttcattacgtcatgtcttgctcaggccgtctcatgcatctccatcagtctcttgtcttaggtcgtcgtttcttcttcacattggtaggaacgcacgctgtgcagtgctttggttaaaacaatttggagtaataaatctggcatattgttctac

SEQ ID NO: 154748 - DNA, 875 bp, Zea Mays
attgatatgttgcttagacaaatcgagtctctttataaacaaaagaagccatattgattttctgatacaggaagattacttttatctatactccaccttctttcgtggctatggcactagcagctatctataaccttttcatcattaacaaatccggcggccttatatactacaaggactatggttcagcagggaggatggataccaatgacagtttaagattagcaagcctctggcattcgatgcatgctatctcgcagcaactgtcccctaccactggctgtactggcattgatctcttacaagctcataactttgatctccattgctttcaatccctcacagggacgaaatttttcgtcgtatgcgaaactggagctccaaatatggaaatgctgctgaaagcgatttacgagctgtacacagacttcgttctgaagaatccgttctatgagatggagatgccgattcggtgcgagctgtttgatcacaacctggctcaggtgatccagaaggaccgtgttgcgctcctgggtcggtgaaattggaaagcttttggtcctaaccataccatgtatcttgtactttcccccctttttctacattatgctcggacttcctgtgcaattgtctcggcagaagacagctggcgaccaacaactgtttggtcctgactattagcaccgtatttggaacagatctatggacgatccgccgtgtgttcttctcatcgtcaatttccagtttttttccccttacaagagccaaaagatgccatagcccatggatgggtcgtttgaacactagtgagcatgaggagacgcgagatcctccgacgtcaaaacaagcgacctcgccagtcgctaattgccatg

SEQ ID NO: 154749 - DNA, 1316 bp, Zea Mays
ggctgcaggcctgcagctactagcctacaacaaatatctacgagctgcactgcagggtacgctcgtctgtgtctgcctactccctcctccggctcccgcgaagcgactccaagaagcagcaggagcgtcgagctcgagcagcagccatggatggcgaggaggttggcaggaggggtattcctactctgctgaagccgtcttcctcctccagcgacggcagtgccggggaacaagagcacatcgcttctgacgtcactcagctcataggatggacgccgctggtcgaattgaagcgaatcgccagcgaggctgggatcgatgcgcggatcgtcggcaagatggaggcttaccagccactttgctccatcaaggaccgctctgctttgagaatgatagaggatgctgaggagaggggattgatttcgcctggagtcacaacactggtggagccgacgagtggtaacatggggttagggttggtcctcttcgctattcagagaggttacaggctcattgcagtcatgccggctaaatactcgcttgacaagcagatcttgctgaggttcatgggcgcggagctatacttaactgatccggcccttggctttccgggcatgtttgacaaagttgaacagctccgaaaacagctgccaaatgtacatgttctgaaccaagtcacgaacaaagcgaattctgaagcccacttcagattgaccgggcctgagatctggaaggacacggcaggcaaggtggatgtattcgtagccggttcaggcacaggaggcactgtttctggcgtcgggaagtatctgaagatgcaaaagccaggcgtcaagatcatctgcgttgagcctgcagaaagcccagtgatttcaggtggcgcgcctggcaagcataaaatccagggagtaggcccagggtttctacctgaagttctggacacctcggtcatcgacgagaccgtcaccgtgagcaccgaggaggccatggcgaatgcgaggaggctggccagggaagagggcctgctcgtgggcatttcttccggagcaaacctggcagcttgtttgaaggtcgcttcgagacaggagaacaagggcaagatgatcgtcactgtgttcccaagtggcggcgagagatacatcaactccgacctctttgcagatgtgcgagaggagtgcattgccatgacattttgatcttccttttttcttttggacactttggtctgaatggtgtcagcattctccacaccacacagacatatttccaggacatggtgttcacgtagattgtctacgtgggaagaccagctcagc

SEQ ID NO: 154750 - DNA, 1479 bp, Zea Mays
ggctgcaggcctgcagctactagcctacaacaaatatctacgagctgcactgcagggtacgctcgtctgtgtctgcctactccctcctccggctcccgcgaagcgactccaagaagcagcaggagcgtcgagctcgagcagcagccatggatggcgaggaggttggcaggaggggtattcctactctgctgaagccgtcttcctcctccagcgacggcagtgccggggaacaagagcacatcgcttctgacgtcactcagctcataggatggacgccgctggtcgaattgaagcgaatcgccagcgaggctgggatcgatgcgcggatcgtcggcaagatggaggcttaccagccactttgctccatcaaggaccgctctgctttgagaatgatagaggatgctgaggagaggggattgatttcgcctggagtcacaacactggtggagccgacgagtggtaacatggggttagggttggtcctcttcgctattcagagaggttacaggctcattgcagtcatgccggctaaatactcgcttgacaagcagatcttgctgaggttcatgggcgcggagctatacttaactgatccggcccttggctttccgggcatgtttgacaaagttgaacagctccgaaaacagctgccaaatgtacatgttctgaaccaagtcacgaacaaagcgaattctgaagcccacttcagattgaccgggcctgagatctggaaggacacggcaggcaaggtggatgtattcgtagccggttcaggcacaggaggcactgtttctggcgtcgggaagtatctgaagatgcaaaagccaggcgtcaagatcatctgcgttgagcctgcagaaagcccagtgatttcaggtagtgctacacagatgcagaaagagcagttgactcgaaacaatcttttcgaagccttgagcagcggccttacaaaaatacagtatttgctagtataagaattagcactgcatctgcacattggtaagcattggtgttcttcaggtggcgcgcctggcaagcataaaatccagggagtaggcccagggtttctacctgaagttctggacacctcggtcatcgacgagaccgtcaccgtgagcaccgaggaggccatggcgaatgcgaggaggctggccagggaagagggcctgctcgtgggcatttcttccggagcaaacctggcagcttgtttgaaggtcgcttcgagacaggagaacaagggcaagatgatcgtcactgtgttcccaagtggcggcgagagatacatcaactccgacctctttgcagatgtgcgagaggagtgcattgccatgacattttgatcttccttttttcttttggacactttggtctgaatggtgtcagcattctccacaccacacagacatatttccaggacatggtgttgtaaatttagagaaataagtgacatgctttctacatatttaaatagattaaata

SEQ ID NO: 154751 - DNA, 1458 bp, Zea Mays
ggctgcaggcctgcagctactagcctacaacaaatatctacgagctgcactgcagggtacgctcgtctgtgtctgcctactccctcctccggctcccgcgaagcgactccaagaagcagcaggagcgtcgagctcgagcagcagccatggatggcgaggaggttggcaggaggggtattcctactctgctgaagccgtcttcctcctccagcgacggcagtgccggggaacaagagcacatcgcttctgacgtcactcaggtgctaccctctcttgccacccaacctttttggctctaatctcctccctgctcccgtttgttgctgctgctactagtggttgaattagagatttgactgttcttgcgcaacggtttccctcagctcataggatggacgccgctggtcgaattgaagcgaatcgccagcgaggctgggatcgatgcgcggatcgtcggcaagatggaggcttaccagccactttgctccatcaaggaccgctctgctttgagaatgatagaggatgctgaggagaggggattgatttcgcctggagtcacaacactggtggagccgacgagtggtaacatggggttagggttggtcctcttcgctattcagagaggttacaggctcattgcagtcatgccggctaaatactcgcttgacaagcagatcttgctgaggttcatgggcgcggagctatacttaactgatccggcccttggctttccgggcatgtttgacaaagttgaacagctccgaaaacagctgccaaatgtacatgttctgaaccaagtcacgaacaaagcgaattctgaagcccacttcagattgaccgggcctgagatctggaaggacacggcaggcaaggtggatgtattcgtagccggttcaggcacaggaggcactgtttctggcgtcgggaagtatctgaagatgcaaaagccaggcgtcaagatcatctgcgttgagcctgcagaaagcccagtgatttcaggtggcgcgcctggcaagcataaaatccagggagtaggcccagggtttctacctgaagttctggacacctcggtcatcgacgagaccgtcaccgtgagcaccgaggaggccatggcgaatgcgaggaggctggccagggaagagggcctgctcgtgggcatttcttccggagcaaacctggcagcttgtttgaaggtcgcttcgagacaggagaacaagggcaagatgatcgtcactgtgttcccaagtggcggcgagagatacatcaactccgacctctttgcagatgtgcgagaggagtgcattgccatgacattttgatcttccttttttcttttggacactttggtctgaatggtgtcagcattctccacaccacacagacatatttccaggacatggtgttgtaaatttagagaaataagtgacatgctttctacatatttaaatagattaaata

SEQ ID NO: 154752 - DNA, 1519 bp, Zea Mays
ggctgcaggcctgcagctactagcctacaacaaatatctacgagctgcactgcagggtacgctcgtctgtgtctgcctactccctcctccggctcccgcgaagcgactccaagaagcagcaggagcgtcgagctcgagcagcagccatggatggcgaggaggttggcaggaggggtattcctactctgctgaagccgtcttcctcctccagcgacggcagtgccggggaacaagagcacatcgcttctgacgtcactcaggtgctaccctctcttgccacccaacctttttggctctaatctcctccctgctcccgtttgttgctgctgctactagtggttgaattagagatttgactgttcttgcgcaacggtttccctcagctcataggatggacgccgctggtcgaattgaagcgaatcgccagcgaggctgggatcgatgcgcggatcgtcggcaagatggaggcttaccagccactttgctccatcaaggaccgctctgctttgagaatgatagaggatgctgaggagaggggattgatttcgcctggagtcacaacactggtggagccgacgagtggtaacatggggttagggttggtcctcttcgctattcagagaggttacaggctcattgcagtcatgccggctaaatactcgcttgacaagcagatcttgctgaggttcatgggcgcggagctatacttaactgatccggcccttggctttccgggcatgtttgacaaagttgaacagctccgaaaacagctgccaaatgtacatgttctgaaccaagtcacgaacaaagcgaattctgaagcccacttcagattgaccggtatggatacaatagcatgtgttcgaacgatgcttatacctcagtgaacagtagctgttgctgggcctgagatctggaaggacacggcaggcaaggtggatgtattcgtagccggttcaggcacaggaggcactgtttctggcgtcgggaagtatctgaagatgcaaaagccaggcgtcaagatcatctgcgttgagcctgcagaaagcccagtgatttcaggtggcgcgcctggcaagcataaaatccagggagtaggcccagggtttctacctgaagttctggacacctcggtcatcgacgagaccgtcaccgtgagcaccgaggaggccatggcgaatgcgaggaggctggccagggaagagggcctgctcgtgggcatttcttccggagcaaacctggcagcttgtttgaaggtcgcttcgagacaggagaacaagggcaagatgatcgtcactgtgttcccaagtggcggcgagagatacatcaactccgacctctttgcagatgtgcgagaggagtgcattgccatgacattttgatcttccttttttcttttggacactttggtctgaatggtgtcagcattctccacaccacacagacatatttccaggacatggtgttgtaaatttagagaaataagtgacatgctttctacatatttaaatagattaaa

SEQ ID NO: 154753 - DNA, 934 bp, Zea Mays
ggctgcaggcctgcagctactagcctacaacaaatatctacgagctgcactgcagggtacgctcgtctgtgtctgcctactccctcctccggctcccgcgaagcgactccaagaagcagcaggagcgtcgagctcgagcagcagccatggatggcgaggaggttggcaggaggggtattcctactctgctgaagccgtcttcctcctccagcgacggcagtgccggggaacaagagcacatcgcttctgacgtcactcagctcataggatggacgccgctggtcgaattgaagcgaatcgccagcgaggctgggatcgatgcgcggatcgtcggcaagatggaggcttaccagccactttgctccatcaaggaccgctctgctttgagaatgatagaggatgctgaggagaggggattgatttcgcctggagtcacaacactggtggagccgacgagtggtaacatggggttagggttggtcctcttcgctattcagagaggttacaggctcattgcagtcatgccggctaaatactcgcttgacaagcagatcttgctgaggttcatgggcgcggagctatacttaactggtactgtgattagttgaaagaaagctatggcatcacctttacttgtcaaattcccttgattaagaaatttatgatgggtggccttcttccttcggggtctactgtatgtgcagatccggcccttggctttccgggcatgtttgacaaagttgaacagctccgaaaacagctgccaaatgtacatgttctgaaccaagtcacgaacaaagcgaattctgaagcccacttcagattgaccggtatggatacaatagcatgtgttcgaacgatgcttatacctcagtgaacagtagctgttgctggtcaggatgtgcagcttaatgctatcttgtttgttgttgct

SEQ ID NO: 154754 - DNA, 775 bp, Zea Mays
agatcggcatacttgtacttcaagtgccaggagaaggaccaccactcccactagctcgtgggttgctggactagctcttccaatcttgatgaagaaaccaaacatgggtgccaaagagttacaaaaagagttgcaagacaaatggaaatgtaccatttcctatgacaccgtttggaagggaagagaaaaggcctttcttgatttgcatggtgcttgggaggacagctttcgactattatttagttggaaggaggcggttttggaaaaaatgccagatagtgttattgagattgatgttcaagaagaggatggaaaggtgtttttcagtaggtttttctgtgcttttggaccatgcataaaagggtttcttcaaggatgcagaccatatctgagtgttgattcgacagctttgaacggtaacagacaccactcgccttgtctcatgcattggaagacgccggttcatcgcagccttctgcaagggtagctgagtcccctccaaggcaaactaggatagctgtacgcaaaatgacaccgaagaagaagaaaatttcgtccatgatttaaattgtagttgtatgatttggaatgtagttgtacggtttgaattattgttctatggtcactttgaatactgtgtgatttcaatatccaaactgcagccagacaaaactgcaattgtggacagaaatgttcttcttcttgctcactgtttggacaaaactgctatgttttttctaataatctagattcattcatggttgtggcatgagtt

SEQ ID NO: 154755 - DNA, 661 bp, Zea Mays
acttttctgccctgctcctagcgacagggcctgtctgttctccttccgccgcaccacaaaacctccatggatgagccgtctcccctagagttggccgacggagatgcagtcctatggctcccagagccggccgccgtagatctagctccgcagctcccagatgaggtggatgtggaaccagacggagtggatccggcatccccgctgctcgtcgttagccccagcctcgtcgtggatcctgccccaccactccctctcgattgcaaggtggatcgacacagagatgaccccttccagcccgccgtggagacgacgcttgccttccagtctgacacggagaggatcctgctactgcgttctctgtccatccccaggacacaggtgagtttcgagtttcgtttatgtagtcttacattattgatagagataaaatgccaattgatagagaaaattgaaatcgaacctagatgggatgaggaaggaacagagggagttgctagtgaacatgggttgtatgttaaactaggactgcaaaaggaggatgaaaaggggaaaaaggttagagaatctagagctaaaaagagaggtgtcggcacctttgaaaatgaatatattgacgatcatgaagggatggcttatcttgagcatataccagaagaca

SEQ ID NO: 154756 - DNA, 3139 bp, Zea Mays
ccccaccacctccctccccagtggcggagcacgacctaaaaataaggtatggcaatgacaaaaatatatcttgcagtaaaacaaaatttagtataaaaacattattaagaagtaccttagatgaagaattccttgtagattatatgtcaaatcagtaacttaaccaaatataagttgtcaaacaaagagcaagcatacattagcattaaaataaagagctaaatttaataaaaaaatgtatagacaatattgttacacataacacaactacctctttctagagcctttctttttgccgaccttgctgagcttgaatctattgcaatttgcaactgcagggcagctaaatttgcaaatagcaagcaacaaagcaagcagaaactgcaagcagcaacgcggccaacgcaactacgcgagcactaagccaactagccaaagccaagcaaccaggcaagcagccggagcactgtagaaggctagcaagcagcaaattgagcaaagcaacttagcaagcagtctgcactataaactacactagccttgcagaactcagagggaacgaatagagtagtgctgggagtttagtgggtcgaggtagctgaagagcaaacaaacacgctgttcggtgttcgccgctctcccatttcaccgagaaagaagggactaatgagaagagagagcatggaggcaggggcagggaggagagggatcccctcgctgctgaaatcgccggcggcgcgggctgatgaatccggaggagccacttcgccgcagcaggagcacatcgcctccgatattacccagcttgtaggatggacgccactggtagagctgaagagaatagcccagaaggacaacgtcgacgcccgagtcgtcggcaagctggagtgctaccagcccctctgctccgtcaaggaccgcagcgctctgagaatgatcgaggacgcagaggagagagggctgatctcgcctggcgccacgacgctggtcgagccgacgagcggcaacatgggcatagccctggcgtacatcgatctggcccgaggctacaggttcgtcgcggtcatgcccgccgagtactcgctcgacaagcagatcctgctgcggtacctgggggccgatttggtgttaaccgatcctgcgcttggcttccagggacagctcgacaagctggaacagctcaggaaagaaatacccaacgcgcacgttcttgaccagttcgcaaacgcggcgaaccctgaagcgcactttagatggactggtagtgccgatctttgcacaggagcatctgatctcataagagagtgataaatgaacttgcctgtgaaacattagcagatttttttcggagcagaaaatgccatgcatgctgtatgacacatcacctctgttcgtctgtgattagggcctgagatctggaaggatacggcaggcaaagtcgacatcttcgtggccggctccggcacgggaggcacggtctctggcgtcggcaggtacttgaacagtagcggatccaggattactctaagagaggggctactaagctaagtctataaatttttttaaaccaaataaaaaatatataattgatgtttaatatgacacaagaagcaagatataatttaaacatttaaaatattttaatcttaatatctacaaacatattacgcttaatatagcatagcagttgttattcatccattcatcacaaaccaaatatgaggttactaccaaataaataattaaattaaaacttcaaataaactttgaatcacaaacctctccttggctcacgtgctcacggtcacaggctcacgggctcacggtcaccgcgtggtcggcggctggacaacgaccagtcggcggctggacaacaacgagtcgacggtcggcggctggacaacgacgagtcggcggccggcggctggacaacctgcgagtcggcgagtcggcggctggacttcgggcgccggtggggcgaggggcctgcgacctacggcagtgctccggccgtccggcggtccggcctccgtgctccgggcgagcggcgctgcgagctccagcggtgctccggggtctgggcgtgggcggctccacctccacggctggcggcggctggagctggagggtataggatagaggaaggatgttcacggggctgggcgcggctggagtgggctgtcgcgcggcgatggacctattcgttttagtgggccgcgaccgggctgcagcccaggcagccccggtcggagatccgccactgtacttgaagacgaagaacccggcggtgaaggtcgtctgcgttgagcctgctgagagcccagtcatttcaggcggcaagccttctcggcacaagatccagggcgtcgggccgggattcgtgcccaagaacctggacacctctgtcaccgacgagatcgttacggtgaccgcagaagatgcgatggcgaacgccaggaggttggccagggaagagggtctgctagtgggcatatcgtctggggcgaatctggcagcttgcctcaaggtggcgtcgagacaggagaaccgagggaagatgatcgtcaccgtgtttcctagcggtggcgagaggtacatgagctccgatctcttcgcggatgcaagggaggagtgcgtcgccatgaccttctgatcttctggacgctctgtgcggatctgcagcggcaaactgctatttctcagcgtggaatggatttttagtatcgtcgatccaatccagcagcttgcggaggcagaagatttggaatccttctggcagaaaatttactgcgcatttgcgttccattggcaggaaagactctgtacatgctcttgggctcttggctaaggacctttacagctttccttatttcttcttggcacagaaatttcagcagagaattgtaccacgagctataaactgagagatgccaatcagtatctcgttgagaaataaccacctggcctctgaataaacaaccatttcatttcttcttcttcttctagtgctgcgagacacactgtcgacgagcaacggaagcctacttccgagttccgagcaactattctatgacgatccgtctagcgtttctttagtttcttaaccacacttgttcagttagcaaagtagctctttgac

SEQ ID NO: 154757 - DNA, 1939 bp, Zea Mays
atctagctagtctctccgtcctgggctcctcacatcgctttctgacttttttttttgtccagtttattttcttgctagcttgcttgcatttcctttgtgcgtgtgtggaagatttgtttccatgtattttcagtgctagtttgagctgccatgatacatgtaaagtttgagttgccatgatacatgtagatcaatcccagttcccctgctgcagcttgtaggatggacgccactggtagagctgaagagaatagcccagaaggacaacgtcgacgcccgagtcgtcggcaagctggagtgctaccagcccctctgctccgtcaaggaccgcagcgctctgagaatgatcgaggacgcagaggagagagggctgatctcgcctggcgccacgacgctggtcgagccgacgagcggcaacatgggcatagccctggcgtacatcgatctggcccgaggctacaggttcgtcgcggtcatgcccgccgagtactcgctcgacaagcagatcctgctgcggtacctgggggccgatttggtgttaaccgatcctgcgcttggcttccagggacagctcgacaagctggaacagctcaggaaagaaatacccaacgcgcacgttcttgaccagttcgcaaacgcggcgaaccctgaagcgcactttagatggactgggcctgagatctggaaggatacggcaggcaaagtcgacatcttcgtggccggctccggcacgggaggcacggtctctggcgtcggcaggctcacgggctcacggtcaccgcgtggtcggcggctggacaacgaccagtcggcggctggacaacaacgagtcgacggtcggcggctggacaacgacgagtcggcggccggcggctggacaacctgcgagtcggcgagtcggcggctggacttcgggcgccggtggggcgaggggcctgcgacctacggcagtgctccggccgtccggcggtccggcctccgtgctccgggcgagcggcgctgcgagctccagcggtgctccggggtctgggcgtgggcggctccacctccacggctggcggcggctggagctggagggtataggatagaggaaggatgttcacggggctgggcgcggctggagtgggctgtcgcgcggcgatggacctattcgttttagtgggccgcgaccgggctgcagcccaggcagccccggtcggagatccgccactgtacttgaagacgaagaacccggcggtgaaggtcgtctgcgttgagcctgctgagagcccagtcatttcaggcggcaagccttctcggcacaagatccagggcgtcgggccgggattcgtgcccaagaacctggacacctctgtcaccgacgagatcgttacggtgaccgcagaagatgcgatggcgaacgccaggaggttggccagggaagagggtctgctagtgggcatatcgtctggggcgaatctggcagcttgcctcaaggtggcgtcgagacaggagaaccgagggaagatgatcgtcaccgtgtttcctagcggtggcgagaggtacatgagctccgatctcttcgcggatgcaagggaggagtgcgtcgccatgaccttctgatcttctggacgctctgtgcggatctgcagcggcaaactgctatttctcagcgtggaatggatttttagtatcgtcgatccaatccagcagcttgcggaggcagaagatttggaatccttctggcagaaaatttactgcgcatttgcgttccattggcaggaaagactctgtacatgctcttgggctcttggctaaggacctttacagctttccttatttcttcttggcacagaaatttcagcagagaattgtaccacgagctataaactgagagatgccaatcagtatctcgttgagaaataaccacctggcctctgaataaacaaccatttcattt

SEQ ID NO: 154758 - DNA, 103 bp, Zea Mays
cttttccatggatctcatattttcatgcgatagatccaacactccttccatacaattcactttcagagttattttctttatggggtcactaagtttgtgttgt

SEQ ID NO: 154759 - DNA, 1097 bp, Zea Mays
tataaactacactagccttgcagaactcagagggaacgaatagagtagtgctgggagtttagtgggtcgaggtagctgaagagcaaacaaacacgctgttcggtgttcgccgctctcccatttcaccgagaaagaagggactaatgagaagagagagcatggaggcaggggcagggaggagagggatcccctcgctgctgaaatcgccggcggcgcgggctgatgaatccggaggagccacttcgccgcagcaggagcacatcgcctccgatattacccagcttgtaggatggacgccactggtagagctgaagagaatagcccagaaggacaacgtcgacgcccgagtcgtcggcaagctggagtgctaccagcccctctgctccgtcaaggaccgcagcgctctgagaatgatcgaggacgcagaggagagagggctgatctcgcctggcgccacgacgctggtcgagccgacgagcggcaacatgggcatagccctggcgtacatcgctctggcccgaggctacaggttcgtcgcggtcatgcccgccgagtactcgctcgacaagcagatcctgctgcggtacctgggggcagatttggtgttaaccgatcctgcgcttggcttccagggacagctcgacaagctggagcagctcaggaaagaaatacccaacgcgcatgttcttgaccagttcgcaaacgcggcgaaccctgaagcgcactttagatggactggtagtaccgatctttgcacaggagcatctgatctcataagagagtgataaatgaacttgcctgtgatagaacggctccctgaggccacaattggtggagcaccaagaatctgatcggtgcagacatgagatgttctgggatgcaatactgtggcggtacttgtccatctgaccaagtcactgtttcatgtttgaagccacggcaaggactaggataagaatgctgctttgtaggttgagcttactgtaactactaagaaatttttattatgtaccaaccttatcatttctacaatgttgcgggatgtctgaagtaattctttgttaaaagatcgggtatcctgctcccttttgcttctc

SEQ ID NO: 154760 - DNA, 2197 bp, Zea Mays
ctgtgatcatgtttctataactctttttccctcttcaatgaaggcatagctcctaccatttgctttcaaaaaaaatatccgcaggagaagttccagggcaaggtatctcgagccaaagttgacacgactgtcatatgaaaactgacttgattcttcactaatctcgcagcccatcacccaagttttcagaacttaaataaaaccaagtgctgcacacacacatttcatcgaacacatgaacctcacacaaatccgaatccgcatccatctgaaggccgaagttatacgaagaggataataatacgaggagagcgcggtataaacaaacagcagtagccgcacctgtagttggtgtgcatgagtgcgagcttgagcggccccgactgcagctcggcccagcggagcgtgcagacatttacactgaagtcgagaccctccgagtagaaccgtgctgcccgcggtacgtcccggtgcagctgcagcacccaccggagcgtcgccgccgccattccccaccacctccctccccagtggcggagcacgacctaaaaataaggtatggcaatgacaaaaatatatcttgcagtaaaacaaaatttagtataaaaacattattaagaagtaccttagatgaagaattccttgtagattatatgtcaaatcagtaacttaaccaaatataagttgtcaaacaaagagcaagcatacattagcattaaaataaagagctaaatttaataaaaaaatgtatagacaatattgttacacataacacaactacctctttctagagcctttctttttgccgatctttgctgagcttgaatctattgcaatttgcaactgcagggcagctaaatttgcaaatagcaagcaacaaagcaagcagaaactgcaagcagcaacgcggccaacgcaactacgcgagcaactaagccaactagccaaagccaagcaaccaggcaagcagccggagcactgtagaaggctagcaagcagcaaattgagcaaagcaacttagcaagcagtctgcactataaactacactagccttgcagaactcagagggaacgaatagagtagtgctgggagtttagtgggtcgaggtagctgaagagcaaacaaacacgctgttcggtgttcgccgctctcccatttcaccgagaaagaagggactaatgagaagagagagcatggaggcaggggcagggaggagagggatcccctcgctgctgaaatcgccggcggcgcgggctgatgaatccggaggagccacttcgccgcagcaggagcacatcgcctccgatattacccagcttgtaggatggacgccactggtagagctgaagagaatagcccagaaggacaacgtcgacgcccgagtcgtcggcaagctggagtgctaccagcccctctgctccgtcaaggaccgcagcgctctgagaatgatcgaggacgcagaggagagagggctgatctcgcctggcgccacgacgctggtcgagccgacgagcggcaacatgggcatagccctggcgtacatcgctctggcccgaggctacaggttcgtcgcggtcatgcccgccgagtactcgctcgacaagcagatcctgctgcggtacctgggggcagatttggtgttaaccgatcctgcgcttggcttccagggacagctcgacaagctggagcagctcaggaaagaaatacccaacgcgcatgttcttgaccagttcgcaaacgcggcgaaccctgaagcgcactttagatggactggtagtaccgatctttgcacaggagcatctgatctcataagagagtgataaatgaacttgcctgtgatagaacggctccctgaggccacaattggtggaggtatgtgatatcttcatctgacaaactttgttactgtgttctctctgtccctagcttatatcctacaatcacataagattgcagtactctgatgcttttttggcattcttgcagcaccaagaatctgatcggtgcagacatgagatgttctgggatgcaatactgtggcggtacttgtccatctgaccaagtcactgtttcatgtttgaagccacggcaaggactaggataagaatgctgctttgtaggttgagcttactgtaactactaagaaatttttattatgtaccaaccttatcatttctacaatgttgcgggatgtctg

SEQ ID NO: 154761 - DNA, 1713 bp, Zea Mays
agtggcctcatctctctcttcctcttctcccgccgcccagcttctctcttctctcggcggcgccaccacggcgatcaagcgcgatacgggcgtaaccgaagaatcgacaatgggcggcgagaaggaaacctttgatacgtccgacctcaacgcctccctccccgcggccgctgcagccctcagcgccgaggaccgcgccggcctcgtcaatgcccttaaggataagctgcagagcctggcgggccagcacgccgatgtgttagagacgctgtcgcccaatgttaggaagcgggttgagtttttgagagagatccagagtcaacacgatgaaattgaggccaagttttttgaagaacgagctgcccttgaggcaaagtaccagaagctttatgaacctttatacacaaagaggtatggaattgtaaatggagaagtggaggtagatggtgtttgtgatgaaccggccagtgagaatactgttgagggaaaagaaccagacgctaaaggagttccagacttttggcttactgccatgaaaacaaacgaggttttgtctgaggagatacaagagcgcgatgaagccgctttgaaatatctaaaagatatcaagtggtctagaatcgaggatcctaagggtttcaagctggattttttctttgatacaaacccattcttcaagaattctgtcctgacaaaaacgtaccacatggttgatgaagatgacccaattttggagaaagctattggaactgaaatcgagtggtatcctgggaaaaacctaacacagaagattctaaaaaagaaacctaaaaaaggttcaaagaatacgaagcctatcactaaaaccgaggactgtgagagtttcttcaactttttcaatcccccgcaggtccctgaagatgatgatgacatcgatgaagacactgctgatgagctgcagagtcaaatggagcatgattatgacattgggaccaccataagggataagattatccctcacgcagtttcctggtttactggtgaggctgtgcaaggtgaggattttggtgagttgggcgatgatgatgaagatgatgatgatgaagacgatgacgaagatgatgaggatgaagaagaggatgatgatgaggaagaggatgatgaggaagaaagcaagccagcaaggaagtcaggatctggtcgcagacataaggtacatgatctgaaattcacaggctgatctgaagtgtccctccctatatattccctccgttcttttttatttgtcgcggtttagttaaaaaatgaactagcgggcgacagatattcgagaacggaggcgccacagaaggtgtcgcagggaaatgcggaacaaccagcggagtgcaagcagcagtagaatggcctgttgatgttggttgatgcagtattttccattgagctgcctagaggttatgtgtgcgcaggccagatgttggtgttgatatctcaagtgtggtttttattagtaggcggtgagggtgttgtctggagcactttggtgctgcgttggtggatggatattggtttgcaacttgtctgctagtgtcttggggattcagctacgtgcaatcggatgatattatatggttgtaattatctttgcactcggcctataacggctctttatttgcactgtgtctatgttggctatcttgaattgatttgtagttgcttaggctgttccattgctat

SEQ ID NO: 154762 - DNA, 1608 bp, Zea Mays
cacgagtgagactagggttttagtggcctcatctctctcttcctcttctcccgccgcccagcttctctcttctctcggcggcgccaccacggcgatcaagcgcgatacgggcgtaaccgaagaatcgacaatgggcggcgagaaggaaacctttgatacgtccgacctcaacgcctccctccccgcggccgctgcagccctcagcgccgaggaccgcgccggcctcgtcaatgcccttaaggataagctgcagagcctggcgggccagcacgccgatgtgttagagacgctgtcgcccaatgttaggaagcgggttgagtttttgagagagatccagagtcaacacgatgaaattgaggccaagttttttgaagaacgagctgcccttgaggcaaagtaccagaagctttatgaacctttatacacaaagaggtatggaattgtaaatggagaagtggaggtagatggtgtttgtgatgaaccggccagtgagaatactgttgagggaaaagaaccagacgctaaaggagttccagacttttggcttactgccatgaaaacaaacgaggttttgtctgaggagatacaagagcgcgatgaagccgctttgaaatatctaaaagatatcaagtggtctagaatcgaggatcctaagggtttcaagctggattttttctttgatacaaacccattcttcaagaattctgtcctgacaaaaacgtaccacatggttgatgaagatgacccaattttggagaaagctattggaactgaaatcgagtggtatcctgggaaaaacctaacacagaagattctaaaaaagaaacctaaaaaaggttcaaagaatacgaagcctatcactaaaaccgaggactgtgagagtttcttcaactttttcaatcccccgcaggtccctgaagatgatgatgacatcgatgaagacactgctgatgagctgcagagtcaaatggagcatgattatgacattgggaccaccataagggataagattatccctcacgcagtttcctggtttactggtgaggctgtgcaaggtgaggattttggtgagttgggcgatgatgatgaagatgatgatgatgaagacgatgacgaagatgatgaggatgaagaagaggatgatgatgaggaagaggatgatgaggaagaaagcaagccagcaaggaagtcaggatctggtcgcagacataaggcgccacagaaggtgtcgcagggaaatgcggaacaaccagcggagtgcaagcagcagtagaatggcctgttgatgttggttgatgcagtattttccattgagctgcctagaggttatgtgtgcgcaggccagatgttggtgttgatatctcaagtgtggtttttattagtaggcggtgagggtgttgtctggagcactttggtgctgcgttggtggatggatattggtttgcaacttgtctgctagtgtcttggggattcagctacgtgcaatcggatgatattatatggttgtaattatctttgcactcggcctataacggctctttatttgcactgtgtctatgttggctatcttgaattgatttgtagttgcttaggctgttccattgctat

SEQ ID NO: 154763 - DNA, 95 bp, Zea Mays
cttctttagcccttgtgttgtgcttttcatgtttatctggcacctgtttctactacatgacttcagttatgctactattgatatgataggaaggg

SEQ ID NO: 154764 - DNA, 1131 bp, Zea Mays
atgggagcacggaggagattcgacgagcagactgggcgagcaccaggaagttctgagctatggcagccacagggcgagagcagtgctgctacagtagtgaccgctgcagcagataggacaacggaggaagagaagaaaagaacgacggctgctaggaaagaggtaacggatgtagacgataatcgtttcagcttatcaaattcgaaagtacgctgcacgcctgactgccgctccacacccaccctcgtgatgctcgccagagtagtcgaccgccgggcctccgccatccgccgcttcccgccgggctgcggccgcccccacaaaccggcggcggggcctccgccgtaccaccggattccaaccgccgccgccgccaaaactaaacacacactcccgaacccctccgcgcgagcggccaccaataccgccccacccccgccaagacaaaccctctcagcaaccgcctccttgggtgccgaggcgcccgaccgtggcgtggggagcggaaggaatgccgctgcggtggtgaccgttcgcctcgtctcggccgttagggggtacccgccgggctgcgggcgaggcgtcgccgtgtccaagtcgaagccaccggattcggaggatgaagcggagcgtgaggacggcgcgggtaatccgtcggcggtggtgggcaacggtgaccccaaggccagagcttgtgacggggatgtgatgctacgcgcgtctgcgcttgatcatgcggagttcagttccaatggtggggtgacgaccggaggtgatggtgacgctggtgcacatgatgaaggtggtgggaagccttgggaggttactggcctcatggcggcgccgttcttgccatgggcgcggcatgagaggaggtcacagcggggcagcggcggaaggccttaacctgctgtaaagcatgtgcgaaacgtggcccttggtttgcttgataggttgcatatatgttggaccatttgctgatcgtagtcgtccttttggatgatcatcctattgacagtgaactgtgaaggatttgatcacttctaaatgctttgtttccaaaaattaccatatactgtggtcagaatcacagaatttaattactaatggaagagttgttgtttcatttaa

SEQ ID NO: 154765 - DNA, 688 bp, Zea Mays
cggggccgatctggagggagatccggccaggcgcggccggcgctgggaacttgaggagcgtgcagggaattccatggcggggaccaggggctcggttgggggaagaagaagtgctcggctgggagaaacaccggggcgccatgggagcacggaggagattcgacgagcagactgggcgagcaccaggaagttctgagctatggcagccacagggcgagagcagtgctgctacagtagtgaccgctgcagcagataggacaacggaggtcggaggccccttccaaggaagcaatgccaagaaccaacaagaacacggcaagaactagcatcactacagttgcaacaaataataatcttactaaatcgccatcgatctcgacggcaaattatccgctaatcatcttccacctccagctaagttctccgagaaccatcattgcaaaatgtgctgccataagcatgcaaacattactcccgccataagcatgcaaacaaggacatcttttcttatctctcttgccccccatctgtcacggcaatgggcaaaatagttcgttcttctgctcaccgacgcgagccaatgatgctccttgatctccattctccataggcaccgtttccggcacggtgcgtcacgcggcgcaggtgtacggccaggcgtcgcggctctcctcgtcgggggtagctg

SEQ ID NO: 154766 - DNA, 262 bp, Zea Mays
ttccgcttcgccgccaccccacaacgccggcatcggcctcaggtccagatttggacccgcaacagtagcaccagccaccgtcgttcccgaccatcactggcgatggcgtcgccgaccagcggcgagtctccccatgacgtccaaatgaggttgacgccaaggttccaccttaccacccaagtgatgtttgttatttcgtatatatgtttcatactaattttttactcccgtggcaacgcacgggcatgaacctagttagtat

SEQ ID NO: 154767 - DNA, 146 bp, Zea Mays
tgtatttttttttcttcatattctcgtatgactttcagggattacgaactctcgaaaggattacctatagatcctttggcttttcaagtgatcccttgaattgaaccacttaaaattttgaagaacctaaataaactgggttagaa

SEQ ID NO: 154768 - DNA, 98 bp, Zea Mays
agaaattggaggagctatatatatgactaagagtcttgctaataagctccgtctcaaagagcgcatttatactattcgtatggcggaaggtacatcta

SEQ ID NO: 154769 - DNA, 1614 bp, Zea Mays
cagcaaacgtcaggcaccatagcgttcggccaggttcattcccctcctctgcgatctcctctgatcggatttccctctcccatggcggctgctcgttcttcctctgctcggcctctgtagctcgccgggatgctccacgctcgctctccctgctgcagcgcctgaacgccctgccctttgctctagctcgccgcgcgccctggtcgtctcccagcccgcccaggcatcgggcgcaatcgcccctggcagccgtgcctgctcccatggccggcgcttggccttctgctcgccgcggatgcgcgctggctgccaagtcttctccctgctcggtcccttccccagcgcctgctccagttcgtcggccgaccatcgctgttcctctggcgccgcgactctctgctcgcgtcgcgcccagtcttcagctcgcggagctctctctctcccgtggatgccgtggagtttccccgccgcgtccatggtcctgttaggagttcgcctaggcccgcgcttcctgcatcgcgcccagccgcgttcttcacagccggctgctgctccctggcgcagctcgttcagtccagccgcgcctgctttcccatggccgcgcgcgaagttttcggctcgccgcgccctggattccctggccttcgcgccctggccctctgcccggagctccctgttccgctcggcgctctccctgctcgctctggacgcgcagctcccttcgtcgcgcccaggccgtatcccgctccagctcgccgaagtccctcccacggctgtctccctcaagccgccgtgagctccatgctctgaaattcgtgcgtcgcctccttcccatttgtcgtgccttgcgacgctcgtcatggacctcgtcgtcgacccacgttgtgcccacgacgtgctcatcgactctgatgatttgatttccaatttcgtgcggcttatgtcaaccctcagaattccttgtcgtgctcgaccctgcaagtctccgacttgtcgacatcccttgcgtcgtcgaacgatcccgagaatttggataaagcaataaatcccgtgtggccgggtgctcggaaaaaggtctgcgcaagaatcgttgctgtctgcgcgaagttatggtcaatatggtaatcatactctgattcgctaccgctattatttttttagtggatggattaatagatatggaggttgcgacgatcctttttatttagcataggtacgcttagtgattatggccagctcggttgttgtgtcggcgtgctgttatgtgaccatttttattaatttagcatacgtatgttgtgatgttcgtaattatgaaatagtcgcgaggtgtggtaaaatataggtgtaaggtacacctgctagcgcgaatgattaaatatcgtatttaactcgtaggctgtacaagttaatccgatgaaatggcttagaaaactagttaagttagttttaagtatggttttggccgattgtgattagcaccatcgacttgtattttatgcgtctcaatttacaaaatggaaacatatgtctagtataatcggattgatctgatgcttgtgatgtacttgtgttcaatggtgaattaatcacattgtataatgatcatcaatt

SEQ ID NO: 154770 - DNA, 116 bp, Zea Mays
gttgatgtttgactacaattgtgtctgctctcttttcagtgatgacaaagataattaggtgctggtgtaggaacgtggaacttttgccttcacagttgcagccatgtgtaattcag

SEQ ID NO: 154771 - DNA, 210 bp, Zea Mays
atgccgcctctgcacactaattacctccaagtgtacaaattcaacaattacaacctcacagtcacagtgctcattatgttagcaatcaaaaaggcagcgggcaaatgtgttattgaaatgaacaccagcacaagcaagatagcttttgacagagttcacagaaggctgctcgtcgctgattccttttgggagttaggtgctgggtggtag

SEQ ID NO: 154772 - DNA, 309 bp, Zea Mays
atgttagatggcgagagtcgtgctgctgccctaattcattctggcaatgaaattttggagacagctagatactcttctgaagccaggttattttcctctcctattctggcactggtagaatgctggttattttgctgattgaatctgttttaatttgtcttgtcaaaacttgcttgcaacattcaagagaaggatctcatttctgagcaacaaactgtgctgagacagcttgaagctattctccatatttataggctagttcgagctgggcaaactgtagatgctttgagggaaaccatcaggctaccc

SEQ ID NO: 154773 - DNA, 108 bp, Zea Mays
gttaaacttaggctctgcctggctcagtagtagccttttgaaagtaccttttttgtgctattgtattggagccatgactgtaagacattctaaactgcttcacgtgac

SEQ ID NO: 154774 - DNA, 3411 bp, Zea Mays
cttttcagttttctccgtgcctcttgctccctcctggctccgcgcctgggccaccgagcccgcgatcggattcgctccctcttcgccgcgccccaccacccatcgccgctggggatccctagggtttagtgcagtcgctcggctccgcgccgtcctcgccgctgctgccaccatgccgctcaggttggagatcaagcggaagttcgctcaacggtcggagagagtcaagtccgtggacttgcaccccacggagccatggatcctgtcgagcctgtactcggggagtgtctgcatctgggattatcaggcacaggcaatggtgaaatcatttgaagtttcagaactgccagtgaggtcggcaaagtttatttcaaggaaacaatgggttgtagctggtgcagacgacatgttcattcgtgtctacaactacaataccatggacaaagttaaagtttttgaggctcatactgattacatcagatgtgttgcggtccatccaactctaccatatgtgctgtcatcatctgatgacatgctaataaaactgtgggactgggataaagggtgggtgtgcactcaaatatttgagggacattcacactatgtgatgcaggttactttcaatccaaaggatattaacacctttgcaagtgcatcccttgaccgcactacaaagatatggagtttgggttctccagatccaaacttcacacttgatgggcatcaaaagggtgtcaactgtgttgactacttcactggtggtgacaggccctatttgattactggttctgatgactccaccgcaaaggtctgggattaccagacgaagagctgtgttcagacacttgaagggcatacacataatatttctgctgtttgtttccatcctgagctccctataatcattactggatctgaagatggtacagttcgtatatggcattcgacaacttacagacttgagaacacactaaactatggccttgagagagtctgggctgttggatacatgaaggggtctagaaggatggtgattggttatgatgaggggaccattatgataaaaatgggccgtgaagtacccatagcaagtatggataccggtgggaaaatcatttgggcgaaacataatgaaatacaaactgtaaatatcaagacagtcggtgcaggttttgaagccacagatggagaaagattacccttggctgtaaaagagttaggaagctgtgatttgtacccacagagcttgaagcataaccctaatggacggttcgttgttgtatgtggagatggcgagtacataatttatactgccctggcctggaggaatagatcatttgggtctgcactggaatttgtttggtcatcagaaggagaatatgcaattagggaaagtacatcaagaataaagattttcaataaatcgtttcaggagaagaaaactatccgcccttcattttcagcagagcgtatttatggtggggtattgttggcaatgtgttctagtgacttcatctgcttttatgactgggctgattgtagactaatacgccgaatcgatgtgaatgttaagaatgtttactgggctgatagtggtgacctagttgcaatagcaagtgatacatcattctacatcctcaagtacaatagagatattgttgcttcttatctagaaggtggaaagcctgtggacgaagaaggcgttgaagatgcttttgagctgcttcatgagatcaatgagcgagtgagaactggaatttgggttggagactgctttatctataacaactcatcgtggcgcctaaattattgtgttggtggtgaggtcactacaatgtatcatttggatcgccctatgtacttgttgggatatattgcgaaccaaagtcgagtttatcttattgacaaggagttgaatgtcattgggtacacattacttctgagtttgattgagtacaagacccttgtgatgcgtggggatttggatcatgcaaacaaaattttatcatccatacctaaggcgcaatataatagtgttgctcattttttggaatcgagaggtatgttggaagaggctcttgagatagccactgatgctgactacaagtttgacctagctgtgcagcttggaaaattagaagtcgcgaaggctatcgccatagaagcacaaagtgaatctaaatggaagcagttgggcgaacttgccatgtccacaggcaagctagagatggcagaggaatgccttcttcaagcaaaggacttaagtggcttgttgctactgtactcatctcttggagatgctgaaggaattgaaaagcttgcttctttggcaaaagaacacggaaaaaacaatgttgctttcctctgcctttttatgcttggtaaagttgaagattgcatacagttgcttgtagacagtaaccgtatacctgaagctgcattactggcgcgttcatatcttcctagcaaagtaccagagatagtggcaatttggagagacgacctgagtaaaattaatccaaaagctgcagagtctctagcagatccttctgaatatccaaatctatttgaagactggcaggttgctctaactgtagaaaaaagtgttgcgtctcagaggggcaattatcttcctgctgaccagtacttgaatcatgctgagaagtcagacatgactattgtggaagctttcaaaaggatgcaggttgttcagcatgaggaacctgaagatgtggctgaggaaaatggagaacttgatcaacaggcatttgaagagactgaaatgcagaatacagatgatgatgctgatgaacctgaagagacagttttagtaaatgggaacaagggtgaggaacatcagggtacggacaatgaaggagctttatctgcctagaattcttggcaaatatgggaaccccaagttttgcctacgtgctaactcaacatgaataggggctgaaagaagcacagctcattggctgcaaatttttttttctgagggtaacaaatgtgggccccctgttttactctgaagcaccggaactggtgatgctggaccgcctgatgcttgtcatatagaaggtcgctatactttttggtgtcaatctgcccatccagtcatgcttctttttgtaaacaacgtaggcaattctttcttcttggaacgtttgcagacccaatttccatgccgtgaaatcaatggatcgggtgtggggccagctgcaatgaatagtgtttgaataattggtatagaggtatgtagtaaaaatatgccagattaccataggagatgacagcttttgttacccattcattgtaatgaccttattcgataaggttacgtgtagtctacgattgcagttgcgggccgggagttttttcccatgttatgtagcatcattctatcggatc

SEQ ID NO: 154775 - DNA, 3191 bp, Zea Mays
cttttcagttttctccgtgcctcttgctccctcctggctccgcgcctgggccaccgagcccgcgatcggattcgctccctcttcgccgcgccccaccacccatcgccgctggggatccctagggtttagtgcagtcgctcggctccgcgccgtcctcgccgctgctgccaccatgccgctcaggttggagatcaagcggaagttcgctcaacggtcggagagagtcaagtccgtggacttgcaccccacggagccatggatcctgtcgagcctgtactcggggagtgtctgcatctgggattatcaggcacaggcaatggtgaaatcatttgaagtttcagaactgccagtgaggtcggcaaagtttatttcaaggaaacaatgggttgtagctggtgcagacgacatgttcattcgtgtctacaactacaataccatggacaaagttaaagtttttgaggctcatactgattacatcagatgtgttgcggtccatccaactctaccatatgtgctgtcatcatctgatgacatgctaataaaactgtgggactgggataaagggtgggtgtgcactcaaatatttgagggacattcacactatgtgatgcaggttactttcaatccaaaggatattaacacctttgcaagtgcatcccttgaccgcactacaaagatatggagtttgggttctccagatccaaacttcacacttgatgggcatcaaaagggtgtcaactgtgttgactacttcactggtggtgacaggccctatttgattactggttctgatgactccaccgcaaaggtctgggattaccagacgaagagctgtgttcagacacttgaagggcatacacataatatttctgctgtttgtttccatcctgagctccctataatcattactggatctgaagatggtacagttcgtatatggcattcgacaacttacagacttgagaacacactaaactatggccttgagagagtctgggctgttggatacatgaaggggtctagaaggatggtgattggttatgatgaggggaccattatgataaaaatgggccgtgaagtacccatagcaagtatggataccggtgggaaaatcatttgggcgaaacataatgaaatacaaactgtaaatatcaagacagtcggtgcaggttttgaagccacagatggagaaagattacccttggctgtaaaagagttaggaagctgtgatttgtacccacagagcttgaagcataaccctaatggacggttcgttgttgtatgtggagatggcgagtacataatttatactgccctggcctggaggaatagatcatttgggtctgcactggaatttgtttggtcatcagaaggagaatatgcaattagggaaagtacatcaagaataaagattttcaataaatcgtttcaggagaagaaaactatccgcccttcattttcagcagagcgtatttatggtggggtattgttggcaatgtgttctagtgacttcatctgcttttatgactgggctgattgtagactaatacgccgaatcgatgtgaatgttaagaatgtttactgggctgatagtggtgacctagttgcaatagcaagtgatacatcattctacatcctcaagtacaatagagatattgttgcttcttatctagaaggtggaaagcctgtggacgaagaaggcgttgaagatgcttttgagctgcttcatgagatcaatgagcgagtgagaactggaatttgggttggagactgctttatctataacaactcatcgtggcgcctaaattattgtgttggtggtgaggtcactacaatgtatcatttggatcgccctatgtacttgttgggatatattgcgaaccaaagtcgagtttatcttattgacaaggagttgaatgtcattgggtacacattacttctgagtttgattgagtacaagacccttgtgatgcgtggggatttggatcatgcaaacaaaattttatcatccatacctaaggcgcaatataatagtgttgctcattttttggaatcgagaggtatgttggaagaggctcttgagatagccactgatgctgactacaagtttgacctagctgtgcagcttggaaaattagaagtcgcgaaggctatcgccatagaagcacaaagtgaatctaaatggaagcagttgggcgaacttgccatgtccacaggcaagctagagatggcagaggaatgccttcttcaagcaaaggacttaagtggcttgttgctactgtactcatctcttggagatgctgaaggaattgaaaagcttgcttctttggcaaaagaacacggaaaaaacaatgttgctttcctctgcctttttatgcttggtaaagttgaagattgcatacagttgcttgtagacagtaaccgtatacctgaagctgcattactggcgcgttcatatcttcctagcaaagtaccagagatagtggcaatttggagagacgacctgagtaaaattaatccaaaagctgcagagtctctagcagatccttctgaatatccaaatctatttgaagactggcaggttgctctaactgtagaaaaaagtgttgcgtctcagaggggcaattatcttcctgctgaccagtacttgaatcatgctgagaagtcagacatgactattgtggaagctttcaaaaggatgcaggttgttcagcatgaggaacctgaagatgtggctgaggaaaatggagaacttgatcaacaggcatttgaagagactgaaatgcagaatacagatgatgatgctgatgaacctgaagagacagttttagtaaatgggaacaagggtgaggaacatcagggtacggacaatgaaggagctttatctgcctagaattcttggcaaatatgggaaccccaagttttgcctacggtgattcactgtctttgaatttttgagttttagtacacttgaatccatagctgtcctcaaagtttgggtagccattccaatctatctcaatacacaatattgacaattaatcaggagatgaaattacaataatagattaccagatcgtcaattcacctctccctcatttaacctttttaatcgatgtgcttattacaaatattctgatatagttttgtggatgatagtgccattgggttgctaaggaacctagaaatat

SEQ ID NO: 154776 - DNA, 1592 bp, Zea Mays
cagccgacggctctgatgtgactgagcagtgagcacaggcgcgtcaacccgggtgccttcacgcttgacaggcacccatcccacgccacgggctcctcctcccctccgcttctcctctaggtccctctcctacagaacccttccaatccaaagcgaatcctccgggccgccgcggcggcgtctccccgggcgcccctagcacagctcgcgttccggtggaacagagaagagaggcgagaggatggagatccagtcgtctggccgctccatcgaggggctgatggagaaggtgctgtccgtgaacatcctctcctcggactacttcaaggagctcttcaagtacaagacctaccacgaggtcgtcgacgagatctacaaccaggtggaccacgtcgagccctggatgaccggcaactgccgcgggccctcctccgccttctgcctcctctacaagttattcaccatgaagctcaccgtcaagcagatgcacggcctgctcaagcaccaggactccccctacatcagagctattggattcctctacctacgatacgttgcagaaccgaagacactttggacttggtatgaaccctatatcaaggatgacgaggagtttgcacctggatcaaatcgtaaagtgactacaatgggcgtttatgtgcgtgatctcctccttggtcagtactatttcgacagtctccttccacgagtgcctctcccaatcctccgacaggtcactagccaccttgagaagctaaagcttccaacaaagcagtcaggaatgactggggattccaacaggcttgaatcaaatgataccgccagaaggcctccttccgtaaaggcttctttgtctgtctcctttggtcagcgcgctccacaccgtgcatccacaagggattcttccccggtccgaagaacgttaccttccaaacaggacaaggaaggtgaccgtgcgaaatcgccaccgatgaagcaccggagtcggagctctgagcgtgatcatgatttggagagggagcgctcggatcgtgaacgtggcagtggcaggtactacaaggatagggagcctgatcggcatgctcgtgagcacagagaccgcgatcatcgtcggtctgattattcgaacagggatggcgaaacacgaggccgtgaaaggagggacagggattctgaccggagtagacatgcaagcgtccgcaggagcaggagcaggagtccagtccgtggcagaagtgatggcgacaaacatcgctccagcccgtttggtagggctccagaattgtcgaacctggcgaagctgaaggatctgtacggcgatgcgacaaacgtgaagaatgatgctggcgacgatagggcgcacagggattctggaacggaagaggtgatccgactgggaggggcaaggtggaggtgagtctcatgttaagggacagtgggacacccacggtgatgcatttaggtccatgaatgaatccaaacagcatcagtggaggaaatgatgggctgtatgtcttaacttgaacctacgatttcaatgctttattctgaaggttttcctctcattatgctattaatgtttttacatgaaa

SEQ ID NO: 154777 - DNA, 1849 bp, Zea Mays
cagccgacggctctgatgtgactgagcagtgagcacaggcgcgtcaacccgggtgccttcacgcttgacaggcacccatcccacgccacgggctcctcctcccctccgcttctcctctaggtccctctcctacagaacccttccaatccaaagcgaatcctccgggccgccgcggcggcgtctccccgggcgcccctagcacagctcgcgttccggtggaacagagaagagaggcgagaggatggagatccagtcgtctggccgctccatcgaggggctgatggagaaggtgctgtccgtgaacatcctctcctcggactacttcaaggagctcttcaagtacaagacctaccacgaggtcgtcgacgagatctacaaccaggtggaccacgtcgagccctggatgaccggcaactgccgcgggccctcctccgccttctgcctcctctacaagttattcaccatgaagctcaccgtcaagcagatgcacggcctgctcaagcaccaggactccccctacatcagagctattggattcctctacctacgatacgttgcagaaccgaagacactttggacttggtatgaaccctatatcaaggatgacgaggagtttgcacctggatcaaatcgtaaagtgactacaatgggcgtttatgtgcgtgatctcctccttggtcaggtatatctcttgaagttatttcacaattattccatataaaaaaacagtatcctgagctgctatcacagtgtctccttagttatccaactacatccgagggcagagaccgttaaccatattattttctgaacttaaatgcaattagtcttccttgaatcactcacctgttgatttggcatactgaggggatgtttcaattgtggagttgcttttaagaggagacatcatctcttccgccagtaacatcactgtataagtactatttcgacagtctccttccacgagtgcctctcccaatcctccgacaggtcactagccaccttgagaagctaaagcttccaacaaagcagtcaggaatgactggggattccaacaggcttgaatcaaatgataccgccagaaggcctccttccgtaaaggcttctttgtctgtctcctttggtcagcgcgctccacaccgtgcatccacaagggattcttccccggtccgaagaacgttaccttccaaacaggacaaggaaggtgaccgtgcgaaatcgccaccgatgaagcaccggagtcggagctctgagcgtgatcatgatttggagagggagcgctcggatcgtgaacgtggcagtggcaggtactacaaggatagggagcctgatcggcatgctcgtgagcacagagaccgcgatcatcgtcggtctgattattcgaacagggatggcgaaacacgaggccgtgaaaggagggacagggattctgaccggagtagacatgcaagcgtccgcaggagcaggagcaggagtccagtccgtggcagaagtgatggcgacaaacatcgctccagcccgtttggtagggctccagaattgtcgaacctggcgaagctgaaggatctgtacggcgatgcgacaaacgtgaagaatgatgctggcgacgatagggcgcacagggattctggaacggaagaggtgatccgactgggaggggcaaggtggaggtgagtctcatgttaagggacagtgggacacccacggtgatgcatttaggtccatgaatgaatccaaacagcatcagtggaggaaatgatgggctgtatgtcttaacttgaacctacgatttcaatgctttattctgaaggttttcctctcattatgctattaatgtttttacatgaaa

SEQ ID NO: 154778 - DNA, 308 bp, Zea Mays
acaaaaagatggtggtctgtttaatgaggctctggaccgagttgggcttgcaatgcagcggcctgttatcctcccaccgttggaagcgggcagtgatcgctgctctgtgaagccagcctcacgccatgcctgccgcttcaggtctaaagaggcccaggccttcgcccgagccccaccagccacaaccaacttggaacgggcaggccggccagtggcacatacaggcccaggcccagaatccgtcaggaaacatccacaccaccttaatgcccccgcttaggttacaagctctcgctactgagctcggc

SEQ ID NO: 154779 - DNA, 2730 bp, Zea Mays
ctcgcgttcggatcagcctctctgtcatgtcgccaatacagcgcagcgctccgcatccacccaaatcggagtagggtcgtcagtacagcgcgacgccctgccagtagccgccgcaaccggccgccggtcccgcgcgaggggaggaggagatcactgcggcggcgtcttctgccggtttgaggattcggggcatcactgcagcagctggcgccaggctccagcatggacacggcgtttctgagtcctccgcttgcccgtaatctggtttatgacgagtttgccgttcttcaccccactagctacccttttcatactcttcggtatttgagatgcaatccaatgtattcgagaccgctgctaacaatagcaccagcctcaccatcaaggggcttgattcagagagtggccgcactacctgatgttgatgatttcttctgggagaaggatcctactccaatacttgacacaattgatgcacccattcatttgaaaaatctatctagagctcaagcagttagccgatgaagttcgttcagaaatagctttcataatgtccagaaaatgccaaccgtgtggtgctgatcgctcagttgtggagctgacaattgctatacattatgtgttcaatgccccaatggataagatactatgggatgctggtcaacatgcatatgcgcacaagattctcacaggaaggcgctctctcttccatactattacacagaaaaatggcctttctgggttcacgtcgcgttttgagagcgagtatgatccctttggtgctggacatggatgcaatagtctatccgctggccttgggatggcggttgcaagggatataaatgggagaaaaaatcgaatagtgacagttataagtaattggacaaccatggctggccaggtgtacgaggcaatgggtcatgctggcttcctcgattccaacatggtggttattctaaatgatagctgtcataccttgcttcctaaagcagatggcggggcaaagatgtcagtcaatgccttttctagtgctctaagcaagattcaatccagcaaaggatttaggaggtttagagaggctgctaagggacttgccaaatggtttggcaaaggaatgcacgaatttgctgccaaagttgatgagtatgctcgtggtatgataggtcctcatggtgcaactctttttgaagaacttggattatattatattggtcctattgatggacgtaacattgatgatctcatctgtgtacttaaggaagttgcgagcttagattcaactggcccagtacttgtacatgtaattactgggactgaaaatgacactggtggaattattggaagtgaaataaatgcagttgaggaagggccttcaaactcaagccctgatcttctaaagtttttaggaactggactttctaggacatataatgactgctttgtagaagcactaacagcagaagcagagaatgacaagcgcattgtggtagttcatggcggcatgggaatcgatcgatcactccgcttattccagtccaggttcccagacagattttttgacttgggcatcgctgagcaacatgctgttaccttttctgctggtttggcatgcggaggtctaaagcctttctgcataattccatccacatttcttcagcgagcatatgatcagataattgaagatgtggacatgcaaaagataccagttcgatttgctatcacaaatgctggtctggtaggatctgagggtccaactaattcaggaccatttgatattacattcatgtcatgcttgccaaacatgattgtcatgtcaccatctaatgaggatgaacttattgacatggtggcaacagctgcaatgattgaggacagacctatttgcttccgctatcctaggggtgccattgttgggactagtggaagtgtaacatatgggaatccatttgagattggtaaaggagagattcttgtcgagggaaaagagatagcttttcttggctatggcgaggtggtccagagatgcttgattgctcgatctcttttatccaactttggcattcaggcgacagttgcaaatgcgaggttttgcaagccgcttgacatcgacctaatcagaacgctgtgccagcagcatagttttcttatcacagtggaagaaggaacggttggtggctttggatcacatgtctcacagtttatttctctcgatggtctacttgacggtcgaacaaagtggcgacccattgtgctgccagacaggtacattgagcatgcatcgctcgcagagcaacttgacctggctggcctaactgctcatcacatagctgcaactgcattgaccctcctagggcgtcatcgtgatgcccttctgttgatgaagtaggggaaggaaccaccaagaagaatggaattggatagataaaaggcaatatgtgcaaaagttgattcggaggacgctcatcatgctgttttacgattgtgttgtctggatagaactgaagcgtgccgtgggaggtggccaaatgcacaaatcccaaagagggacgacaaagcctatagcaccatagattaatagtcacggtgtatatactaaaaagaatttacagagcaccgatgtaacgttgttactgtgcatgttaatactgaaattgtggtacgacgccaactaggagaatgagctggagctgacatgtttcagttaatgtaataaagctacttagttttgta

SEQ ID NO: 154780 - DNA, 1608 bp, Zea Mays
ctcgcgttcggatcagcctctctgtcatgtcgccaatacagcgcagcgctccgcatccacccaaatcggagtagggtcgtcagtacagcgcgacgccctgccagtagccgccgcaaccggccgccggtcccgcgcgaggggaggaggagatcactgcggcggcgtcttctgccggtttgaggattcggggcatcactgcagcagctggcgccaggctccagcatggacacggcgtttctgagtcctccgcttgcccgtaatctggtttatgacgagtttgccgttcttcaccccactagctacccttttcatactcttcggtatttgagatgcaatccaatgtattcgagaccgctgctaacaatagcaccagcctcaccatcaaggggcttgattcagagagtggccgcactacctgatgttgatgatttcttctgggagaaggatcctactccaatacttgacacaattgatgcacccattcatttgaaaaatctatctagtaaggagctcaagcagttagccgatgaagttcgttcagaaatagctttcataatgtccagaaaatgccaaccgtgtggtgctgatcgctcagttgtggagctgacaattgctatacattatgtgttcaatgccccaatggataagatactatgggatgctggtcaacatgcatatgcgcacaagattctcacaggaaggcgctctctcttccatactattacacagaaaaatggcctttctgggttcacgtcgcgttttgagagcgagtatgatccctttggtgctggacatggatgcaatagtctatccgctggccttgggatggcggttgcaagggatataaatgggagaaaaaatcgaatagtgacagttataagtaattggacaaccatggctggccaggtgtacgaggcaatgggtcatgctggcttcctcgattccaacatggtggttattctaaatgatagctgtcataccttgcttcctaaagcagatggcggggcaaagatgtcagtcaatgccttttctagtgctctaagcaagattcaatccagcaaaggatttaggaggtttagagaggctgctaagggacttgccaaatggtttggcaaaggaatgcacgaatttgctgccaaagttgatgagtatgctcgtggtatgataggtcctcatggtgcaactctttttgaagaacttggattatattatattggtcctattgatggacgtaacattgatgatctcatctgtgtacttaaggaagttgcgagcttagattcaactggcccagtacttgtacatgtaattactgggactgaaaatgacactggtggaattattggaagtgaaataaatgcagttgaggaaggtttgtaatgtagattgctatcaaaatttgcatggtgttttacttttcttttgctgaactaggactctaggaggcatgcctagtgttttttttttttttgctctcttgctctgttacctctgcactggggttcctcatctaggggaggaagaaccatggcaatatgactacatgagggagtgtcagtgctcatggcaaacaaacttctttaaaaatatgtatatgtcattattagc

SEQ ID NO: 154781 - DNA, 865 bp, Zea Mays
ctcgcgttcggatcagcctctctgtcatgtcgccaatacagcgcagcgctccgcatccacccaaatcggagtagggtcgtcagtacagcgcgacgccctgccagtagccgccgcaaccggccgccggtcccgcgcgaggggaggaggagatcactgcggcggcgtcttctgccggtttgaggattcggggcatcactgcagcagctggcgccaggctccagcatggacacggcgtttctgagtcctccgcttgcccgtaatctggtttatgacgagtttgccgttcttcaccccactagctacccttttcatactcttcggtatttgagatgcaatccaatgtattcgagaccgctgctaacaatagcaccagcctcaccatcaaggggcttgattcagagagtggccgcactacctgatgttgatgatttcttctgggagaaggatcctactccaatacttgacacaattgatgcacccattcatttgaaaaatctatctagagctcaagcagttagccgatgaagttcgttcagaaatagctttcataatgtccagaaaatgccaaccgtgtggtgctgatcgctcagttgtggagctgacaattgctatacattatgtgttcaatgccccaatggataagatactatgggatgctggtcaacatgtaagacatctctctgttactgttgttttgtttttctcagatctgttatctgcaacccttttccgctcaatagttttcttgcaacaggcatatgcgcacaagattctcacaggaaggcgctctctcttccatactattacacagaaaaatggcctttctgggttcacgtcgcgttttgagagcgagtatgatcccttt

SEQ ID NO: 154782 - DNA, 897 bp, Zea Mays
gggaatccgtgtttctgctacctctagaccatctccagcagatcgagtaaacggtcgtgtaaaatactgttttgtattgtagattacgctgcttatagagtagagtttaaaataggtggtgagatagagagtgctggagatagtctattctagctctacgcagcctcatgagtcatgagtgagtcttttctctcatctcttagtcactaagcaaaacattcatccatacgaggtgacgacaacggctctatatctcttgggagatatcatctgaccatgtcaagcccgcaagcagtcaataaatacggcctcgcctctgcatccattgcagtgcacaaggcaggcagggtcagggaagagaagtgaagcagaagcagaggtcggtgaaacatctgctgctccgtgaacgtacctgaagaagaagaggaaggggaagccagccagccagccagccaggatgtacaacgcgccgccgccgcggccgcaggacatgtcctactacgagcactgccagaagaggcacgaggagaagggctgcctctatgcctgcatcttcacggcgctgtgctgcttctgctgctacgagacctgcgagtgctgcctcgactgcctctgctgctgctgcgactagcccggctccagctcagaggacgatcgagacgcagatggagatcgcctccgccacttctaccttaccctagtgacgatgatgatgatgatgatgattcagtttcagtagcctgtctccttttagtctggttgtggcaaacctaataaagcatgcatgtcgtagcgccatgatttcagttgaaccaccacacccttttgtcattgctattgttatcacccgatttccgattccaaacacaaggcattcgttcgcgtagtttacctgtc

SEQ ID NO: 154783 - DNA, 1707 bp, Zea Mays
taagagcctattgtagaccgcccccgcctcctacgcccgcccgcaagcccgcaaatcacgccgcgaaccgccgcagactgaccccgactccctacgcccgcccccaatccagccgcaatccaccctgcgaatgcggcgaccgtcgcgttccggccggccgcccgtccgcccgccgctatggcactatccactaaccagacacagcgtccagccaagcttttgccgccgcccacttctctcccacctcccctccactcttttgcttgtcgcggggttagaatcccatggcgctatcggccgagatccgcttcggccaccagatcccctatcccactacgacactgactcctacgaggaggaggaagaagaggaagaggaagacgaggaggagttcgagggggtggagggcggaggagatggatgaggtgacggtttcgtctccgctgatgctgccggcaacggaggccaggggaggggtgtccgtggtcgagatggtgatgggggcgcttcggaggtcgctcatgttgtgcagcagcagcgccggcgccggcgccggcgtgcgcgagccggagcaggaggaggacggggtgactcccccgggtggtatgcaaataggggggccaacggatgtgcggcacgtctcacacgtcaccttcgaccgcttcattggcttcctcgacctccccgctgacctcgagcccgacgtgcctcgccccgtgccgagcgcaaggtctcctgcttgtggtgatgatgcaggagagccatggtgggtaggtgaaagcatacctcgatcgcaagtcactggcaaattctctgaacgacataaagaccgtagttatgcaacttcacgacctcatcagtgttatagacttatagtcatcattgttacactactatttatgggcattgcgacaaccaagattcttgttgtcatctcgtcccagcttctggttgcgggattcatatttgggaatgcatgcaagactgtatttgaggcccttatatttgtattcatcatgcatccatttgaggttgctaaccgctgtgttatcgacgaaacacaggtacctggagagcaaaccaacgcattggcaccctacccacactgtaaatctcaaggacatcttggatgtgaacaagattaacatgtctctctcagtccagcacaccatgaactttcaaaacatccgggagaagaacatcaggaggtctgagctcgttatggagttgaagaaaatattcgaggagatgtccattcggtaccaccttctaccccagaaagttgaactcacctacgtcgactcgaacccactgcccatgggtccttctcatacaagatagaagatgggtgaagacttttaagtctcatactgacaacttgatccgtttcatgggatctgacaactgatggctagctgtgcagtctgttctgaagttactaaaactctgcatagtagatattagctcgtagaataatttgtcagataatgcatttgtaagcggtgatggtactggtgatcaatgctttgggattggccattacaccatttgattatctacaccgtttggtgcatcacaatcgaaaatgttgcgaaatagccactactaaagaaattcagctgggagattgaagtgggcctgtcgaaatgttattcttcacaatagtaccatgtaattcagctgtgagactggtagtcactcttgtgc

SEQ ID NO: 154784 - DNA, 1791 bp, Zea Mays
taagagcctattgtagaccgcccccgcctcctacgcccgcccgcaagcccgcaaatcacgccgcgaaccgccgcagactgaccccgactccctacgcccgcccccaatccagccgcaatccaccctgcgaatgcggcgaccgtcgcgttccggccggccgcccgtccgcccgccgctatggcactatccactaaccagacacagcgtccagccaagcttttgccgccgcccacttctctcccacctcccctccactcttttgcttgtcgcggggttagaatcccatggcgctatcggccgagatccgcttcggccaccagatcccctatcccactacgacactgactcctacgaggaggaggaagaagaggaagaggaagacgaggaggagttcgagggggtggagggcggaggagatggatgaggtgacggtttcgtctccgctgatgctgccggcaacggaggccaggggaggggtgtccgtggtcgagatggtgatgggggcgcttcggaggtcgctcatgttgtgcagcagcagcgccggcgccggcgccggcgtgcgcgagccggagcaggaggaggacggggtgactcccccgggtggtatgcaaataggggggccaacggatgtgcggcacgtctcacacgtcaccttcgaccgcttcattggcttcctcgacctccccgctgacctcgagcccgacgtgcctcgccccgtgccgagcgcaaggtctcctgcttgtggtgatgatgcaggagagccatggtgggtgaaagcatacctcgatcgcaagtcactggcaaattctctgaacgacataaagaccgtagttatgcaacttcacgacctcatcagtgttatagacttatagtcatcattgttacactactatttatgggcattgcgacaaccaagattcttgttgtcatctcgtcccagcttctggttgcgggattcatatttgggaatgcatgcaagactgtatttgaggcccttatatttgtattcatcatgcatccatttgaggttgctaaccgctgtgttatcgacgaaacacagatgatcgtcgaggaaattaatatattaaccactgttctcttcaagaatgacaaccagtttaggcagctttgaggtccaaaattaaagggtacctggagagcaaaccaacgcattggcaccctacccacactgtaaatctcaaggacatcttggatgtgaacaagattaacatgtctctctcagtccagcacaccatgaactttcaaaacatccgggagaagaacatcaggaggtctgagctcgttatggagttgaagaaaatattcgaggagatgtccattcggtaccaccttctaccccagaaagttgaactcacctacgtcgactcgaacccactgcccatgggtccttctcatacaagatagaagatgggtgaagacttttaagtctcatactgacaacttgatccgtttcatgggatctgacaactgatggctagctgtgcagtctgttctgaagttactaaaactctgcatagtagatattagctcgtagaataatttgtcagataatgcatttgtaagcggtgatggtactggtgatcaatgctttgggattggccattacaccatttgattatctacaccgtttggtgcatcacaatcgaaaatgttgcgaaatagccactactaaagaaattcagctgggagattgaagtgggcctgtcgaaatgttattcttcacaatagtaccatgtaattcagctgtgagactggtagtcactcttgtgc

SEQ ID NO: 154785 - DNA, 1751 bp, Zea Mays
taagagcctattgtagaccgcccccgcctcctacgcccgcccgcaagcccgcaaatcacgccgcgaaccgccgcagactgaccccgactccctacgcccgcccccaatccagccgcaatccaccctgcgaatgcggcgaccgtcgcgttccggccggccgcccgtccgcccgccgctatggcactatccactaaccagacacagcgtccagccaagcttttgccgccgcccacttctctcccacctcccctccactcttttgcttgtcgcggggttagaatcccatggcgctatcggccgagatccgcttcggccaccagatcccctatcccactacgacactgactcctacgaggaggaggaagaagaggaagaggaagacgaggaggagttcgagggggtggagggcggaggagatggatgaggtgacggtttcgtctccgctgatgctgccggcaacggaggccaggggaggggtgtccgtggtcgagatggtgatgggggcgcttcggaggtcgctcatgttgtgcagcagcagcgccggcgccggcgccggcgtgcgcgagccggagcaggaggaggacggggtgactcccccgggtggtatgcaaataggggggccaacggatgtgcggcacgtctcacacgtcaccttcgaccgcttcattggcttcctcgacctccccgctgacctcgagcccgacgtgcctcgccccgtgccgagcgcaaggtgaaagcatacctcgatcgcaagtcactggcaaattctctgaacgacataaagaccgtagttatgcaacttcacgacctcatcagtgttatagacttatagtcatcattgttacactactatttatgggcattgcgacaaccaagattcttgttgtcatctcgtcccagcttctggttgcgggattcatatttgggaatgcatgcaagactgtatttgaggcccttatatttgtattcatcatgcatccatttgaggttgctaaccgctgtgttatcgacgaaacacagatgatcgtcgaggaaattaatatattaaccactgttctcttcaagaatgacaaccagtttaggcagctttgaggtccaaaattaaagggtacctggagagcaaaccaacgcattggcaccctacccacactgtaaatctcaaggacatcttggatgtgaacaagattaacatgtctctctcagtccagcacaccatgaactttcaaaacatccgggagaagaacatcaggaggtctgagctcgttatggagttgaagaaaatattcgaggagatgtccattcggtaccaccttctaccccagaaagttgaactcacctacgtcgactcgaacccactgcccatgggtccttctcatacaagatagaagatgggtgaagacttttaagtctcatactgacaacttgatccgtttcatgggatctgacaactgatggctagctgtgcagtctgttctgaagttactaaaactctgcatagtagatattagctcgtagaataatttgtcagataatgcatttgtaagcggtgatggtactggtgatcaatgctttgggattggccattacaccatttgattatctacaccgtttggtgcatcacaatcgaaaatgttgcgaaatagccactactaaagaaattcagctgggagattgaagtgggcctgtcgaaatgttattcttcacaatagtaccatgtaattcagctgtgagactggtagtcactcttgtgc

SEQ ID NO: 154786 - DNA, 1575 bp, Zea Mays
taagagcctattgtagaccgcccccgcctcctacgcccgcccgcaagcccgcaaatcacgccgcgaaccgccgcagactgaccccgactccctacgcccgcccccaatccagccgcaatccaccctgcgaatgcggcgaccgtcgcgttccggccggccgcccgtccgcccgccgctatggcactatccactaaccagacacagcgtccagccaagcttttgccgccgcccacttctctcccacctcccctccactcttttgcttgtcgcggggttagaatcccatggcgctatcggccgagatccgcttcggccaccagatcccctatcccactacgacactgactcctacgaggaggaggaagaagaggaagaggaagacgaggaggagttcgagggggtggagggcggaggagatggatgaggtgacggtttcgtctccgctgatgctgccggcaacggaggccaggggaggggtgtccgtggtcgagatggtgatgggggcgcttcggaggtcgctcatgttgtgcagcagcagcgccggcgccggcgccggcgtgcgcgagccggagcaggaggaggacggggtgactcccccgggtggtatgcaaataggggggccaacggatgtgcggcacgtctcacacgtcaccttcgaccgcttcattggcttcctcgacctccccgctgacctcgagcccgacgtgcctcgccccgtgccgagcgcaaggatacgcgggaagaaagccaaggtcaatttccgggatgaagcggcggcagcaggtgctcagaagccagccgcaaccgcaactactccaactgcttgtgccagcgcagcgaggctaggtcctccaccgccgaagttccgtgctgacgaggttttcgggaacatgaacggtggcagcaacgatctgttcgcgattatgttcgcgttcagtgacagtagtagtcaggtcgttcgtgtggagccaggtgagggcgccgccggtttcctccccgcagtggaagtgttggacgacgagcctctgttgcccggcagtaagaggtctgcggctaacatgctgctgctctccggccagagcagcgactcgtatggctcttgtgacttggggtgggactgggacgatgacaccatgacctcagactacgcctcagtctttgctcctgctgctcccagtaacgttgtgccagcatggtacacgcaaggtggaccggcgtcgaagagaacgaggagcagctatggctacggtgtggcgatgctccagcagggagatggcgcgcaggccatgccgggcggctttgaccctgagacgaactaccagtaccagctgttgccttacgtcgtcgagagcagcccgtcggacggcgcgtcgacgcacgacatggactgccttcaaatgatgcgagctggtgatgttccacaggatggggcgagcagtggtggtggtggtggtggcggcggcgatatctggagccttgacgagctgctcatggccgctggcgcttactgagaaaagctatgtgcatcgcatgtactagacggttacttgttgtgccgtgaatggagtgtttctc

SEQ ID NO: 154787 - DNA, 799 bp, Zea Mays
taagagcctattgtagaccgcccccgcctcctacgcccgcccgcaagcccgcaaatcacgccgcgaaccgccgcagactgaccccgactccctacgcccgcccccaatccagccgcaatccaccctgcgaatgcggcgaccgtcgcgttccggccggccgcccgtccgcccgccgctatggcactatccactaaccagacacagcgtccagccaagcttttgccgccgcccacttctctcccacctcccctccactcttttgcttgtcgcggggttagaatcccatggcgctatcggccgagatccgcttcggccaccagatcccctatcccactacgacactgactcctacgaggaggaggaagaagaggaagaggaagacgaggaggagttcgagggggtggagggcggaggagatggatgaggtgacggtttcgtctccgctgatgctgccggcaacggaggccaggggaggggtgtccgtggtcgagatggtgatgggggcgcttcggaggtcgctcatgttgtgcagcagcagcgccggcgccggcgccggcgtgcgcgagccggagcaggaggaggacggggtgactcccccgggtggtatgcaaataggggggccaacggatgtgcggcacgtctcacacgtcaccttcgaccgcttcattggcttcctcgacctccccgctgacctcgagcccgacgtgcctcgccccgtgccgagcgcaaggtcagtgttccaacaccttttactccccaattgtttgatctgtctatgcgcatagtttcctgcacggga

SEQ ID NO: 154788 - DNA, 288 bp, Zea Mays
ttcgatcaatcaacaagacagagatggcaagaatgtacaaatcaggctgttacagggggggcttgcattgtacacacccaacctggcctagcctaccctactacatccatcatacatcatcccctgcagaaactccactcccgcatgcatcatccatccctcgttcacaacaactccacacgcttcaaaaccctgttcctgctttttcctccccgtcctgacctccagggcttttttttttaccccctcccatgcatgatgctcagctctaccaattgcctccaagcc

SEQ ID NO: 154789 - DNA, 1636 bp, Zea Mays
tcttctcgcctcgcctcgtctcctctgttctccagttctctcatagtcactcccccaactctgctgcttcccgtggccgtggttcaaaattcgaatccagaaagacttccccaagcattttccgtttctttaaaccgtcatcgtcctccctcgtgctagcctcgctcgttgcgcgttcaaatttcgaaccacctccgccttcgacgccccaaaccctagcccgacccctcctcctccacctgcgccaccgcccaccatgagctccgccgccgcgccagctgccgtcggcagcggcaaggagcttgccaacccgcccgccgacggaatcaccaacctccgcttctccaaccacagcaacaacctcctcgtctcctcatgggacaagacggtgcggctctacgacgccgacgccaacgtgctcaagggggagttcatgcaccccggggccgtcctcgactgctgcttccacgacgactcctcgggctttagcgccggtgccgaccacaccgtgcggaggttggtatttagctcgtccaaggaagatgttttggggcggcatgatggtccggttcgttgcgtggaatactcttatgctgcaggtcaagtcatcaccggcagctgggataaaactgtaaaatgctgggatccaagaggagttagtggaccagagcgcacccttgttgggacatatgctcaacctgaacgtgtatattctctttcgttagtaggaaataggttggttgttgcaacagctggaagacatgtaaatatttatgatctgcgcaatatgtctcaacctgagcaaaaaagagactcttctttgaaatatcaaacacgatgtgttcgatgttttcccaacggaacaggatatgctcttagttctgttgaagggcgagtttctatggaattctttgatctatctgagtctgctcaatctaaaaagtatgctttcaagtgtcatcggaagtctgaggccggcagggacaccgtttatcctgtcaatgcaattgctttccatcccatatatggaacatttgccaccggagggtgtgatggatttgtgaatgtgtgggatggcattaacaagaaaagactatatcagtactcgaagtacgcatcaagcatcgctgctctatcattcagtaaggatgggcatctgcttgctgtggcatccagctacacttatgaagagggagaaaaaacgcatgaacctgacgctatatttatccggacagtgaatgaagtcgaggtgaagccgaagcccaaggcattggcagccccccagtagtgctgtgacctgttctggaggctagatgacccgtacttctctgcgttgatgtcaattacattagttgacggagtgcttgtttgtgttgaaagagctgaaacgcctgtgtttcttaatctggaaccctcttctcccgttttacttgtccgtggaaacatttcatgttccagctggttgtatattccgaaacagaccatgtttaagttcactcggttcttcgttgacttaagttatttatcaaatatttaagtatcgtacgtaagtttgaaacctggggggaagaactatgctggctttgttgtactgccaatttcaatttaggaaggatgaaattgaagtttggacttg

SEQ ID NO: 154790 - DNA, 1717 bp, Zea Mays
tcttctcgcctcgcctcgtctcctctgttctccagttctctcatagtcactcccccaactctgctgcttcccgtggccgtggttcaaaattcgaatccagaaagacttccccaagcattttccgtttctttaaaccgtcatcgtcctccctcgtgctagcctcgctcgttgcgcgttcaaatttcgaaccacctccgccttcgacgccccaaaccctagcccgacccctcctcctccacctgcgccaccgcccaccatgagctccgccgccgcgccagctgccgtcggcagcggcaaggagcttgccaacccgcccgccgacggaatcaccaacctccgcttctccaaccacagcaacaacctcctcgtctcctcatgggacaagacggtgcggctctacgacgccgacgccaacgtgctcaagggggagttcatgcaccccggggccgtcctcgactgctgcttccacgacgactcctcgggctttagcgccggtgccgaccacaccgtgcggaggttggtatttagctcgtccaaggaagatgttttggggcggcatgatggtccggttcgttgcgtggaatactcttatgctgcaggtcaagtcatcaccggcagctgggataaaactgtaaaatgctgggatccaagaggagttagtggaccagagcgcacccttgttgggacatatgctcaacctgaacgtgtatattctctttcgttagtaggaaataggttggttgttgcaacagctggaagacatgtaaatatttatgatctgcgcaatatgtctcaacctgagcaaaaaagagactcttctttgaaatatcaaacacgatgtgttcgatgttttcccaacggaacaggatatgctcttagttctgttgaagggcgagtttctatggaattctttgatctatctgagtctgctcaatctaaaaagtatgctttcaagtgtcatcggaagtctgaggccggcagggacaccgtttatcctgtcaatgcaattgctttccatcccatgtaaagccacgatattctattttcttggtagtttgatatctcactggattattagttcagatttttattgtccttgtgcagatatggaacatttgccaccggagggtgtgatggatttgtgaatgtgtgggatggcattaacaagaaaagactatatcagtactcgaagtacgcatcaagcatcgctgctctatcattcagtaaggatgggcatctgcttgctgtggcatccagctacacttatgaagagggagaaaaaacgcatgaacctgacgctatatttatccggacagtgaatgaagtcgaggtgaagccgaagcccaaggcattggcagccccccagtagtgctgtgacctgttctggaggctagatgacccgtacttctctgcgttgatgtcaattacattagttgacggagtgcttgtttgtgttgaaagagctgaaacgcctgtgtttcttaatctggaaccctcttctcccgttttacttgtccgtggaaacatttcatgttccagctggttgtatattccgaaacagaccatgtttaagttcactcggttcttcgttgacttaagttatttatcaaatatttaagtatcgtacgtaagtttgaaacctggggggaagaactatgctggctttgttgtactgccaatttcaatttaggaaggatgaaattgaagtttggacttg

SEQ ID NO: 154791 - DNA, 1919 bp, Zea Mays
atccaaacccccccaccccctcgcgtagataagcctagtaatcagtctcggcggcgcgggacgctgtggcgggggagaccagtgcgagactgcgctgtcttgtccattggggggatttggggctgtgcgcgaggcagttaataatgcccgtcctctccccaagtcagagtccgctgccatggccgtcgccgtcgccgtcgacgtcccctcctgcatccagctcctccgctcctgcagcgcggtcgccggccggcagctccaccagctcctcctcaaatccggccacgtcccctcctcgctcccgcccactaactccgtcctcctcatgtacgcgcgcggctctccgctccactcccgcgacgcccgccgcctgttcgacgaaatgcccacgaagaactgcttctcctataactccatcatcaccgccctcttcaagtccggagaccaccgtgcggctctccgcgtgtttcgctccatgcctgacaggaacaccttctcctacaacgcggtgataactggcctcactggtgctggggatctcgacaccgcgagtgagttgctagatgagatgcccgtgaaggacgccgtggcttgcaacgctgtgttgcatagtggttggcgcctgtgctgatcggacgcagtatgagattgggaggcaagctcacacccggttggtggttgccaacaccgggattgattcgatattgggctgcgcgttgattgacatgtattgcaagtgtggggatttggactccgctcaccaagttcttgacaggttagaacatgtcgatgagatttcgctgtccgcattggtctatggctacgcatcttgcggacagttgcacaaggcgttatgtcttttcgacaagatggagagccccagcattgctctatggacgtctcttatcagtggttgtaaccctgcctatcatggagatggtgcttttgttctttttgtaaggatgttgcggtcagaaatgttgcctaattctactatttatgccattgttctgaacatgtgtggctttttaggcatgctgaagcctggtcagcagacgcaagcttgtgctttaaagagtggggctgtcaatgacttgatagcagcaagtgctctcattgacttctactcgaaatgcggcctctgggcagatgcctgccaagctttcagtgagcttaggcatcatgacaccattgtgctcaactcaatgatcactgtatactcaaactgtggccaaatagatgaggctagaagagtttttcgtttgatccctagcaagagtgtcatctcatggaattctatgattgttgggttcagtcaaaacgggcatgctcttgatgcattggagctgttctgtgagatgcaccggcttggtttgcagcttgacaatgtagctatatccagtgtccttagtgcatcaggcagcatctgctctgtaagttccggggagcagatttttggtcttgctattgcgcttggtctgcagtctgaccatattgtagcctcctcgctcattgacctatactgcaaatgtggtaacttggccaatggacgcaggatcttcagtggtattgctaatccagacgaagtcctgtggaactcaatgcttataggttatgcttctaacgggtatggactcgaggcactgaaacttctagatttaatgcaaagtaggggtctgaagccaagcgaacggacatttgttggtgtcctttctgcatgctgtcattctgggcttgtggaagagggattgagatggttttaccggatgaaggaagattttggcgtgagtccatcagctgagcattatgcatgtgtgactgacctgttggtccgagcaggtcgactggatgaagcagttgagttcatagagaacatgcctttcaaagctgatgcaattagttggacttctattattgga

SEQ ID NO: 154792 - DNA, 966 bp, Zea Mays
cagtcgaccgcaccacactccactccacaccacacatgatctgcggaaaccatgtccgcgcccgcccgcccgccgtttctgcgccgcccgccgatcgtttgggtccattgatgccgcctataaatctccggcaggcctccccggagtcaggcagcagatccatcgtcctcattattattctcactggtcgatctgctaacacaaacagcagcagctcctcctcactagctagccttctctatttttgctactgcaagtgtccaagtctgcgacgacgtccgagatgtcgacggtgagccgtgcatcccttgaccagaagcttgccctcgccaagcgctgctcccgagaggcgactcttgccggagctaaggcggcagcagtggcgactatcgcctccgcgattcccaccctcgcgagcgtgcggatgctgccgtgggccaaggccaacatcaaccccaccggccaggcgctcatcgtctccacggtggccgggatggcctacttcatcgccgccgacaagaagatcctgtcgctggcgaggcgccactcgttcgaggaagctccggagcacctcaagaacacctccttccagggcaccggacgcccccacccggctttcttcaggccatgatgagatcagatatatatgacacatccgtcgacctcatcagtcatagagccggccagccagtcagtcagtcagcacaagcaccagagatgatgccatccatgtctgcatgcatgcatgcatatataaaaaataaactgctaggctgatgagtcatcgcgctcgcgtgctattaatcatcctcgatgcatgtactagtgaattgtgctatttaaatatatagtttcacgaagggtggatgtttttactttgtttgctactagtacgtggtgctcggctcagaacgaacgcagatctagctaattcctgtccctaatcactcgacagatttatgtgct

SEQ ID NO: 154793 - DNA, 465 bp, Zea Mays
cagtcgaccgcaccacactccactccacaccacacatgatctgcggaaaccatgtccgcgcccgcccgcccgccgtttctgcgccgcccgccgatcgtttgggtccattgatgccgcctataaatctccggcaggcctccccggagtcaggcagcagatccatcgtcctcattattattctcactggtcgatctgctaacacaaacagcagcagctcctcctcactagctagccttctctatttttgctactgcaagtgtccaagtctgcgacgacgtccgagatgtcgacggtgagccgtgcatcccttgaccagaagcttgccctcgccaagcgctgctcccgaggtacgaggaacaaccagctgtgtacagacactcgccgatcgacattcaggcagccaataagccgcgcggccttaattaattaaagctcgaaatgactaacgctatgtatgtatgtgtg

SEQ ID NO: 154794 - DNA, 369 bp, Zea Mays
atgagcgcctggccggtggggttgatgttggccttggcccatggcagcatccgcacgctggccagggtggggatcgcggaggcgatagtcgccaccgctgccgccttggctccggcgagggtcgcctctcgggagcaacgcttggcgagggcgagcttctggtcgagggacgcacggctcaccgtcgtcgacatctctgtgtgcgcggttgcagacttgcaggtgcagcagcaaagcaagagggtttgtgagacggagcagctcgatctgctggcagtggcagtgagcagcactggagttgcaaggagagcgagcgagctagcgaggatggatgtgttgccagacgcaggagaggccaaggatttatag

SEQ ID NO: 154795 - DNA, 1081 bp, Zea Mays
cccctgcaaagccaacatacatggccactaaccactttatttttttacaagaaaatagcacacacaaagttggttaactggtaataacataaattaaacttacacattctgaatttagcacaccaacactactttacagcgctgtgttcagcgcgcagctagcctcgtagtagtagtagttatactagcgcatcgacgttcagcagcctcgcaattacagtagtttattcaggcatgcatcggtgggcatttggtgcttgcattggcaaactggaaaaagaggtaggtagctagctctggacggaggtctcgtctcacggcctgaagaaggctgggtggggacggccggtgccctggaaggaggtgttcttgaggtgctcaggggcttgctcgaacgagtggcgcctcgccagcgacaggatcttcttgtcggcggcgatgaagtaggccatcccagccaccgtggagacgatgagcgcctggccggtggggttgatgttggccttggcccatggcagcatccgcacgctggccagctgaagaagcgacgaccagttattagagactgctggccgacgacgggccgtttcgcgacgatcgacgcgtacgtacgtacggcagcgcctgattaaatctacgggagaaagctagagacggtgaaaggaaactcacggtggggatcgcggaggcgatagtcgccaccgctgccgccttggctccggcgagggtcgcctctgcagaccatgcatgcgacatacagacaagcatcgatcagtcagtttagtcagtgtactactgtactgcctgcgtaataaacaggctagcttgtttgtttggttcgagggcagagctagtgtgcctcgcacgtacctcgggagcaacgcttggcgagggcgagcttctggtcgagggacgcacggctcaccgtcgtcgacatctctgtgtgcgcggttgcagacttgcaggtgcagcagcaaagcaagagggtttgtgagacggagcagctcgatctgctggcagtggcagtgagcagcactggagttgcaaggagagcgagcgagctagcgaggatggatgtgtt

SEQ ID NO: 154796 - DNA, 537 bp, Zea Mays
atgcctgatggtgagtgtgtgacggcagtaggttccactgctcggccagctcgtcacatctcacgctcttggtatcaccccagtcgcctcttacctcccggtgcctgcctcccttggtgcattgcacctatagcactccatcctgctcgcaaagttgtgtacgttgcaaccaggcctcgtgcagatccagtcgccagctttccacccagcacggactgcggcgctgtcgcgtccaccagcaaagtcaccctcagcaccggctgcgccttgccccgctgggaagtctctgacgatcgtgccgcacttgaagcagctgctgcggctggcgaagttgtggtagccgcagctgcagtaccagtcacctgggcggatgtccagggaggtcagcacaccaaccgtgctatagccgtcgccgaactgcaagtcagggcgtggatcacggcaacgctggcagtagtcacggcggctgaagttgagatgctggcagttcttgcagttccagtctccaggcttcctctggttgttcattcgcagtga

SEQ ID NO: 154797 - DNA, 1657 bp, Zea Mays
cgaggcagtcccttcgtcccttcccttccattaataattgcggtgcacaggagcggagatccacttcacccgcaccgcacagctcatgatttgcacagccaccctcgtccgtccccgcccagctgctagcgcaaggaagcagctggctggctccaatcccccgccaccccgcctatttataacaccaccacttcccttgccccctccgccgtcgccgccaccgccaccaccaccaccgttgccgagccctcgcctcaccctcacagtcgtctcaggatgatgccccaggccagcgctagcctcgacctcggcctcagcctgggcctcaccctcacctcccagggcagcctctcctcctccaccaccaccgccggctcctccccctgggcagccgcgctgagctccgtcgtggccgacgtcgccagggcgcggggtgacgcgtacgcgcagcaccacgccggcgccgcgatgacgatgcgcgcgtccacgtcgcccgacagcggcgacaccaccaccgccaagagggagagggagggggagctcgagcgcaccggctccggaggcgtccgcagcgacgaggaggacggcgcggacggcggcgccggcgggcgcaagaagctcaggctctccaaggaccaggccgccgtcctcgaggagtgcttcaagacgcacagcacgctcaaccccaagcagaaggtgcagctggccaaccgcctgggcctccggccgcggcaggtggaggtgtggttccagaaccgccgcgcgcggaccaagctgaagcagacggaggtggactgcgagtacctcaagcgctggtgcgaccgcctcgccgacgagaacaagcgcctcgagaaggagctggccgacctcagggcgctcaaggccgcgccgccgtcgtcggccgccgcgcagcccgcctcggccgccgccaccctcacaatgtgcccgtcctgccgccgcgtcgcggccgccgctagccaccaccaccagccgcccccgccgcaatgccaccccaagcctaccgtcgccgccggtggcggcagcgtcgtgcccaggcccagccactgccagttcttcccggccgccgccgttgaccggacgagccagggcacgtggaacaccgccgcgccgccgctcgtcaccagagaactcttctgatgccgccgtgacacacgtccatgtccgtcgaccgatccatgcattgctcgctgctcggtcgatcttgccatggcaagtggaaaaaaggttagatcgaagaagatggtgattgacgacgattaggagaggatctcgcaggtggtggactggcggttggggtaattaatcaattaattaattacaattaatcaatcaggagacgagaggagatttgttttttttttcttctgttctttccttcttcgatgaattcattcatcagttgggtgggtttctgaaaacgacgaacgagcaacaaacaaacaaacaaaccaaaagatggctgtctgctttttttttccctgatggacgccgtgttagtgtcatgtaaaaccagctcgcacctaacctctgctgctgctgggttggtgagaaataacagcgtgagtgattgtttgtactactactaattgattggtgaagaaagttaatgggaatgaaatctctactacaagcagca

SEQ ID NO: 154798 - DNA, 1205 bp, Zea Mays
cacgagcgcccagctcatcattgtcgaccacttgcatatctctctcctccactccaactggtctcgatccctctatttataccccgcctcccgcacattccttcttcaccaactccggcggccggtgcagcagctagcagtggacgtacttatacgtctccccccagctagctctaccttaggtagcatagtggtgcggccgcgcttggtttaaactagacacatggcgcctcaaagcttggatcttgggctgagtctcggcctgggcgtggcggcgttccagcccagcagcttctgccaccccggcaatgccgtcgtcgtccccgcggcggcggagcgggaggccagcccggccgcggcggaggagagggagcggaggtgctcgcccgccggcagcccggtgtcgagcggcagcggcagcgggaataagcgcggcgcggcggagaggtcggccggcgccggcgccggtagcggcgacgaggacgacgacggtgccgcacgcaagaagctgcggctgtccaaagaccaggccgccgttctcgaggagtgcttcaagacgcaccacaccctcactccgaagcagaaggtggcgctggccagcagcctgggcctccggccgcggcaggtggaggtgtggttccagaaccggcgcgcccggaccaagctgaagcagacggaggtggactgcgagtacctcaagcgctggtgcgagcagctcgccgaggagaaccgccgcctgggcaaggaggtcgccgagctcagggcgctcagcgccgcgccggcggccccgctcaccaccctcacgatgtgcctctcctgccggcgcgtcgcctcctcgtccccgccgtcgtcgtcgtcgtcgcccaacatccccggcgccgcagctgccagtggcgggagcatggcctctccggcggcggcggcggcgacgttgcccgcccacaggcagttcttctgcgggttcagagacgccggggcggcggccgcggcgtacgggacagcctcgtcggggctcgcgaagccggtcagggctgccagataggcttagtgcagtggaaatgcatgggtccgtttaagttacaactgcaaagcaagtgttgtggctgaaactgaaactgaaagctgaatttttttatgtatctttagaggggaaggaatgcatgcatgcaatgcaaatcttttttattaaacaaggttaattagga

SEQ ID NO: 154799 - DNA, 591 bp, Zea Mays
atgagactaccaacaaaattgccttatcttcatcatctatcttcacatcaagactctcaagcaacattgtggaagaaattggaggagctgtatatgaccaagagtcttacaaacaagctacgtcttaaggagcgtctttacactattcacatgtcagaaggtatgcggttaacggactgcatgctagaggcgcaacgtcgtacaaggtacaggcagtttacagtactagtactactactgatgatcgtcatatcaagtgatggttccgtcgtgacgttgaccgacgaccggggcgtgccgcatgtggatggagtggagatcttctcgaagggtgggcccatcgagaaggaggcggggtcaggcgacctctccgacagagagtcaacgcttgctagtttgctaagcacgccgtctgtcggcgatgggtcgcatcttcgtgacgagcgatatcaggcatgctggacgggccgatgtcgcaacaaggacgagcatggtggggacgtcaaggaggggtcagagtcggacaacaacacacatcgggaaggtgacaacagcaggcagcgttgggaatggggcatcaggacagattag

SEQ ID NO: 154800 - DNA, 1066 bp, Zea Mays
atggcgcgcggcggcctcgcccgcctgctcgccacgctcatcctcttcctcctgctcgccacgcccctcgccgccggaccttcactcgccgagtcagaggcggacctcgcgcggggcacgtccgaggcagcgccggacgcgcagcagcacctcctggccgcgcccgctccgccggacgcgcagcagcacctcctgccgcgcccgctcgtcatcgagctcccgtcggcgcgggccggggccgagctcgacgccgacgccgacgccgacgccgtggtaacggtcgacgtgcgctgcgccagctggcggctcgcggccgaggccaacaacctcgcgccgtgggcggcggtgccgcccgaatgcgcgccgcacgtgcgggactacgtcaccggctccgcctaccgctccgacctcgacctcgtggcgcgggagtcggccgcctacgcgcgcgccgccgcgccggccggcgccgccgacggacgcgacgcctgggtgttcgacgtcgacgagacgctgctctccaatctcccatactacgccgagcacggctacggggccgagttgttcgaccaccacaagttcgacgagtgggtggaaaggggcgaggcggccgccatcccttccagcttgaagctctacaacgaggtccgcgggctgggattcaagaccttcctgctcacgggcagaagcgaggcgcaccgaggagtcacggtggagaacctcaacaagcaggggttccatgactgggagaagctcatactcagggcagcaggtgaccgcgagaaaacagcgacagtctacaaatcagagaagagggacgaaatggaacaggagggttacaggatcctaggcaactccggcgaccaatggagcgacctgctgggatcttccatgagcgctcgctctttcaagctccctaacccaatgtactatatcccgtgacagaaagaaactggagaacagggcgggtgaaaggtgctctgcgtttactggatgcacattctaccaggccctcggctgatgatggaaaatgaaaaataattttgcaatggaattaaactgtacaaaa

SEQ ID NO: 154801 - DNA, 1242 bp, Zea Mays
acgggccagacccaacccagtgcccaccgcggcaccgcctcactgcgagccagaaacctgagcccgccgcccgtcggacgcgacgccacgcagcgcggtgcggcagcaccgcagcagccatggagcccgcggcgatggaccgcatcgccacccgcctctccgccgtcgaggacctctacttcccgtcgtccttcctcggcccgtcccccgccggcaccggggctgcgccccctccctcgccgccgcggcgcagggcggagctccgctccctcctcgcccgcgacgcgccgctcttcctggagcggtacggcgcggcgctgtccgccgacgagctcgccgccttcgacgcgctcagccccgactacgaggtcgactggcacctccgccgcctgcgcgccgccgccgcgggggctcccccgcccgcgtcgcgagtgcggaaccggcgccgcgcgttcctcgaccgcctcgtccgcgagggggagtacttctcggaggacgccatgcgagagcgggagccctacctgcaccacgagtacctcgggaggttccaggacccgctcgggagggccatggcgcggcccggggagaggtggtccgagacgctcatgcgccgcgcggaggaggcggtcatcgtggagaagatccgcggggagcagattaggagaggggttgatccaagcgagtgggtgggtggtggcactgacgagaccatggaggagcaggaagaggaggaggaggaagaagaggaggaggaggacggggaagaagggatgaaggaaaatgggacagaggtcgagaagcagattgcgactgaggtggtcgaaaatgatgcatctgcacaagtggagcccggtaatgggggaggctctgctgcaagggctttgaaccaaacgttgtcttctgaagagatgcaggaccagctggagcagttcacgtatgtgatgcaacagaagttcctgtccggtgaagacaccgaacatatggactactcacggatcgataacgatgagatgctggatgaccactggtccagagaagtcaactatgacgcagaggagaagtatttcgaagaagattaggtagtaataggcctactgttttggtgccttggatgcagcgcctcgtcttatgtgatggttatgtttggaaacttgtagagttagcatgtgttttgtatataatgaacagattgttatgttcagaactcgagaaaccaaatataaaaaatccagtttttgtgga

SEQ ID NO: 154802 - DNA, 1498 bp, Zea Mays
acgggccagacccaacccagtgcccaccgcggcaccgcctcactgcgagccagaaacctgagcccgccgcccgtcggacgcgacgccacgcagcgcggtgcggcagcaccgcagcagccatggagcccgcggcgatggaccgcatcgccacccgcctctccgccgtcgaggacctctacttcccgtcgtccttcctcggcccgtcccccgccggcaccggggctgcgccccctccctcgccgccgcggcgcagggcggagctccgctccctcctcgcccgcgacgcgccgctcttcctggagcggtacggcgcggcgctgtccgccgacgagctcgccgccttcgacgcgctcagccccgactacgaggtcgactggcacctccgccgcctgcgcgccgccgccgcgggggctcccccgcccgcgtcgcgagtgcggaaccggcgccgcgcgttcctcgaccgcctcgtccgcgagggggagtacttctcggaggacgccatgcgagagcgggagccctacctgcaccacgagtacctcgggaggttccaggacccgctcgggagggccatggcgcggcccggggagaggtggtccgagacgctcatgcgccgcgcggaggaggcggtcatcgtggagaagatccgcggggagcagattaggagaggggttgatccaagcgagtgggtgggtggtggcactgacgagaccatggaggagcaggaagaggaggaggaggaagaagaggaggaggaggacggggaagaagggatgaaggaaaatgggacagaggtcgagaagcagattgcgactgaggtttgcttttactggttattgttattattgtctacatttactggctttattgtgttgtgctttctctattcctactgtaaattgtttgtagttgattcagtgacccgcatgcttgtgtatgttaatttgaagtagaatcatatcatattaaatgatgcacaactgtttactgctaagtttcatcttgaagacagacaacctatcaaccaaccttttagttctagtctaacttcacaataatgatgtgtagattcagacaatagtttttgtttgcaatttttctgaaggcaacatactgtggggggagatcccccattacattcatttcattaaaaaatcagtgatagttacagggggatatccccacaactttggttagcaattttgaactggtggagtgctcagatttgaaaaaaaacagctaatttagagatgctcctatgcacatggagctgcaagttgtggatgattttttaatatttcactattatgtttaaatcaatggcattaaattttcactgtcagttatacttcctccatttcaaattgtaagctgttttggctttttctggttacattaataatgcggtagtgatggaagtgaataatccggcggtattgtttttacatgggtatggaaatatgaaatttctacactgctagttgttctgctcttgttctac

SEQ ID NO: 154803 - DNA, 564 bp, Zea Mays
caccagctaaatacatctctttttcctactagctggacaacatacatcaacgtagatattaactaaatgaaaggacacttgagtagttgctctctaaaattcatgcagctcaataagcagcagcaaggtgttgtgatcatgcagttctgttgcgttcaactattgtatatttagcttaatcatggagcattggtggtatctattctatagtttattttggaatggatttctaagtagtctactaatgatttgggttttaattttgtcaggagggaggtcctagaggtaataagtcacttgtttactccatgatgacaatagcaagcagatcacggtggtgcctatggatgctacaacaagaaagatcaaaagttcttttggatggatgcaactacatattttgttttgtattttctccaaaagagaaatttgcaagtgaacttaaaattgtgaaaccaacatgtggttgtactagctagtatctctgagctttcacaagccaaacttagtgttgttgctgcttattttgatctttattacaacaaaagcaaacttgtgaacttt

SEQ ID NO: 154804 - DNA, 1231 bp, Zea Mays
gctttccccagctcggtcgctcgctcgcacaccatcttccttgcccaagcctccactccttttcctcgtcccgaactctcccgactcccgagctagagcaagcaaagccaacgcggacgcacgcacagctggggcacgacgcgcgcacggggctcacccacatgccgcctttgtcgcgcacgcctgcttccgctccccctgaccccctccacgctcgcgctcctcgccgcgttagccacctacgagccccacgccgcctgcccgcgcaccgcctcgtctccaaggcctgcgagccactgccacgccgccgctgcctctcccgcggtccgcgcgccgcgttcccggcgtcaaacatgggcgtcgacggccgccgctgggttaggccgcgccacggccacgagttcctcgtcgacgacgtcctgcgcctcgccgccagcaagatccggaccggcctcgacgtctccggcggcgccgccaacttcgcggcccggatgagggagcgcggggtcaccatattcaccacggtgctcgacaacgccgggaaacccatgaacgagttcgtggcggcccggggactgttcccactgctgctctcaccggcgcaccggttcccgttctacgatggggtgttcgacctcgtgcacgtcagggccaccgcattggccgaaggcgggtcgccggcgctgggacaggcagggacggaggaggcgctggagttcttcatgtttgacgtcgaccgggtgctgcgcgccggtgggctgctttggattgacagccacatgtgccacgccgatgaacggaggcagacgcttgccaggctcattggcaggtatggttacaagaagctccggtgggcaacaggagagaaggccggcacagggagcacgaaggcagcgatgtacttgtgtgcggtgttgcaaaagccggcacgagtttgaaattggatggatgggaaatctgtggcatgaatggcaccaccttatcctgattgtttgggggctcatcaggggatctggcatgagatgttgtcttgcccaatagatgccacagattaggttgattctattgtttgttcagatagtgtaacttaaaataagtgaaaagagtacaattgctccacttctgttgttgtttaggctgttagggggaaacgtatgaggtagttgttgctcctcaaagtgactactattcacattcaagcagaaaatgaaagtaaaggagactctttgag

SEQ ID NO: 154805 - DNA, 2267 bp, Zea Mays
atctaacgaaagagcccccaaaaccttcccagaaaggcgacggagtcaggttcgaatcgaaatcggggtcaccgcggcggcggcggcggcggcgggtctactcatcagagactacagagcagggggtctcacgctccggcggcgggacgatggccatggcgccgtcctcctcttcctccggtggcggcggcggcgacggcgccaacgccgccgacgcgatggctctcgtgcaggggtacacggccgaggagctcgccatcgcgggggagttcctcaccacctggctccccttcctctctgccggcctctgtccctcctgcgcctcctcgctccgcggccgcgtcgactccctgatcacgcgaggccgcgcagctgaggaatcgccgccggtcgatcagattgagccgtcagggtgggactcggatccagcggacccgcagaaccttcctttcgagccgagtggttgggattcggatccgcccccacccccgccgccggcgccggcgccggcgccggtggagaaaccgaggatgtcgtgggcggacatggcgcaggaggacgagctcgccgcggcggcggaggatgacgcggcggccgcagcggccgacgagggggaggacggggccgaggcggggaggcccaaggtgccgctcacgagggagcagcgggaacagaggaggctcagtagcttggtgcgcaacaaggagttcaggtgctacgagagagttcgtggccagctcgtcaacatcctcgctggccttgagcttcatgccggcgtgttcagcgcagctgagcagcggcgaattgtccaatgtgtgtatgacctccaggcaagagggcagcgtggggagctcggagagcgcacatatacagaaccccaaaaatggatgcgtggtaaaggccgggtaacaatccaatttggatgctgttacaattacgctacggataagaaaggaaatccaccaggcattatacggaccattgtttctgatccaatgcctgacctctttaagactatgattaagagattggtacgatggcaagttctgcctgcaacttgtgtaccggacagctgcattgtaaatatatatgaacctggagattgcatcccaccacatatagatagccatgattttgttaggccattttgcactgtttctttcctcagcgaatgcaacattctttttggacccaacttgaaagttgctgcccctggagaattcatcggttcaattgcgatccctctccctgtcggatctgtgctagtcctgaatggcaatggtgctgatgtagcaaaacattgtgtcccagcagtccctaccaaaaggatatccattacattcagaaaaatggacccagcaaagcgtccatttggctttgaagatgacccggaactacttaatcttgctcctctagggacagttgtacaagaaactggcatatcatcagatgaaggcaagggcaagctacctgacgtccaaataacaaatatgggcaaagcatccagaggcaagaggtctaaaggaagaacagctgctgggaaatatgggagcggcattcttggagaacagtctcctgggcatgcccaagcccctgcagtggaagtgcagtcactacggaatccgcatggccagcgtcctgtctccgcttcaagtgctgagagggaaaggaattctgctgggaggtcaagggaatcgagacatcaatctagtacgcttgtggtgcactcacaagtggacaatagcaggcagtggccacgtcggtcggcgcaagagaggtggcatagtaatggcatgagtttctctgaagatggtgtgggatccgcggaaaggagaccacgggtggagcatagacagatttcattgataaaccaaactataagcgacgacatggattccctgtcgctctcaggccgtgaatcaggcgaccagcctcgtgctagtgtgcggaccgtgtataacaagcccagggaggaccagattaagcctagatgattgagctcttgggttgctcgtgtctgcatactttcatgcgaagacccgatgacatcaaaaatgatatttactataaactgtattgtatattttcattgggtttcggtgtcatgaaagcaccaaaaagttaagcgtagaattcctacgtgtactgaatgaacttaattgagacgaaatcagttgcaatcgggcgcctgttctgtagataaaatctcatgtaattttgactgatgcattggtgatctggcttacaattcatttgcaatttgatgc

SEQ ID NO: 154806 - DNA, 936 bp, Zea Mays
atgttctggttcagcatgatgaaagacccccaatggttggatctgtgtggtaacaacgctgctacggtctttagcttgttctttttctttgctaagaccagccaatctggcctcgatggttccattagtgaagatgacagatctatactggttgccaacatctggcccttgcccaaacacctcacgtgggtcatgacttgcccagaacacatccaaaagttgcctgtagtgaatcaaccggggatcatactcaacctaattggttcaagagagacagtgcgtcaatgccaatcatcattgctgaggaaacacagttcaaatgagctctgctgcatccaaacatgagcgctaataggtgagctgattttttagccaagtcttcacctagttgttagccaaccatcatagctaatttgatctaaattttagccaaactggtaactagccaggtgtatccaaacaggtgctctaaatcagtaaacaaaaataaaacatgaatacacgataaagcaatccgacacaccaagaccataggcatgtcatgtcccggtttcttcaagcacacggacacacggttacactactcatgaggctatttgaacagttgaacggcaccttgacgcactcggcgtggtcggcgaggttgcggtactcggggttggacttggagccgccagcgtagccgacggaggtgcggatcacgccgtggaggcacccgaacgccgcctccgaccgccagaagcttcccagcgcgaacaccgccgtggccggcgctcccccgcgcggcagcgcagctccccgggtggtgctgccgcggcctgggaggcgcgcgcccgaggcccccacgacgaggaggacgagcacccctatgacggccgcggagggggctgccatggcgtcggccggagatcgggaattcgggatcggggaggagcg

SEQ ID NO: 154807 - DNA, 1158 bp, Zea Mays
cttcatatcgaccccgctccagtgctccaccatctcactttcgatcgcgagttccaacttccaagctagctagtcgtcgttgccgtcgtcgtcccgaccgccagctagcgctcgtggtacgtacgtgcgcgtatacgcgcgtgcgcgctcaatacaacacacacatggcgatcgtcaacaagaagcagggcggcgcggcggcgtcggggctgaagcacatcctgaagcggtgctcgagcctgggacggcgccagcagcagcatcagcgcagcgttggggaggatgagaaggaggaggaggaggccacggggctgccgtccgacgtgccgcgcggccacttcgcggtgtacgtgggcgagcggcggcgccggttcgtggtgcccatcgcgctactggaccgccccgagttccggaccctgctgcggcgcgccgaggaggagtttgggttcgcgggcgccggcggcgccggcggcgccctcgtcctcccctgcgaggaggtcgccttccgctccctcacctccgcgctcgcctgcgcccggtgaacgcgcgcccgtgtcctgccgccgcgtgcttgggatttggatgcccccacggacgctgcggcgccgcctattcgagattcggttcattggttcggcccacaggccacagctagctcactcgctcggcgacggcgagagcacctacgatgttaatggcgtgtgtaaatatcgattattagagaagagatacaggtggtggtgcatggcatgcgcccgcccacccgcccggaccggcactggtgatcgacggccgggcgacggaggaggagatcgatggagtgatatggatgcatggacggagcgagagctccagagcttcactgctggctatttgactagctgttggccgctgctctgtgctctacatgtacgttgtttgtgctgcgttctgtctgttcatggccggactcctgctgcaagtagatatggttaggccagccagtgcgacaagtgaaccatcatcaatgttttcttattttttttctatacatgcaaagatattgatggcaagcacacatgcatggcccgacgatggcatgcaagccagagctacctgatatgggcgaccatacgaaccgacatcatcaagcattattcagatatgcgtactactttc

SEQ ID NO: 154808 - DNA, 717 bp, Zea Mays
atgcaggttgcggggggcgaaaggaatataggatgtgtttggttggctggcccaatccacaatcaggcccgtttgctcggtagcctggctgagtacaaacgtgaggtttccaggtggtccgccatcaccactaggctgcccgggcggacggacaacgagatcaagaacgtctcacacacacacctcaagaagcgtgtggatcccgccaagcaggagcagcagcagcacggcacgacgccgacggctggcgtcggcaagaagcacaggcccgcgacggcagcgaagcgcgggggcggtggagccaggaaggcgacggccgacgccgacggcgtcgtcgtaccggccccgaccaccgctgcgccggcgtcgcccgaacggtcggcggcctcgtcgttggtgaccgagtcatccatgacggagcaggagcacggcaacacggggagctcgctcgcgttccccaaggaggagagcttcaccacctccttctcggacgccgaggagttccagttcgacgatagcttctggtccgagacgctgtcgatgccgctggacagcctcgacgacgccgtccccatggagccctccgacgacgcgttcgacgacgtcgacgtggctgtcgcctcctcctcgtccatcggcgccgacggcgacctggactactggctcagagtgttcatggagtccggcaacgcgcacccagaactgctgcagatttag

SEQ ID NO: 154809 - DNA, 1333 bp, Zea Mays
cagcgccgcacgaatctcggcgcggtccgcgcctgcatcttctccctcgttatccgctgggtcactcgctcgtcgctcccaagtcccaccaagctgtcccccgaccactccgccgcccgctccaatggcggcgccggccagctcctcatgcttccacccacgcgcgaccgccagcccgccgtcttctctcagcgtcggcaccaaggtcttcgtcgggctcagggcgcagaccaagctcggttcgtcggagtcgtcatgcccgaatgtcagcgctgggttccacactgcggtcaaccggagaatctctctcaggttgtccaaaaagaaggcgaccagagcccgcatctcgatgatgcctattggtactccacgtgtgccttaccgaacacctggtgaaggaacctggcaatggcttgacatatggaacgctctgtaccgtgagcggattatcttcattggggacaatatagatgaagaattcagcaaccaagtgttggcaagcatgctctatcttgacagcattgataattccaaaaagataatgctatacattaatggaccaggaggagatcttactccgtgtatggcactatatgataccatgctaagtctaaaaagtcctattggcactcactgcttgggctttgcattcaacctggcaggattcatccttgcagccggtgaaaagggttcacgcactggtatgcctctatgccggatttcactccaatcacctgccggagcagctcgaggacaggctgacgatatagaaaacgaagcaaacgagcttatccgcatcaagaactatctctatggcaagctcgcggggcacacaggccattctgtcgagaagatccatgaggacctgtctagggtgaagcgcttcgacgccgaaggggctctcgagtacgggatcatcgaccgtattgtcaggccgtctaggatcaagaaagagggctccactgctcaaaggagggacatgcggaatctgggacttggctaataatagacgatcgaaatcctgttgtatcagaattttttgtgcaagggatgcgcttattatgggagagcgagcgatgcactgttccaagctctacgccggcgtaggtgttttgttgtgtcagctgtgcttttgctaactgtcagcactactattataatatatttgctgggattgttgatgagcacggcaaagaaaaagaccagagatgcgagggcactggcctctaggcgtctcgtctcttggacaactcttgtaccaatcaatcaaccaggtgcccatgctctggatggggactacagttatatgcagggctaccactacgcttttttt

SEQ ID NO: 154810 - DNA, 757 bp, Zea Mays
ttctttatgtcccccataatcagtttttggggaaaatttttgcatcttcttttggagttgctctaagtaacaaaaactccatggcaatcaggtggccctaagatacttatgttacatttcgaaccctaaacttacgctggtgttgcagcttactccgtgtatggcactatatgataccatgctaagtctaaaaagtcctattggcactcactgcttgggctttgcattcaacctggcaggattcatccttgcagccggtgaaaagggttcacgcactggtatgcctctatgccggatttcactccaatcacctgccggagcagctcgaggacaggctgacgatatagaaaacgaagcaaacgagcttatccgcatcaagaactatctctatggcaagctcgcggggcacacaggccattctgtcgagaagatccatgaggacctgtctagggtgaagcgcttcgacgccgaaggggctctcgagtacgggatcatcgaccgtattgtcaggccgtctaggatcaagaaagagggctccactgctcaaaggagggacatgcggaatctgggacttggctaataatagacgatcgaaatcctgttgtatcagaattttttgtgcaagggatgcgcttattatgggagagcgagcgatgcactgttccaagctctacgccggcgtaggtgttttgttgtgtcagctgtgcttttgctaactgtcagcactactattataatatatttgctgggattgttg

SEQ ID NO: 154811 - DNA, 1042 bp, Zea Mays
ctgcaaccacccacacgtggacgtggctgaggaacaccggccgcgtgtcacccggcgactgtgcatcaggccggccgcgcgctagtcgcagcggccaagtagaagtagtcgtgtgtatatcttccagcccgtctgctcgccggccgtctccgtatctatccacccacccccacgccgcgcgcacctgcatcgaccgcccgtgctcacctccacccagcaccacaccacctacaagaacgagccagcatcccgccatgccgatcggcagcggctgcaccacccaggcgctggcggcgatgcacggaggaggcgagccagaggtggtcgagccccaccgccggctgctgcagcagcgcatggagccgctgtcgtcgttccgcccgccggcggacagcgacgtggacagggacgactgcaggcggctgacgcggctgctggtgaacgtgacggtggaccgcagcctgtggcccgtccacctcgtgctgggcgccgacgccaccgtcgccgacctcgtgcgcgccgccgtcgccgcctacgcccgcgagggccgccgcccgccgctcgccggcgcggcggccgacggcttcgagctgcacctcgacaagtactcgctccagagtaggtgcaccgagacgaacaacgaacctaattaagctctttctcatatctctggaagactggaactccagactaggtaggtaggtgcactgaccgtcggccgccgcttgtttggaactctgtcaggcttgaggctggaggacaaggtgctggaccttggctctcgcaacttcttcctctgcgcgcggagacctgcggggctcggcttgacgacctgatgagagcctggttggttggatcgatcggatccgatcgacggtgcacgcacgtgcagcctcgagtcgtcgatcgtggcaaggtcacatgcgaagaaggggttgcgagtgcagcaggtattcaggccttcagggtttggagatggagatggcgatggcgaacgaccttgaatgttggagttcctgtcgagccatttctttatcgcgtc

SEQ ID NO: 154812 - DNA, 1050 bp, Zea Mays
atggccgccactgcaggatcggccaagcgccccccgcaaaagccccctgtccggcccctggcacccggctcaacctcgtcggccgcagcggcctcggcggcggccgttgccaactctgggggcgtcgacctcacccccgccgtgcggcgcaacaagaagcgcaaactccccgagaagcagctccctgaccgcgtcgacgcgctgctcccagagtccgccctctacacgcagctgctcgagttcgaggcccgcgtggacaccgcgcttgcgcggaagaaggtagacatccaggaggcgctcaagacgccgccctcgctccagcgcacactccgcatctacgtcttcaacaccttcgccaaccaggggcctcgcaccatcccaccgcccaagaatgctgacccgccaacctggtcgctcaagatcattggtcgcgtgctggaggacggcgccgagctggatccttccagtgttgtgcccaagcacaacccagtgtaccccaagttctcccaattcttcaagagggtgactatagcgctggacccctctctgtacccagagaatccgctcatcatctgggagaatgcacggacagctgcccagcaggaagggttcgaggtaaagaggaaaggggataaagagtttgttgcaaacatccggctggagatgaactacaatcctgagaagttcaagctgtcacagccgcttatggaggtgcttggggtggaggtggacactcgcgcacgggtgattgctgccctctggcagtatattaaagcaaagaagcttcagaacccaaatgatccttccttcttcatgtgtgaccctcaattgaagaaggtgtttggggaggacaagctcaagtttgcaatgctgtcacagaggatatcgggcgtggagagcgctcgggagggagagcgccggggaagaccgtcgggagcccagacgagctcgacgagcgccgggcagagagagcagtcgagcgccggagaagacgacgcagaccggtcgtggatccgttctaagaaacggactgccgtaacaacgagttga

SEQ ID NO: 154813 - DNA, 138 bp, Zea Mays
atgacaataattaatagtgttggtatgcacatgttgtcaccaagtacccagctcagcatcgcaggcattccatacttgatgaagtatctgccacctactcttctagggtgtggtatccacaacttggtcgaaaactac

SEQ ID NO: 154814 - DNA, 214 bp, Zea Mays
tccaatataaaacgttgtacaagatcatccagacagagaaacttattattcagtgtagtacagataaacttattcgaacacactgcctgtttgggccacacacacactcacacagtttgctcatctcgttctgaacgagatgccgcagctgaacacagcagcaggcagagaggaagagaaacaggccctcctgccttcctcgtcttctgcgagg

SEQ ID NO: 154815 - DNA, 97 bp, Zea Mays
cagtcagtcaaatctaaacaacacacctctcttaacaaacattaatatgatatgcagtatgatgtctagagttttgtctaaaaatatatctacctga
